United States Patent Application Publication US 2022/0267820 A1 - sequence listing, part 2

SEQ ID NO: 4059 - protein, 1585 aa, Cryptococcus gattii
MRANTVALALTASAIAAWASPPVRVSLQTGWAAPPLVLEILEIVYDEYPSSYFPLLHLLSSLPVNSTDESILSSTLDLIQAYSLLPSPSSLSTFHFALSLHSTAPRIEAEYNWYNSAVKGQENQLGVEGCEGWVEWRGKGFCDVDGLRRDMELSIEEGTHKIDQKHHSLPFDHTSPSVSSTSSSPRAIFYYVPSASTSNELLGYLDHHASQYPEFTYTVRYQPPLSHEAREPLSLSGWGAEMALKKMDYLVVDDRATENTSFQYESDEMTRDESSIFAHVFGDDPWGDQATPLTPAEIRDIGLKAATLIMSSDDPISALTHLSQDFPKYSAALARQIVVPEDIQSKGRTIAVRGKAKEAIYINGKPFDRDLNAYALLKALRDERQLTVSLTSLGLTPKQSIDLLADPVVGQGQVEDDMGEGLVDASDRIEGGDVIVYWNDIEKDKRYQNWPIHPQGYMRPVYPGQFHTVRRNTFNLIFALDLSRISSLELIVHSISNMIQRGLPIRFGIVPVFEPGQQDDISLQMAKVFWYSVKTFGRRSTRDFLAAIIDAIPRQPNNLAPLVTDDLLRKGYEALSATSEKASLAFDDVLASEDWDHRIEKTGNYLKRLLITKKDAENGGMFMNGRFTPNAPTWPNIVTQEMQSQLSFIQEQASLVMLDAIPEDISTMFYDLPATSKRRSSLVIPVGDNKLKAFNLVDLFGNEGIEGKLSGEFVYPNGERGTPVTMWIIGDLDSSEGLETVKNGLQHLQTPQCASRLGFIHVPPAPNQSSCPAGQYCFSTVLYQILSQNALSLAKPSDLLELISDVQHSIKTNLEKDGEIKVGNQKVDDCGTTFTLSPEDQRRYYEAKPLHGMTFGGWAAGDIAAASEFWKAGTQIAGKLGIRGGVHLLANGRLVGPITPLTFPLDDYDALEAYEHRKRVKPIIDVLKTMYDDITVFDRPTFANLISKVSSVVTTAYKPLDAEGIFAPTQSTRTRYYEKLDYGAMSFKLGDEDMSLLKVAVVVDPLSEQAQKWSPLIQSLSEMDHLCVSVYLEPEALMEEVKLKRFYRTSIPSKLTFDVDGAAIAPGLTFNNLPSNPIYTLGLDTPPSWIVSPRTSPYDLDNLLLSSISSPVSVTFQLKQLLIEGHARESGNIPPRGLQLQLKTLSGDIAADTQVMANLGYLQFRATPGYYTLSIRPGRGEEVFNLESVGAEGWDSPLVEEVGDGVSLGSFDGKTIYPKFARKEGMEKADVLQESVATPEGLVKQVYSRMKSMIGLSTSVTPIKTEHADINIFTVASGLLYERFASIMILSVMKHTNSSVKFWFIENFLSPTFIAFIPKLAEEYGFQYEFVTYKWPHWLRAQTEKQRIIWAYKILFLDVLFPMSLDKVIFVDADQIVRTDMKELVDVDLHGRVYGYAPMGNSRKEMEGFRFWKSGYWKEALRGRPYHISALYVVDLKKFRQLATGDRLRGQYHALSADPNSLANLDQDLPNSMQDQIPIWTLDQEWLWCQTWCSDESLATAKTIDLCQNPLTKEPKLVRARQIPEWDVYDQEIAAFAARVSDEGEESGALAVSVDDLASEGQVSGVEEKEVETKRGTDGHIEDEL

SEQ ID NO: 4060 - protein, 1374 aa, Pseudogymnoascus sp.
MVRLGNKWSLTGSALAFSCLQSIKVSASPTINVALATSFTSAPYLLELLETAGDENSTSYFPLLDRIAEGYFKDAKTDHELYNSFLKVLRDDGHLDSEGLASYSLALSLRTSAPRIEAQYQFYDTAIEQSGDDSSCPVWVLFADKKHCSPALDDAHGTYNGRRGTEQLQFDRITGNLSAPASILYADITSPEFTQFHKKLNQKAQKQEISYRIRHKKPNVEKSRPLVIGGYGVELALKRTDYIVIDDREAEAQVQGESVKTEVVLEDEVVADLKPLSSLELMSLALKASSFIMQSENPFEMLTRLSQDFPRYSSAIAAHNISHGFSNEHAYNRDQMVPSGTNVVWINGLQVPTRQMDAFSILDILRRERKLLNKFSQLGLTGAQTISLLSHKDIAFTKADDEPARFDWRDEGDGKTIIWLNNIEKDKRYDGWPASVTTLLQGGYPGQLPQVRKDLFNLVFPVDLSNLQDVELVVTQLSDFVKRALPLRFGLVPLTNSDAALDQAKIVYYLLDSYGLSTTVAYLNGFYASKGASSSRSANFEAAIEERKLLKDKIAKSLEEVLDANEADGSIAHSKQWCSRLGANDKVPPVFVNGAAVPRDENWMQGMSQRVQMDLRLMARAVYENTVTDDHWPPMLYLHDAASGRNPFLMPENDKDVQLLDVNAIYSDHAEAFEGLPTVKIDPSAAQDEWAHMVLVADVESEHGKQLLKAAVEFSKRNPSVELVIVPSSESPAGIASVYDYMAARSFQPLKSGVDLDTLVEAVSISTGGEGSQEKYVQKIAEKWAAIDDLLTSLSLKTGQQGLLLNGRLLGPIPTEIELGVSELEQLLGFERTKRIRPVLAAVKALGFSEAISDPLASSKLTSLVALSFISNVPEGIFEQASTLRIDSFKVWKSEYTAIEIGDESTASIHVQVALDPASQESQRWIPILKVLSELDGVYLKLFLNPKVVLKDIPIKRFYRYVLESKPSFNADGSLKDIKAQFASVPQEALLTVGMDVPAPWLVAPKQSVTDLDNIKLSSVNGDVNAVYELQHILIEGHSSEKETGQAPRGAQLHLGTAADAHFADTIIMANLGYFQFKANPGFYKINLQEGPSSKIYSIDTLGAPGRDAAKPDETTEISLISFQGLTLFPQLSRNPGQETEDVLEPTTDLKDDIVSKGFKLAESILGFGKKDTAAAQTTQAEINIFSVASGHLYERMLNIMMVSVMKHTTHTVKFWFISQFLSPSFKQSLPSLAAAYNFDYEMVTYKWPHWLRSQTEKQREIWGYKILFLDVLFPLSLDKVIFVDADQIVRTDMRELVDLDLQGAPYGFTPMCDSRVEMEGFRFWKQGRPTALPRDRRRRQTETAVPPAQCRSGEPGEPGPGSAESYADAPADL

SEQ ID NO: 4061 - protein, 1509 aa, Daphnia pulex
MKFIALFLCLIFYQLQFSETASETADDVKGKSKTVSTLLNAKWNSTPTALEIAEFLNDEDPSYFWAFLEDLSANVDTFSGKTDKSKYETLVDLTRKYLSEAQVSLMRFSLGLHVYSPKIEMFQQIAMVQGVPEQKCEAVAAVNGKLTCDPSLIKTLLNEKPNPELYKLDHQYPGKAAKGHPVVILYGEIGAKSLTEFHETLKALADSGEIIYVIRHYIRERKGPKVRLSGYGVELQIKSTEYKAQDDTKVTAEQSGAPGDEGASQQSTEDEDVDVEGFLFTKLKVLNPDLAPKLDKLRQALLDESQELAPLKVWQLQELSLQAAERILNAAKDESLKIMAQLAQNFPLLARSIVRTTVRPALKAEIKRNQQRFSNEFSLQPSEAALFINGQHFNVDSMDVFTLFEQLREEVKLVEGLHKIGVPSQYVSSLLSLDLSPPSRQYAVDIRDSAVLFVNDIEKDSQYKRWSPNIQDLLRPSYPGALRSIRRNMYNLVLVVDPLDIEARSLIKLAESFVVHNAPLRVGLVMAVNSDPKITGRDDPGVAMLNAFNYVSQRTHATDGLSFITDLFALVGDNSIVVDDVGKLLKKKFSADLEDVLGEDSDYDVGRQLTKDFLRRTGFRKLPQVLLNGVALEETSLNGDEFEEAVLTELMRQTSSLQKALFRGEMKEDDNVIDFLMGQPNVMPRLNDRVLSTSAKYMDTTGVVEGGIKDLTSLSSHQLIATFADSISYVSSNTRALTPITLWMVADLTQQAGRELVQNALEYVQNSRLIRLSLLHNPESSLTESANHYIDIIDAVLSSNDIKLFDKLLKNGNAEAIISGAKTGSDFGVEPAQKSSFGLKLHQLLAGRVLEFQPGQRGLIANGRVIGPFDDEEDFTADDVALLEKHTMSTSGEKILQFTQDLPQLHSSDLIMKVGGLLMSSASGTTPKTRHNIDERGSELSLLSFPPKFSDSPFIDITAVVDPLSVGAQKLAPLLLVLQEVLNCRVRVFMNCVEKNSEMPLKSFYRLVLEPDLMFGADERQLSGPVAKFGILPMGALLTQGMQVPDNWLVESVWSPYDLDNIRLRDVDTDVHSEYELEHLILEGHCFDSHSGSPPRGLQLTLGTPVDPLMVDTIVMANLGYLQLKANPGSWILRLREGRSTEIYDIVSHEGTDTPSSGGSGDIHVLIGSFKSHVLKLKVAKKSGKQQMDLLSSDDDDNNAGLWNSITSTFTSKSSEDDEDKLNIFSLASGHLYERFIRIMMVSVLKHTKTPVKFWFLKQYLSPTLKDFLPHMAAQYGFEYELVQYKWPRWLHQQKEKQRIIWGYKILFLDVLFPLSVKKIIFVDADQIVRADLKELRDLDLGGAPYGYTPFCDSRREMDGFRFWKSGYWRNHLQGRKYHISALYVVDLKRFRKIAAGDRLRGQYQALSQDPNSLSNLDQDLPNNMIHQVPIKSLPQEWLWCETWCDDTSKRKAKTIDLCNNPQTKEAKLDAAVRIVAEWNDYDTEIKMIQEELVRNRTEQQRQHDSSEL

SEQ ID NO: 4062 - protein, 1612 aa, Hebeloma cylindrosporum
MKRAFTVLGAALQVAGSVTSPPVKVGLRSSWSAPPFLAEILETISLDNPNSFFPLVDRLTNPEVLPNIHKLPPEAVHQGALGVAIDDGIIQQPGDLGIVEMNLAMHAATPKLEAFYNYYEDTHNSSRGRECGSWVDWYGEVVCDVEGLAHLVGTEAIDAKDTPNKQLSAKPKLLTFDHIFPPPSEILERPPRTAILYASLSSPNFRELHSYLYTLVNKPEPHVEYVFRHIPPSNPGEKNYLSGYGVALDLKKKDYLALDDRNLNAGDTTGAGSTSEADGQKERVDPILSLILAHPDNSSAPDANVALTNEEILSLGAKAVQIIAESSDPLSTLTHLSQNFPKYATSLARRVLVNESIGEELHNNSLKVQWGLNVLWLNGQQIDAKDVHPFGLLRLLKKERAVMQSLASQGLQPSQAFHLLTHPAIAAAQKDGGVMDAVFDASDRPEGEDIIVWWNDMEKDKRYASWNPSLYALLRPIYPGAMPSVKANLFNVVLILDLSQMPALNFISGPMQNIISREFPLRFGLVPVAETQDGKKMAKLFYYLIKNYGRKKTLEFLNIISQTQLPVHMQTEKVQWEAVSSAYVRLTESERQEKPSALVPTLASIIGEDAQSLVSLEKIAAYTERLGSTLATSATGHAFFNGKHFDVNDDFLRHLQTEVGVQMQFLQEKVYEGSLSDATKGESMSNYFYDLPTSSKRRNRYIFPSNAAGRLRIVNLPELFGRARFRVSPPTYIYPPEFDSVSESLYIVADFDSVAGLDLIKEGLNSLNADSKTRVSFIYNPTSDSKGPENIPRGPASWVLSHLHIQGSLSKVTPATLLLALGADSDIAGDVDPLSEGFQIPLGKKDGYEALMEDGVHLDDLKMEEYVDYVKAGRLVARELGLAPGQSALVVNGRVVGPISGGDFRAADFKTLEEYEYRKRVQSVELALKEVAPLVLEDRYLFADIASMASSVIASTQQPDPSEVGLFDAPPKPRQKTYQLLDSNYTTFEFGDNSTALYHVAVLIDPLSATAQKWSGILKWLSNLPDIFIEIHLNPGRYTEVPLKRFYRYNLIPSLTFDEAGQEIQPKALFEDLPVDPIYTLAMDVPNAWLVRPREALYDLDNIQLGKLFPGDTSVEAVFELDYLTVEGHARETSTSSAPRGVQVQLATADGHPIDDTQVVANLGYFQFRAKPGVFQFEIRPGRGREIFKLDSAGNEGWDSPPVEVAGSEITVTSFEGLTLYPKFSRLPGMETADVLEEKQSEESKSFFEDISNRVMSIFKSPKKPEGPTGVIPVKPQAEINIFTVASGLLYERFVGIMILSVLRNTNSTVKFWFIENFLSPSFLEFIPHMAEKYNFQYELVTYKWPSWLRAQTEKQRIIWAYKILFLDVLFPMDLKKVIFVDADQIVRADLKELVDLDLQGAPYGYTPMGDDNTDMEGFRFWKAGYWKDFLRGKSYHISALYVIDLVRFRQLAAGDILRGQYQQLSADPNSLANLDQDLPNNLQDQVPIFSLGEDWLWCETWCSKDRLHRAKTIDLCQNPLTKEPKLARARQIPEWEEYDTEIAQFTRQLAKEGKIHSRMATADANVLAGAGNAATAGDDKPREIADAAVSESENTHAEKVEAASEPERDEL

SEQ ID NO: 4063 - protein, 1130 aa, Lonchura striata
MHPDLKNNLIEFKKHLIETTNNMEPLKVWEMQDLSFQAATRIMSTPIYDALKIMKDVSQNFPIRARSLTRIPVDKKMQKEIEENQKHFHETLGIQPGEARLFLNGLHIDLDFQDPFRLQQIFQSPIGSSGRFKGVAVLFVDPVQEDTGDYMKLAELFYHHDVPLRIGIVFILNTREEIDGNEDAGVALWRTFNYIAEESDTSQAFMSIINMYHEVKDGNILTVDDVKHVLRSEYPHANVQSILDVHSEYDEGRKAGATFYKKSGLGPLPQALFNGVPFPREEMDAAELETLILQRIFDATGFFQRAVFMGLLDDHVNAVDFLMDQNNVVSRINPSILGAERRYIPFRFTSVPFHVEDFSTFSFLDSQDKSAVISDNMKYLTKKDEDALYAVTVWIVADFDKPAGRQLLSNALKSLKTSSHTRVGILNNPSSKIKEDNTAIARGILAAFFTQNNSNLKSFLRKLSKEETAKSLAAGTKIVKFLIPGMDGDTFEKKYNTLGLDLIKTQQMFCQEVLKLLPGQMAVISNGRVLGPLDENEFYEEDFNLLEKITYSTSAEKIKAIVKEMGNSSKSGSDLIMKIDALLSSLPKTEMRQDVELLKEQYRSVFVVKFEPQENEPFYDIIAIVDPLTREAQKMTHLLIKSFMFDLCISLNVGVLSHLFFNSFYRFVLEPELTYGINKHIPSEPVAKFLELPESPLLTLNMITPESWLVEAVNSSCDLDNIHLQEIKGAVIAEYELEYILLEGHCFDVTTGQPPRGLQFTLGTKKSPVMVDTIVMANLGYFQLKANPGAWTLRLRKGRSEEIYQVFSHEGTDSVADLTDVIVVLNNFRSKIIKVQVRMQAYENDNFLSDLYFHRIMMLSVLRHTKTPVKFWFLKNYLSPTFKDVIPHMAKKYGFKYELVQYKWPRWLYQQTEKQRIIWGYKILFLDVLFPLAVDKIIFVDADQIVRSDLKELRDLDLNGAPYGYTPFCDSRREMDGYRFWKSGYWASHLGKRKYHISALYVVDLKKFRKIAAGDRLRGQYQALSQDPNSLSNLDQDLPNNMIHQVAIKSLPQEWLWCETWCDDESKKKAKTIDLCNNPQTKEPKLKAAARIVPEWVDYDTEIRNLIQQIEREKKNLTSLFQKGLKHDEL

SEQ ID NO: 4064 - protein, 807 aa, Meleagris gallopavo
MTNYFCNDSFVRPVTFWIVGDFDKPSGRQLLYDAIKHQKSSNNVRISMINNPSEEPNSSNTIVAKAIWAALQTQTSNNAKNFITKMAKEEIAKALEAGADILEFAVGGMDTNIFKEAFESPKVDFILSHAIYCRDVLKLKRGQRAVISNGRIIGPLEDGEMFNQDDFHLLENIILKTSGQKIKSQIQQLGFEEDLASDLVMKVDALLSAQPKGEARIEYQFFEERYSAVKLRPKEGETYFDVVAIVDPVTRDAQRLAPLLLVLNQLINMNLRVFMNCQSKLSDMPLKSFYRYVLEPEISFTADNSFASGPIAKFLDMPQSPLFTLNLNTPESWMVESVRTPYDLDNIYLEEVDNVVAAEYELEYLLLEGHCYDITTGQPPRGLQFTLGTSTNPVIVDTIVMANLGYFQLKANPGAWTLRLRKGRSEDIYRIYSHDGTDSPPEADEVTVVLNNFKSKIIKVKVQKKLDMMNEDLLSDGTSENESGFWESLKWGFTGGQKNEDVKQDKDDVLNIFSVASGHLYERFLRIMMLSVLKHTKTPLKFWFLKNYLSPMFKEFIPYMAKKYNFQYELVQYKWPRWLHQQTEKQRIIWGYKILFLDVLFPLAVDKILFVDADQIVRTDLKELRDFNLDGAPYGYTPFCDSRREMDGYRFWKSGYWASHLAGRKYHISALYVVDLKKFRKIAAGDRLRGQYQGLSQDPNSLSNLDQDLPNNMIHQVPIKSLPQEWLWCETWCDDSSKKRAKTIDLCNNPMTKEPKLQAAMRIVPEWQDYDQEIKQLYNLFQKEKETGTPAQTLGQHTQDAAAHVEL

SEQ ID NO: 4065 - protein, 1749 aa, Puccinia sorghi
MKRLRGLRKRLGLLLILSSGVLAGSPPISVSIQATWQEPPMLVQVLESATLERPGVLFSALDAVCTSWEDGKSKLSTDQQTYEYLMSLLRSPGLLDGPGEIESLAFSIALKEAQPKIEAFRAWYASLPSNLTAPIESQDNAAGSKTDDCKSWALINDSKVCDFSKLTQLLESKHLAEKIQPQPQVLPFDHQQGRSSPKSRVPIVILYASPDPGSLCPFHRVLHATSKKHQPGATYIFRWKISSVPSTSSKSSLLSGWGASLDIKKSEYLTLDDRPVESSSKEDFQLVIDGTKQPAGTEVQVVSEQAKLKPLKAAEIFDIGAKAAQHVLSSPSPLSALRHLTEDFPLIAHALVNEWVPGRISRELRGELQENIANGIPAGQSAVWMNGLQLSSLVSLENLNFFKLVEIMRSERRWIALLTSLGINSLQARTLIVDEKLNLAMNPEAASALEVGEIDASTLGVRFDASDRQEGGGAIIWFNDLENDDRYSMWPTTLRAILRPTFPGQLHAIGRNLINVVLGLDLTQRKNLHTLGHVIELMISRNLPIRWGVVPIPTGNTSEGEKMSRYLWDMIEAVGPMETLKFMKEFTVSLEPQAETIDVEQFSAKASELVSSEKKSPEEAQAHERKFQNWLNKSQQYSSRLSLCSNDNSIPACMLINGRFFPMEEVGLINCITLSCIYCNALICFFSSALAQNYRSHLQETATLHIGFLQHQVYFNLLKDDASVADYLYDLPMVHRARNDLVFPSETRPLQFVNLVEALQSTDVLAASTFFQNSALPRNDDQPIASLWVVGNLDSSIGISAVAATLGLLVCMRSSSDTFIQVSFVHTPPEDSDTPTEVSARLAALLSPAIDEKIKTSDLLDLLDRHGYRVIVSDDSDLGIELVLKKVQAEGSDVAGTNDQPAWAGTREFARTLGVQSDDLAVIINGRILHVSPGTKLLSEDLVLLVEYETQQRIGTLMEALRSLNDFDLAQHYSKVPLIMCTVGFVLVGSNDGFGLSSSSETRSAKHLSRDGQYSSFKHGDEQAALFEFGVILNPASEAAQRWSALLETLSHRSDVAIKIWFNPSLELNELPIKRFFRSAIWNSLEFDKNGRAIPALVNFRGIPTETLFTLAIDTPPAWLALPHDSIHDLDNIMLSELPSAYSSQGVEAIFQLDHIILAGHAREVPSDIPPRGLQVVLSDLLRNQEVDTIIMANLGYFQFKSAPGLHRLSIRPGRSLELYQFQSTDSESENNEAYQLLSLTTFNGLTIYPRVRKRPDKTSETLIEPLSTSSKKNPGREFSKIMGQVKDLAAGMLKNQGFDLASRAAPSIINVFTVASGLLYEMIFPPANGVFDVCQCHASHPQSVWFISNFLSPSFKRFIPHLAREYGFDYQLVTYRWPSWLRAQKEKQRVIWGYKILFLDVLFPLEVDRVIFVDSDQVISECNIDFWDRSGLNLAFLSVQQIVRTDLKALVDLDMEGAPYAYPPMCNDRNETKGFRFWDTGYWKESLQGRPYHIRYIYLFTALYVVDLRVFRTVAAGDLLRQHYQALSADPGSLANLDQDLPNNMQGMLPIFTLEQSWLWCETWCSDEGLKTAKTIGARERYEYLMLLPFFGHKYADLCNNPLTHEPKLKRARRLIPEWEEYDQEVAALAARIKKNHAGEFSSKITVQAGEKIDDGKDHYDHPKENHDDVKPSKGLADDDLDSSVWSLHGEEGLCDLGQASKCEILVTDKSAIFRKTIPVKVCVYESISQRSSLDIEKSLNVVPGMDF

SEQ ID NO: 4066 - protein, 650 aa, Syncephalis pseudoplumigaleata
IGPIGRDDAFDVDDFELLVDYEHKKHVKPIHDYLSALFDNEKMGDDYANCLLRAVVILGRLAQSSFVGDAFEKPDVIQRQGACTDSTISSMITVGNPLASVIRVQAILDPMTETGQKWAPILEASYAAAAAIGAFFNTDLLVKELPIKRFYRYLIPPRLTFNVTTGAIIPDRIAFAGTPKQTLLTMGLDTVSTWVAMPTASSYDLDNLRLTTSSALVEATFTLSELLVEGHVRDLTPDNPRGLQLVFSPSQGGTIVMANLGYFQLRAPPGMYRLSLREGRSSEFYHLLRIDHSMWAAFEDEDEDGQDASGSRDDATGKGAATPVDTRIVIESLEGAILFPVVRKNPGYETRELLASNEETASSSEGGIVGKLKDQATARQSADINIFSVASGHLYERFLSVMMLSVMRHTSSTVKFWFIENFLSPAFKDFLPHLAAKLGFQYELITYQWPHWLRKQTEKQRTIWSYKILFLDVLFPLDLDKVIFVDADQIVRADLQELVDLDLKGAPYGYTPFCSDREGMDRFRFWREGYWKNHLRGKPYHISALYVVDLKRFRAMAAGDILRGQYQALSADPNSLANLDQDLPNNLQDDVPIYSLPQEWLWCETWCSDEALAKAKTIDLCNNPLTKEPKLDRARRQVPEWSEYDTEITA

SEQ ID NO: 4067 - protein, 1554 aa, Ascodesmis nigricans
MWWSLHPAKLLSVALLISPFLQVATSSPAVNVGLKASWDSAPYILELIETAAAENPSSYYPLVAAISSGEFNPNSSTDQALYTEFLRVATAHGYLTKPEELSLFNLALSIHAAAPRIEAHYQYYEQNLEPRLGDDYKPECHTWIQWGSRQICDLSDNIDTLKEPKLGDTTFEDLLPFDRTSGDEGKPVAIIYISDVMDRNLKILQKEAAKGKIEYRVRYRRSKTEEGRPVILSGYGVGLALKKTDYMVMDDRDLGDGAEETGKGSIKTSETQAVLEDSESQDITPLQGKDLAGLGYKAASFIMASENPFDTLQKLSQDFPKYQAKLAAVETDEELVDELGDNWDMLFGPGVNQMFINGLQMEDSHINVFGLIEHLRGETRLIDGFKKLGLNTTEVMKLLTHETLTQAKADKTQRFDYRDVKEGGDVIFWLNDLEKDARYKDFIPRVFGLLRQVMPGSIHPVRKNIHQIVFPVDYSSQSDMMLISTQLRVYVHRKVAMRFGLVPMTTSQEAIDQAKVIYYLQDNYGLKYTLEYIDQSLVQKTWAKPSQKVFDEVVKGATGTLEGGKALSLQEVLSSEDLSNRMERAKKWGQRLGTDGPTPLILLNGQPIPKDEDWPAYMQPKLAADISLIQQATYLGELTDESSYPDWFLNDAAPRRNRHIFPEKGVDIKHINIAEVASAHKEVFKKLPKVNSNTVDRSKETNIWVVGDFDSPSGNELLTAAGEMQMHTTGANLVLINNPALLTEKPMLSTLLYHFQQVGPMTEVVFQQILLQVRSLIEKLDPRLDHVERFMEEFANFAKEETWGIPDHIEAGTFWGDARKLLASSGLKPGDRGLIVNGRVVGPIPVDEPFTFEDLQALVEYERRKRIEPVLKAAEDLGIMDKITQTDELGPAALTNQIALAGTPSVPLGFLDDPDMTRVDIRDKIALSYKHSGFTVGNKDSANIHIVVSLDPASEKAQKWVPLLNVISEMSGVYLELYLNPARTVSELPVKRFYRHVLQAKPQFDDKGFTINPRAGFENIPEKVLLSLSMDVPSSWLVTSKECIYDLDNLKIAALKDNLRGSDIEALYELRSILIEGHSSEVGGGAPQGAQLVLGTEKEPHIQDTIIMVNLGYFQLKANPGYYKINLKEGRSKEIYHIDTLGTKGQNSLADKDDKSEVALISFQGATLFPRLSRNPGMEDEKILAGDEAEEETTGALGKAVKWFKKAESLLGVGQNKANSVMNNHADINVFSVASGHLYERFLNIMMLSVMKHTDKTVKFWFIENFLSPSFKDFLPSMAKEYNFTYELVTYKWPHWLRAQKEKQREIWGYKILFLDVLFPLDLEKVIFVDADQIVRTDLKELVDLDLQGAPYGFTPMCDSRKEIEGFRFWKQGYWKTYLRGLPYHISALYVVDLKRFRQIAAGDRLRQQYHSLSADPNSLANLDQDLPNHMQSILPIHSLPQDWLWCETWCSDESLKTAKTIDLCNNPMTKEPKLDRARRQVPEWTLYDNEVARLAKRVAAERKDESGATAIEGHLVEAAKEEEDSRKKEEESSNGQKGDENDKEEKPRGHDEL

SEQ ID NO: 4068 - protein, 1534 aa, Thamnophis sirtalis
MGTVTALIGIWMTFSLAEAHSKAVTTSLTTKWFSTPLLLEASEFLAEEDNEKFWNFVETCQNFQSSNHDGTDYSSYNAVLQAASQNLSPLQQNLLKFVLSLRSYSATVQAFQQIAADEPAPEQCNAFFVVHGEKTCEADRLGTLIQTASKRPKPFMFKGDHKYPGSNSESPIVIMYAEIGSKQFSEFHRLLVSKAIAGEINYILRHYVANPNKEKVYLSGYGVELAIKSTEYKAKDDTQVKGTDINSTVIGDSDPIDEVQGFLFGKLRQSHPHLEEELKELRKHLVESTNEMAPLKVWQLQDLSFQTAARILAAPTMDALTVMKDLSQNFPTKARAITKTVVPSELRSEIEENQKYFKGTLGLQLGDSALFINGLHIDLDTQDIFSLFDVLRNEARVMEGLHSLGIVGHSMHNVLKLNIQPSDSDYAVDIRNSAISWINNLEIDSKYNSWPSSVQELLRPTFPGVIRQIRKNFHNFVLLLNPSHESSAELLGVAEMFLSNHIPLRVGLVFVVDNSEDVDGLQDAGVALLRAYNYVAQEVDTNYAFQTIISMYNKVNAGEKLKVEHVISVLEKQYPYVEVNSILGIDSAYDQNRKEGYTYYEQTGVGPLPIVLFNGMPLQKEQLDPDELETVTMHKILETTSYFQRAVYLGELSNDQDVVEYIMTQPNVVPRINSRILMSDREYLDLTANNNFYVDDYARFSTLDSKDKTAAIANSMTYLTKKGMSSKEIYDDTFVRPVTFWIVGDFDKPSGRQLLYDAIKHQKSSNFIRIGVINNPSEDPAAKNTIIARAIWAALQTQGSNNAKNFITKLLKEENAKMLESGTDITEFAVGGMEISTFKAAFEAPEVGFILSHAVYCRDVLKLKKGQKAVISNGRIIGPLEAGELFNQDDFHLLENIIVKTSGQKIKSHVQQLGVEEDLASDLVMKVDALLSAQPKGEARIEYQFFEDKYSAIKLRPKEGEIYFDVVAIVDPATREAQRLAPLLMVLNKLINMNLRVFMNCQSKLSDMPLKSFYRYVLEPEITFTAEKHLIPGPVAKFLDMPQSPLFTLNLNTPESWMVESVRASYDLDNIYLEEVESVVAAEYELEHLLLEGHCYDITTGQPPRGLQFTLGTSTNPVIVDTIVMANLGYFQLKANPGAWFLRLRNGRSDDIYKIYSHDETDSPPDASDVVVVINNFKSKIIKVKVQKKPDMLNEDLLSDGTNENESGFWESLKWGFTGGQKKEEVKQDKEDVINIFSVASGHLYERFLRIMMLSVLKHTETPVKFWFLKNYLSPTVKEFIPYMAKKYNFQYEFVQYKWPRWLHQQTEKQRIIWGYKILFLDVLFPLAVDKFLFVDADQIVRTDLKDLRDFNLDGAPYGYTPFCESRREMDGYRFWKSGYWASHLAGRKYHISALYVVDLKKFRKIAAGDRLRGQYQGLSQDPNSLSNLDQDLPNNMIHQVPIKSLPQEWLWCETWCDDASKKRAKTIDLCNNPMTKEPKLQAAMRIVPEWQDYDQEIKQLYNQFHQEKESGILITTNETESQSQKDTLLHGEL

SEQ ID NO: 4069 - protein, 1628 aa, Ziziphus jujuba
METRFRSGFCILVVLVCLGLCGIGSVCAQNRKPKNVQVAVQAKWSGTPLLLEAGELLSKEKKEHFWNFIEAWLPNENESADSFSAKDCLKKILRHGRSLLDEPLASVFEFSLILRSASPRLVLFQQLAEESLSSFPLADESNPNSVSGGITETNEYVQAKKSDALNVGLNPKSPGGKCCWVDTGGALFFDIAELQLWLHTPGDSFQPELFEFDHIHYDSSLGSPVAILYGAIGTDCFKEFHSTLVEAAKEGKVKYAVRPVLPTGCEAKTSQCGAVGTRNALNLGGYGVELALKNMEYKAMDDSAIKKGVSLEDPRTEDLSQEVRGFIFAKILERKPDLTSEIMAFRDYLLSSTVSDTLDVWELKDLGHQTAQRIVHASDPLQSMQEISQNFPNIVSSLSRMKLDDSVKDEIIANQRMIPPGKSLMALNGALINIEDVDLYLLVDMIHQDLLLADQFLKLKVPPSTVRKLLSTLPPSDSNMFRIDFRSTHVHYINNLEEDAKYRRWRNNLNEILMPVFPGQLRYIRKNLFHTVSVIDPATVCGLEGIDMVMSLYENNIPMRFGIIMYSSKLIKKIETGGGGIYSSSMENDNQIEDDLSSLIIRLFIYIKENHGIQTAFQFLSNINKLRIESDGSTDDALEIHHVEGAFVETVLPKAKSPPQDLLLKLEKEQTFKELSLETSMFVFKLGLAKQQCCLLMNGLVIDSNEEALMNAMNDELPRIQEQVYYGHINSRTDVLDKFLSESGLSRYNPQIIADSKPRFISLSTSILGGEVVLNDINYFHSSETVDDLKPVTHLLAVDVASKKGIKLLHEGLQYLIEGSKGGRVGLLFSGNQDADVSSLLFIKAFEITASSYSHKKKVLNFLEQLCSFYEQNYLLVSSKPAENSQAFIDKVCEFAESNGISSKAFRAALTDFAADKLREQLNKVGQFLYRLLGLDSSVNAVITNGRVIVLTDRSTFLSHDLHLLEGVEFKQRVKHILGIIDEVKWQDLDPDVLTSKFISDIIMSVSSSMATRDRSSESARFEVLHAQHSAIVLNNETSSIHIDAVIDPLSASGQKFSSILRVIQKYVQPSMRIVLNPMSSLVDLPLKNYYRYVVPTMDDFSSTDHTINGPKAFFANMPLSKTLTMNLDVPEPWLIEPVIAVHDLDNILLENIGDTRTLQAVFELEALVLTGHCSEKDHDPPRGLQLILGTKSTPHLVDTLVMANLGYWQMKVSPGVWYLQLAPGRSSELYLFKEDDDGNQNKPLSKRIVINDLRGKVVHLEVMKKKGKEHEKLLVSDDEVQDNKNGNSWNSNFLKWASGFIGGKELSKKSESTSMEQGKSWRRGKTINIFSIASGHLYERFLKIMILSVLKNTNRPVKFWFIKNYLSPQFKDVIPYMAEEYGFEYELITYKWPTWLHKQKEKQRIIWAYKILFLDVIFPLSLEKVIFVDADQIVRTDMGELYDMDIKGKPLAYTPFCDNNKEMDGYRFWRQGFWKEHLRGKPYHISALYVVDLVKFRQTAAGDNLRVFYESLSKDPNSLANLDQDLPNYAQHTVPIFSLPQEWLWCESWCGNSTKSKAKTIDLCNNPMTKEPKLQGAKRIVSEWPDLDLEARKFTAKILGDEVDLQEPVPSPTDQLLEEDLESKAEL

SEQ ID NO: 4070 - protein, 1496 aa, Cadophora sp.
MGLFSMPWGLTGALLATTYLHSLCVSASPSINVGMKASFSSAPYLLELLETAGNENATSYFPLLDRIADGYFSKASTDKELFEKFVQVLKDDGHMLSPETLSSWQFALSMRASAPRIEAHYQYYHTAAEPSLKAEQDTSCPVWVLFNGKQYCSPALDAAHGDISGDSQTQELQFDRVLGNPSAPASILYADITSPTFGQFHKTLVKTARDGKTSYRVRHRKSLAAEDKPLIIPGYGVELALKRTDYIVIDDREESESKSVSSTPEKEVKFEDEDEEFADLKPLSASELFSLGLKASSFILQSGNPLNSLVKLSQDFPKYSSAIASHNVSSDFVAEHEFNRAQLVPAGGNIIWMNGVQLIERQIEALDLLDIFRKERKLINGVRELGLTGSQAIQLLSHEAIATVKAENEPQRFDWRDDIEGGNVIIWMNDIEKDKRYAQWPTSLNAFLQRVYPGQLPTCRRDAFNVILPVDFTDPQDVLIVADTLLSFVKRKLAIRIGLVPLTSNQYQLEHAKVVYHLLETYGITAAMSYLEAAYTREKLTTPTAESFKTAIGERKVRTDKTALTLEDVLEPESHKDQIEGSQKWIRRLAADSKIPPMFVDGVALPRDENWLQSMSQRVTTDLQILQQGIFTDTFNEDSWLPLYFLVQASARRNALIVPEDEKSLKIFDVNKLGGENQDILNILPRIEADVSAAKADWAHMVLIADLESKTGEKLLATAAVFREANPSVELTIVHNSGPEAAEPGLSKDLFSYMSKNNNKAFSHINDLTAVLTADLAAPGQQVQDHAIEYWRGADPLIKTLELLPGQNAILLNGRLVGPIPSDSEFDEGDFAQLLSYERAKRITPVHAALEALGLSDNVGSPLAAAKISSIVAISTISDTPDGIFEQASTLRMSQFDIWNSTHTSMETGDVLTASIHFTVLLDPASQLGQRWVPILKVLSELDGVYMKLFLNPKERLQELPVKRFYRYVLDSKPTFNDAGALLPLGASFKGVPQEALLNLGMDIPPAWLVAPKVSIYDLDNIKLSSIKADVEALYELENILIEGHSREIPGGAAPRGVQLTLGTERDPHTADTIIMSNLGYFQFKANPGYYKIDLLEGRSAEIFNIDSVGSKGWSPTPGDENTEVVLMSFKGATLYPRISRKSGMETEDVLEAKPESKMDFVSRGLNFAQGILGKATKSVEKEVQAEINIFSVASGHLYERMLNIMMVSVMKHTKHTVKFWFIEQFLSPSFKDFIPYLAAEYGFKYEMVTYKWPHWLRAQTEKQREIWGYKILFLDVLFPLSLDKVIFVDADQIVRTDMIELVNHDLKGAPYGFTPMCDSRTEMEGFRFWKQGYWEKFLRGLPYHISALYVVDLHRFRQIAAGDRLRQQYHQLSADPNSLSNLDQDLPNHMQTILPIHSLPQEWLWCETWCSDEALKDAKTIDLCNNPQTKEPKLDRARRQVPEWTVYDDEIAAVDRRRKGLPPVSASTAATEKNTKSRTLEVEKSSSTVSKKDEL

SEQ ID NO: 4071 - protein, 1479 aa, Penicilliopsis zonata
MAGTMSSASSWQWCVVIVAGVLACLAHASQSVNVALQASFDSAPFLLELLETAAEENPASYFPLLDHIADGTFDAAVTDKELYDQFLETLKQDGLIEAPESFSSFKLSLAIRSTAPRIEAHYQYYNTSVQQSLMAAQDAACPVWIHYEGKQYCSSAMERAQQDVSGELDSRKLPFDRVSGDVSLPPAVLYADVASPLFKEYHQTLSALAKEGQLSYRVRYRPPQHWAPRPLFVSGYGVELALKRTDYIVIDDRDAEKRELGKDELQDESPDDLRPLSSSEVTRLGWNTASYVMNSADPLDTLVKVSQDFPKYSSVVAGHNATKALVREVHSNRGQMYPSGHNIMWINGVQMDARKIDAFSLLDHLRRERNLIDRFRNLGLSAQETVKLLSHRKVARAQADNEPQRYNYRDEIEGGRVVLWLNDIEKDVKYESWTNELAAYLQRSHPGQLPAVRRDLHNIVFPVDLTNPEDLELVIQTIQIFVKKRIPVRFGLVPTAISKGSIGQLKITHYLHETFGLESLIHYLEQFASKKKVSSPDKFSFQAATKERETRDNVEALTFEQVLASDELDEIVSRTVSYQKRLDIHPETPYFFVNGVPVVRDDTWVQEMSSQISQDLQFIQRGIFNELYEEDTWLAGVLLAKAFTRRKTLIVPVDAKDVRFVDVVGLSESYQTALVNLPRVSSAVDKARENVHMIVVGDFDSEDGLKLLADALNVRREHPEAELLFLDNSPSQTIDQAVSHKFYGLLEQDEPVDVEKITAAVSSITETPDAETIFKYWTDRRLLAEALGFPTGTNGLVVNGRAVGPISQSSELVAEDLEQLLAYEQEKRITPIAEAIEELAIQAKPLNALEFAKLTSLVALSTISDVPEGIFESPADTRFSPSDNWNTSHSVVIVSNSEDPVINIVAAIDPTSEVAQRWLPILKVLSQLAGVEVKISMNPKDEMHELPTKRFYRYVLDSEPSFDTKGSLLKPQASFSGVPREALLTLGMDVPPSWLVAPKESLHDLDNIKLSSVKGGLDVEALYSLEHILIEGHSRDTTVKSPPSGVQLLLGTEENPHFADTIIMANLGYFQFKAQPGFWKINLKPGNSQRIFNLDSVGGLGYSPQPGDENNEVALLSFQGATLFPRLSRKKGRENDDVLETGPKAGSAMDYVSKGLGFAQGVLSGVGLKTSGGAVEKQADINIFSVASGHLYERMLNIMMVSVMRHTKHSVKFWFIEQFLSPSFKSSLPYLADEYGFSYEMVTYKWPHWLRPQSEKQREIWGYKILFLDVLFPLSLDKVIFVDADQIVRTDMYDLVSLDLEGAPYGFTPMCDSREEMEGFRFWKQGYWKNFLRGLPYHISALYVVDLNRFRAIAAGDRLRGQYQLLSADPASLSNLDQDLPNHMQHYIPIKSLPQEWLWCETWCSDESLGPARTIDLCNNPLTKEPKLDRARRQVPEWTVYDDEIAELAKRVAEKEEQEQEAATFTDGADAADWDKDEL

SEQ ID NO: 4072 - protein, 1517 aa, Neodiprion lecontei
MWVFILWYSFVLCLNQITADKQVNKYVTTLIDAKWKETPLILEVAEYLSDESHDYFWGFVDEISSSSYLLPPNAMERDAYNVAITATKKFLTPAEIAVLKLGLSLRTYSSRVEMFNQMAENRNVSHLGCSVAMDIGGKLTCSLKDLEDLVNKQAEVEIDTYSVDHHYPGGEQSDKTVILYGQMGTAEFSEFHSTLKSLAEQKKIDYVLRHYVNNRSEKKLRLSGYGVELQMKSTEYKATDDSDIKDNSDKEADSTSDGIEEIDGLNFGILKNLYPDKQAELDKLQTHLLENSHEIGALKVWQFQDLSHQAAERIMKSPASEAIDALTDIAQNFPMQAKSLIRTKVNSEMKKEMKLNQEIFSANLNIQPTDTALFLNGLFFDLEAIDILTLLESLRAELRVMELLHKIGFANKKMNKLLALDLSGNGDSQDFAIDIRDSAIIWVNDIENDSRYKRWSPSLTELLRPTFPGMLRNIRRNLYNLVIIIDPLSKDAVPLISLAESLYTHSAPLRVGFVFITNYNTSVTGQTDASVAVNNAYHYFAESLGHKEAMRFLSDLRHFIDEDDTDVGEIRKAILARDSSADVNYILGEESEYDVGRHLANDFVKRTGFHKFPQALLNGIPLPSNQLSSELFEEAVLSTIMTQTPAFQKAVYRGELTEGDDVIDYIMNQPNVMPRLNERVLKVEKHNWLDLIGSMPETNEISKWSSQDTSNWLMERMKYVYISRRSAVHHLFTFWIVVDLNLSIDRQLLREAFEYVKSNADVRISIIVNGIENNSRPEIDINKVVLAALNALSSEEAMRFILQVTQDDAISLITNGKYEIENEDVKKKLDEQTMTLEVHKHYVRNALHLESGMRAIICNGRIIGPFDENEEFTSEDFGLLERFSQNTYGNKLFKHVMKADSLDDDDEYEKIDITDDMIVKIVALLVPRPQTRSRVDVPFHSDEHSAIKIPAGDPDSVAFDLTAIVDPVSRGAQKLGPIISTLQQTLNCHVKVFLNCLDKNSDMPLKSFYRFVLEPELQFTPEGQIAGAIARFNKLPTSSLLTQHIHAPENWLVEVVRSVYDLDNIKLDNVAMGVQSEFELEHLLLEGHCFEAVMGNPPRGLQITLGTENEPVIVDTIVMANLGYFQLKANPGEWLLRLRQGRSAEIYDITSVDGQDVIQSENNVKVVISSLRSHVLKLKVSKKPDKANVDLLSEDESSSGLWNSISRTFTAAEESEDKDEKLNIFSLASGHLYERFIKIMMLSVIKHTKTPVKFWFLKNYLSPTLKDFLPHMANKYGFEYELVQYKWPRWLHQQTEKQRTIWGYKILFLDVLFPLDVKKIIFVDADQVVRADLKELANLDLGGAPYAYTPFCESRREMDGFRFWQQGYWRNHLQGRRYHISALYVVDLKRFRRIAAGDRLRGQYQALSQDPNSLSNLDQDLPNNMIHQVAIKTLPQEWLWCETWCDDDSKQYAKTIDLCNNPMTKEAKLQAAMRILPEWVGYDEEIKRLQQEIENANRQTEREEGEMMDDSPAHEEL

SEQ ID NO: 4073 - protein, 1546 aa, Drosophila guanche
MLRLLCVFVLLQSAAPILARAESSQSYPITTLINAKWTQTPLYLEIAEYLADEQAGLFWDYVRGVAKLDTALNEYDTESQMYNAALELVKAHVSSPELPLLKLVVSMHSLTPRIQTHFQLSDELRSGGACQSSTFAHVGTELACSYVELEKKLELSRAEDSLDSPVDTYSFDHIYPGSENNTRTVVLYGDLGSSQFRTYHKLLEKEANNGKIRYILRHHLAKTEKKPVRLSGYGVELHLKSTEYKSQDDAPKPEAGSTLDEDLDNESDVQGFDFKALKNKHPNLKRALDQLRQRLLQGNDEIAQLKAWEFQDLGLQATAAIAEIQGDESLQILQYTAHNFPMLARTLLAHKVTESLRAEVKHNTETFGRSLNVAPPDGALFINGLFFDADTMDLYSMVETLRSEMRVLESLHSNNVRGGLASSLLALDLTASSKKEFAIDIRDTAVQWINDIETDAQYRRWPSSVMDLLRPTFPGMLRNIRKNVFNLVLIVDALQLKARSVIKLSESFVIHQAPIRLGLVFDAREASKENAEDYIAITCAFNYVSQKKDARAALSFLTDIYAAVGETKVVKKENIVKQLIKEFSTLTRAKAEEFIEEDSTYDYGRELAAEFVQRLGFSDKGQPQALLNGVPMPSNIVTADSEFEEAIFTEIMTHTSTLQKAVYKGEMTDNDVAIDYLMNQPHVMPRLNQRILSQEDVKYLDINGVPYKQLGNVAALNRLSNRDMTATVMENLKFFGGKKSTERIGRASLQFLTIWVFADLDTEEGRNLLTHALEYVQGSESVRLAFIPNTENVPAGDSKNLNRLAWAAMQTLPSTQATEQVLKWLKKPKEKLETPSKVLDILGSTELHLKMLRVYAQRVLGLNKSQRLVIGNGRLYGPLSADESFDSADFALLARFSSLQYGDKVRQVLRESAQDVGADFTSDTLLKLYASLLPRQTKNRFKMPTDLKSDHSVVLLPPKQEKLPHFDVVAVLDPASRGAQKMAPLLILLRQVLNCQLSLFMIPVPQHSDMPVKNFYRYVVEPEIQFEANGVRSDGPLAKFSGLPANPLLTQQIQVPENWLVEAVRAVYDLDNIKLSEIGGPVHSEFDLEYLLLEGHCFDASTGTPPRGLQLVLGTKSKTTLVDTIVMANLGYFQLKANPGAWSLRLREGKSTDIYGISHIDGENANYDAGSSVVQVLITSLRSHVIKLRVSKKPGMQQAELLADETDQAAQSGIWNSIASSFGGSNGNQAAADEDTETINIFSVASGHLYERLLRIMMISLLKHTKSPVKFWFLKNYLSPQFTDFLPHMATEYNFQYELVQYKWPRWLHQQTEKQRTIWGYKILFLDVLFPLNVRKIIFVDADAIVRTDIKELYDLDLGGAPYAYTPFCDSRKEMEGFRFWKQGYWRSHLMGRRYHISALYVVDLKRFRKIAAGDRLRGQYQALSQDPNSLSNLDQDLPNNMIHQVSIKSLPDDWLWCQTWCSDSKFSSAKVIDLCNNPQTKEAKLTAAQRIVPEWKDYDAELKALLARIEDHENSHSRDIDEDPVDDHVVVTTQPPPPEPKHGEL

SEQ ID NO: 4074 - protein, 1787 aa, Leishmania panamensis
MSSSMAGTGRGAMASPLRSFFALLRLLVLLSLGITSPTVHGKGIRATVEASWNETSFYQEGCEWAARSFGDEAFYSCLEALWSPPLKGNKSSVNPEEAREAMSARFRTQQQQYMTLLEVLFDLPETRGANRAFFEVEMAARVYSPAVEAHYALTDKALRETTSPQYFSERAYNDEDKRGSGSSSSCGDPFAVVYTRTAPGALLQALRVETPSALKSAVDGVGKSHRGALVSVDEVTFARFDHRYMSSSPSATREVPAVVVLYGFLGSAATHALHRAAVELSSLADAASASTTSAPAYFWRHLPVSVSRLCAAAGVPGRSFSAATTSMWDSPLVVQGYGATVDIKNIEYNVLDEKKAAQQRSKEESLAATATGSLHDATNAAAAAKGAPEAHGGRIVGGFRVARLKERYPGLAALLDEFATLLDEEVGNDDMKVGFDVWELQKIGLAATQYILDVKNHSRRLYVLEDMVMRFPTYATALSRIATQPERLVEVQNTLSILHQTISPGQSALFVDGWRVGEEELSLFGVLHALHEEERLIRCIKTVLTTRAVPAKAEVSSEDVKREVRTVSWLPAMLEKVSGYVKQATRRAISTPENGADMEVAYAIPAKHTIWINNVETSPQLEGLSSELSIFTATDDITQIPRRNVLNYVFLWNPVSKTSLQILSLLFRHRQEGLNARYGLAVVDPTWSPVVETGVQSDARDFKGEPTRSQAALQVFALVYHLAAMDENAVLAFLVELFQTSMKINTDTIPDAVVFRVCKKTAGRLLRTSVAELTSKADFLTYYHETQAVLRRFPVPQYPATFLNGVLLGDDLAGMSAALRRELALLRRWVSSGVLRDEMKDMYNAILKQRNAVDHLQPALVRTPVTMRWSDRPSTVAYVEGMPYVYSAAYAGDALALTQLVTLPCELTTTMLQQVLTVLKSLEECGAVLEEDTVTHEVCRSLRLSLVSCPTATSLVHRHIEALQQQLTRSRAPKVTWHTALRRYVLHVVESVTSTSVDMNAVLCTETVLAALTESPLPDDLQTLVGVSSSTGENTSPQWDREQVHFWTAFEDAYKSSADNVALITNGRIVAMDTSFSTADVLTAARLVAPITKAALHVVMNVNFAEMISAADAGYTAEELDTNFFAGKAACLSSVFVDEISRHVAKESLSAPELMREENMVSSAKSWKRLQGVLFTVRNFRAEGVPSDNAGEAEEESVTASGLQPLHHVTAVVDPSSRDAQVIVSLVHYLVKSQLQVHLTVLLNPSLDVKYPIRNFYQYVASPTLAFEETSGRVIVPPATFTQMPSLTLLTLGIDEPPSWTVFSQDAEVDLDNVMLSRLPRGTLFATAVYRMHSVLITGDATYVQTRVPTNGLPLSLHSSSRAGGAPEAAPTARSTDTQVMANKGGYYQLQANPGLWYLSVKEGPVAAAYCIEAMDGHAVLECAGGGKGLSLTNWSQGQHIPLLVDSFLGRYLSLRVGHTPNSAVAADLHRILQQIASGVEPTWPPFRSTHHTPPERPRKPTLNIFSVASGHLYERFLRMMMYSVHNTSSDKYGANTTRIKFWVIENFLSPQFKRYIPLLAEQLGFEVGFVTYRWPWWLPRQTEKQRKIWAYKILFLDVLFPLDIDRIIFVDADQTVLVDLHELYNMNIGIKPVAMTPFCQKFKNKATASFRFWEQGFWKSHLGLKPYHISAIFLIDLRRFRAMRAGDQYRGTYAQLAGDPNSLQNLDQDLPNYLQNIIPIFSLPEEWLWCETWCSETSKSRANTIDLCNNPLTKVPKLENAKTIIPGWEELDNKLQNLSDSVLASL

SEQ ID NO: 4075 - protein, 1298 aa, Sordaria macrospora
MIRLSQLPWGLAAAIVTATWLPSNHVAASPSVDVALKAAFPSPPYLVELLETAASENATAYFPLLNRIAKGDFAQAKSDQELYEKFLEVLQQDGHVNHEALSTFKLALSLRSAAPRVEAHYQYYTTDVEPSVVADQDGCDLWFLYNGKQYCKASLEASHGDVDSNSQERTLPFDRKFGSGPQEIVLYADITSPAFGKYHETSMELARKGEASYRLRYKRSLAQSDDALSVNGYGVELTLKRTDYIVIDDRNTGADKATGDDSQKTIKSDSELVLDEDEEVADIKPLEKSELSPLAVKAASFVMQSDSPFDTLLKLTQDFPKYSTKLGKHNVSKEFLAEHEYNRQLLVASGANVLWMNGVQLVDRQVQPFGLVDMLRRERKLINGALDLGLTGQQALSLLGHDEVAAAKATEEEPRRFDWRDESEGGQVIIWLNNIEKDKRYAEYAPSVWALIQHYGQGLPQVRKDLFNLVVPVDFTKADHVTLVTRQLLAFMKRGIPVRFGLVPLTPTGEAIEQAKVLYHLLNTYGLAAMSTYLEKSLEASSTDKPNVDIFNLAIKDREVRPEHETLAFKDIFTSGDLEKQVHRAKHWCERLRADTEIPPAFINGFAIPREEDWLRNMNHKLMVDLQVLQQAVYYNKVNDHTDVPGFFLENAIARRNTFISPEDPNAIKVLNVNKVYSEHQRLFSKVPVIEADDSAPKEDWAVLTIVTDLDSVEGQKLLYFALRFRQEHQGVRLDIIHNPADLTNSPSVMSQRLKTKEGSLLEVTRLVELETILEEGKPEADQEFDADLAIFLSGFDLKSGDNMLILNGRIVGPIASANDFVKEDFAEFLKTERANRILPVYKAIEDLGLGDKVSGPLAAAKLTSVTALSGIPDTPQGIFDSATPIRTTAYNRWNTTYTSFEVGNPETASIFFVAAINPASQMGQKWAPILKVLSELEGVNLQVFVNPETELSELPVKRFYRYVLESAPSFDESGKPATDKSVSETAQHAEINIFSVASGHLYERMLSIMILSVMKHTTHTVKFWFIEQFLSPSFKSFLPFLAAEYGFQYEMVAYKWPHWLRHQSEKQREIWGYKILFLDVLFPLSLEKVIFVDADQIVRTDMYDLVQLDLEGAPYGFTPMCDSRTEMEGFRFWKTGYWATYLRGQPYHISALYVVDLRRFRELAAGDRLRQQYHTLSADPNSLANLDQDLPNHMQFQIPIKSLPQEWLWCETWCNDETLGKARTIDLCNNPQTKEPKLDRARRQVPEWTVYDEEVAGLAKKVREEQEKLEQVVELKKKVEEKNAEDKAEKEHVIDEL

SEQ ID NO: 4076 - protein, 1737 aa, Thalassiosira oceanica
AGWLGLFDEKEEKGLPGGENKNAARTLSSFEDYSRGLSKDTPVNPLGRRDVEVSVKTGWPTTVFSPLCEAWSYLDAGSSDKNSLSWKYLDVFADLGGSESLDRWIDEPKDEYSWGVHNSSLLALEVAAKVDIGALDHNLLPLALSLRAHSPHCEMHRSLARDASISFGLYNTSEPGNLPDAFAIISKTGVDEITNQTKVMAAQVVMDGVLVSNAIESLHSIGDDSRHIAAGYSKLLLPLSDEIVNPGSDSDGGASAVVYGQVGTSAFASMYQSFKNSNIAFVVRHMGYIQYEEDSPTSPKASRTKLQGYGVRLDIRNIEYKAFDEPDDGNDDSDVDLSDAGHDPSEASRDEYLAGINLHRILRRLEADGRLPLDTDLNAMQTGIIQSQRAQQRYESIIPPAWQRRPLSMQATTIVLSSPDPLGTLKGLSQNLPSIAHFLASVRVPPSLEKLAEDATALASRVGAVSPGWGDAAFGLYVNSNPVDVERPSFNVFQLLSVIREEDKKLRELESRVRPVLKFASESLGSSSDWKTLLAVRNAMDMGMDKLKQIGNNLSGAMVESELYGDKELPVSKKYRIDVGRGGKNAVLYLNDIEKDPEYRSWPSSLQEMLMRSQYGGAPTVRRNLFTLLVVMDPASGVAQPSLSVAAQLMNSQVPLRIGVLIVNENDVANGLASPHPSWNDGQRRFHARDSSLILRFLAKEFGGLTSFSCLVQMSHMSDTDITVSEYIDKHVAFLNEMGVVQGMGVRYNLEAIVKSGKIDSVTKRIDITYEQAVSFASDKLIAPGMSFFNGLPLPDASDRESFGAAVNEIFSYEQQNIMELVVKGIISDGPKSVYAAVLRKGDNLFKQFHPLLRESEGVYFALDSSELDSDVDSLLVPSSPSISLEEVRALYLIEAFVDFESTEGVGAAIALLDINISPPEAWYESKTAVASKISPSGPVESPGGLAMFNILRSVSQFNASDVKAALLSLLPGNFDSTSDVAAVINQLEQVDKEVRQKLIDVVSVEHTKVSPSPRPEKNFYIANGRVFVPPKGRSISISDIEMLIDLEYDLSSAFSHLVLPKLVGEVTVGGGIPPATYLAMGKAASVLFEMLSQPTSRVQDFTSVFDSVDEDSPLFFSWNEESDDEHLQVLQVKVSCILDPLTEPTQRVAPILMAIRDSLKIPLRLLLAPRLTVSNELPLSSYYRFVVDADSEDPKASFHNLPTNHLLTLRMDVPEIFDVQQSSAVEDADNLRCIPPFGCGDKAHLLAKGQVPKEGAQAGPTRIEYQLKNLLFFGQCHDLLKNTSPNGLQLTLDRSSIINPSSPSAVEIDGKGVISSSLPSASMGSRKEHADTLVMKTVGYWQLRANPGVWELKIAKHSRGSQIFDMVEGTATATGRLKLKRSQKMESKTLSMKDFTNQGRVLTVLRKKGFEQTELYEENTLESTEPQTRVDTVHVFSLATGHAYERLLKIMMLSVTKRTTSPVKFWLFENFLSPSFKSSAKYMAEQIGCEVTFVTYKWPEWLRGQSEKQRLIWGYKILFLDVLFPLSVKKIIYVDAEAKIPRDKSRSPDFSHVYSLQVIRGDLTELANLDLEGAPYGYTPMCDSRVENRGYAFWRTGFWEAHLRGKPYHISALYVVDLERFRRELVGDKLRAIYQQLSADPNSLANLDQDLPNYAQHEVRIFSLPQKWLWCESWCSDETKIDAMTIDLCNNPEHKEAKITMAKRIISGPLFEESWEELDKMVGQYDKEYLDNSKTR

SEQ ID NO: 4077 - protein, 1559 aa, Genlisea aurea
VSAQTRRPSKNVQVALRATWSGTPILLEAGELMSKQWKDFFWNFVDAWIHSETVEPEPSTSKDCVAKILAHGKSLLSEALASIFEFSLTLRAASPRLVLYQQLAEESLSSLPAAGGVVTNNKEAESIEYDEIIERKKTHESLFSCKRPSSPRSRCCWVDIGSSLFFEVSELQIWLLDPDVIITGAVPHPEIFEFDHVHPDSKAGSQVAVLYGALGTKCFEEFHMVLSEASRTGKVKYVVRSVLPVGCESKSATCGAIGAGGPLNLGGYGVELALKNMEYKAMDDSSIKKGITLEDPQIEDLSQDVRGFIFSRILERKPDQIAEIMAFRDYLLSSTVSDALDIWELKDLGHQAAQRIVHASDPLQLMQEISQNFPSIVSSLSRTKLNESIKAEIISNQRMIPPGKSLMALNGALVNIDDIDIYMLVDLVHQEVSLAEQYKKLKIPPSVVRNLLSVLPPSESASLRVDFRSAHVHYINNLEVDAMYKRWRSNINETIDMVISLFENNLPVRFGVILYSAKSVEKIEAKNDVLSSSDLKSDLEDISDLIIRLFIYVKEHHGVLAAFQFLSNVNRLRIESAAEDSLEVYHLETAFLDTLLPTAKSPPQETMSRLKEDKTLNELSQESTSFAVKLGFATLGCSFLMNGLVYEPNEEALMNAINEELPRLQEQVYYGQINSQTDVLEKFLSESGVQRYNPMIIAEGKDKPKFTSLCASVLTEGSVIDQLRYLHSVKTVDDLKPVTHLLIVDIDSKKGTMLLREGIRYLISGSRNSRVGVLFNSNEQTTSSSLFFMEAFKITASSFSHKKGVLQFLDELFLLYEQEVLASEVDGSYDAILDKVTQLADANGLPSKRFESDLSGFSPESTRSYLNEVTRFLYKSLGIQEGVNAVVTNGRVILLTEGSIFLSHDLHLLESLEFKQRIKHIAEIVEGIKWEGVDPDLLTSAFMSDVIMAISSSISSRDRSSESARFEILNADYSAVFLENQDSSIHIDVVIDPLSPTGQKLSSLLSILSKYIQPSMRLVLNPVTSLADLPLKSYYRYVVPTMEDFSSTDDMIHGPRAFFTNMPLSKTLTMNLDVPEQWLVQPLVAVHDLDNILLENLGDTRTLQAVYELEALVLTGHCSEKDHEHPRGLQLILGTKNNPHVVDTLVMANLGYWQMKALPGVWYLQLAPGRSSDLYFMKGEGKETQNTTLSRRITIDDLRGKLVHLEVVKKKGMEQEALLIPSDDDDNHPLNKKITQSKWNSNILKWASGLIGGSYQPKKGESSSLDSGSKVRRGQTINIFSVASGHLYERFLKIMILSVLKNTDRPVKFWFIKNYLSPQFKDVIPDMAAHYGFDYELITYKWPSWLHKQKEKQRIIWAYKILFLDVIFPLALEKVIFVDADQIVRADMGELYDMDINGRPLAYTPFCDNNKDMDGYRFWKQGFWKDHLRGKPYHISALYVVDLVKFRETAAGDQLRVFYETLSKDPNSLSNLDQDLPNYAQHLVPIFSLPQEWLWCESWCGNATKSKAKTIDLCNNPMTKEPKLQGAKRIVAEWTDIDLEARLFTARILGETTEPPQIQ

SEQ ID NO: 4078 - protein, 1492 aa, Penicillium brasilianum
MRAPTRPRASWHWYAALGALLPACLANASPAVNVALQASFDSSPYLVELLETAADENATSYFPLLNRIADGAFEEAISEKELYDRFLQVVHEDGHLRTPESLSSFKLSLSTRSAAPRIQAHYQYYNTSVQRSMMGAQDAACPVWVHFEGKQYCSSLMERAQQDVDGELDPRELPFDRVHGDVSLPPAVLYADVSAPAFKEFHEKLSEMAKQGEISYRVRYRPPQHRASRPLFVSGYGVELALKRTDYIVIDDRDTEQRDGSGKEDALSGSEELKEDAPDDLRPLSASEVSRLGVNSASYVMDSEDPLNTLIKLSQSFPKYSATIAAHNATAELLQEIRGNRARMIPAGYNVMWINGMQIDTRQIDAFSLPDILRRERRLIEKFRDLGLSAQEAVKLLSHPTLAESQADDDSQRYDYRDTLEGGQVIIWMNDLEKDSRYESWPSDLQTYITNTYPGQLPQVRRDLHNVVIPVDLSSPEHVLLVVNQVQTFIKRLIPIRFGLVPTASSPNAISQLKVAHYLQETYGLSSLLHYLEESASKGKAGETDKASFGTAIKERTPRADKEVLSFDQVLKSEYYDTVATRSADYQRRLGLQGAAPHFLVNGIPVSRESNWMQELSMLISRDLKLIQQGIVEGVLEEDAVLPEFFLAGAFERRNTFIMPEDPKSVRIVDLATIFGSDSTILDQIPQVEPESGVLGGIHIIVVGDFESETGLKLVTDALKFRKENGEMELLLVHNGATESEGSMSRLNVLRHALAKGADIDGMVDAITSSEPLESSEYDSQEAIQVHRRLAETLGFDAGTEGLVVNGRAVGPIPKEYSLSVEEIGQLVAYERTKRIEPVARASLSLRLNKKLTKPLDLAKLTSMVTLSTMSDVPEGIFESMPDFRMDVSEKWKTEHSVITVSNSEDPAINVAVVLDPASETAQRWLPILKVLSELAGVQLKIFLNPKDELKELPVKRFYRYVLESEPSFSADGSLSRPGASFTGVPVEALLTLGMDVPTSWLVAPKESVYDPDNIKLSTLKAGANVDAIYALEHILIEGHSRDVTTNSPPRGVQLILGTEDNPHFADTIIMANLGYFQFKAQPGVWQINLKPGRSEKLFNIDSVGGLGYRPQPGDESTEVTLLSFQGRTLFPRLSRKPGHENDDVLETGAQPGSARDYLSKGFNFASGVLSSVGVGSKSEEQQADINIFSVASGHLYERMLNIMMVSVMRHTKHTVKFWFIEQFLSPSFRAFLPHLAEEYGFSYEMVTYKWPHWLRPQKEKQREIWGYKMLFLDVLFPLSLDKVIFVDADQIVRTDMYDLVTHDLEGAPYGFTPMGDSRTEMEGFRFWKQGYWSTFLRGKPYHISALYVVDLNRFRAIAAGDRLRGQYQMLSADPNSLSNLDQDLPNHMQHHIPIHSLPQEWLWCETWCSDEDLASARTIDLCNNPQTKEPKLARARRQVPEWTVYDDEIAALAKRVSAEQVGFVQTGEDAGQKEVSVDDVIVEDVDRKDEL

SEQ ID NO: 4079 - protein, 1457 aa, Eptesicus fuscus
FNSEFMAEESNEKFWQFLDTVKELAIYKQRESGYSYYNLILKKAGQFLDNLHINLLKFAFSIRAYSPTIQMFQQIAADEPPPDGCDAFVVIHKKHTCKINEIKKLLKKATSRPRPYLFEGDHKFPTNKENLPVIILYAEMGTRSFGKFHTVLSEKAQNGEILYVLRHYIQKPTSRKMYLSGYGVELAIKSTEYKTLDDTQVKTVTNTTVEGEIETNEVQGFFFGKLKERYSDLRDNLTAFQKYLIESSKEMMPLKVWELQGLSFQAASQIMATPVYDALKLMKDISQNFPIKARSLTRISINQHMKKEIQKNQQDLHNRFEIQPGDAHLYINGLRVDMDALDPFRILDMLKLEGKMMNGLRKLGINGEDMSEFLKLNSHVWDNNYVLDIRHSSIMWINDLENDNLYVTWPASCQELLKSVFPGKIPSIRRNFHNLVLFINPAQEYTLDFIKVAELLYYHKIPLRIGFVFIVNTDDEVDGTNDAGVALWRAFNYIAKEHDVSQAFISITHMYQKVKNQNILTVDNVKSVLQDKFPHANILDILGIDSRYDNKRKAGASFYKMTGLGPLPQALYNGESFNHEELNIQKLERALLQKMMDMTIYLQREVYMGTLNDRTNAIDFFMDKNNVVPRINPSILYSKGQYLNLISTSVTADVEDFSTFFFLDSQDKSAVIAENMYYLTHEDEDVISSITLWIIADFDKPSGRKLLLNALKHMKKSFHSRLGVIYNPTSKINEENTAISRGILAAFLTQKNSFLRNFLRKLAKEETATAIYSGDKIKTFLTEEMDKNAFEKKYNTIGVNIFRTHQLFCQDVLKLGPGEMGIVSNGKFLGPLNENFCAEDFSLLEKITFTNLAEKIKGIVENMAISSKKKSDLVMKVDALVSSLPTRESRHNVKFLTENYSIIKISPQENDMFFDVIAIVDPLTREAQMMAQLLIVLGKIINMKLKLFMNCRDKLSEAPLKSFYRFVLEPELTLVTNDLIEPVAKFLDIPESPLLTLNMITPEGWLVETVHSNCDLDNIHLKDIERTVIAEYELEYLLLEGHCFDRTTEKPPRGLQFTLGTKSQPVAVDTIVMANLGYFQLKANPGAWILKLRQGKSEDIYQIVGHEGTDSQSDLGDVIVVLNSFKSKILEIQVQKKPDKIKEDILTDEEKKGMWDSIKSFTRSLHKEKDKKETDVLNIFSVASGHLYERFLRFYEVRVSFSNNSKEFTFSKPKPMEVIPYMAKEYGFQYELVQYKWPRWLHQQTEKQRIIWGYKILFLDVLFPLAVEKIIFVDADQIVRHDLKELRDFDLGGAPYGYTPFCDSRTDMDGYRFWKKGYWASHLLKRKYHISALYVVDLKRFRRIAAGDRLRGQYQALSQDPNSLSNLDQDLPNNMIYQVAIKSLPQDWLWCETWCDDESKQRAKTIDLCNNPKTKEPKLKAAARIVPEWVEYDTEIRQLLDHLENKKKNAILTHDEL

SEQ ID NO: 4080 - protein, 1610 aa, Jaculus jaculus
MGSREAAQPACAGKGTNIADSVLDMCPKGLLRQDEFMAEESNEKFWQFVETVQELAIYKQTESDVSYYNLILKKAGQFLDNLHINLLKFAFSIRTYSPTIQMFQQIAADEPPPVGCNAFVVIHQRHTCKINEIKKLLKRASSRPKPYLFAGDHEFPTNNENLPVIILYAEIGTRAFAEFHKVLSEKAKNGKILYVLRHYIQKPNTRKMYLSGYGVELAIKSTEYKALDDVQVKTVTNTTVEAETEAGEVQGFLFGKLKEIYSDLRDNLTKFQNYLIESNKEMMPLKVWELQDLSFQAAAKIMSTPTYDAIKLMKDLSQNFPTKARSLTRIAVNQLIREEILENQKDLHNRFGIKPGDARLYINGLLVDMDVYDPFSILDMLKSEGKLMSGLQNLGFRGEAMDAFFKLSSAVREDDYVLDVRHPSVVWINDLENDALYASWPSSCWELLKPPVHDSIPSIRRNFHNLVLFIDPTQAYTLDFIRLAALFYYNEAPLRIGFVFILNTDNEVDGTKDAGVALWRAFNYIAKEYDMSEAFVSMIHMYEKVKSQHVLTVDDVMSVLQNKCPDSNILEILGLYSKYDSERKAGASFYGKTGLGPLPQALYNGEPFNHKEMTIEELEVALLRKMMRTSINLQRNVVMGTLNDQIDVINFLMDKNNVVPHMNSLILHTEPRYLNLISSSVTADIEDFSTFSFLDSQDKSAVIAKNMHYLTLEDDVACAVTLWIIADFEVPSGRRLLLNALTHMKTSVHSRLGIIYNPTSKINEENTTISRGILAAFLTHKNSLLMSFLKNLAKEETSAAIYSGVKMKTFLSKGMDKNAFEKKYNTIGVNIFRTHQLFCQDVLKLKSGEMGVVSNGKFFGPLNENFYMEDFHLLEKITFSNLVQKIKDIVERLDIHSKHVSDLVMKIDALFSSLHMHATRHNVNFHKENHSVVKISPAEPDMVFDVIAIVDPLTREAQKMAQLLTVLGKISNMKIRLFLNCRGKLSEAPLNSFYRFVLEAELLSGANDSPYGPVAKFLDVPESSLLTLNMITPEGWLVETMHSDCDLDNIHLENIEKTVVAEYELEHLLLEGHCFDVTTEQPPWGLQFTLGTKHKPALGDTIVMANLGYFQLKANPGAWILKLREGKSEDIYEIVGHEGTDSQLDVGDVIVVLNSFKSKILKVQVRKKKDKIKEDILADEYENKGIWDSIKSFTRTLRKEDPKKENDVLNIFSVASGHLYERFLRIMMLSVLRNTKTPVKFWFLKTYLSPTFKEVIPHMAKEYGFQYELVQYKWPHWLHQQTEKQRIIWGYKILFLDVLFPLAVDKIIFVDADQIVRHDLKELRDLDLDGAPYGYTPFCDSRTDMDGYRFWKTGYWASHLVKRKYHISALYVVDLKKFRIIAAGDRLRGQYQALSQDPNSLSNLDQDLPNNMIYQVAIKSLPQDWLWCETWCDDESKQRAKTIDLCNNPKTKEPKLKAAARIIPEWVEYDKEIRQLLDHLEQQRESAAFAEETIIFSLSDLVTLSEDEFDPICSLFLPFVFYWDEGSNLYDEKLEKEERIIVLLPPWVTWTLQYTEAAAELLVPWQYVSQSDAYQEPNPCYRAQRKPDETCGLQIMTVSIFHARTSLQFT

SEQ ID NO: 4081 - protein, 1294 aa, Pogona vitticeps
MYLSGYSVELAIKSTEYKAVDDTWSEGAVNVTEEESNGENEVQGFLFDTLRQNYPDLKDNLKELKKYLIESADDTEPLKVWELQDLSLQAASQILSVPVYNALKVMKDIAQNFPVKARSLTRVLVNQQMRKEIEENQKHLHETLELQPGEARLFLNGLPIDLDFHDPFSILETLKLEGKAMHGLHSFGIKGDTLHKLMRLAGRSDDDTYALDIRHSAIIWINNIEKDHMYNKWPTSFQELLKPTYAGMMRQIRRNLYNLVIFIDPIQEEASTFMNLVEVIYSQKVPLRIGFVFVLNTDEEVDGNEDAGVALWRAFNYIADEMDIPEAFASIIKMYREVKDGGMLSVEHVKRVLRGAFPHADMQDILGVDSEYDEKRKAGAVFYKKTGLGPLPQALFNGVPFNRKEMNVGELGSSLLKIMDATESFQRAVFMGQLNDHKDAVDFIMEQQNVVSHINEKILSSERRYLNFISPSAPIDTSDFSTFSFLDSQDKTFVISENVKYVTRKDEDIIYPVTMWIVADFDKPDGRQLLSNALKHLKSSSHAQLGIVNNPASKITEDNTVIARAILAAFLTQKNASRKSFLSRILKEEVAKALATGAKIKKFFVPGMDDDTFEKKYHTLGVDLIQAHRIFCQEVLRLLPGQMAVVTNGRIIGPVHENEFSLEDFDLLEQITLSAATVKIKSLIKEMGIESKRGSNLVMKVNALLSSMPKMDARRNIEFLKEQQSVLKLDPQENEPFFDVIGIVDPLTREAQKLSHLLIVLGQVVHMRLRLFMNCRSKLSEVPLNSFYRSVLAPELTAGIHDLFPLPPGANFLEMPESPLLTLNMITPESWLVEAVNSSYDLDNIRLKDVDGIISAEYELEYLLLEGHCFDVTSRQPPRGLQFTLGTRNDPVQVDTIVMANLGYFQLKANPGTWILRLREGRSEDIYQIFKHEGTDSSEALEEVIVVLNTFRSKIIKVQVQKKPDEISEDLLSDRLTEEEEDLMASSIGGTQTSEKEKKMDILNIFSVASGHLYERFLRIMMLSVLHHTKTPVKFWFLKNYLSPTFKKVIPYMAEEYGFQYELVQYKWPRWLHQQTEKQRIIWGYKILFLDVLFPLAVDKIIFVDADQIVRSDLRELRDLDLRGAPYGYTPFCDSRKEMDGYRFWKSGYWASHLGKRKYHISALYVVDLKRFRKIAAGDRLRGQYQALSQDPNSLSNLDQDLPNNMIHQVAIRSLPQEWLWCETWCDDESKKKARTIDLCNNPKTKEPKLEAAIRIVPEWAEYDSEIQKLISRIRNEKKNVIQSRHTDSKHDEL

SEQ ID NO: 4082 - protein, 1684 aa, Amanita muscaria
MRSAFIALLYATAAINDVRAITAGRPPAVNVSLRTSWPAPPFLVELLESFSLEFPSSFFPLLNLLSDPNIAQKLKSSNPKEIRDETVKLALEHGILEDSTDVAALDSTLALHAATPAVQAFYSFYEEKYGDRGRLCAQKDGGGQAWVDWYGEVACTAAELRGLVDERPANVNYTRPQLLTFDHVHPVPSRSLTRSPRTAILYTSLDGHPSNLGELHNALYALSKSDKEDNSVEYVVRYTPPLQGGKESGNGEGEAKGSYLTGYGVALDLKKTDYMVLDDRHSRSLEDKEGKKDIQEEKVQVDPLLDFIQSFEAKEKNNDEDKDHADTNTPLTEAEIVELGYQASQLIISISSLSSTNNLAVPLSSSHSSLSPLSALTLLSQNFPKYTQSLSRRIPLSSSVESELRQNALRAQAGANVVWLNGGIIFSPGGDVAGGGGLINGVDVLKMKRVMRREKAWVRTLESLGLTRQEAVQVISDSGAIIGEDGKPKNHGGGSVSSESSVLDGRVDASDRTEGKDVILWWNDLEKDERYARWGASFYGLMRPMFPGQFPTVKRNLFNIILILDLSNPTALELVGGTISNIIERGIPFRFGLVPSMASEENRKMAKAIYWLFENAGRKRTMHWIKLLAGIEGRGFMNMGSSVPENQIDWTRAKEEFNKLVDEIKEKEGKDETVDDLEIVTFDSVVNSQDGGGSLKEVDAYIDRLDVKTIKAGLLGHAFFNGKYLEVGKDLLGGLQQDIGYQMQYFQELIYQGTLTDGDSPDMANWFYDQPGVSKRRNTYIIPSVGFGPNESGGGRPLRLVSLPQVFEKTGFQWEKVKGGFVYPPGKGALPFSTFVVADLDSEEGLELVKEALKSLVYVPKMRVLFVHNPSSDVKKSVDHVSPRSEIVAKLAMPGRMLESTVTPQALATVLGIDIEFEVQELSTDETQVPLGQSAVELLTVDKIDEKTYGEYTEASRLLARELEFGPGESGVVINGRVIGPMERGSFNAADFKALAEFEYKKRMEVALDSIENACHRVVDLDRVAYADLVSLTASVLGVMQMPDPSDVGMHDATPKPRRRNYLALERNLTMFTHGDSSAAMYHVVFVLNPLSETAQKWSSLIKWLTEMPEVYIEVHLNPNKQAEIPLKRFYRYNLQSALVFDESGNEVTAQTSFEELPVEPLYTLAMDVPSSWLVRPREALYDLDNIQLTSLSPSDSSVDAVFELDYFVIEGHARDPATNAPPRGLQLQLVDSHNKTIADTLVVANLGYLQFRAKPGVFKLEIREGRAKEVYHMDSAGNEGWDSPTVDVGGTDITLTSFDGLTLYPRFSRKEGMESASVLEGDETEQMSSGIIGTVTSRFRSFFNAGKGPKSATGVVERRDLAEINIFTVASGLLYERFVGIMILSVLRNTNSTVKFWFIENFLSPSFLEFIPHMAKEYGFQYELVTYKWPSWLRSQREKQRIIWAYKILFLDVLFPMDLKKVIFVDADQIVRADLKELVDLDIHGAPYAYTPMGDDNYDMEGFRFWKKGYWAETLGGKPYHISALYIVDLVRFRQLAAGDILRGQYQQLSADPNSLANLDQDLPNNLQRMVPIHSLHEDWLWCETWCNKDRLHRAKTIDLCQNPLTKEPKLARARQIPEWEEYDAEIARFTRKLAEEGKIRSGMAAADVNALASAGNTPAVPPTTGSAESEPGTATTSIHEEL

SEQ ID NO: 4083 - protein, 1415 aa, Zymoseptoria tritici
MAVLSGWKAGVLASLLAWANAVPSINVELRTSFGAPPYLVELLETAAEANASSYFPLLDRIADGYFDSSKTDRDLYNSFRSVLQQDSHLSSEALSLFDFALSIHAAAPRIEAHYQYYNTSIVPTLLADESEGCETWAHMSYKRQRYCSPELRESDVIKDYGPADDDVRSLPFDRVLGDDFNEKPSVLYADIESEAFRKFHKKLSPTAKEGSTSYRVRYRATPGYESRPLAVSGYGVELALKRTDYIVIDDRQAEEAKSEDNAGDATLSEEELSDLRPLSSSELRRLGLKASSFVMASEDPFETLLRLSSDFPKHSSPIAATNVSKEFLKEHEHNRELLLPAGYNVMWMNGLQVMSRDVEAYALLEQLRRERKMINDVQSIGLTGAEAVELLSHEAITKSQVGQEAQRYDWRDDAEGGNVIIWLNNIEKDKRYASWPATVNAFLQRTYPGQLPSVRKEVQNLVLPIDFSDLSDVSLVADSIRGFVERQVPIQFGLVPRINSPASKEQAKVFYYLVDRYGVAVALDYLERSVAGSTRKLGGPDEKHFTTAIAERILRRSKEALEFSKIADDEELSARLKPVQAYLARLGDIDAAPHAFINGVPIPRTDEWLQVMSQRIGLDLRVVQQAIYEGTLSDDDYLPDVFLSKASFRRNNIVIPGDDKTLRHLNLGELPHFELLPSLPASKDTIERELVHLTVAADFDTTEGFEQLMEALVFREEHDNVELAVLHIPISPNPAIHMYKKLQGEVATGDNLSARREVYASMRKTAMTGDDINEPGFEKALVINGRVVGPFAQETVLEVADLEALFSYERKRRLLPAALAIESLKLQDKASTPLAFARVSNVIALSLISEVPEGIFEQAPSVRMDTFKKWDSTYTAIRIGDEKTANIQIYAAVDPASEVAQRWIPIIKVLSELEGVYVCLYLNPKERLEEIPIKRFYRHVISSKPDFEDDGSLRAARAQFGGLPADALLNMGMDLPPSWLVAPKHTVHDLDNIKLSAVKSGSDIDAVYELEHILIEGHSKDASSGPPPRGVQLVLGTESDPHFADTIIMANLGYFQFKANPGIYNLALQKGRSEAIFNIDSTGAPAWRTKTFWKHRSKYLSKAAQLGSGLFSSKDDVQAPKHADINIFSVASGHLYERMLNIMMVSVMKHSSHTVKFWFIEQFLSPSFKDFLPIMATAYGFQYEMVTYKWPHWLRGQKEKQREIWGYKILFLDVLFPLDLDKVIFVDADQIVRTDMYELVQHDLEGAPYGFTPMCDSRTEMEGFRFWKQGYWKNFLKGLPYHISALYVVDLKLFRQMAAGDRLRQNYHQLSADPNSLSNLDQDLPNHMQSLLPIHSLPQEWLWCETWCSDESLKDAKTIDLCNNPQTKEPKLDRARRQVPEWTAYDDEIAGVAKRYKDSRSGDLRKLRATKRRRT

SEQ ID NO: 4084 - protein, 1365 aa, Kazachstania naganishii
MGCCRFILNVLHLAACLWAVQVEYGEGLTLGAQEAVRIYSILVHIGVDKVILAGLYPTITGLDSAEDRDDADDAGGAGIFESVLESLSTTAGDGANWAPLFDKYYHLYPMGFPLDQATGLTDENYFVLNGDVYSKPDDVFYMKSKDLKRQTAVPDTDILNSRFDVVIGWNAAAPLITFFGCPSSQAFREFNRNLFAEAIGSGKIRFVWRPTCSYREATPLEVDFPLELTFKKDGEHWDSIVPYVKLPYGLSLPQSLDYEPTEEELEDLDIKIASLIAKHYSGTKDFDATIEYFQRIVNNFPLLFEELTKMEISDAEINEIEKSNHVLEQYGIDYFLLGLFVNGQNIKLTSLDPYSLVNLVQVEYDRLKLLTKALHKAIPGFAYHDARNLVNLFSEISMPTMQELQPIKVDAHRIPAFSHNVIYFNDIEKDDVYNELRNDASQFFEKTKFGEIPEFRQNWNELVFVIDFSNLEEGTVNSDALTALVRVLDVVSQGYPQRLGLLPITNKESEKVLSTIYKLKEQSLSQLKEFFVDLIAEKDLPLDSKFPHPDNSELLSYLDIDDTAIIIDGEIFPFQKNAWHYLLAKVIKRDVEQIKFKLERRRKEEDFTTGNIDVRGLLHLKSATLKHHKYTPDYFSDALYTVMDNDALTNCGIELSSTTKNKNFKILHTISLVDDFGTLSALQRLYNMITVKFSGVRVRVIHTGEAKDGNWLSVKTALAKSGSDMKKSLRKTITSFKQQKRRSLGVNLNWIKQWLPDIALEFLEAGRFMVLNGRFIHFNKDEIPSKEHFEAIVKREAQRTLDMVRALEGLVPEDHEEISDPNTYEVVSSILAKTYYHSLQINRKGFEFTTETTLSRLDLQGHVMINNFTTFESKDKSKPVLVTLVVDPVEERTQKILALIPMLQNLSFVDIEIVLLPTLELKVVPNQRVYLPDRDVQLSTDVLSSYDVEVDVPKTFVMSNITTLESIVIEVYCFDKDRKLSQGSVNSIGGVSLELLDSAGISVGNATTMETFGYAQFHVKTLAQNYTIRSTDPRFEVKGMSTQFNSEFVLSDRFSVDTFDPVRVLVTLEEHEDVDVREDVVAIDDATNVFTVLSSLEEEEIYKDMILKIATSRSERIVFWLLSESFYSKSLYRFVDAVNNNAELNVEVRFISYSWPVWIRPQRFIERRTNVARVLLLDVLFPRSVHHLVYMAPTSTPVDPVLMLRSTMKSKRPVNMFRMKGKGYWDEGYWKKLKEETGFAFYSAEPAFVVHMDRVRALSGGEVFRIHYQRLSADQNSLVNIGQDLLNDVQGQMPIGALKKSTREPLAFDQSKVDATLQSIKAAAEAEADAFNRTGSQREKTQQAGKQPQEVQEDVDEFDLLHDEL

SEQ ID NO: 4085 - protein, 1496 aa, Spizellomyces punctatus
MLSQKGWLYATTLLLFAAPATTNPQESSAPVITRLKTEWPAPPLILEAIEFVAQDRGAQAFDYISQLASTGVLSRSSAANSNRIYNEIIGGLDEGLSKTPGDSQRESFLLSAASLSLLKLSLATRSSAPRIQAQYRFYTENVLPAFGSPSAKFNQKCDVWLDWYGTQSCDVSEVEKLVSASVSNASAPLVFPSDHIYRLDNSVNSRPFAVLYADLQSDAFPPFHSALLASARRGDLAYVLRYKPPSAMPEEPLHVSGYGVELALKSTEYKVVDDREVQKGDESTSSESGTRSVMNEDDPLFESPPRVMALTANETQGLGLKTTQFILNCTNPLRALVDVSQNFPKFAHLLKGVQVEAAIASELSYNRAYLAARRHGLWINGIELDPERIDIFSLQRTLRMEVSRVASLTALNLTSDQAVDLLTTPISEKSGSDLEWGETFDVRSDLVVWWNNLEKDSRYKYWPASVMEVVRPSYPGQLKYLRKNLMSTVLNLDLANPSHLQIMTQVFAFIEREVPLRFGILPLVDIQHHDSASSLAAGAFYHLLKHAKLKDAKNFIQALRDASGDETLTPNAVDSAYNKVAGKSLKAALAEWNDGYSGHVRRLHEFSLRFGTSLREGAVFANGKYVPLNEEWQQSMITTYFKMLDYLMQKVYNGQISDRDNLYDHFLTLPNVNSKRNEFIFGEPVMKNFLDCDECELLSDIVWLSPETVPSTISIIVVADFAQKEGIDFALQAVQYLSFSEGVRMTFINSGAEPVSKVPRSTRADAEVQEEGLDELDKVFQVTGESLHTKTQAFIRSLGLATGQRAIVVNGRIVGPIPSEIPFDAQDFELLIAREFRQRIGNVATKMAGFFGIPDRQSDAISMAIFKATSALATIAMQEISKPLSTSPQTRRPLDTFAKLKKEHSCILVGKEENALLRIIAIVDPVSQVAQKVSALLQVLSKLEGVRIEILLNPEPDMGGSLPIKRFYRYVVAAEPEFDSLTGAMKPPSAAFYGLPEEPLYTLGMDVASSWLVFPSRSIHDLDNIRLSTLTNRRKGVDAEFLLENILVEGHARDSRTNGPPRGLQFVLGTKQSPSMYDTITMANLGYLQLKANPGVWHLRFREGRSRELYEFESITDTLEAQTTTLAGEDGPTIVVNSFEGVTVLPVVKKKLGREQEDILAVENAESGEGKGLWNQIKANFFSSSASTSANATINVFSVASGHLYERFLSIMMLSVVKNTQSPVKFWLVRNFLSPSFKEFLPHLAKAYGFEYELVTYNWPHWLRQQTEKQRTIWGYKILFLDVLFPLNLDRVIFVDADQVVRTDLKQLVDLDLHGAVYGYTPFCDDRKEMEGFRFWKHGYWKDHLAGKPYHISALYVIDLKRFRQLAAGDQLRQQYQMLSADPNSLANLDQDLPNNMNTARQLPIYSLSQDWLWCETWCSDESLKTAKTIDLCNNPLTKEPKLERAKRILPEWEGLDAEVAAVAKRVGHSQVHGNVTKTSGVTESISQYSPVRDEL

SEQ ID NO: 4086 - protein, 1543 aa, Priapulus caudatus
MDAPMKRIMHYMVVVVALLLSLGLSTTEAVRRNKPVIVSLDAKWACTSFILETSEFLAHVNPATFWKFVDEVSEREISIENLTEKEQYELALEIAGALLSPAQLNLLKLSLSIREFSATIEMYKQISKDRVLPEACDAVVDINGALSCKPAEIIQMIDNAKKEKPATYKIDHYYPASEENEPVAILYGELGTPSFKDFHKMLRQAAMDGSTAYILRHYTKPQNEAPKKTRLAGYGVELDIKSTEYKAQDDTKVEGEETAEDEDEDEEEDVEGFIFSKLKSLHPERKDDLAKLKSHLIESNLQMAPLKVWQLQDLSFQAAQTVLSSPKEEALTMLRSISQNFPTVARSLVRTQVPAQLKNEVKENQQSFENYHGIMPGDSAMFLNGLSLDLEVVDIFTIQDVLRDELYTMEGLWALGLRGDDFSAVLRQDLKQESMEYAIDIRHEAIHWLNDIEKDSQYRDFRTGVHEMLRPTMPGMIRNVRKNFYNIVFLLDPSEARSKDLMLLAETFYVHKAPTRIGLVLVVNTDPTVKGRNNAGVAALEAFNWISKNKNVHEGLTFLNELHASTDAGSNIEVKDIVKLLLTKYNLEDMDPIFGDDSEYDYNREFGMKFLEGTGLAHTPQALMNGLVIDENSMDKDSFEDAMLAKMMAATPEIQRAIYMGELVDSDNVVEFLMTRDHVLPRINKYILKTEGKYLDFSGSADEAARTDAIAFSSLSTRDMTVTMSEIQNYMTRKGDPFLRSVTIWVVGDLERAKGRELLAAAIKHMRTSNDIRLGVVHNPKKKGKAPSMLVRSIEAALATLSHQHCKLFINKLLKEENAAQVITGKMAPSELEVGGMDTAMFQSYLESMSDDFINIHQTFSTQVLGFTPGDIGVIVNGKVVGPLSVGEKFLEGDFALLETHTYKASASKIRSKVKYMKSVEENGDEIGSDLIMKISAICLQKEQTRTRQTVRHTGSEHSTLEIAAADAGAPAFDVVAIVDPASRAAQPLSHLLLVLQSALNANVHVLMNCRAMLSEMPVRSFFRYVLDAEPGFTASGERARGPLARFTELPHNVLLTLNMKVPESWLVASVRARHDLDNIRLEDTEAGVTGEYELEYLLLEGHCYDKTTSQPPRGLQFTLGTKANPVLFDTIVMANLGYFQLKAKPGAWMLRLRDGRSSDIYTISDHYGTDSPRNSSDVITLMDSFKSKIIKVRVQKQAGKENEDLLKEEGDDDSASIWSSISNTLSGEKKKEEEKDQTLNIFSIASGHLYERFLRLMVLSVMKHTNSNVKFWFLKNYLSPQFKESISYMANEYGFEYELVTYKWPRWLHQQTEKQRKIWGYKILFLDVLFPLNVKKIIFVDADQIVRADLQDLADLDLGGAPYGYTPFCDSRRDMDGFRFWKSGYWASHLGHRRYHISALYVIDLKRFRKIAAGDRLRGQYQGLSQDPNSLSNLDQDLPNNMIHQVAIKSLPQEWLWCETWCDDSSKKYAKTIDLCNNPKTKEPKLDSAKRIVPEWTEYDNEIATLLEKFHEEQGSSSKVNAILDEKSTASKQKPVHVHTDL

SEQ ID NO: 4087 - protein, 1639 aa, Triticum urartu
MATTGGSRSGVSWAAFALLAVVLVGCLGGGVSVAEIRRQKNVQVALRAKWAGTPLLLEASELLSKEWKDYFWDFIGHWKELDKGSECLTAKCCAQKIVEDVRSFLSEPLASIFEFSLTLRSASPRLVLYRQLAEESLSSVPVKDDALEQISGSGAVEGTCCWVDTGNTLFFNSDDLHKWLEGSGEGATDSTGQPELFDFDHVYPRSNITAPVAIFYGAVGTKCFKELHVHLAEASKQLIVLITGSSSSTCFLCHHITLYVFFCFSNFAALAGKVRYALRPVLPSGCQATSSFCGSIGAADAVTLSGYGVELALKNMEYKAMDDTAIKKGVALEDPKTEDLSQEVRGFIFSKILERKPELNAEIMSFRDYLLSSTVSDTLEVWELKDLGHQTAQRILHASDPLQSMQEINQNFPSVVSSLSRMKVDDSIKDEIIANQRMVPPGKSLMALNGALINIEDLDLYLLMDMVREELSLADQFIRLKLPQSAARKILSAAPPAESNSFRVDFRSSHVHYLNNLEEDALYKRWRSNLNELLMPVYPGQMRYIRKNLFHAVYVFDPASACGAEASLFLTFSLKNDGSKSDEDTSTLIMRLFLYIKETYSTQLAFQFLSDIHRLRNGGDDYSEEPVEVHHVEEAFVDSLLSGAKSHPQDVLLKLQKENLYKQDAEENSRFVHKLGLYKLQCCLLMNGLVHDPNENVSLTAVNSLVLRKLHKNAEAIVVANVVPFYYSYILKDATMNAMNDELPRIQEQVYYGHIQSHTDVLEKFLSESSYKRYNPSITGKSTEKKRFVSLFASYHQEDSVLHDISYLHSHGSGDDVKPVTHLLAIDLSSVTGTKLLHEAIRYLMDGSNRARIGLLLYARSDSISTILLMKDIIDRTISSFSGKEKVLDFLYGLCKYYEGQHMVASSAAGDTLSSIKDKVYSLAAETALPVDDYKAWLTSFSADTILEGIDKLSDFLFGQLGLEFGSNAVITNGRIFVVDDGDSFLNDDLGLLESMEYELRTKYIHEIIEEVEWGGVDPDYLTSKFYSDITMLVSSSMSIRERPSERAHFEILNAEYSAIKLNSMNSSVHIDAVIDPLSPAGQKLSPLLRILSRQIQPSMRIVLNPISSLADLPLKNYYRFVLPSMDDFSSTDFSVHGPKAFFSNMPLSKTLTMNIDVPEPWLVEPVVAIHDLDNILLENLGDVRTLQAVYELEALLLTGHCMEKDREPPRGLQFILGTKQRPHLVDTLVMSNLGYWQMKVSPGVWYLQLAPGRSADLYELPSKLIAIDSLRGKLLHIEVQKKKGKEHEDLLNADDDNHVQEKTDNKGWNTNLLKWASSFISGDASLKKKAEKNTVSISSSNVAAANPSYTSYTILLLEEYHTERYERFLKIMILSVLKKTQRPVKFWFIKNYLSPQFKKEKQRIIWAYKILFLDVIFPLSLRKVIFVDADQIVRTDMGELYDMDLKGRPLAYTPFCDNNKEMDGYRFWKQVSYQLSTNHTTAVDPIIHGSALYVVDLAKFRQTAAGDNLRVVYETLSKDPNSLSNLDQDLPNYAQHTVPIFSLPQEWLWCESWCGNATKARAKTIDLCNNPMTKEPKLQGAKRIVPEWVDFDAEARHFTARILGENVEEIAEATPPSSESDAPKPDHEDSSQDSKDEL

SEQ ID NO: 4088 - protein, 1500 aa, Neurospora crassa
MIRLSQLPWGLAAAIVTATWLPSHHVAASPSVDVALKAAFPSPPYLVELLETAASENATAYFPLLDRIAKGDFAQAKSDKELYEKFLQVLQEDGHVNAEALSTFKLALSLRSAAPRVEAHYQYYTTAVEPYVVADEDGCDLWFLFNGKQYCKASLQASSDHVNSNSRERTLPFDRQFGSGHQEIVLYADITSPAFGKYHEAAMELARKGEASYRLRYKRSLGQSDDALAVNGYGVELTLKRTDYIVIDDRDTGGDKATGDDSQKTIRSDSELVLDEDEEVADIKPLEKSELSPLAVKAASFVMQNESPFDTLLKLTQDFPKYSTKLGKHNVSKEFLAEHEYNRQLLVPPGANVLWMNGVQMVDRQVQPFGLVDMLRRERKLINGALDLGLTGQQAVSLLGHDEVAAAKATEEEPRRFDWRDEPEGGQVIIWLNNIEKDKRYAEYSPSVWALIQHFGQGLPQVRKNLFNLVVPVDFSRAEDVTLVTRQLLAFMKRGIPVRFGLVPLTPTGEAVEQAKVLYHLLNTYGLAAMSTYLEKSLEASSTDKPNEDIFSLATKDREIRPDHEALPFKHISASEELEKQVHRAKHWCERLRADTDIPPAFINGFAIPREEDWLRNMNHKLMVDLQMLQQAVYYNKVNDHTNVPAFFLENAIARRNTFIYPEDANAVKVLNVNKVYSEHQRLFSKVPVVEADDTAPKEDWAVLTVVTDLNSVEGQKLLYFALRFRQEHQGVRLDIVHNPADLANSPSIMNQRVKAKESSLLEVTRLVDLETILEEGKPEADPDFDADLASFLSGFNLKSGDNMLILNGRIVGPIASANDFLKEDFAEFLRTERMNRILPVYKAIEDLGLTDKVSGPLAAAKLTSVTALSGISDTPQGIFDSAPPIRTTAYNRLNTTYTSFHVGNPETATIFFVAVINPASEMGQKWAPILKVLSELEGVHLQVFVNPQTELSELPVKRFYRYVLESAPSFDESGKVKALSATFNGVPPETLLVAGMDVPPAWLVASKVSVDDLDNLRLKDIKAKRNTEHVEAIYELENILIEGHSREFPSGSPPRGVQLVLATEKHPHFADTIIMANLGYFQFKANPGMYSIHLMEGRSSDIFTLDSVGAQGWSPVPGDETTEVALLSFQGATLYPRLTRKPGMEREDVLQDETTPQDESLVSKGLKFAEGLFGSKKPTEKSVSETEHAEINIFSVASGHLYERMLSIMILSVMEHTDHSVKFWFIEQFLSPSFKSFLPHLAAEYGFKYEMVAYKWPHWLRHQSEKQREIWGYKILFLDVLFPLSLDKVIFVDADQVVRTDMYDLVSLDLEGAPYGFTPMCDSRTEMEGFRFWKTGYWANYLRGQPYHISALYVVDLRRFRELAAGDRLRQQYHTLSADPNSLANLDQDLPNHMQFQIPIKSLPQEWLWCETWCSDETLTKARTIDLCNNPMTKEPKLERARRQVPEWTVYDEEVAALAKRVREQEEKKAGEVLEGKKVEEQVIVEEKHEEKEHVIDEL

SEQ ID NO: 4089 - protein, 1478 aa, Exophiala aquamarina
MHPLNLPWRVLVTAPLALSVFSTLSQCGPSVNVALKASFSSAPYLVELLETAALENSSSYFPLLDRIADGAFADLTSEQELYNKFIDILQQGGHLADPESLSSFKFALALHAAAPRVEAHFQYYNTSIQPHLPAAQDAACPVWVYLDGQQYCSPALDRSQQSVDLPNVDDELPFDRVLGQSSENPSSILYADITHPLFGQFHQVVSQTARDGKTSYRVRYRPSTSLESKPLYVSGYGVELVLKRTDYIVVDDRDAQKSDSKDPGQQSLETAEEEELTDLKPLTASEVANLALNAASFIAASTNPLDTLLQISSDFPRYSSLLAASNASKEFVTEHRANREQFLPSGYNVLWINGVQIEPRQINAYSLLDHLRRERKIIASVKDIGLTSSQAISLLSSEVIAEAQANETPQRFDWRDQTESGTEKVLMWLNDLEVDKRYAQWPSNLHSLFQRVYPGQLPQLARDIHNLIVPIDMNDLKDIELAATSLQSLVRRLVPLRIALVPVGTGEVADTYGKLSYYILDTYGLAILMNFFSDVVSAKKLSLSAAEKSFVAVTKERNPREGSEPLSFEDVLKSEHFRRRLDARDSYTERLAIEGPSIPFMINGVVLPRTDNWFELMSARLYADLQLLQQAVYQDVILEDSSVPEFFLVEATPRRNQLVFPHDPKDVKIADVSSLAVTYAEDFANLPRILGWEATLLSDRVHLLLSIDLNSADGLALLSEAIALQHQRPHTDVVILHNPVLESTPSEVACHIFSMVEDGRRDVHIEKLWDLLGGEQPLPTLADDAIHACKKYWAGKRDLLHDIGFSPGENGLWVNGRIIGPLSMTFTSVDMEALLDFERTERIAPVTTAITSLGLEQQFTDALNLAKVTSLIARSLKSDLPEGMRESAPLIRMDRFKRWNSTHTAINIANSEDPSVQVVAVVDPASELVQQWIPIIQTLSQLSGVNVKIFLNPKDRLTELPVKRFLRHVISAEPAFDSNGSLSNTGAFFKGIPKDTLFNLGMIVPPSWLVAPQDSIHDLDNIKLSSLAEGQNVDAIYELEHILIEGHARDVTSGPPPRGVQLLLGTEDEPHFTDTIVMANLGYFQFKANPGYWHISLKPGRSSKIFNIDSVGQNGYSAHPGDETTSVALLSFQGVTLFPRLSRKPGMEEEDVLEAASGAMDYFSKGASFASSALSSLGLTKATSTNAEVNIFSVASGHLYERMLNIMMVSVMKHTKHTVKFWFIEQFLSPSFKATLPHLAEHYGFEYEMVTYKWPHWLRGQKEKQREIWGYKILFLDVLFPLDLDKVIFVDADQIVRTDMMELNKVDLKGAPYGFTPMCDSRTEMEGFRFWKQGYWETYLRGKPYHISALYVVDLKRFRQVAAGDRLRQQYQALSSDPNSLSNLDQDLPNHMQHNLPIHSLPQEWLWCETWCSDESLGKAKTIDLCNNPQTKEPKLDRARRQVPEWTIYDEEIAAVIRDAQVETARGSEVPERKRDEL

SEQ ID NO: 4090 - protein, 998 aa, Saccoglossus kowalevskii
TFIVDPTSLISGELLQQADSFHINNAPTKIGIVFVVNDEKVIDGRNDVGVAIMRAYNFAKSDRGAGRALTFLTRIYKKAGTDEVTVDHVIEQLNKVFPGEDIDDILGEDSDYDDKRMAGKAFFDRTGLGELPQVLLNGVPMKKDEMDPNAFEEAVLTDILQQTTDFQKSVWQGDITDQTDLLDYLMSRPNVMPRLNPRILTPDIKHIDLSSPTGDTDANVYEAFSQLKPGEMSATVANSMKYMTKRDDYSVRPVTNWIVCDLETEQGRLLLRDGIKQMKNSNKVRVGILNNPFREPSDGSHWLARAVNAALQSQTKNNAKNFIVKLLKEENIVEINDGKKTVQDLAVSGMDLAAFNQLFDNKSTGFVKSHQRFCQYILGVVPGGRAIVSNGKLFGPLKQDEEFGLEDFNLLEKYVSGVAAENIQYKMRSLNISRDEIDGLSDLVMKVDALLTANPQTEERKAYDFKASEHSFYRYVLEPEVGFRPDGSFTAGPIAKFNDLPHDILLTLNMMTPEGWLVESVRSPYDLDNIKLSEVESYVYGHFELEYLLLEGHCIDLTTGQPPRGMQFTLGTNNQPVTVDTIVMANLGYFQLKANPGAWLLRLRQGRSADIYEIANHDGTETLTDSDDVVAVMDSFKSKILRIKVQKKPEKMEEDLLVSDDDDEDEDGGIWHSISSSFSSFTGRGGEDNKDSKKKKKSDEDKDQTLNIFSLASGHLYERFLRIMMLTVLKNTKSPVKFWFLKNYLSPTFKEFIPHMATEYGFEYELVQYKWPRWLHQQTEKQRIIWGYKILFLDVLFPLDVQKIIFVDADQIVRTDLQDLADFDLGGAPYGYTPFCDSRKEMNGFRFWRSGYWASHLSGRKYHISALYVVDLKKFRRIAAGDRLRGQYQGLSQDPNSLSNLDQDLPNNMIHQVAIKTLPQEWLWCETWCSDEELKTAKTIDLCNNPLTKEPKLTAAMRIIPEWTDYDNEIKALQDRIANSSVKTKTESSKTKDIHVEL

SEQ ID NO: 4091 - protein, 1489 aa, Rosellinia necatrix
MTIRLLNLPCGLAAALLAAVCIGPSHVTASHSVHVAMKAAFPAPPYLIELLETAAGENATAYFPLLDRIAEGIFVESTTDKALYERFLDVLQQDGHISSSQALSTFKLALSIRTAAPRVEAHYQYYDTAVTPSLAEAKSECEEWVLLNQKQYCSATMANSDGRVTGESQIRMLPFDRSLGSGAEAILYADITKPGFIPFHKALAEMARKGEISYRLRYRNSRRGQLQALPVSGYGVELQLKRTDYIVIDDREAAESSADQPRKTPSAEVVLDGEEEVTDLKPLATSELASLGLNAGSFIMDSEDPFQALIKLTQDFPKFSSSLAARNASDAFIAEHDRNRETAGPSGLNALWMNGVQLTERQIDPYTLVDSIRRERIFIKGAMDLGLTTKEAISLLGDREVTMAKTDDEGPRFDWRDELEDGRVIIWLNNIEKDKRYASFSPSLSTLMQMSYMGQIPQVRRDMFNLVVPVDLGSPEDVSLVVERLQGLVKRALPLRFGLVPLTPTKTAEERAKLVYYLTENYGLPALISFLEPFSAGDQATQSEQKSFEKAIKNRKPKEDAAELSFHDIIASDNYEDQLQLSKRWVERLQANTQVPPVFLNGFAIPRETGWLQTMSMKLSADLQQLQSGLFMGTVTDDTWLPSLFLEGALTRRNPYTYPDGDNPLKVLNVHRVYSEHDDLFSKIPVIDADIDTEKDKWAVITLVADLSSPSGLQLLRSTLAFRRNNPGIRVDIVHNPRSTVNSHEVNSILVDNADKLLDTKNMETLELIASGSASTSDDGYGLALTRFLAFSGLALGSQALLVNGRIIGPIDTEFVFHEDDLQQLFEFEQSKRILPVYQAAENLGLAGKISSPIAAAKLTSITALSTISDLPEGIFESTSIIRTAIFDLWGSSHTAFDVGNPETADIHFVALLNPSSELGQRWAPILKVLSELNGVFLRIFLNPNDRLGELPVKRFYRYILQSEPSFDDNGALHSQGATFKGLPSEALLNLGMDIPPAWLVAAKESVHDLDNLKLSSIKSDVEAIYELEHILIEGHSRQTPGGSPPRGVQLLLGTERDPHFADTIIMANIGYFQFKANPGYYNIHLQEGRSSDIFDIISVGAKGYEAVPGDDGTEVALMDFQGTTLYPRLNRKEGMETADVLEEPNVDDGSDLLSRGLKFAEGILGGSKSKSKSLSAEIHAEINIFSVASGHLYERMLNIMMVSVMKNTKHTVKFWFIEQFLSPSFKEFIPYLAEEYGFKYEMVTYKWPHWLRSQKEKQREIWGYKILFLDVLFPLSLDKVIFVDADQIVRTDMIDLINYDLEGAPYGFTPMCDSRTEMEGFRFWKQGYWKNYLRGLPYHISALYVVDLRRFRQLAAGDRLRQQYHQLSSDPNSLSNLDQDLPNHMQFVIPIHSLPQEWLWCETWCSDESQKEARTIDLCNNPQTKEPKLDRARRQVPEWTVYDDEIAAVDRHRRGTNGSQKAPGGEETNTKSRRFEEGDVHTRTKDEL

SEQ ID NO: 4092 - protein, 1600 aa, Hypsibius dujardini
MQLLFLLSLLTALFSPLARTDPAPPPVKLKPVTAALYTRWAQTPLLVEASEFFFDESPTLFWSFLSRVQAHLKARTQGPWTDEQQHDLAVEISQTLLSPVKQNFLGLALALRFYSARVQMYRQIVETENITRVCADVLVDFGDGMHACGLEEVKAAWTLTSDLENPEKIKKPQLISVDHHYPGSRDAKRTVIVYGNILRPEFWAVHELLVAHTDQVRYIFRHYADSRDLVNVSKIRIPGYGVEMAIKSTEYKAQDDSKIKEGDGALDEQTDEVVDEELDTDIEGFDFGKLKSRLPEKKDQLEQLKSFLLLSSGTELQQLKAWQYQDLSLQAAEKSLRVASLHGGSSTDALRTLRDISQNFPTQAPTLLKIPVREDVKAEIERNREFFAHYHSIEAGGAALFVNGIQHDTDVTDIYVLFEKLREENRLMESLHGFGIQGPDMTSILELDLHPTGGAKYGIDIRHPAVHFVNDLEKDKRYAEWPTSVRELVRQSFPPTLLKAIRRNFYNLILVVDPAEMKANHDILQLTESFYVHKLPIRVGLVFITTDSTDSTGLTDPSIAMYNAYRYMQEKKTPQAALSFLTDVYYSKEAKEKGSLTPEIVIDAFKAKFPQETLEEVFGAGSQYEEGRNDGRKFLEKLNINQTPTALLNGVLLDGSRLNADEFENEVLQNLVAVYGSLQRDVMSGSLTDYSDVVEFLMSKPHIVPRLNSLILAPSEYRILDFSGQSLDPERYTFANFEALKSADKVATMASASFYLTKHEEGDAHPVTLWIVTDPETAAGRELLYAAVKHSKASNDVRIGIIYNPSESSLAGDLRISKAIQVALETQPMNLARNFITKLLKEENVAEIAVGTKTLQDFEVNGMDMVAFNSGLEQVSTDFLKIHSSFAQHELNLKPGETGAVANGYVVGPLQKDFGADDIDLLEKYIESYGAVKLSNELHRLHIFPSGEKLSDVVMMTSALLSGLGSTEDAKKRTKVLYSENENSIINIESRNPQQPAFDISFIVDPVSKEAQKIIPVLMVLHEALNCRIRVLMNCRDKLSELPLKSFYRMVLEPRLTFTDNGSISPNFAVARFPALPQTALLTMNLLPPDNWLTEATSAVHDLDNIRLEEVDGWGVYGGFELMNLLLEGSAKDQSNEQPPRGTQFILGTSSNPNIVDTIVMANLGYFQFKANPGSWTIKLREGRSRDIYAIASSDGAEKDGTDEEQLRVVLGSFSTKMMKIYVKKRIGMEKEDVLSDPKAAGVEKIAGTGILDSISNYWSPEEKKALEASGSDDVINIFSLASGHLYERFLRLMMLSVVKNTKTPVKFWFLKNYLSPQFKEFIPFMAARYNFQFELVEYKWPRWLHHQSEKQRVIWGYKILFLDVLFPLSVKKIIFVDADQIVRTDMKELRDLDLEGAPYGYTPFCESRKEMEGFRFWKNGYWASHLGHRRYHISALYVVDLVRFRKIAAGDRLRAQYQGLSQDPNSLSNLDQDLPNNMIYQVPIKSLPQEWLWCETWCDDASKVDAKTIDLCNNPLTKEPKLTAAMRIIPEWKAYDEEVRRLQDEFQADKKRLSGGGQGAEPRLSGAGQGAEPMQPVLEDDSENDVFVHSRPAAHGGEL

SEQ ID NO: 4093 - protein, 1346 aa, Metarhizium acridum
MEPLKELQDCDIWVLLDDRQYCTPDFDAEAKNELVSAVVKPLPFDRILGIGRDAILYADPTSDGFAEYHQSLSKAARTMNLRYRLRYRRSKSHISRPLPVSGYGVELALKKTDYIVMDDRHSSQSTEQSPKEPVEVLDGTDDVADLKPLSTSELSSIGMKAASFIKDSDHPFDTLVKLTQDFPKFASSIASRNVSIAFAAENKQNRAKKMRGGINFLWMNGAQLTDREIQPFALVNMLRSERRLVDGIRDLGFDGEQAVALLSHKAVSAAKEDDKPFRYDWTDKLEGGRVILWLNDLEKDDRYASYPKSLSSLLQGTFPGQFPPIGRNIFNLVIPADLSNTEDLDFISEVESIRERGIPIRFGLVPLQLSDEAKTRAKVAYFLTENYGIESTISYISQLAKAHQKIADSKTLLSTITENHTLLPGGEDMSLSMILQASAFTKRLLQAEKWVKRLKADTVVRPLFVNGVLVPRDQSWMQSLSMTVSQDLQTVQRGIYHGVLDDDTWTVGVFLEGAASRRSLYISEANEKTLRVLNIAKIYRENADLFDAVPVFDSYAESTQENWAVVTVLADMSSRAGLDVILSALEFRRNNPAIRLDFVDTQDNAKMSSQVNKALKANEAKLKDIETVQDLEELLSEASNYDASDDFAVSVARFLADTKIPTSSQVVIMNGRVIGPIAPEASFDAEDFQQILAYEQTRRILPVYAAVADLGLNEKISDSMAAAKLSSIIALSTLSDLPEGIFESSSPIRSAIYASWNSSHTVIESGDPKKSSIHIVGLLDPVNETSQRWAYILRLLAELDGVYVKLFLNPKVQVEELPVKRFYRYVVEPTPKFDENGSVKALTATFSGLPLNALMTVGMDVPPAWLVAPKLSVHDLDNIQLSAANSDVEATYELQHILIEGHSRDDQGSAPRGAQLVLATESQPLLTDTIVMANLGFFQFKANPGVYNIQLKEGRSAEIFTIESIGAQGWEAAPDDEGSELALMDFQGTTLYPRLKRRPGMENQDVLEHTSNLSQGNIVSKGLKFAEGLLGGKGKSTSDVQHAEINIFSVASGHLYERMLNIMMVSVMRNTKHSVKFWFIEQFLSPSFKEFIPHLAKEYGFKYEMITYKWPHWLRQQKEKQREIWGYKILFLDVLFPLSLDKVIFVDADQVVRTDMMDLVNLDLNGAPYGFTPMCDSRTEMEGFRFWKQGYWANYLRGKPYHISALYVVDLRRFRELAAGDRLRQQYHALSADPASLSNLDQDLPNHMQFQIPIHSLPQDWLWCETWCSDESLAKARTIDLCNNPQTKEPKLDRARRQVPEWTIYDQEIAALDLKRKRRLQSDATETYRTTSEDGEVGDHRSKDEL

SEQ ID NO: 4094 - protein, 1201 aa, Trichomonas vaginalis
MNIHFALMFFSILFSFSISQEIEKQLDVSMTAKWEKTKLIAESLCFFGEFKKDQYQCAVNQINSLEKFSDSIEENIQSFKPCLSESDQKFLQFNLQYHVFSPRIAFYSTIKDNFTTETFDFEPNHKNIKYIDFNSPVKLPENTIIRPITKLNPDKNPQILNGYGVELRPFKYSMEYGVKDPSQLQKGSLSILNDESYEYIKKFEESEEVTFDNLVYKHLESYIMNSEDPLKELKEVVENWPIAMKKVYQSKIDENSQEEEISESVMTLNGRVIPFETFDPFTFSSQIFEIQKIQKILTEKFGLTPKKANILMETETRKSNLVIDVRGDHIIWLNNLETDKRYSKYSRKIDSLFGKLTEPPKVRHNLVNMVLFIDPSSSKDMKLLLEVHKLLEKGYAMRVGLSPLHRNNNENQIKALYDIFTNYNPFKYVSLLVKGDSIKSAYEKTTKKEYSEDFSEESEEYISLIDSFCEASNINETAIWTNGDLYTGNDLEDKISISPLETLQILRNLLMENEISGDYLSFILRKRHAVKRLIPEISKIRPISTKISQEKIEKIEEFIQFSKSINYQKRDEEKSLVTCWLKIYNNKASIEEKIDEFFKSRHQSSVRLSFVSEFPSLVEQEILNKNNDAVLFLNGRIFYFNESFEYFDDLFSWQSLLSSQLSETIEDEDLLMFWSSYLLSLNEREIEIKHFHPNEFNPDEKFALNIDGELKSLEVKCVIDPFTKNGQKIIGFLCHFSDLSFGRISLHICPSTRDLKIPKSYYRYVTDERALLSSFNNSMIYSILLETPETWMVEQNRVDCDVDNVLGSDLQNGYRYQFEYVLSYLVVEGFSYDLQNNPSENVQIKSFESDTTVMSNNGYFQLKTTFPTILDISLFSDFSKGNFEIMSGNKIVFDSFNWRHFSVRIQRKTSKIQRFPYVDDGKIHVFGVCSGRLYERLMKIMILSVKQNSQNSTTKFWLLKNYLSPKFRSELQKMSLEIGFEYELVSYHWPHFITRQEEKQRVIWGNKILFLDVLFPASLHKVIYIDADQVVRTNMRELMTMDLHNNPYGFTPMCDSRKETEPFRFWHQGYWKEHLQGKKYHISALFVTDLQRFREMKAGELLRDYYNSLVLDDQSLANLDQDLPNYAQERIGIYSLNQEWLWCETWCSDETMDKAKTIDLCNNPLTKAPKLKIAKERIKEWPGLDKLASTFEEKQEKNDEL

SEQ ID NO: 4095 - protein, 1877 aa, Asbolus verrucosus
MKQFSDLPSPENQSDSGSTKNSFNISSSSEDNRSFQLRNAYRSKSLSNISPDNYTPREIHRIKERLLRTNSRLERSTFRSFTRKQKMTLTSLALVDFVSFCSMSIMAPFFPREAAEKGLSDTLSGFVTLEYVTNYTWFTTFCIVIRGFEALGASAFSTASYVFVVNTFPQNIGSVLGILETFVGLGMSTGPALGGVLYSFNLTPEKIGLIFLLFSGLYGVSSPAWGWLADKINNHWSMMVVGLFMCTTGLLLLGPCPYIPFLSSTLWLNLVALSILGISVALALLPTFQGLLSSAISSGCGDTLSTYSVVAGIWSCVYSLGEVIGPSLGGFLLQHYGFPITSTIMATMTFCLAVLTFFFFIIKNNYCNDQDCASDSGISESWRSSSSEDVSTETTPLIMSTMDASYKMYTEEKLQYYGKSRKHDTENGEIDSNQVTDIRGTVTITARGSCEQSSAVKCDHFVDFQDAVSDFNTGCVGVFTVYVRRELSYEKVKISAERNLPNCPVIADVGGTLTCDATALKQLIENYDKNGDKRIDLFNMDTHYPGSENRTKVVVLYGELGSKEFASFHNILKQEAEEGTIDYVLRHYVQNESNKKLRLSGYGVELQMKSTEYKVQDDTQLHDDPTSEESSQEEEEVEIEGFDFKKLKTLFPDLKKDLDKFRQHLEESSNEMAPLKVWQFQELSLQAAERIMSAPKDEALKVFTNIAQNFPMQAKGLVKTVVNPDLKKEMKLNSDIFASTLNLQPSDTALFINGMFYDVDLVDVYSILDVLRQELRAMEGLHKIGIENNRLASLLALDFSESGSGQEFAIDIRDSAINWVNDIENDSKYSRWSSSVMELLRPTFPGMIRQVRKNLFNLVLIIDPTEPKSRDLVKLLESFVVHTAPLRVGIVFAVDSSTELTGLADAGVAMQCAFNYLSQKKNPLAALSFVKTVLGSADEEVKVENVKDELKKQFGDDYLDVLGEDSDYDFGRQLAIDFIQRTGQRVLPQALLNGIPLPSSSLNVDDFEEAVLQEVMSQTSSLQKAVYRGKLSDGDDVLEYLMNQPNVMPRLNERVLNKDQSLYLDMTGTATSTMDPEALAKLSARDMTATAIDNLKYFYVPKKGKQLHTMTYWITGDLKYLESRQLLLAALQHAKSENHVRVTFLPNVDGSVRNMINKLVLTALNEMPAEKALDYVLSLLREDKAAVDLESGGRVKFPPEFAGKVNLQELNLKMLRVYSRRVLNLKGGERAVVANGRVLGPIENGETFTTEDFALLERFSSATYLDKINKALEKDSEEAEEISSNSFLKIVSLVVSRPQTRTRFEISSSGDEYSVLKIPAAHQDKVAFDLVAVVDPVSRGAQKLGPILQVLQDVLNVNIKVFLNSVEKNSDMPVKSFYRFVLEPEIQFTEEGKQTAGPIARFNNMPTSPLLTQNYHVPENWLVEVVRSVYDLDNIRLEDVDSNVHSEYELEYLLLEGHCFEATTGSPPRGLQITLGTESEPVKVDTIVMANLGYFQLKANPGAWILRLRQGRSAEIYDIVNHDGSDTPANSSDIKVLISSLRSHIVKLRVQKKPDKYNMDLLSEDEPNSGIWNSITSSFTKTEEEGEEKLNIFSLASGHLYERFLRIMMVSVLKHTKTPVKFWFLKNYLSPQIKDFLPYMAKEYGFEYELVQYKWPRWLHQQTEKQRIIWGYKILFLDVLFPLDVKKIIFVDADQVVRADLKELQELDLGGSPYGYTPFCESRREMDGFRFWKHGYWRNHLQGRKYHISALYVVDLKRFRRIAAGDRLRGQYQALSQDPNSLSNLDQDLPNNMIHQVSIKSLPQDWLWCETWCDDESKAKAKTIDLCNNPMTKEAKLTAAMRILPEWKGYDEEIRELQKKIDSGLLDADPAESVDIT

SEQ ID NO: 4096 - protein, 340 aa, Lingula anatina
MASAGNDRLKKHSHTLRVGIVHNPRSPSTKLYRGSQIPLAIHTALGSQVPHIARSFVTKLLKEDNIHAILEGTESLSDLEVHGMVMEVYLKALDVQTMAFLQFHSAFCTQVLGFEPGAQGVIVNGRIIGPLKDQKTFIEDDYNLLEKYTQKSSAEKIVQMLTGFTEDTKRVSDMVMQVGSLLMSNQQASIASRTDVQFAGDQHSVLKIPAKPEEPAYDVTFIVDPVSREAQKVTPLLRDLPNNMIHQVNIKSLPQEWMWCETWCSDDEKSKAKTIDLCNNLQTKEPKLNAAKRKVAEWEEYDNEERRIFENFTSNKPTLGSLSADHIEAQETSTQPRDEL

SEQ ID NO: 4097 - protein, 1694 aa, Rhodotorula taiwanensis
MRLAGLLVLVLTGAASSAEAYRSPPVVTSIEASWPAADLVTQYFETLSLEAPKLLFPVIDFIVSFPHSHRALKHLKLHPATVATADRYAAQGINPIFAAEREVRGNDTLAMIEASLIRSQLVVRKPGLFDSLRLSLANREASVRIEGTRRIWEDRVAELEGGERVATAGRSMTPAEENPLGEVNAARTCESWIDVAGRVACTVQEFWSIVGEEQRQGFDPLILPPVISAVSPLGFYELDHISPGGPNQHLPRVVLYASPVSGAFPELFTFLYQLSWPRGETVRNVETGKTTRRPRPHPPRLQFALRWKPSAAAQAAPRKLVLSGYGAALDIKKSDYLAIDDRLAGGTAAAAGAASAKGDLPLLEIEGEAPLKMEAVRKADVADLAVRTAQFVLSAEDPFDAFVDITSDFPRLAAHLPKLVPHPDPHLIGEVSTNQMRSPLTRRPAFFLNGKLLAEDEVEPFALLRLMRQERQIITDLLGLDVYMTGAMARHILIAGGPKEPVVSRDRIDAELLGDLYDSTDRHEGGKVILWWNDLEKDRRYKSWSKSVRELLRPSYPGSMTQVARNLNNLVFIIDLSDPASIAHITNNIRQYVSRGIPIRFGVVPIVGPFGDTSMRTLMAQMLWYLSDKAGRSVTMSFLDQVAQATQGARISEDLLQRAYSQLRAQTEDVDGDELVPFERVRAYETGQRSRTVPGRLASTRNYLERLGIAEEAETERSGAVFLNGAHFPLNEDFAQNLQRTLGLHTQFLAQEVYMHSLTDDDEVTTYFAELPRTHKRRNPHIVPSDDNHPLKIVNLLHALEGATTSWLEEGFFEGTSGKMNQTTGNEIEAPPAPASLFVVADLDTPIGAELARNGLRLADSTTKVRVVLLHNPADSTIETHPWSLSRVYWHLIETKAVFDTLPKELAQWIDLELTKEGPSSTAGRDWNAENPLKKLLPSGVAGRDAGEAALYWDLLQLTRYRFGFEAGQSGLVLNGRVVGPFAAEYFTLFDLRTLLNLELEKRVEPLVAAVNSSGLALEGLLRAQISRIYMIANSVVGAAHLPDQATGMFATSTGERRRDYLQLHGNHTAIPAKFANSALYEIAVIVDPASPIAQRWAPILRTLNKMNSTTVSVYLNPTLHLTEVPIKRFYRFSFEHAISFDVAGAEAQPEIRFDAIPPDVLVTYAADVQRSWLAFPRSGLHDLDNIKLADLAPQHAQRGIEAILELEALTVEGHAREVPSSRPPRGLQLELFRPVSSRDDDTSASIVMANLGYFQLKANPGRWHLDLRRGRSSEVYEIDSVGAEGWKSRVIEQTGQTFSVSTLEGKTLYPRFRRRPGHEQTELLDDADAPASRTPSVVASLWDRLKTMLPFVAPASTDLVVSGKRADINVFTVASGHLYERMAFLMIVSVLRHTKSTVKFWFIQNFLSPSFKAFIPHMAREYGFDYELVTYKWPHWLRGQTEKQRTIWGYKILFLDVLFPLELDRVIFVDSDQIVRADLKELVDLDLQGAPYAYAPMGGYDGEKPEMEGFRFWKTGYWAKHLQGRPYHISALYVVDLDRFRQIAAGDLLRQQYQALSADPGSLANLDQDLPNNMTPNLPIYTLPKEWLWCETWCSDEALATAKTIDLCNNPLTHEPKLQRAKRLIPEWTEYDDEVAALAKRVAEAQGSGESAAFGARADELEQAVQQQEERDAFVGEVVTGEQVSPDHVKDEL

SEQ ID NO: 4098 - protein, 1708 aa, Rhodotorula graminis
MLLGGLVGLLLAASSACSSASPPVTARIETAWPAPDLVTQYLETVELEAPGALFPLIAFLASHPHSTKFLRDPLPPLSQHRAQRFANAGTNPVFAPEGTLTPADTFALLEASTTRSVLVRDKGVRDGIRLALANRETTVLLEGMRRVWEERESEVGAALAADEGAPARAERVRDDDDDEAAPSCESWIDVRGERACSEDEFWDLVGPEQKDKSTPIQLPDHLDSHPRPRLYPFDHVTPRVAALPRFVLYGSPTSPSFPRLFTFLFSLSNPKSPLQSNPKAQPPSALTGAPSPTVAPPARSYSPRLQLVLRWKPSTKAQLEQKKLVLGGYGAALDIKKSDYLVIDDRLTGASSSSGAKPAHEVLGIDGGAAAKMEAVKKADVAELSVRTAQFILGSDDPFSAFVDLTSAFPRLASHLPALVPDPSPHLMSEVSTNQMSSRLAMRPHFFLNGIALSDADADPFALLRLMRKERKILADLAALSPHLSGSDVRDLLINGGPKAKASGGMRDRIDADVLGELYDATDRDEGSQVILWWNDLEKDRRYQSWPTSVRDLLRPSYPGSMSQVAKNLNNVVFLVDLSQLVSLALITENVKQFVSRGIPIRFGVVPLVSPLGAEDAIETHLAQLLWYLTDVVGRGPAMSFLASLQKAANGRRVTVELARRKYEQVAGRLPPIDGGELASYDEVQKGVGRYKASASHSRLNKARQYLRRLGVALPNSLEEEDDDELAQPGSFFMNGAYFPLDDDFGQNLQRTLALHTQFLQQEIYLQSLTDSTDAKSFFANLPTTHKRRNPFVFPSDSNPLKVVNLAKAFDGVDRTFTHGSYIEGASGDLNETTGYDIEGPPAVATMLVVTDLDTPTGAQLAKAALQLADQSTKIRVSFLHNPPSFDDVPHAYALSNTLWALHKNKKLDEILPGELISWIDLSISSEGPEGGAGLSWQPENPLKELLKTKGVDKERAFDALLWWEELQWLVAKLGFGPGENGVILNGRVVGPFPDGIFGLPDLRTLLAHELEKRIEPVVAAFNSTVFDLMHASRSTISQAYNLATSIIGFAHLPDPAQGMFGGGPVERTRSYNALLSDHSSVIGNLSRGALFEVAVVVDPATELAQRWAPVIKTLAGLNTTHVRLYLNPSLHVTEVPIKRFYEYVFEPEPRFDSTSGNEIEPSIRFDNVPEDVLVTFGVDAQKSWFAFPKTSVHDLDNIRLADLPEWSKAEGVEAVLELEALVVEAHARELPSSRPPRGLQLELKSGVESSPHEQRVDTTVMANLGYAQWKAAPGVWRLGIRPGKGADVYELESTGADGWKSGNVATTGDSFVVSTLEGLTLYPRFYRKPGQELTELLDESAASGTAGKRESGGVVERIKSMLPFFGGSSGKDLVSTGKGAEINVFTVASGLLYERMAFLMCVSVMRHTESSVKFWFIENFLSPSFKAFLPHVAAEYGFSYELVTYKWPHWLRGQKEKQRTIWGYKILFLDVLFPLELERVIFVDSDQIVRADLKELVDLDLDGAPYAYAPMGDDREEMEGFRFWKTGYWEKHLQGRPYHISALYVVDLDRFRQIAAGDRLRQQYQALSADPNSLANLDQDLPNQSWRDIPIYTLPQEWLWCETWCSDESLAKAKTIDLCNNPATHEPKLQRARRLLPEWSEYDDEVAALAKRVLANDSSSSSSSAAAFQAHAHELEQAVQQEQERESFVEEQAQAVPAASERVKDEL

SEQ ID NO: 4099 - protein, 1603 aa, Capsella rubella
MGTNLRSWLYLILLFFVVVGVNAQNRRPKNVQVAVKAKWQGTPLLLEAGELISKESKQLFWEFTDAWLGSDGDDTGDSDCKSARDCLLKISKQASTLLAQPVASLFHFSLTLRSASPRLVLYRQLADESLSSFPHGDDPSATDCCWVDTGSSLFYDVADLQSWLASSPAAGDAVQGPELFDFDHVHFDSRAGSPVAVLYGAVGTDCFRKFHLSLAKAAREGKVTYVVRPVLPLGCEGKTRPCGAIGARDNVSLAGYGVELALKNMEYKAMDDSAIKKGITLEDPRTEDLSQDVRGFIFSKILDRKPELRSEVMAFRDYLLSSTVSDTLDVWELKDLGHQTAQRIVHASDPLQSMQEINQNFPSVVSSLSRMKLNESIKDEILSNQRMVPPGKALLALNGALLNIEDMDLYMLMDLAHQELSLANHFSKLKIPDGAIRKLLLTTPLPEPDSYRVDFRSVHVNYLNNLEEDDMYKRWRSNINEILMPAFPGQLRYIRKNLFHAVYVIDPATACGLESIGTLRSLYENQLPVRFGVILYSTQLIKTIEENGGQIPSSNSQVIRLFLYIEEHHGIQTAFQFLGNVNRLRTESADSSEEDIIEQDYVDGAFVETILPKVKSPPQDILLKLQQEHTLKEASEASSMFVFKLGLAKLKCSFLMNGLVFDSIEEETLLNAMNDELPKIQEQVYYGQIESRTNVLDKLLSESGLSRYNPQIISGGKNKPRFVSLASSTRKGESMLNDLNYLHSPETSDEVKYVTHLLAVDVATKKGIKLLHEGVRYLIGGSKSARLGVLFSSSQNADSNSLLFIKFFEKTASSFSHKEKVLYFLDKLCSFYEREYLFKTSVDSASSQIFIDKVLELAEEYGLSSKAYRSCTAESLNEELLKRLAKVAKFLSWELGLESDANAIISNGRVIFPVDERTFLGQDLHLLESMEFNQRVKPVQEIIEGIEWQDVDPDLLTSKYFSDVFMFVSSAMATRDRSSESARFEVLSSEYSAVLLGNENATIHIDAVIDPLSPTGQKLASLLQVLQKHVQTSMRIVLNPMSSLVDIPLKNYYRYVLPNMDDYSSTDFDVDGPKAFFANMPLSKTLTMNLDVPEPWLVEPVIAIHDLDNILLENLGDTTTLQAVFEVESLVLTGHCAEKDHEAPRGLQLILGTKNRPHLVDTLVMANLGYWQMKVSPGVWYLQLAPGRSSELYVLQEGSDGSQDRSSLKRITIDDLRGKVVHLEVVKRKGKEHEKLLVPSDGDDGVQQKHERRSWNSNFLKWASGFVGGRQQSMKGTSEKEHEKGGRQGKTINIFSIASGHLYERFLKIMILSVLKNTNRPVKFWFIKNYLSPQFKDVIPHMAQEYNFEYELITYKWPSWLHKQKEKQRIIWAYKILFLDVIFPLSLEKVIFVDADQIIRTDMGELYDMDIKGRPLAYTPFCDNNREMDGYRFWRQGFWKEHLRGRPYHISALYVVDLVTFRETAAGDNLRVFYETLSKDPNSLSNLDQDLPNYAQHTVPIFSLPQEWLWCESWCGNATKSKARTIDLCNNPMTKEPKLQGARRIVTEWPDLDLEARKFTAKILGEDMELNEPPVAAATDKPNPPPSNEVEDSEQDLESKDEL

SEQ ID NO: 4100 - protein, 1614 aa, Apiotrichum porosum
MPAGFQLCPLLPAKSARLETPHSAWPVTCFATLSIAISTLSTAAPTPKSTIMWLAGAVLTALAGTSAVSASLSPPFSVTVETSWAAPPLLLEILEVAHDEDPSAYFPLLKLLTKHSLTLGPSPTPQKVLETALDVVHSHDILPKPGSRSTFELALALHTAAPRIAAAYADYTVDEAKLDVAGCASWVEWRGKGFCDAEQLQRDVERSIDERGRAPDPRTPSRPFDRVSHSPLGDGPQAVLYYSPSPEALPLLEYLDTHARAYPAFQYVVRYRPFPADESSDAPRAPRTPLAGYSVEMALKNTDYLVVDDRITAGGDGAQTAFKDSKDASRSNPFSEILGEDPWSESAIPLAKEEILDLGLKAVALIKAADKPLDAFIELSQDLPKYSAALARHVEVPEDIRKTSQRLAVRHPLGPAAFLNGRVLKDTEMNAFGLLKAVRRERDIMTSLLAIGYTPKQAFQLVSDELIGHAETEHDPLEGLVDVSDRIEGGGVITYVNDIEKDRQYARWSPYMQEYLRQIYPGQLHLVRKNTWNTVLVVDLATARGIEAIASTAGSMLQRNVPIRFGVVPLFGHVNEDSGQIARLVLYISGKWGAMKTREFLNIIHASVPKGSSPMIRVHPQVMQGAYERVARGEGLTFEEVMESPELATQLEVTLKYLNRIGASRDDSPLGSVYVNGKYAAFSGTWTQHLTGTLSQHLNHIQEMVASGVDFEEGDGEVATYFYDLPTTAKHRNRHIVPTEESTLRIFNLMDIFPDNTEYIDTEFMYPDAEDAGTPLTTWIVGDLDSDDGRSLVLDAVKHIQGPEASSRLGFIHVPSPESSNVQGYRLSTLLFQFYESGAFSLVKPDQFQSILEEIETKGNVIDGGDISAQSNTDPLNVLTADGWNVADAARAAEFWKLGTAVADSLGLQSTKPHILMNGRLVGPLTADEFSEVDFDTLEVYELRKRVHPVINLVQTFWEDPKELSRDTVAGIVSLTSSVIAWAYQATGAEGIFIQAPGPRSRGYEQIDDGEVSFTIGDSSTALFHVAAIIDPLSELAQRWTPLLKLLANIDHVAVTVYLDPNTKATDFNVKRFYRSAVPSTLHFDVDGYEVAPAVTFSDLPSTPIFTLALDTPGSWVVRPKDSPLDLDNLLLGRLYEPTHVQFDLYQLVLDGHGREGGNVPPRGLQLQLKDGDDVVSDTQVMANLGYFQFKATPGVYNLAIRPGRGEEVYDVESVGGDGWDSPTVNITGPSVTVDALDGTTIYPRFARQPGMENADVLAESVVPESFSSSVLSRMKSMVGLNEVKPKSRHADINIFTVASGLLYERFASIMILSVMKHTDSTVKFWFIENFLSPTFIKFIPHLAEEYGFEYELVTYKWPSWLRAQTEKQRIIWAYKILFLDVLFPMDLDKVIFVDADQIVRVDMKELVDVDLHGHVYGYPPMGNDRVEMEGFRFWKTGYWKEELRGLPYHISALYVVDLKRFRQLATGDRLRGQYQALSADPNSLANLDQDLPNSMQRQIPIFTLDQDWLWCQTWCSDESLATAKTIDLCQNPLTKEPKLVRARQIPEWDVYDREIAAFAATLGSGESGALAANVDDLAAGPGSAAAKHQEKEAALEPEPHADADIEGAPHDEL

SEQ ID NO: 4101 - protein, 1564 aa, Rhizoctonia solani
MRSLSALGTLGVAASLAAAESTFSPPVKVSLTTAWAAPPLLLEILETAAAEHPGRYFEILDALTDRSSAGLLGPITEPVHKPQYVYNTALTLLQSRGFLTEPNALSAFEKNMALHSATPKIQAFYQLFGDPSKAPGCESWVEWSGKQACTPEEADKLLTEAPTDVHIQTFPFDHIQKFADRECKHPAIFHAALSSQNFYDLHMYLSSKSENPEFCYVLRYTPPKDATIAGEHSRNTLSGYGVALDLKKMDYLALDDRGLHGKGDASDETTEESAKWEDYQEISSLPLRATHLVMSSEDPLKALSHLSQNFPKHAVSVARRWDTGRTDELKAKHESVEAEVQANLHMVSGAGNMVWLNGVALPEADINPFSLLRLLRREHQTVGSLMKANLTSEQAIHVLTNPAIGKASTTSGPTDGVFDASDREEGGGAIVWLNDIEKDQRYARWPTSLTVLFRPLYPGQFPTVRRNCFNVIAALDLSRTSSISFIVQLANNLISRMLPFRFGYVPLIETAESRQVARLMKWMMDEYGLEKASQYFSVVLTPEDTVNFTVLEGAYLQFTTQMPPPSGIVPDFSSFTADPLQIQMVGHEFVPDEGLQPAAAYAKRLRLGAQDGAGKGHVFINGKYLAYDDNFLRHLQTEMGAQVNFIQEQLYAGALADAPETDVSIFMYDLPTTAKRRNKFIYPSGNTKIYALDNLFDSAGATKQLKDSFIYPTGENPTPLTIWVVGDMDNDETLTLAIEGLRGMSDGAKYRFGFVHTPSVDPSDVPSTQQPLVSPMLARLAATGNYAEFPPSELAQILEEAKQLVVNAAELNIQDNPTLLNLNNRLTGITNEGVDLEELKRTNAAGNALAKAIGLKSGERAIVINGRVIGPLAGSDFVAEDFGSLVNYEAAKRVTPVEVALTSVREDLAELDRPAYADLVARVSSIISSVSVPDPSEEGLFQSKSLARQRSYNELTGKDCTFEIGDNSTALFHIGLLLDPLSESAQKWTSIIEWLATVPQTHIHVRLNPATALTEMPLKRFYRYNIQPRLTFDQDGFETRKPVEFHGLPVEPIYTLAMDVNPAWLVRPYISEADLDNIHLASLSDPKAGVEAIFHLDHLVIEGHAREDNNAPPRGVQLQLTSLDGTPTADTQVVANLGYFQFRTGPGAFRLEIRPGRGRDVYTIESAGNEGWNSGHVNVTGTEITLTSFEGHTIYPRLSRKPGMESVDVLAEPEKEESLWDRVSSLWGSKPTEAVPESKQADINIFTVASGLLYERFVSIMILSVMRNTKSTVKLWLIENFLSPSFLEFIPHLAEKYGFQYELVTYKWPSWLRAQKEKQRVIWGYKILFLDVLFPMDLKKVIFVDADQIVRTDLKELVDLDLQGAPYGYTPMGDDNEAMEGFRFWKQGYWKDALRGKPYHISALYVVDLVQFRKMAAGDRLRGQYQGLSADPNSLANLDQDLPNNMQDQVPIFSLDKDWLWCETWCDSARFDRAKTIDLCQNPLTKEPKLARARQIPEWTSYDNEIAEFARSLADSGKLRSRAISGSVDALASVGKKVTSTNEESSAPTPDEETTEMPREHEEL

SEQ ID NO: 4102 - protein, 1440 aa, Candida orthopsilosis
MIPWQWITKLSFTICIFSILGSADSARSLTIDVKAPWKKVDFVSNFIESIAGFNSSLYVPTLEGIFGLGESDEVEGRSDRDIYEHLLNQLQLEPTTIDFINFNLVNKKYSARVASHYAHYEMVIEQFGERLKKACAHDSFGNVVETKNGLVPAWVLYNDKIYCSVNDLFALQTDKSNQETFLFDRIIGHNDESPLLAFYGDPTVDQTKGFLKVLYEEARNGKLRFVWRYIPSFSKQLDSLPGYAVELPFRDAEYSPQFRKDLNKDFDLIKGSTAISKVGEDVNDLGIKLTSFILSNRVKSTKFELLQTLVNNLPKFYFYLNKLPQSANYKKVKSKVVGNEQMGLSKESFGIYINGSPIHPLELDVYKLADKIKEELSMIQDLIKHGFNSVQAKLLLSKFGLLSAVKQAQFRTGNTLMGNNENRFKVFQHAFNRKDSSKGGVVFINDIESDSNYGEYSTDRQEVYLGVESRKLKPNQIPPLKENIHDLIFALNLASKKQLKAFFKFSKIILDSGIPQQIGIVPIIGEDPLDEQLATRLYHITGLSDQKEALALLYKYMESSGPDEVHDLLEKVNIPSGFVVDFDTVLNKFSIESPSVIVNGVIHDLFASNWQIAMSKQIEQDNALIKSQLRSGDMNGSLKDILYNNAKSERNLRIHPLDPSEIIYKRIDHDLMRSSIAFKKIDKELENHATIWLVSDFSNSKMVDQLINLLNLMRRRSIQIRVVNVGNSEMFSKLVEKRRLNALTNAEINGIISSLKESELSTGLDEEILHVLEEKHLPVRHSYLLVNSRYIRLDPVILSVDELSQLIEYELSQRLRLMNEVALTYVDEFPQALYEYNSVVSGIDDMDWFDLVSSIITKSFHVDDKTFINDVNRFDFGSLDMSNSIDYEKYDESKLVDVLVIIDPLEKKPQKLINILDAVKDFSFVNVRVLLQPKLEYKREELNERFYQGVFPPSVPQFEDSGYWNDKYLANVVSLPLAIYSINMDVPKRWVVIAKSSPSDVDIGSFKSNKSPISLSFELSNLLIEGNARDIHTGKAPKNLQLQISNGTHSDDTLVMTALNYFQLKALPGVHLLSVESNHSLLSASDNKFDPNVAEIDAVPVSMFSLDGVALQIRTTSRKEKVDQKTKHADINIFTIAGGHEYEKLVGIMIASVKKHNPRKSIKFWILNNYISPQFRALVPLLVKKFDIEIELVTYKWPNFLRKQSSKQREIWAYKILFLDVLFPQDLDRVIFIDADQICRTDLGELVNMDLEGAPYGFTPMCESNKETEGFRFWMSGYWSEVLQDDLKYHISALYVVDLPKFKSIEAGNRLRAHYQKLSSDPNSLSNLDQDLPNNMQRQIKIKSLPQEWLWCETWCSSDTFNEAKMIDLCNNPLTKENKIDTAKRLIPEWVEYEKEVLALIDQTDDILKEEEEEKKDLTIDDNLHGDEVTDDDDFYHDEL

SEQ ID NO: 4103 - protein, 1490 aa, Monilinia fructigena
MGGFRLPWGLSGALLASTYLHSICVTAGPSINVGLQTSFPSAPYLLELLETAATENVSSYFPLLDRIADGYFAKASTDKDLYEKFIQVLKEDGHMNAEALSSYQLALSMRVAAPRIEAQFQYYHTAAEASIKTEKDSSCPTWVLFNGHQYCSPTLDEPHGTVTGDSQIQELPFDYVLGNPTGPHSVLYADITSSTFGQFHKTLVKTAREGKTSYRLRHRRAIDAGSKKPLIIPGYGVELALKRTDYIVIDDRNDEDASKSTTETEVKFEDEEVADLKPLSTSELSSLGLKASSFVMQSEKPFDSLIKLSQDFPKHSSAIASHEISSDFLAEHNYNRGQLVPAGYNVWWVNGVQMIERQIDAITMLDILRKERKLINGVRDLGLTGPEAVQLLSHSNISEAKSVGDVQRFDWRDEIEGGSVIMWLNDIEKDKRYADFPAALGALLQRTYPGQLPSVRKEIFNLVIPVDFSTLEDISLVAETLANFVKRKLVLHIGLVPITTSPAATEQAKVLYHLLDVYGLSGAIAYLEASVVNGVANPTEKVFEAAIEGRAIRAEKVATSLKDLLKSDHYNDRIDASSRWTRRLSADGEFPPIFVDGVALPRDENWVQTMVQRLTADLQIIQQGVFNEIFKQDSYIPDFFLSEATARRNALIVPESDKNLKIIDVTSLSNQHGDILSRLPKIGADLASSKENWAHMVLIADLSSVSGLDLLLSAVKFQESAPSLEITIAHNPSTEKEISDFSTQLFSHIQKSSDKPFVAAQDFPDLASPETLELDHATKGSAQAYWKTAGPLIRTVGLLPGENAILLNGRLVGPIPTGSELNQDDFEQLISYERAKRIAPVYAAMKALDLSDKITDPLASAKISSVVALSSVSDTPEGIFEQAPTNRISAFDIWNSSYTSIKVGDSSTATIHMTVVIDPASEQGQKWVPIVKVISELEGVYVKLFLNPKERLQELPVKRFYRYVLESKPNFDGEGALVAPGASFTGVPQEALLTVKLDIPPAWLVAPKVSIQDPDNIKLSSIKSDVDALYELEHILIEGHSREMPSGSPPRGAQLILGTEKDPHFADTIIMSNLGYFQFKANPGLYKIDLKNGRSSEIFKIDSIGSKGWSPVAGDESTEVVLMSFQGTTLYPRLSRKPGMDAEDVLEAKADSAMDYVSRGLHFAQGILGSKTKAAAVEEQAEINIFSVASGHLYERMLNIMMVSVMKNTKHTVKFWFIEQFLSPSFKDFIPHLAAEYGFKYEMVTYKWPHWLRGQKEKQREIWGYKILFLDVLFPLSLDKVIFVDADQIVRTDMIELVNHDLQGAPYGFTPMCDSRTEMEGFRFWKQGYWAKFLRGLPYHISALYVVDLRRFRQIAAGDRLRQQYQSLSADPNSLSNLDQDLPNHMQQVLPIHSLPQEWLWCETWCSDESLKEARTIDLCNNPQTKEPKLDRARRQVPEWTVYDNEIAAVDRKRKGTNENLNGNESGGTKNTKSRTLEEVLDTKTKKDEL

SEQ ID NO: 4104 - protein, 1514 aa, Ooceraea biroi
MGRLIFFYTFLLCSTQLGADKKINKYVTTLINAKWNETPLVLEAAEYLSDENPNYFWKFIDAFSRRINNLVIATEKENYDIILELAKMYLSESEMAVFKLGLSLRIYSARVEMFSQMAVNKNVSTHECNNVVDVGGTYTCSLEEIDTLLEQDTWKTADTYDVDHRYLTTPESEKVIILYGQIGTPTFAKFHDKLKSIAETKGINYVLRHYVKDRVDKKLRLSGYGVELQMKSTEYKATDDSDIKDNAGKNSEVANDGVEEIEGINFMTLKKLYPEQHAELDKIQTHLLETSHEIGAFKVWQFQELSHQAAERIMKSPSAESLNVLTDISQNFPMQAKSLIRTKVNGDMKKEMKLNQEIFMASLSIQPTDTALFINGLFFDLEAIDVLTLLESLRSELRVMEAFHKIGISNKKMGKLLALDLSSGTDNQNFAIDIRDSAINWINDIENDSRYSRWSPSLTELLRPTFPGMLRNIRRNLYNLVLIIDPLNEESMSLVTLAQSLYAHSAPLRVGFVFVMNHNTSLTGLTDARVAVNNAYHYFVDTRSAKEALHFLAELGNYIGPDGADVEDIKKVIKSKDSSANVNYILGDESEYDVGRHLANDFIKRCGLKKFPQALLNGVPLTPGQINSESYEEAVLSAIMSQTPMLQKAVYRGEVTEGDDIVDFLMNQPNVMSRLNERIWKVDKNAWLNLIGTIPENEDYTKWSSQDLSSYLMTKMHYFFVPRRSNTLHQYSFWIVADFNSLLGRQLLREALEYVESNSDVRISVIVNAEERANPKSDVNKIVLAALAALSPERAILYMRKIIKDDAAALIANGNFEIEDEVAALLENQSSILSLHQHYVKTVLNVDKEARVILCNGRIIGPLDSDEEFTDDDFSLLERFSQKTYGDKLFLKLVIFNDDDYEESEITDDMIMKITSLLAPRPQTRSRYDVPFHGDDHSVIKIPAANPDEVAFNFIAIADPVSRGAQKLGSILKTLQQALNCNIKVFLNCLDKNSDMPLKSFYRFVLEPELQFTAEGDISGSIAKFTKLPTSSLLTQYIHAPENWLVEVVRSVYDLDNIKLDNVAMGVHSEFELEYLLLEGHCFEAVMGNPPRGLQFTLGTENQPVMVDTIVMANLGYFQLKANPGEWILRLRQGRSAEIYDFTTVDGQDIIQNGNDVKVLISSLRSHVLKVKVSKKPDKAGMDLLSDNEKDSGLWNSISSIAKFWTFTATDESEEQDEKLNIFSLASGHLYERFLKIMMLSVIKHTKTPVKFWFLKNYLSPTLKDFLPHMAEEYGFEYELVQYKWPRWLHQQTEKQRTIWGYKILFLDVLFPLNVKKIIFVDADQVVRADLKELATMDLGGAPYAYTPFCDSRAEMDGFRFWKQGYWRNHLQGRAYHISALYVVDLKRFRRIAAGDRLRGQYQALSQDPNSLANLDQDLPNNMIHQVAVKTLPQEWLWCETWCDDASKQYAKTIDLCNNPMTKEAKLQAAMRILPEWVGYDEEIKALQQKVENANRQTERDSETVDDVSKHEEL

SEQ ID NO: 4105 - protein, 1490 aa, Tribolium castaneum
MRWRGVVFVSVTTLLEAKWETTPLVLEVVEYLRDESSDFFWSFVNSISSLNPPLATLENDRVKYNIMMDHASKLVTTSELSVLKLGLSLHIYSPKVQMFRQIATERELPSCAAAVDIGGIITCDSSKVQSLIANYNEQKKVDIFNVDTHYPGSENRSKVAILYAELGTKEFADFHNVLKQEAEEGNIDYVVRHYVQTPADKKLRLSGFGVELQMKSTEYKVQDDAELHDDPSSEESSQEEEEIEIEGFNFKKLKTLFPDHKKDLDKLRQHLEESSNEMAPLKVWQFQELSLQAAERIMSAPKDEALKVFTNIAQNFPMQAKGLVKTVVNPELKKEMKLNSDIFASTLNLQPSDTALFINGMFYDVDLVDIYGILDVLRQELRTMEGLQKIGVGNKRLSSLLALDFSDGSSGQEFAIDIRDSAVNWINDIETEAKYSRWSSSVMDLLRPTFPGMIRQVRKNLFNLILIIDPTEPKSRDLVKLLESFVVHTAPLRVGIVFAVDASTKLTGLQDAGVAMQCAFNYVVQKKSPLAALSFVKTVLGSASEEVKVDDVKKELKAQFGDDYLDILGEDSDYDFGRQLSIDFIQRTGQRVLPQALLNGIPLPSSSLNIDDFEEAVLQEVMSQTSLLQKAVYRGKLSDTDDVVEYLMTQPNVMPRLNERILNKDQSLYLDMTGTATTSMNVEDLAKLSPRDMTATAIDNFKYFFSPKKGKQEHTMTYWVVGDLKYLEARQLLLAALEHAKSENHVRVTFIPNVDSSMKNMISKLVLTALSELSPEKALDYVLTLLRDDKAAEELEHGGHIKFPPELSGQVNNHELNLKMLRVYSRRVLNLNAGERALVANGRLLGPFEVDESFTVQDFGLLERFSSATYLEKIQKAIEKSADEEEELSSNSLLKVISLLVSRPQSRTRFEIQFTGDEHSVLKIPASQSDKVAFDIVAVVDPVSRGAQKLGPILQVLQEVLNVNIRVFLNSVEKNSDMPVKSFYRFVLEPEIQFTEDGKQTAGPIARFNNMPTSPLLTQNYHVPENWLVEVVRSVYDLDNIRLEDVDSNVHSEYELEYLLLEGHCFEATTGSPPRGLQITLGTERQPVIVDTIVMANLGYFQLKANPGAWILRLRQGRSAEIYDIVSHDGSDTPANSSDIKVLISTLRSHIVKLRVQKKPDKFNMDLLSEDEPNSGIWNSITSSFSKNEEEPDDKLNIFSVASGHLYERFLRIMMLSVLKHTKTPVKFWFLKNYLSPQIKDFLPYMAKEYGFEYELVQYKWPRWLHQQTEKQRIIWGYKILFLDVLFPLDVKKIIFVDADQVVRADLKELQELDLGGAPYGYTPFCDSRKEMDGFRFWKLGYWRNHLQGRKYHISALYVVDLKRFRRIAAGDRLRGQYQALSQDPNSLSNLDQDLPNNMIHQVGIKSLPQEWLWCETWCDDESKARAKTIDLCNNPMTKEAKLTAAMRILPEWKGYDEEIRQLQKKIDSGVLDPDPENHIPDTTDKHIEL

SEQ ID NO: 4106 - protein, 1495 aa, Ophiocordyceps australis
MARCRFARLAWALCHACLQATVASPAVNVDMKAAFSAPPYLLELLETAASENETAYFPLVDCIASGRFATARSDAQLYTAFLDVFDTQGYISSPEALATFDLALSLRATAPRIEAHYQYYSTAVEAAVSKLSCQNDWVWLDGKQYCSSSSLDEGIRDGLFSTKVKELPFDRTLGAGPDAILYADMTSNSFAPLHTTLSRAARQLGLRYRIRYRHSTLDKAEPLTVSGYGVDISLKRTDYIVIDDRAAEKDGLQKPLASAAFLDDNSQAADIRPLSTSELALLGMKTASFILESENRLETLIKLTKDFPKYSFSIVAHNVSADFAAEYEQHRADIGRGGINFVWINGLQLAERQIEAFALVQLLRRERKLMDSVRDIGLHGKQAVSLLGHRAIVASKSNKDPLRYDWTDRSEFSKAIIWLNNIEEDARYQEYPTSLNAFLQYTHPGQLPAIRRNVFHIVIPADLTESQDLAFVNDIMSLMTRGIPIRFGLVPLTLSANAMARAQVLYHLAASYDTAALATYIKKLSHHEGPESEEKLVNHVMAYEQLLPGAQKSCMEDVIRSESYLQQTEMARKWVDRLNADGKIRSLLVNGIPLPLEGEWMHMMGAIITQDLQTIQKGIFQGIIDEETDIAATFLQDAVKRRNAYVSLDDDKALDVLDVSKMYHEHADLLAMIPVLGSCSNSSKDTWAVLTVFADVTNVHGMKLVTAALDFKRSNPGLHVEIVHNPKDDKASSRVNSALKSAERLLPSIDSVEALSKIIDMADGLQDLDGYWTMLSRLHESTNVSPGASVVMLNGRLVGPLAANVTLTPDDLQQLFEFEHSRRILPVFTAMDSLGLSDKLSSPHAAAKITSMVARSTMSDIPEGIFDSAPSIRSTPYDSWNSTHSAIEIGDAETASIHIVGLLDPASDKGQRWAPIFAVLSELKGVYVKLILNPQETLTELPIKSFYRHVMESKPSFDQDGNVMQLRATFRNLPSEALLTTAIHVPPAWLVAPSKSVHDLDNIKLSTARADIDATYKLEHILIQGHSREDQGVPPRGAQLVLATEKNPLITDTIIMANLGFFQFKANPGFYKIELKQGRSAQIYTFESTGAHGWEAVAGDQGNELVLMDFQGATLYPRLKRRAGMQDEDVLEPATKPSGDSLLSRGLELASHVFNSASSPRVLSVEAHADINIFTVASGHLYERMLNIMMVSVMRNTKRSVKFWFIEQFLSPSFKDFIPYLANEYGFKYEMVTYKWPHWLRQQKEKQREIWGYKILFLDVLFPLSLDKVIFVDADQVVRTDMMDLIKLDLEGAPYGFTPMCDSRTEMEGFRFWKQGYWASYLRGRPYHISALYVVDLRRFRELAAGDRLRQQYHALSADPNSLSNLDQDLPNHMQFQIPIHSLPQDWLWCETWCSDESLASARTIDLCNNPQTKEPKLDRARRQVPEWTIYDDEIAALDATRRQQPQNRAGLKQEQVQVQIHMQNSHGEGSHHVNTMSRNWDELKLGQSHTIDEL

SEQ ID NO: 4107 - protein, 1542 aa, Zootermopsis nevadensis
MINIYRKLNERGCSTKMQFLVLVLLVHVLYGATGGASRKKTKSVTTLIEAKWEITPLLLEISEYLGEENADFLWEFVDGVSALHPPITDLESDRAQYDNALDIADHLITPAQISLLKLALSLHIYSPKVEMYSQMAVGRGVSNISCPTVADVAGKLTCHVEEMKKLITQKQGDDLGHAETFGVDHHYPGSQNNSLTVVLYGELGTREFAEFHQVLKTYAVKGAIDYVLRHYVKERPNRRVRLSGYGVELQIKSTEYKVQDDTEVKGDKAQDSDEQDDDDDDEIEGFNFSRLKHLYPDMKEKLDKLRLHLLESSNEMAPLKVWQVQELSLQAAERIMSSPKEEALKVLTNIAQNFPLQARSLVRTVVKEELKQEIKRNQELFSSSLNLQPTDTALFVNGMFFDLDVVDMISLLEVVRQELRVMEGLHNVGISDSRMSSMLALDFSGSGSSSSPEYAIDIRDSAVMWVNDIEHDKQYRRWSDSLMELLRPTFPGMLRSVRRNLYNLVILANPAKKEARPLLKLAESFYVHVAPLRIGLVFAVDADQSVSGNVDAGVALLNAFNYISDVKDAYSGLAFITSVYATIKEDRDVTVEDVISLLSTKYRSADVNEIFGEDSEYDTGRRLARDFVEGSGFRKIPQALLNGIPISEKHLNAEDFEEAVLSEIMNQTPVFQKAVYKGEFTDGDNALDFVMNQPNVMPRLNDRILNQDKSHYLDVTGSPLAGDITLTVESFSNLSHRDMTATIISRGVQYFVKKQYADKAAKVPPHIITHWVVTDLGTAGGRQLLAHALDQMRSSGSPGHATQFVNKILLDDSLVKEINSGQKDPRDISIPGVDLTAISEVTEQDSIEILKVQQLYCRNVLNVPAGGRAIVTNGRIVGPLEETEKFILDDFSLLERYSMSSYGDKILQTLKRKTVDDDDDDDDFDDVPRNSDVLMQAVALLVSRPQSRSRFDIPVHTDIHSVIRLPPHNASEPAFNIAAIVDPVSRGSQKVGPILSVLQEVLNCHIKVYLNCVEKNSDMPLKSFYRFVLEPEIHFTSDGRQTSGPMARFANMPTSPLLTQNMQVPENWLVESVRSPYDLDNIRLEDVDSVVHSEFELEYLLLEGHCFETTMGNPPRGLQITLGTETQPVVVDTIVMANLGYFQLKANPGAWILRLRQGRSADIFEIVSHEGSDTPANSTDIKVLISSFRSHVLKLKVAKKPDKMHVDLLSDDTDPSSGIWSSITSTFGGSKTAEEDGDGRINIFSLASGHLYERFLRIMMLSVLKHTSTPVKFWFLKNYLSPTLKDFLPHMAKEYGFEYELVQYKWPRWLHQQTEKQRTIWGYKILFLDVLFPLDVKKIIFVDADQVVRADMKELRDLDLGGASYGYTPFCDSRTEMDGFRFWKQGYWRNHLQGRRYHISALYVVDLRRFRRIAAGDRLRGQYQALSQDPNSLSNLDQDLPNNMIHQVAIKSLPQEWLWCETWCDEASKQHAKTIDLCNNPLTKEAKLTAAMRIVSEWKDYDSEVKNLQNKLNRIETEKDGDLRSGKSAFQKTDDHERHSEL

SEQ ID NO: 4108 - protein, 1643 aa, Hevea brasiliensis
MEARSRSGFCVLIILLCVSFSGIVSVCGESRRPKNVQVAVRAKWEGTPVLLEAGELLSKEWKDLYWEFIEVWLRAEEDESDSHTARDCLKRIIKHGRSLLSDPLASLFEFSLILRSAAPRLVLYRQLAEDSLSSFPLSDDSISNNDSGEIAETSEENESKRADPLLVGVNPKSPGGKCCWVDTGGALFFDVAELLLWLHNPAKLAEDSFQQPELFDFDHIHFDSHTISPVAILYGALGTDCFRQFHVTLVEAARQGRIKYVVRPVLPSGCEEKVGNCGTVGAKDSLNLGGYGVELALKNMEYKAMDDSAIKKGVTLEDPRTEDLSQEVRGFIFSKILERKPELTSEIMAFRDYLLSSTVSDTLDVWELKDLGHQTAQRIVHASDPLQSMQEINQNFPSVVSSLSRMKLSDSVKDEITANQRMIPPGKSLMALNGALINIEDIDLYLLVDMVQQELLLADQFSKLKVPHSAIRKLLSTMSPPESNMLRVDFRSAHVHYLNNLEEDAMYKRWRSNINEILMPVFPGQLRYIRKNLFHAVYVLDPATSHGLECIDMIISLYENNFPMRFGLILYSSKFIKKIEDGGGDLHLSAVENDSQKEDTSSLIIRLFIYIKENYGIKTAFQFLGNINRLRMESAESVDDSPEMHHVEGAFVETVLPQATSPPQDILLKLEKEKTNNELSQESSMFVFKLGLYKLKSCLLMNGLVFDSSEEALMNAMNDELPRIQEQVYYGHINSRSDILDKFLSESSISRYNPQIIAEGKAKPRFVSLSSSVLEGESVINDISYLHSPNTIDDLKPVTQLLVVDITSIRGIKLLHEGILYLIRGSKAGRLGVIFSAKTDTDLPALLFMKAFEITVSSYSHKKNVLNFLEHLCSFYEQNYIFASSIAAESVAFTNKVYELAESNELSLKAYKSDLPEFSIDIMRKRLNKVVQFLYRQLGLEAGVNAVITNGRVTVLTNEGTFLSHDLNLLESLEFKQRIKHIAEIIEEVQWQDIDPDVLTSKFVSDIVMSVSSAMALRDRSSESARFEILSAEHSAVIIENENSTVHIDAVVDPLSPVGQKVASLLRVLRQYIQPSMRIVLNPMSSLVDLPLKNFYRYVVPTMDDFSSTDYAVNGPKAFFANMPMSKTLTMNLDVPEPWLVEPIIAVHDLDNILLENLGDTRTLQAVFELEALVLTGHCSEKDHDPPRGLQLILGTKNMPHLVDTIVMANLGYWQMKVSPGLWYLQLASGRSSELYVLKENGGGSLDNLLSKRITINDLRGKVVHLEVAKKKGMEHEKLLVSNDDDNHSQGKKKGTHNNWNSNLLKWAAGFIGGSGQAKKDENTSMEHGKGGRRGKPINIFSIASGHLYERFLKIMILSVLKNTNRPVKFWFIKNYLSPQFKDVIPRMAQEYGFEYELITYKWPSWLHKQKEKQRIIWAYKILFLDVIFPLSLEKVIFVDADQVVRADMGELYDMDIKGRPLAYTPFCDNNKDMDGYRFWRQGFWKEHLRGKPYHISALYVVDLVKFRETAAGDNLRVFYETLSKDPNSLSNLDQDLPNYAQHNVPIFSLPQEWLWCESWCGNATKSKAKTIDLCNNPMTKEPKLQGAKRIVSEWVDLDSEARQFTAKILGDEVSPQEPASPNASQNSATDSSSGEDEDRAEL

SEQ ID NO: 4109 - protein, 1466 aa, Syncephalastrum racemosum
MTRAFASIVFGLAVTLQYVGKPILAASASSTPVDVTLVAPWSAPDLLVEIAETVAGKNDTRYFDIVGRLATLTTKSTPQALYKTALDTLALTERELETAKLALSIHAAAPRVESHMQYFESHIQKDEQPCDIWIETAAGYTCDIDAMAATAPLNLLPFDRVLRTRVDAPTAILYTPNLSHPEFLRFHRYLSAQALEGQLAYIIRYAPSKSASPSPPLTLAGYGVELALKNTDYLVIDDREKEDQQEQDSTVKSKLAGLGKKISQTLFDTGAPATIEPLASKEIKDLGLKAAKFIRKSKKPLNTLVQLSQDFPKYAHRVSELHLDESDQNTFNSIIAQGENSMWINGLPLDSTEVEAFSLVRILRQEADRIAGYERLGLNSRQAIDVMTHPALAGDHTDESVKDIYDVRSELVEWWNDLEKDKRYKGWSSNIFEILKPVYPGQLRAIRRNIYSLVMVEDLTSLKSLERVATQIQAMIKHNTPIRFGILPLVSSSTESKGMALALHHILQNGGKADGMTFLNKVLEGTMAAKHEHTTMEIVEQSFQSVVQGLKSPREEDIESRSVKDLLPTGADYIASLVSFLNQFGIASPTMFMNGKLVEIEDDATWTRSIMAALQEQTQLIQRKVYFNEIEHDADFYQELLSASYVAKSRNPYIIESDQSPLRMVRMQDISYELLNGIRYFSNSEEAKYNVWIITDLNTAHGLELARNGLLFSETAGDARVAIFHCPDNMESNSVSPPAISNLLNTRSKTEDALNIIDKLLAAKEVGDDDTQIKISKSSDTEKSTDKPFLDGLESVGLERGFQGIIFNGRVIGPLNSAVVFSVHDFSNLAQYETDKRIEPVREALAAANVKDMTADKVMQVTAITNTPVGDEEINVPRAKKMLEHQVTGRERPYKDSNVDIQLGDKEKAYVEIGVFLDPVSETAQKWSAILETLSSLQGVYICIHLNPVSHLDEIPLKRFYRYVFDAEPHYDPTDGTAQTPTAYFSDLPVDALYTLGVDTIKSWHVTVKEANDVDLDNIVLKDGHVSAVYELERILIEGHCLDSVTLSPPRGLQFVLSNTTDTIVMANLGYFQLKSRPGLWELTLREGRSREIYTIDTLGTGNNEDDLLALTSFEGLTLYPEVRKKPGKEKEDVLVEMQQQKGHDEGILSSLKHKLFGDKSEEPKPAVAKQADINVFSVASGLLYERFMSIMIASVMENTNHTVKFWFIENFLSPSFKDFVPSLAQELGFDYEMVTYKWPSWLRAQKEKQRTIWGYKILFLDVLFPLDLEKVIFVDADQIVRTDLKELVDMDLHGAPYGYTPFCTDRTEMDGFRFWTQGYWKEHLRDKPYHISALYVIDLVRFRQLAAGDRLRAQYQQLSADPHSLANLDQDLPNNMQHIVPIYSLPQEWLWCETWCSDESLKSAKTIDLCNNPMTKEPKLDRARRQVPEWEVYDRRVAALRKGLPYAKAKELEKEHKTLHIVDEL

SEQ ID NO: 4110 - protein, 1288 aa, Oikopleura dioica
MVSFIPELDQKSDVEIYDTVNTLVNGMKFSKADIRMMNFALSLHIFSPRIEASRTKWLEGPADCAQVFFSSGGTSFCELKPEEIAEPAPVETDIVLIPGSKKIIFHGIVEAADFNDRLQAAKVFSARNNIGLSLRWQFSDDLCATPSLTGYGVELRLKSTEYKASDDSQDKSDDEDLVQKAAGFDFEILSKRFPDLQKEIKKFSRYVSDSSQEIQPMKKWQMGDLSYQAGLAAIEAFSKDGPEAGLESLQKISGNFPQMAMRLARTTVPSAFKSEVKKISESLSQSVGVRQGDSFFAINGMPVDLTSQWGDPFQLYETVKGELNVMEKLAGLGITGDLAQSVLQAPEPQGSSSEAVLKIPGDDEGLIWLNNIENDKKYAQFGQSLQEFLRPTFPGVIRRLRYNYLNLMIFVDPLSKDVHAIHDVIDTLSQNNLPVRVGVVLTGTSEKSLAASAVFHFLLKHNKEKNKSKMYTWNKWIALLTEKLDSASIKKLTGVDKDTITAEESEAYKNAFKMMNFGRAIGVGEDSSILINGAALKNLAFEDGMEEIVYQELLDAVPDIQRAIYYGTYRGETSFVEYFNSRGGVVTRFNQEILKAPVVNIDLTNIQYDGEYHGDGNICTFLVTTNSENSPVAQEALAYLKTSTSSRTAIIDCSQSSKICETLEKNAIYVNGRAYTKNTDNFTAADFALLETLAIQFGANKIAHLLKSFDDDVIMKTINVLSSQVEIKSRKTITFPVAKYSLIDFEPLRKDEASFDVVAVLDPASEDAQKMIPIISTLRKVVNMRLKIFLNCQENLSELPVKSFYRFVISDEFRESDKTHAVFTGLPHHSLLTAAVIPPESWMVAAVDAVHDLDNIKLVDQGDVHAVFELQHLLLEGQAFDVSNGSPPRGTQFELVKTGVALDTLVMANLGYFQFKASPGFWNLNLREGLSRDIYEIKEISSESGGEEQREIMMTSFTPKSLRVGVNKKSGMEDMDVLSKPDDRPQVNDEGSIWDRVGEAVGLKAKKVLAKEEVETINIFSLASGHMYERLMRIMMLSEITRVPRLENHFRIVSKEFGFEYEFVQYKWPRWLNSQKEKQRTMWGYKILFLDVLFPLSVDKIIFVDADQIIRADLKELVELDLEGNPYGYTPFCDDRKEMDGFRFWNGGYWKQHLAGRKYHISAIYVVDLKRFRQLAAGDRLRGQYQGLSQDPNSLANLDQDLPNNMIHQVGIKSLPQEWLWCATWCSDESKERAKTIDLCNNPLTKEPKLVAAARIVPEWTGYDDEIKQVLQGEKQTVKDNSNVKTEL

SEQ ID NO: 4111 - protein, 1536 aa, Sipha flava
MANYNDFDDGNDYIQSKYKHRNKTNCAKQSRKKSKRKSSNDSSNFFMIICLVLFVLLFTHKSENKNLKKGKYVTTMIDTKWNVVPLVLEIAEYMAEESQHTLWSFVDSISELNPALSELDNDQTKYQIAISKAELLLSNSKLRLLKFSLSMHIYSPRIEMYAQMAADRGVQCLTSVEIDGELVCSIEKLKNILKRIRAKGSKESCEIYHIDHHHPSSKNKSNSAILYGELGTAEFAAFHQILKQSAQDGYIDYVLRHFVKEKSEQKVRLSGYGVELHMKSTEYKAEDDSIVKDKNDININEVEEDISEIEGFDFKRLVELYPDKKQDLIKFRTHLSESSGELAPLKAWQFQELSLQAAQRIMSGPPQDAIQTFIHIAQNFPTQARSLANIKVSKELRDEVSKNQESFSMGLNLQTSDTVLLLNGMYFDIDITDMSTILDSVTEELSVMEGLFSLGITDKKAISSMLALDLGNIKGKSYAVDIRDSAIQWINDLETDTAYKRWPSSVDDLLRPTFPGMLRSIRRNLYNLVIVCDPASKSSWPLLKLTDSFLNHQSPLRVGIVFNVSPKPAIGLDNASVALLNAFNYIVEQTSKPLSAFNFITNIYTSISEDRDVNVEDVLHGFMKQYPKASIDDIFGEDSDYDTARILAKEYVTRTGFRKLPQVLLNGVPLQEKSLVEEDFEEAVLVELVSQTQTLQKAVYKRELTDGDNVVDWLMKQPNVMPRLNSRVLNTDSKKNLKLNNKHESIFKSMHYTTYTKQSSINPITHWIVGDFSKLSTFKLIKNTFEHLKSNSESRVSIIPNPSSNDEHVIKLNKIVFEAFKQKDKLNILVKHLSQAIEADKNHIEVISSLPEEINFDVSSIDIKSYSNYAIEILNFESGQCGVITNGRILGPFDENEDFLTDDFALLEQHTLKNSVNKILSILKDSDVEEITSDMIMKASALISSRSQTKNRHSIPDVSTKHSVIKLTAKNEDEPIFEINVIVDPVSRGAQKVGPIISVLSHVLNANINIYLNCVDKNSDMPVKSFYRFVLEPEVIFDKSGHLSPDPIAKFTNMPTSPLLTQILHVPDNWLVESVASPYDLDNIRLEDVEMGVYSRYELEYLLLEGHCYDSVNMNPPRGLQMTLGTKSNPVVVDTIVMANLGYFQMKANPGAWMLRLRQGPSADIYDIISHEGSDRSPNSMDIKVLISSFRSHIIKVKVAKKPGKQNLNVLGDDDAENKGLWNSITSSFSSGSPDKASDETINIFSVASGHLYERFLRIMMLSVLKNTKSPVKFWFLKNYLSPTLKDFLPIMAQEYKFQYELVEYKWPRWLHQQTEKQRVIWGYKILFLDVLFPLDVKKIIFVDADQVVRADMKELVDLDLGGAPYGYTPFCESRKEMDGFRFWKQGYWKTHLQGRRYHISALYVVDLKRFRKVAAGDRLRGQYQALSQDPNSLSNLDQDLPNNMIHQVAIKSLPQEWLWCETWCDDASKKSAKTIDLCNNPLTKEAKLTAAMRIVDEWKDYDNEIKKLQIKQSEHEDQVFNEKIQLKESQDHIEL

SEQ ID NO: 4112 - protein, 1538 aa, Astyanax mexicanus
MAPRSETGIMKILWLLLILTQFHHAHSASKGVTASLKAKWPQTPLLLETSEFICESGEEKFWPFVDTVRELAVYKHGESVRSYYNLIVKKAGQFLTDLQVSLLKLSLSLRAYSPTVHTFLQIASDEPPPEACSAFVSVHGQLTCSTKDMKKLLKTATGRPKPYLYKNDHKYPGANGTDLPVVILYAEIGTKKFNTFHKVLSERAEEGKLIYVLRHYVAEPKKQNILLSGYGVELAIKSTEYKAVDDTQVKDSKSSTTDEEDDTDEVQGFLFGKLKKSYPDLQGQLGDLRRHLLESTNDMAPLKVWELQDLSFQAAARIMSVPKFDSLKLMRDLSQNFPSRARSLTRVAVNQEMRKEIEENQKRLSESMGIHPGDSSLFINGIHIDLDFHNAFSILDIIRGEAKLLEGLHNLGIRGTSMSKFLRMPVTTVEESYALDIRHSAIMWINDIESDSTYRTWPSSLQELLRATFPGVIRQIRRNFFNLVLFLDPAQEESIELVKLAELFYKHKIPLRIGFVFVVNTEDKVNGFEDAGVAFFRLWNYIAEEYDVTQAFLSMVTMYNRVDVGDSLSVETVTAYLKKKFPKANTAKILGVESSYDDKRKAGAVFYRKSGLGALPVALFNGIPLSSEEMDPDELETILLQRIMDTTNFFQRAVFMGQISEGLDVVDFLMEQSNVVPRINPVILSPERRYLDFTASPVADDWDDSTMFSFLDSKDKTAVVSKRMKYLTKHEEEMVYGVTIWIIADIEQAPGRQMLLNALKHMKSSSSNSRVGVINNPGGTPSEDNSSLYKAIWASFLTQTSKNTLDFTLKLLKEDTVQLITHDTKIKDLLLQGMDQDAFEKKFNTLEVDFLRSQQRFCQEVLKLKAGQRAVVSNGRILGPFTEDEEFSADDFHLLEKITLSTSAEKIKAKVKQMNLAPRKSSDLIMKVDALLSAAPKGEARKDIKFVKDKHSVLHLAAREDEVFYDVVAIVDPLTRDAQKLAPLLSVLGQVVNMRVQVFMNCRAKLSEMPLKSFYRFVMEAEVSFLGNDTMSTGPVARFTEIPESPLLTLNMITPESWMVEAVRSPHDLDNIHLQEVSGVVNAEYELEYLLLEGHCFDMSSGQPPRGLQFTLGMKQDPLMQDTIVMANLGYFQLKANPGAWILRLRKGRSEDIYQIQAHDGTDSPADAEDVIVVLNSFHSKIIKVRVQKKPDKLNEDLLSEATESKGLWDSITSVWSTLEKSLTGSSSVEEGDKKKEDVLNIFSVASGHLYERFLRIMMLSVLRHTKTPVKFWFLKNYLSPSFKETIPHMAEAYGFQYELVQYKWPRWLHQQTEKQRIIWGHKILFLDVLFPLAVDKIIFVDADQIVRADLKELRELDLEGAPYGYTPFCDSRREMEGYRFWKTGYWASHLAHRKYHISALYVVDLKKFRKIAAGDRLRGQYQALSQDPNSLSNLDQDLPNNMIHQVAIKSLPQEWLWCETWCDDSSKPTAKTIDLCNNPKTKEPKLSAAVRIVPEWTSYDSEIKQLLKRVQEQKPEESNTGPSQTQTKHTGNQRDEL

SEQ ID NO: 4113 - protein, 1549 aa, Acidomyces richmondensis
MRSRSSRLALGFCVIGCLFYTAHAQSSVNVALRTSFSAPAYLIELLETAAEENETSYFPLLDRIAEGYFDSAKTDEELYVSFRGLLQQDGHLSQPEDLSSFDLALSLHSAAPRIEAHYQYYETSVKPLLEQREDDDCETWVYIPFNGDRYCSPQMSEASQQKVWKPTETVHQLPFDRILGDVDNKRPVVLYADILSASFRRFHTTISQTAKAGTTSYRLRYVPNKNRFNVPLTVNGYGVELALKRTDYIVIDDRNNKVEGEESTAPAVEATLSEEELSDLRPLSSSELLRLDQKAATFVMSSNDPFETLLRLSQDFPKHSSAIAAVNVSNDFLQEHRSNREIILPSGFNILWINGVQIMARDVDAYALLEHLRRERKMINSVRGLGLTAPLAIDLLSHEAVTAASVDQEVQRYDWRDDNEGGNIIIWLNDIEKDKRYAEWSNSIAALLQRTYPGQLPSVRRDIHNLVMMIDFADYGDVATVVDNLQNFVKRKVPIRFGLVPRIRSSAGIEQAKIIYYLLDRYGLSAAIDYLGKSIIGAGRKFAMPQEKYFVQAITDRKLRRDKAAQSFDEVLKSKEFDVQIIGAQSYVSRFSDGDTASPMLVNGVPVPHTEEWLQAMSQRVSIDFRMIQQAVFHGEVTEESWLPEIFLNNAWLRRNPLIVPEDDDDIRHINLGDLPDFATLKSVPADSDTIERELVHLTVATDLSSEQGLAQAMEAFLFKRDHDNVELALIHVPNKPDSNHICSLELARLTAEALQSLGRRYDALANEQFGDTALDYSQRRSIYQKLCEISSGAKTNYDQKSTADGATVKHIITAAGLEPGKQAFIVNGRIVGPMSTSKVLVVDDLDTLLSYERKKRLLPAALAIEDLQLQSMASTPLAFARISNLIALSQVSDVPEGIFEAAPTVRTSVFKQWNSTYTAIKVGDMENANIQIFSVIDPASELAQRWVPIIKKLSELDGVATTVFLNPRDRLEELPVKRFYRYVLDSKPTFDSEGSVRGLTAHFSGLPADALLNMGMDLPPSWLVAPEESVHDLDNIKLSALRSGTDIEAIYKLEHILIEGHSRDVTLGPPPRGAQLVLGTKHDPHFADTIIMANLGYFQFKANPGVYNLALQRGRSEEIFHIDSAGTRGYIPMPGDNSTEIVLMSFRGATLFPRLSRKPGMEEEDVLETSKTTLENLADGADKFLAKIGLHSSGASKYLSKAAKIVSAWTSGKVIPADLSAEPHADINIFSVASGHLYERMLNIMMLSVMKNTKHSVKFWFIEQFLSPSFKRFLPIFAKEYGFAYEMVTYKWPHWLRGQKEKQREIWGYKILFLDVLFPLDLDKVIFVDADQIVRTDMYELVQHDLKGAPYGFTPMCDSRIEMEGFRFWKQGYWKNFLRGLPYHISALYVVDLKKFRQIAAGDRLRQQYHQLSADPASLSNLDQDLPNHMQMVLPIHSLPQEWLWCETWCSDESLKDAKTIDLCNNPLTKEPKLDRARRQVPEWTLYDEEIASLARRHKAVEGTGMPSAGESGIVGVESANEESIQERLQREDAEKELKKQGRLRDEL

SEQ ID NO: 4114 - protein, 1532 aa, Varroa destructor
MSSAIFIWKSSGPRQSTVRNVFSCLLLTSLAYAVLGKLNQKPLTVSLDARWNHTPLHLEAAEFFAEDGADSFWKFVTDLQTLDLESFIKASEKLQYESIVELASRQLSEGRLALFKLSLALRAHSPAVETFQQIARDKKLPDCEFVLEFPGNEFTCSLDEIDRFIDKKIEGKVDIYGVDHEFGALSNGMPVVLYGDMVSTGFQKYHNALLKRYSQRKIRYILRHYVHKPVRRQVRLSGYGVEMALKSMEYKSQDDTNYKEKEVAEDETVETSEGHNDDRDIIHIMDAELTNLKESEVEELSLQLAAKILKVPPERQLKMFRDLAHNFPSIARSLTSQKIDPDLKSAVERNKKYFQAYLNLETTDTALFINGLYYDLEVSDMFVLLDSIKQETHLLEDLRDVGVETEAIPKLMKLDLNIKNSVYGVDIRDSAVQYINDIELDSDYRNWPRSLQEMLRPTYPGMLRSVRRNIFHLVIVADPAAPECRDMFKFAESFYIHRAPLRIGFVFAVNPSKDATGISNGGVALLNAFNFISQEKKPFDGLAFITEVYASQNEGYIEAERVISMFKLKFPSEDIEMVFGADSDYDTGRMLAWDFINRAGVGTPPLAMLNGISLKKENLKGDMFEEAVLTEIMKQTPKIQRAIYKGELTDRDFVIDYLMTRDNIMPRLNERVLNPPSREDTVFVDFTGRTVTDINADMMENLSAADLGASFAQTLQHLGKGTASVPLTMWIVADFDTSSGRNLLGHALEHLGNSDHTRLGFIYNNKKAATAGELTTFVESALRSLSFMETRQFLTRLVRNWDKIGSGKVKATDLLPSGTNFKLLPDDELSTIVALHQAFARTLKLKPSLRAVIVNGRLLGPLTESEDFTAEDFNLLERLSMAIYGVKLMELLDGVSSNVMMKASSVLQRFAQRKVRHEVKFATEQYGVINVSRKDKDSAAHDITVIVDPASRGAQKVSQILLLLQQVVNADIRVFFSCSYGNKELPLKTYYRFVASSEPQFGPSGELSGPRAVFVGLPSKPILTLAMATPENWLIGAVSSIYDLDNIRMADVESRVVAEFELEHLLVEGHCFEQSSGSPPRGLEFTLGSPANPVMYDTIVMANLGYFQLKANPGTWFLRIRDGRSSELYDVASTENTEKSGDDIAVLVTNFRSKVLKVRVAKRPGKEHEELLVDDDSQDDGIWNSITSSLGGGKTGEGADKEKDAEDDVINIFSVATGHLYERLLRIMMLSVLKNTNSKVKFWFLKNYLSPSMKDVLPYYARRYGFEYQLVEYKWPRWLNQQTEKQRIIWGYKILFLDVLFPLSVKKIIFVDADQIVRTDMKELRDLDLGGAPYGYTPFCDSREDMEGFRFWKRGYWSQHLGNRKYHISALYVVDLKKFRRIAAGDRLRGQYQGLSQDPNSLSNLDQDLPNNMIHQVAIKSLPQEWLWCETWCSDESKPHAKTIDLCNNPKTKEPKLAAAARIVPEWTSYDEELKKMIEEYEKEKGSGYKESTTQDSGEATLVYDGRQQQQQQPANLNGKPDLIDSQQHTEL

SEQ ID NO: 4115 - protein, 920 aa, Aphanomyces astaci
MAAEDPLKRLQLLSQNFPKYASSLVLASKPIPQQTIDDINHARSQRLYNRIVVNGLPVDFNEYGFNAFDFLKSLNGELRLADTLAKLDPTGSIKAAMGSLSSAPSDVRISLRGPVDGDAPLYLNSIETDEETAEWPTDLGSLRGPSWSLIYLRKTMYELILVVDPTTKQGINAMNEERATYAPSVEDKDVATVFHVSKMFLAARANGKSARDKYLREVLSLNDLTVKEVLQIYSQAVGERYTNDDWLQTAKAILTDGDNDGVWAMTNLVAEKNLPINSQVFNGVVRKHVNVQEDIMTHFARDQPLYQTLVRANQITDDSDMLSELLGNDETYAVFCPWFDPEYKPPTTVVQLDWNDPVRCFLPDQHVIYVNGRPLELVAPVTPSLFDGLVTYESATRSKAVSKAYVSQFKHNVLTAEDAADKTLQLNVVLSMVDSYLKTPRVAAVLPDDVQRPTYSYVTPSGSSSLDVVAYLDPLSDTAQRASGILRMLHSVLHAKITLVLVPPPSYDEFPLKRFYRFLWGGTSSSLVEFDRLPRHPVLTLNIETPELWNVQMVQSDVDIDNIQQNASATFTIKDVLVYGQCVDKTNAQYPTLPNGLQLVLERSVAKLHSHKDTVVMKNLGYFQLQAAPVPVIVYDFLSKTLQLEVKKQPGQEGVRLLDDGPEAPKAPAQPEETSVWTSLVQWGAGSSKLEARKGDTIHVFSLATGHLYERMLKLMMLSVLKRTNNPVTFWLLENFLSPDFKNSVAALQAEFGMDIRLVTYKWPNWLRRQTDKQRIIWGYKILYWKDHLRGKPYHISALYVVDLVKFKRMAAGDSLRAIYDQLSADPNSLSNLDQDLPNYAQHQIPIFSLPQEWLWCESWCSDESKAEAKTIDLCNNPKHKEPKLDMAKRVISGDLFPESWLQLDAEVKAAEAAYELASD

SEQ ID NO: 4116 - protein, 1587 aa, Heterostelium album
MSKTTMQTTIAQDGDSSKAVHVSLVSNWENTPLYLESFMFFKERVDNVVYNKYIEQLAKSVAKRSYSELSDKQKYDIVIDAATTVLGDDTQFYIGALRADLTMRTFSPKVELLRQLYLSAMTSNNIAIGKSSVPLIQIGSQTIHQNLNINAIDQALKSIVVTEKNSNNNNNNTQVYSFDTIIGNDITFDSQLLVDNGRPIVIYYGNVFSVEFLDVHSHLVKLATGSDAKITYVLRFTVESSEQPAKLQGYGYGLTIKNLEYKVMDDSVIAQDEKNQDASGNQLHEDVAGFNFKVLQDRHPQLLSTFKTFRKFLLAHQQTTDLKVWEIKDIGLQSAQKIISSSDPMRSMKFITSTFPSLARSLSRISLNDSLKQHVEQNHKFLTAGANQLFLNDLNIDLEEEFALNPIGLNEIIYNEIKSKLETKKLDLQSSLITKATNTMSKMNPVRFDIVPEDDTIFYINNVEKDYTYQRWDKSFSAIENGIDQNSVYIAKNIFTGIFMIDMDSDDAYQTLGQINMMINNNLPMRIGIIFATDRAQASGVKPNPAQVPNEAIIKVFASFWRYMGQRAAFYFMNALNYYRQQYDINYVTHSLMQGAFQTVTSQMHNRIPGGLHMAMENPQMDAQLVAGNQYIASKGIANFPQLFVNGMIVDLKKGNPLETLMSLVQEEMAEVKKLVDQRIIDDSTQDIYKTIMSHYRETTGLMSNFNPIIIPSESSPLKYVSLAYSSDAAIQQLANQVLNTDIIWFESTTEIKALSTFVVGDFDESSSSIKLALNALDRFSTDAKPNNQVRYALLSTGNGVVSKVLSHPQITIQGAIDLLTKQAQILEDKSTPLTLDQALAAAKLSNNPLLNQRNQNQLTFIKEYIGLPMTGSQTTIIVNGRVLTVEENDVFNEFYFLECYELSKARKVLSDILENPSADDKPLTNSQYSTILMRLMSSLGKRNEDTTIAKKQPPSGITPSFTYETNNNIISGLLRFTMIVNPLSKQAQKIIPIVAEFAQHYGIPCDVYLNVQLALSEMPLKNYYTYVVQLDNAFDSATGKVVSEPGGTLVNLPESRVLTLAMDAPVDWIVSPIVAKYDLDNIRLKDLGSDKVMRAVYALEHLLVQGSALDISNYQPPGGLELQLSSLNSKVSTDTIVMGNGYFQLQGNPGIWTLDTIGRGVDIFDTLNLVDRKASSLKNAHSVPHLLVYIESFRGSNAFLGLKRKQGQEATPVLPPVEDNQDQQQPEEEIEESYFFNWMKGNNNKKEKAPAKVSSTNETIHVFSVASGHLYERFLKIMMLSVKKNTNNPVKFWFLKNYLSPKFVDFIPFFAKKYGFDYELVTYQWPPWLRAQTEKQRIIWAYKILFLDVLFPLDVKKVIFVDADQVVRTDLKELWDMNLQGAALGYTPFCDSNKDTEGFRFWKSGFWRDHLRGKPYHISALYVIDLQRFRRIIAGDNLRMTYDQLSRDPNSLANLDQDLPNYLQHSVKIFSLPQEWLWCETWCSQASKSKAKTIDLCNNPMTKTPKLENAVRIIDEWTTLDNEAKGVEKEYEQLKSTKSQNKTPTSSTVIDVGSASQTVATTKYEETLPNQDVINQALIDAANEFI

SEQ ID NO: 4117 - protein, 556 aa, Dendrobium catenatum
MRIVLNPMSSLVDLPLKNYYRFVIPSMDDFSSIDHSVNGPKAFFANMPLSKTLTMNLDVPEPWLVEPIIAIHDLDNILLENLGDTRTLLAVFELEALLLTGHCSEKDHDPPRGLQLILGTRQMPHLVDTLVMGNLGYWQMKVSPGVWYLQLAPGRSADLYVMKKNEGEKSSLSKDIIINDLRGKLVRLEVEKQRGKEHVELLSGSDDPLKNKKDDHTGWNANLLKWASGFIAGNGLSRKRNENSSDNKKIIRHGETINIFSVASGHLYERFLKIMILSVLKNTRRPVKFWFIKNYLSPQFKDVIPHMAQEYGFEYELITYKWPTWLHKQKEKQRIIWAYKILFLDVIFPISLKKVIFVDADQIVRTDMGILYDMDLKGKPLAYTPFCDNNKDMDGYRFWRQGFWKDHLRGRPYHISALYVVDLVKFRQMAAGDTLRVYYETLSKDPNSLSNLDQDLPNYAQHTVPIFSLPQEWLWCESWCGNSTKFKAKTIDLCNNPMTKEPKLQSAKRIVPEWVDLDAEARLLTSRVLGEELEIQQIPSSTDTDKKDDLESKAEL

SEQ ID NO: 4118 - protein, 1331 aa, Pomacea canaliculata
  MOD_RES (286)..(286): Any amino acid
MLNFHRVLVTKAQERDIQYVLRHFVQEPAESNVRLSGYGVELSLKSTEYKAKDDTKFEGGTDGESIDFEDEEEDLQGFVFSKLRQLHPDLQKELKEFHSHLRESATELAPLKAWELQDLSLQAAQRVLSSSPADALQILTDISQNFPTLAQSLVKTVVPVELKEEIRQNQEFFERNHNLFAGESAFFLNGRAMDMEIYDVFTLLDIMLAEAKLVEGLHTLGFKGEWLQKILQLDLSSGEDTGNALDIRHSAVQYLNDLEKDSKYRGWPASVQDILRPTFPGMLRHXAKNIFHLTFIINPAEDASRELLKMAEAFYVHSAPIRLGIVLQASADASAKEDAGVAFARAFDFIKIDQSPAKALSFITDVYEKVGSEKITAESIIAEFNVQYPGEDLELVFGSSSEYDDTRKAGIDYIQRSGLLGFPQVLVNGVPLDKKYLSQEDFEEGVVGEILKQTQVIQKAVYHGKLTDSDVVLDWLMEQDNVMPRLNSRVLSSAAAQLDLTENVDGSVLDDPALFEMLNVREMSGAVAARLKYLTRRDEPAVRPVTMWVVCDLQTPEGRDLLYNAIKQVKASNELRVTWVPSSAAADNVDLVSRAAWVALRDLPGMLSKSFLTKLVKEENYAEISAGTKTLRDLEVNGMDMDSYLAAVEAETGGVLKSLSMFTRRVLGFTVGQRGVVANGKIYGPLGAQEDFTQDDFGLLEKVISVQAGAKLREQVKAVGIDGDRGSEMVMKVSALLSSRSRSESRSKVVFREDKYSVVKIPAADDLPAFTVEAIVDPASRAAQKMAPILQILHAVANVDIRIYMNSRQHLSEMPLTRFYRYVLEPELMFRSDGSAAEGPVARFIALPHKSLLTLGIDAPESWLVESVSSVYDLDNILLEEVDKGINAGFELEHLLLEGHCSDATTMHPPRGLQFILGTENKPDIVDTIVMANLGYFQLKASPGLWRLRLREGRSQELYTIQSHEFTDTPAGSSDVVVAMNSFKSKIIRIKVSKKPDKLHEKLLEDGQQESQGLWDSISSSFSGHKTEEDEDKTLNIFSVASGHLYERFLRIMMLSVLKHTKSKVKFWFLKNYLSPTFKDFIPHMAKHYGFEYELVQYKWPRWLNQQKEKQRVIWGYKILFLDVLFPLDVKKIIFVDADQIVRTDLQELHDLDLGGAPYGYTPFCDSRKEMDGFRFWKSGYWHSHLSGRKYHISALYVVDLKKFRQIAAGDRLRGQYQGLSQDPNSLANLDQDLPNNMIHQVAIKSLPQEWLYCETWCSETEKARAKTIDLCNNPLTKEPKLQAAMRIVPEWKNYDYEIKLLWDQIYGTNTKAQIEYEPPNIADFTTKTEL

SEQ ID NO: 4119 - protein, 1489 aa, Thielaviopsis punctulata
MWQLGVAAALLAALPASAVPAVDISMQAAFPSAPYLIELIETAAGENATAYYPILDKVANGYFSGISSDKGLYDAFFALLSDDGHIVRPDVLSTFKFALSMRTAAPRVEAHYQYYATGVEPGLGDTASAEGCDAWALIDGQKYCTPELTKGKGVVVKGLQSSTLPFDRVYGSGTPAVLYADIMDPSFGPMHKALMAAAAKGEVSYRLRHRRLGSVDGLEPLPVNGYGVEMALKRTDYIVIDDRDTGGEPAKIEKKSEAQVVLDAEEEIMDLKPLSKGEVLHLGMNAASYILESENPFDMLVKVSQDFPKYSTQLAARNASKAFVDEHMRNDANVPPGYNMMWINGAQQIERQIEPYTLLETLRRERKMIDGVRALGLNAQQVNDLLGHRAITTSKLSSDDTRYDWRDNIEENKVIMWMNNLEKDAAYSSFDSSLQALLQQTYGHLPSIAKNVFHLIVPIDFTNPEDISTAGQIWALANRALPVRFGIVPLLPSDTAIEISKLLYYLYDEFGFRAMMDYVSKAGMDGLNGVKEEAYTIATQKPPAEESEVDEGSEKESENETKTALPLSEVLSSESAAAQIALAESWIGRMDAAAEIPPILINGIMMPRINNWMPAMSQRLQGDLQEVQQAVYTKILTDESDPVSFLLKDASIRRNKYITPPDEKDPRMLDISKVYSEHRSLFEKIAAIEPTEDTTKEKWASLTLVADLNSDAGLQLLLNAFEFAEANPGVRLDIIHNPVETAGASQINEALIKNDPDAANIEQLRTILEADKFPIDEAFDAALENFLADTNIKAGTNLLILNGRVIGPIAPADAFSPSDFHQFLETERKKRIFPVYEAIDELKLGTVVSTPLDVAKLTSIVALSTISDLPQGIFEAAPTIRTSMWTEWNREHSSFDVGDPTESNVHIVVLLDPISEKGQRWAGILKVLSEIEGVYIKIYLNPSDNLTELPLKRFWRNVLSSRPTFNTETGKVETLHGIFKSLPTEVLFNVKLDVPPLWLVAPKSSVYDPDNMKLSSAKGDIEVVYELQNILIEGHSRESNRDGPAIAPRGAQLVLATEKHPHLDDTIVMLNLGYFQFKANPGFYNIQLLPGRSTEIFEIESVGAKGTTTPVPGDEGNDVCVMSFAGTTLYPRLARKPGMEKADVLDVEEEDSLLSKGKKLATGFGLFGGKQKTSDEEHAEINIFSVASGHLYERMLNIMMVSVMKNTKHTVKFWFIEQFLSPSFKEFIPFLAEEYGFKYEMVTYKWPHWLRGQKEKQREIWGYKILFLDVLFPLSLDKVIFVDADQVVRTDMIDLVNVDLEGAPYGFTPMCDSRVEMEGFRFWKQGYWENYLRGKPYHISALYVVDLKQFRRLAAGDRLRQTYHALSADANSLSNLDQDLPNHMQFQLKIHSLPQEWLWCETWCSDESLKEARTIDLCNNPQTKEPKLDRARRQVPEWTQYDDEIAAIDRKRRGVGNETKEKGEVAEEKNTKSRAWEEPPAVPTEKDEL

SEQ ID NO: 4120 - protein, 1238 aa, Tupaia chinensis
MIGENDPIDEVQGFLFGKLRDLHPDLKGQLKELRKHLVESTNEMAPLKVWQLQDLSFQTAARILAAPAELALVVMKDLSQNFPTKASLFDVLRNEARVMEGLHRLGIEGLSLHNVLKLNIQPSETDYAVDIRSPAISWVNNLEVDSRYASWPSSLQELLRPTFPGVIRQIRKNLHNMVFIVDPTHETTAELINTAEMFLSNHIPLRIGFIFVVNDSEDIDGMQDAGVAVLRAYNYVGQEVDDYHAFQTLIHIYNKVRTGEKVKVEHVVSVLEKKYPYVEVNSILGIDSAYDRNRKEARGYYEQTGVGPLPVVLFNGMPFEKEQLDPDELETITMHKILETTTFFQRAVYLGELSHDQDVVEYIMNQPNVVPRINSRILTAEREYLDLTASNNFYVDDYARFTALDSQGKTAAIANSMNYLTKKDDSFIRPVTFWIVGDFDIPSGRQLLYDAIKHQASLLDLSLYFRLRLHLALGLSLKSSNNVRISMVNNPSVEISYENTKISRAIWAALQTQTSNSAKNFVTKMVKEETAEALAAGADIGEFSVGGMDFNLFKEVFESSKMDFVLSHAVYCRDVLKLKKGQRAVISNGRIIGPLGENELFNQDDFHLLENIILKTSGQKIKSHIQQLRVEEDVASDLVMKVDALLSAQPKGDARIEYQFFEDRHSAVKLKPKEGETYFDVVAVVDPVTREAQRLAPLLLVLTHLINMNLRIFMNCQSKLSDMPLKSFYRYVLEPEISFTSENSFAKGPIAKFLDMPQSPLFTLNLNTPESWMVESVRTPYDLDNIYLEEVDSIVAAEYELEYLLLEGHCYDITTGQPPRGLQFTLGTSANPVIVDTIVMANLGYFQLKANPGAWILRLRKGRSEDIYRIYSHDGTDSPPDANEVVVVLNNFKSKIIKVKVQKKADMVNEDLLSDGTNENESGFWDSFKWGFTGGQKTEEVKQDKDDIINIFSVASGHLYERFLRIMMLSVLKNTKTPVKFWFLKNYLSPTFKEFIPYMANEYNFQYELVQYKWPRWLHQQTEKQRIIWGYKILFLDVLFPLVVDKFLFVDADQIVRTDLKELRDFNLDGAPYGYTPFCDSRREMDGYRFWKSGYWASHLAGRKYHISALYVVDLKKFRKIAAGDRLRGQYQGLSQDPNSLSNLDQCNNPMTKEPKLEAAVRIVPEWQDYDQEIKQLQIRFQKEKEMGTLYKEETKESSKEDAHPAVGQAGKALSKVHLPKGHADVLLMPALRSLPGR

SEQ ID NO: 4121 - protein, 1526 aa, Ornithorhynchus anatinus
MEILVVFAGLWLYSSSVKADSKAVTTSLTTKWFSTPLLLEASEFLAEDGPEKFWNFVEASENIRSSDHEGTDYSFYHSLLNAASQNLSPLQKNLLKFSLSLRSYSATIQAFQQIAADEPPPDGCNSFFSVHGAKTCDFDTLGALLKSAPERPKPNLFKGDHRYPTSHPERPVVIFYSEIGSKDFSSFHHRLVSKSNAGEITYVLRHFIANLSKERVYLSGYGVELAIKSTEYKAKDDTQVKGTDVNATVIDENDPIDEVQGFLFGKLRQLHPDLKDQLKELRKHLVESTNEMAPLKVWQLQDLSFQTAARILTAPPELALVVLKDLSQNFPTKARAITKTAVNSELRFEVEENQKYFKGTLGLQPGDSALFINGLHIDLDTQDIFSLFDVLRNEARVMEGLHRLGIEGLSLHNVLKLNIQPSDSDYAVDIRSPAISWINNLEVDSRYSSWPSSLQELLRPTFPGVIRQIRKNLHNFVLLVDPAHESTTELINVAEMFLSNHIPLRIGLIFVVNDSEDVDGMQDAGVAILRAYNYVAQEVDDYHAFQTLISVYNKVKTGEKVKVEHVISVLEKKYPYVEVNSILGLDSAYDRNRKEGRAYYEQTGVGPLPIVLFNGMPYLKEQLDPDELETVTMHKILETTSFFQRAVYLGELFHDQDVVEYIMNQPNVVPRINSRILNTEREYLDLTATNNFFVDDFGRFTFLDSQDKTAAVANSMNYLTKKDDSFIRPVTFWIVGDFDKPSGRQLLYDAIKHQKSSNNVRISMINNPSEDPSFESTHIARAIWAALQTQTSNYAKNFITKMAKEETAQALKAGADITEFAVGGMDVNLFKDAYESLKVDFILSHAMYCRDVLKLKKGQRAVISNGRIIGPLEDGELFNQDDFHLLENIILKTSGQKIKSHIQQLRVEEDVASDLVMKVDALLSAQPKGEARIEYQFFEDNYSAIKLRPKEGDTYFDVVAIIDPVTREAQRLAPLLTVLTQLINMNLRVFMNCQSKLSDMPLKSFYRYVLEPEITFMADNSFAPGPIAKFLDMPQSPLFTLNLNTPEGWMVESVRTPYDLDNIYLEEVDNIIAAEYELEYLLLEGHCYDITTGQPPRGLQFTLGTSANPVTVDTIVMANLGYFQLKANPGAWVLRLRKGRSEDIYRIYSHDGTDSPPDADEVVVVLNNFKSKIIKVKVQKKADMMNEDLLSDGNPENESGFWESLKWGFTGGQKTEEVKPDRDDVINIFSVASGHLYERFLRIMMLSVLKNTKTPVKFWFLKNYLSPTFKEFIPYMAKKYNFQYELVQYKWPRWLHQQTEKQRIIWGYKILFLDVLFPLVVDKFLFVDADQIVRTDLKELRDFNLDGAPYGYTPFCDSRREMDGYRFWKSGYWASHLAGRKYHISALYVVDLKKFRKIAAGDRLRGQYQGLSQDPNSLSNLDQDLPNNMIHQVPIKSLPQEWLWCETWCDDSSKKRAKTIDLCNNPMTKEPKLQAAVRIVPEWQDYDQEIKQLQSLFQEEKETGTVHSDREVKKPNREGLETHVEL

SEQ ID NO: 4122 - protein, 1288 aa, Entamoeba invadens
MFLLVCAALFLGTIAKVEVSVRTPWKDVPVIYEVISYVHKTTPTHFKDFFDQIIASQVFSQSGQTAYDTIISIASKYVNKNILERSLALHSEMLFVVSSDNMNVTLDGLLVGDKHFAAKSPLESKLLYLIKSDESLPNAVIVIPDSKIKNTVEEAYSKVSKKEVGSVAIYLSPSKIHTIDRMNTSEVIKDGIVTPLDNMNFTGFTAEMMHRSFKREFGIVQDKEDYIYLKEWDQDKLRAAVVKLLKSNTTLVGENLRKIIANFPLEIVDLLKTNADGIANDFAEMRMMQDQSLSINNIDFELSTKSVYDLLELLRTEDAAIRDLALLKLPQEMYTKSVQYYNNKGVMRFKIPSDIITFVNSFENRIYERNPKNLESFFQYNPYRIFRFTAKDLYTFVATLDFSGDDGMEKALKQLNIVNTIMLRYMIPFHFGVVPVSLPETQGAQLLFTAFYDVNRKWGTDGLMRFVEILGDQNIKTAQDMENVIKNFYRGRVATFTEKFENILKDEKVENKVSYMNKNGFDSSAFFINGMFITPKNIYMEMGKVYQKDLRQLENLISSKQLDENRSIYLQLLYHFDWINTFDKKLLVLEESSLGDSTETTLTLSQEELKMMKHVISVCKAKTETDQINLIKKLSDLNLNNEYLIQANLVDEKDEQKFIELFKNKRYEEAAHLVHSSASKVRNENCDFVYDGIKVVGKEHLNEQIKIIQKLYNSLHDYLLREVGIKKLELATTLVLKDSLKNKRTTNNMYSMVVTSKMARERKLSVTLFIDPIMREAQKAAEYLSIIEDLFPNQVSIDINFIKTPGRGGDFPSEFYISKTLTKPIIRNGVRVDENLEIKGLPSGRNYQLKIETPQCVDTILELATCDIDNIKFLRNTTEHVEYKIRGIVAEGFFSNSIYDGNEKKYFYLTAKGDYGNSVQGAVSKEGYFQLLTPPGSYSLHLENSDVSKFVIKQSKFDTTSFLFAPLRLEVFKEPLLPSERVAQPTQNSVNSKFSSFSSFFGGKNDEQIEIFTIAGGADYERTVKILMYSVKHKTSHPLRFWLVEDFLSPSGRKTLPEYAEKIGVKLNYVRFHWPYFMFKQVSKTRLIWAYKMFFNDLMFPQNIHRIIFMDSDQVTRADAFELWSYDMKNYAIAMTPFCVGEWLNKETESYRFWYQESWKNALNGRPYHISALFIIDFDNFRRDDVGTVYREIYNNLTPDPNNLANLDQDLPNYVQGRVPILSLPQEWLWCESWCNKGVKSRAKTIDLCNNPIHPMSKIQSALMNIEEWKDIDETISGMMKNSEKKEL

SEQ ID NO: 4123 - protein, 1339 aa, Vanderwaltozyma polyspora
MVVKKWSLNWVSTIVLTFLALVAHSNGLGDRNGFGVPEVARVWTVLTRILSLEDDLSVLQGLFPVVFQLDDSLILEDMEQLPETVSELLVKEFQKPNEAALLIEYCYLYPMGFPSELTDGEETNSNYFILNDKHYYEPDDVFYLKSGDLKKQSLKQDADILLVNDVVIGENSKAPIVLLYGCPVGDGVFDSFNRNLFAEAKAEKLRYIWRSTCSLDYQDDPIELSVSLTKRKNSGLTKWNYDFPGDLPAEFRKRKYTMQLPTTEELKDMDLKVASLIGSFYEKTKNFSKTLDYAKSIVNNYLLLVPQLLKAKVNERIIETQKLLSKKGIDYNMLGLYINGNNLRFSMLNEYTLLNAIKMELQDVNRFEKLLSNIGAKNTLPLAKKLLSRFSQFSLNNLKELQPFKLDLHRIPAFEGSVIYFNDIEKDTQYNELSTDVEAFFEKSKYGEIPEFRQNWNEIIFVIDFNTLHDSETQEALSGLIRALNIISQGYPQRIGLLPLHTGNDKNIIRSIYELKESGIKHLIEFLNALLKNENDEINDKDLLFSDYEDVPSIDKFLEDMEIYENSVIINGEIYPFKSNTWNYLIAKIIKKDVTLLKRELSRQKGQKDVKVRGLLHLKSGVNRNSRYLPDYFADSVYTYMNNGILENIRENLIEYIPNKEFNVLHTITLADDFNQLEALNRLESLINISYGGIKIRLINLFDDKSGNWGKLKDAFLKSKDLISVVESLQRKKPLKKGSEKSVGIDILHKWLPDVPLKYIDDRNFMIFNGKVISFEGDEILDTKLFESILQREAKRTLDTMYSFEEIYPDFFIDGVDPNNVEVASSLLTKMFYHSSDIYHNGIEYKTESELPRMDLNKFLENDDFTIFDKTSKPKPVDILLILDPLEERSQKILSLVSKIEQLPFINIKLVILPTKDLSFYSIERVYLPNTDIDDLLSSDLRKYFDIEIDSNPEMVMNENFEITDLVLEVHAFDETRPVSEGTVDGQGGVCLELLDSSDNLVGKAFTMETFGYGQFNIPKLGKCFKIQSCDPRFEVVSFSDAAYSDYISVKSFSILDFNPKKVYVKLRKLSDDKFVKTIEDNKINIFSTLNGSPEEEGNYKEMVLSILASSKNDGKRIKFWILDIPQLSTSFREFCSRITLEESVNSEIEFIKYNWPSWLRPQRFIDRRLDISKFIFIDVLFPQEVDKIVYMDPTREPIDIFDILEGSSKFSSPFVMFPISGKGYWSEGYWSKMLKEKKLRFHSIHPGFVINLQELRKLSGGDKLRIHYQRLSADVRSLTNIGQDLVNDVQADVSIAPLKKSLKKRLEISEEKLSALRQLISNGSANSKGSGEPLHDEL

SEQ ID NO: 4124 - protein, 1306 aa, Tetraodon nigroviridis
NPNPRKVYLSGYGVELAIKSQEYKAKDDTQVQGAEVNATVIGENDPVDEVQGFLFGKLKNMYPELKEQLQELRKHLVESTNEMAPLKVWQMQDLSFQTAARILAASPDDALYVMRDLSQNFPTKAMSITKTVVKPEIHKEITDNQKIFKGSLGLHPGESALFINGLHIDLDTQDIFSVFETLRSEARVMEGLRSLQIETHFIHDILKLNVQPSDSDYAVDIRNPAINWINNLETDHRYSSWPYNVQELLRPTFPGVIRQIRKNFHNLVIILDPVQEYAAELLSVAEMFYANNIPLRIGLVFVVSDEDEVDGMQDAGVALVRAYNYISNEVDSQSAFDAVISMFNQIPLGGLLSPAHVVKVLEKRFPYVEVSSILGADSSYDTNRKEGGAYYRQTGVGPLPVVMYNGIPYQREQLDPDELETVTMQKILETTSFYQRAVYLGELATDHDVVEFIMNQPSVVPRINPRVLSTSRSYLDLSDTNNYFVDDYARFSTLSVKERNTAVANSMNYLTKKEALSYFISLSDDAFIRPVTFWVVGDFDSPSGRQLLYDAIRHMKTSYNVRLGMINNPSDASSSETSRVARAIWAAMQTQSANNAKNFITKMAKEETAAALGQGADVGQFAVGGMDVALFKEAYEGLKLDFLHSHAAYCRDVLKLKRGQRAVISNGRIIGPLDEEEVFNQDDFLLLENIILKTSGERIKSKVQQFETEEDRASDLVMKVDALLSSQPKSEARVEYDFANERYSAVKIRPKEGDMYFDVVAVVDPVTREAQKLAPLLLVLKKLVDVNLRVFMNCQSKLSEMPLKSFYRYVLEPEVLFQADGSFSAGPMAKFLDMPQSPLFTLNLNTPESWMVESVNTRYDLDNIYLNEVDSVVAAEYELEHLLLEGHCFDVSSGQPPRGLQFTLGTASEPVIVDTIVMANLGYFQLKANPGAWILKMRKGRSDEIYKIYSHDGTDSPADSDDIIVVLNNFKSRIIKVKVQKKQDKLDEELLSDGTEENDAGFWKSLTRGFTGGGATEELKQEKDSVINIFSVASGHLYERFLRIMMLSVLKNTRTPVKFWFLKNYLSPTFKEFIPYMAKEYGFQYELVQYKWPRWLHQQTEKQRIIWGYKILFLDVLFPLAVDKILFVDADQIVRTDLKELRDFDLEGAPYGYTPFCESRREMDGYRFWKSGYWASHLAGRKYHISALYVVDLKKFRKIAAGDRLRGQYQGLSQDPNSLSNLDQDLPNNMIHQVPIKSLPQEWLWCETWCDDHSKRSAKTIDLCNNPMTKEPKLQAAVRIVAEWSDYDQEIKRLQSRVQESSDRGG

SEQ ID NO: 4125 - protein, 351 aa, Cervus elaphus
IEKAVTAEYELEYLLLEGHCFDLTTDQPPRGLQFTLGTKNKPVVVDTIVMANLVRKKPDKIKEDILSDKGEKKRGMWDSIKRIMMLSVLRNTKTPVKFWFLKNYLSPTFKEVIPHMAKEYGFQYELVQYRWPRWLHQQTEKQRIIWGYKILFLDVLFPLAVDKIIFVDADQIVRHDLKELRDFDLDGAPYGYTPFCDSRTEMDGYRFWKTGYWASHLLKRKYHISALYVVDLKKFRRIAAGDRLRGQYQTLSQDPNSLSNLDQDLPNNMIYQVAIKSLPQEWLWCETWCDDESKQRAKTIDLCNNPKTKEPKLKAAARIVPEWVEYDTEIRQLLDHLENKKKSAVLTHDEL

SEQ ID NO: 4126 - protein, 586 aa, Elephantulus edwardii
VIKLEPKEGETYFDVVAIIDPVTREAQRLAPLLLVMSQLINMNLRIFMNCQSKLSDMPLKSFYRYVLEPEISFTSDNSFAKGPIAKFLDMPQSPLFTLNLNTPEGWMVESVRTPYDLDNIYLEEVDSIVSAEYELEYLLLEGHCYDITTGQPPRGLQFTLGTSANPVIVDTIVMANLGYFQLKANPGAWILRLRKGRSENIYRIYSHDGTDSPADADEVVVVLNNFKSKIIKVKVQKKADMVNEDLLSDGTNENESGFWDSFKWGFSGQKNEEVKQDKDDIINIFSVASGHLYERFLRIMMLSVLKNTKTPVKFWFLKNYLSPTFKEFIPYMAIEYNFQYELVQYKWPRWLHQQTEKQRIIWGYKILFLDVLFPLVVDKFLFVDADQIVRTDLKELRDFNLDGAPYGYTPFCDSRREMDGYRFWKSGYWASHLAGRKYHISALYVVDLKKFRKIAAGDRLRGQYQGLSQDPNSLSNLDQDLPNNMIHQVPIKSLPQEWLWCETWCDDASKKRAKTIDLCNNPMTKEPKLEAAMRIVPEWQDYDQEIKHLQTRFQKEKEARTLPEENKTKEPRLEVKYTVLSLPTSM

SEQ ID NO: 4127 - protein, 1933 aa, Hericium alpestre
  MOD_RES (1175)..(1179): Any amino acid
  MOD_RES (1182)..(1182): Any amino acid
  MOD_RES (1193)..(1194): Any amino acid
  MOD_RES (1207)..(1207): Any amino acid
  MOD_RES (1220)..(1220): Any amino acid
  MOD_RES (1231)..(1231): Any amino acid
  MOD_RES (1242)..(1242): Any amino acid
  MOD_RES (1249)..(1249): Any amino acid
  MOD_RES (1267)..(1267): Any amino acid
  MOD_RES (1308)..(1308): Any amino acid
  MOD_RES (1314)..(1314): Any amino acid
  MOD_RES (1324)..(1324): Any amino acid
  MOD_RES (1328)..(1328): Any amino acid
MQLALHAGTPKIEAFYQHYIDTSKAQLAPNDTDACGSWVEWYGEAVCDIDRLRDLVGPEEIDASEQEVHHSESSSRPQILPFDHIYPPPSQTLDIPPRTAIFHASMASSNFRELHYYLMRVSGRVAPRVEYVYRPIPSPDRGAEHSHLSGYGVVLDLKKMDYLALDDRRAGRKGSTSSSQALHISNADLGSSSGDSQVDEGTLSEPEVDQIVTLLSHYELNETMAASEPLTAEEIAPRRVVVNSGLEEEVHRNSFKVQPGTSIVWLNGGIVSEADMNPFGLLRVVRKERNIIQSLTSLGLEPPVARKLISHPAIADAATNSEFLDGIFDASDRPEQGDLIVWWNDIEKDSRYARWPSSLYTLMRPTYPGQINLVRLNFFNTVLVVDLSRFASLDYITGMVSNMIEHSFPMRFGIVPVVETDEGTRMAKVFWHLIETYGRGRTMRYFRSILESPQSYDVLPTYIDWAKARSVYDDFVVLQELPEGKRRLDWETVIGDSDEETETRLAKARSYTQRLGAGLSSASNGHVFANGKYFELNDMIAHQLQNAMTQTLQHIQEQIYVGKLSDEDSGKLSTYFYDLPGVQKRRNKYIFPAGGAKNTRIFNVPDLFDRTGFPASSESFVYPETEKVPLTIYVLADLDSEAGLSLVQAALTFVRPSEARISFIHNPSPSNIGVGEHRRPSTLLSRLQVHGLLAKRDPDRLSQALNLEVPLDIVKAGQTVLSPEAALQEISEGIAFDKDVDLHADYIKVGRLVARELGLSPGESALMVNGRVVGPIGEGGFTAEDFQVLQQHELFRRVEPVLRALEDLHPVISDYDKATFAQVVSMASSVVSDVLTPDPSEVGLFNSPPASRNPTYGLLQSEHTKIELGDNSTSHLHFAVLIDPLSEYAQRYVSLLEWLTSIPHVSAELHFHPVVNTELPLKRFYRYNLLPRLNFDENGKEIPSNAVFEDLPVEPIYTLALDIPSSWLVRPREALYDLDNIQLGVLSNEEARRGVEAVYELDYLVIGGHAGDAAANGAPRGVQLQLTTSNGAPIDDTLVLANLGYFQFKAKPGVYRLEIREGRGREIFELESVGNEGWDSPPIDKTGNVITLTSFEGWTLYPRLARKPGMLLADVLEVPQEKEETNGLASVLSSISSFFKPKETANEQTEESVSTRRHADINIFTVASGLLYELXXXXXQEXLPHFAEEYGFXXELVTYKWPAWLRXQKEKQRIIWAYKXLFLDTLFPMDXDKVIFVDADQXVRADLKXLVDLDLHGAPYGYTPMGXDNTDMEGFRFWKQGYWQQALHGKPYHISALYVIDLNRFRQXAAGDIXRTQYQALSAXPHSXANLDQVIRVTSSTRDHVRNTKRSSTKTLVVPSSANGEVVITSSQDVSPEVVASTISPSGNLTAILRETGQGEKKRFVEIWAKDRLIVATEVTKLHGVFYTDDHLRSLSFSPSETKLVYTAEANTPENQKDPYTRFRFVPDFGESLTERKRPQLALFHWQSESTTSFGQGPGQADIISFPPHLQLGGPHASCTTLHFLDLDTRESKTLLGTIDKPSPSIMDDFAGLYTVFALPAKPFLRLGKNLKTYIVTQSAEGSRTTIVLIDAESPSNVKRVTSAKNGSVEDTLRSWSFLGTDGHAQFLCARSSPTRPNELLLGTVDDHLTVTWKVLDTPALPSAAEQALKSLQASIIQIPDRHPVETILVKESKGSSAEPKPLATFIHGGPHSTSFTAFTPSVAALALQGYNVSLPNYTGSLGFGEYYVQKLLGKCGSLDVEDTVASVQHLIKLGIAEDKPEKLFLLGGSHGGFLSAHLVGQYPDKFGAAVLRNPVITGASPASTDIPDWYFWEFGVPYTPGADITPELYEKLWKMSPIAHVDKVKAPVLLHLGTSDRRVVNVQGRDYYHALKGRGKTVEMMEFKGEGHPLDGVEAARVTWESTVDWFKKVRS

SEQ ID NO: 4128 - protein, 699 aa, Fukomys damarensis
MMEKKDYYKKKTETKNSQFIPHSSSWSLPSSSQLSRVPARNMLSPVLWHFLWAQVPPSQLVFLSQEPFISLRLTLQQENRIGFVFILNTDDEVDGRNDAGVALWRAFNYISEERSVSEAFISIVHGMDKNAFEKKYNTVGVNIFRTHQLFCQDVLKLRPGEMSIVSNGKVLGKIINMRVTLFMNCKSQLSEAPLESFYRFVLEPELMSGDNDRPFLGPVAKFLDIPESPLLTLNLITPEGWLVDTVHSSCDLDNIHLKDIERSVTAEYELEYLLLEGHCLDPMTKQSPRGLQFTLGTKNKPVMVDTIVMANFGYFQLKANPGAWILKLRQGKCEDIYQIIGHEGTDSPSDIEDVIVVLNSFNSKIIEVEVQKKPDKMNEDILTDSDGKKGMWESIKSFTRKLHKDDDKKEKEVLNIFSVASGHLYERFLRIMMLSVLRNTKTPVKFWFLKNYLSPSFKEVIPHMAKEYGFQYELVQYKWPHWLHQQTEKQRIIWGYKILFLDVLFPLAVDKIIFVDADQIVRHDLKELRDFDLGGAPYGFTPFCDSRTEMDGYRFWKKGYWASHLAGRKYHISALYVVDFKKFRRIAAGDRLRGRYQALSQDPNSLSNLDQDLPNDMIYQVAIKSLPQDWLWCETWCDDESKQRAKTIDLCNNPKTKEPKLEAAARIIPEWVEYDAEIRQLLDHLENEKKSTSKLLSLP

SEQ ID NO: 4129 - protein, 1493 aa, Sclerotinia sclerotiorum
MGAFKFPWGLSGALLASTYLHSIGVTASPSINVGLQTSFPSAPYLLELLETAATENVSSYFPLLDRIADGYFTKASTDRDLYDQFIQILKEDGHMDAESLSSYQLALSMRVAAPRIEAQFQYYHTAVEASIKREKDSSCPTWVLFDGNQYCSPTLNEPHGKVNGPSQTKELPFDYVLGNPDGPHSILYVDITSPTFGHFHKTLVKTAREGKTSYRLRHRRAIDSGSNKPLMIPGYGVELALKRTDYIVIDDRKDDDEEVPKSKTETKVKFEDEEVADLKPLSTSELSSLGLKASSFIMQSENPFDTLIKLSQDFPKHSSAIASYNVSSDFLAEHNYNRGKLVPAGFNVWWVNGVQMIERQIDAITMLDIMRKERKLINGVSELGLTGPEAVQLLSHPDISDAKSDGDVQRFDWRDEIEGGRVIMWLNDIEKDKRYAEFPAALGALLQRTYPGQLPSVRKEIFNLVVPVDFSTPEDIALVSETLASFVKRKLVLHIGLVPITTSPAAIEQARVLYHLLDVYGLSGAIAYLEASVLNGVASPTEKAFEAAIEGREVRAEKVAIPLKDLLESDYYSDRIDASNRWSTRLSANGEFPPIFVDGVALPRDDNWLQGMVQRLTVDLQVIQQGVFNEIFTQDSYIPDFFLSEATARRNALIIPESDKNLKIIDITILSKHHGDVLSKLPKIGADSAWSKEDWAHMVLVADLSSVTGMDLLLSAAKFRESTSPLEITIIHNPSSDKETSDFSTRLFSHIQKRSDETFVDAQDLPTLANQDELELDYTTKDSAKTYWKLAGPLIRSAGLLPGESGLLLNGRLVGPIPAGSELKQEDFEQLISYERAKRIIPVFAAMKALGLSEKITDPLTGAKISSMVALASVSDTPDGIFEQAPTTRVSAFDIWNSSYTSIEAGDSSTATIHMTVAIDPASEQGQKWVPIVKAISELEGVYLKMFLNPKELLQELPVKRFYRYVLDSKPTFNDDGALITPGASFTGVPQEALLTVKLDIPPAWLVAPKASIHDPDNIKLSSIKSDVDALYELEHILIEGHSREMPSGSPPRGAQLILGTEKDPHFADTIIMSNLGYFQFKANPGFYKIDLQNGRSSEIFKIDSIGSKGWAPVPGDESTEVVLMSFQGATLYPRLSRKPGMEGEDVLEAKVESAMDFVSRGLNFAQGLLGSKNKATAAVEEHAEINIFSVASGHLYERMLNIMMVSVMKNTKHTVKFWFIEQFLSPSFKDFIPHLAAEYGFKYEMVTYKWPHWLRGQTEKQREIWGYKILFLDVLFPLSLDKVIFVDADQIVRTDMIELVNHDLQGAPYGFTPMCDSRTEMEGFRFWKQGYWKKFLRGLPYHISALYVVDLRRFRQIAAGDRLRQQYQSLSADPNSLSNLDQDLPNHMQQVLPIHSLPQEWLWCETWCSDESLKEARTIDLCNNPLTKEPKLDRAKRQVPEWTMYDDEIAAVDRKRKGINGSGSGNEVGDGKNTKSRTLEEVVDTKTKKDEL

SEQ ID NO: 4130 - protein, 1545 aa, Gouania willdenowi
MAAGQHQQPGEKRGSCSSAIMRRTIVLSLLLLNIHQVISAPKGVTASLKAKWSMTPLLLETSEFIAEDGNEKFWQFVDTVQELTVYKHGESVRSYYNLIIKKAGQFLTDLQVNLLRFALSLRSYSPAVHASQQIASDEPPPEACPAFVSVHGQHGCSTKDIKKLLKAATDRPKPYLSQNDHTYPGLNKSEVPVVILYAEIGTKKFTTFHKVLSEKAEQGKLTYVLRHFVADPKPRDMLLSGYGVELAIKSTEYKAVDDTKVKDANTTMNAEEEEQDEVHGFYFGILKKSHPELKEQLLDLHKHLLESRNDMAPLKVWEMQDLSFQAAARIMSVPKFDSLKHMRDLSQNFPSKARSLTRVAVKQEMRKEIEENQKHLSDTVGVHPGDGELFINGLHIDLDVHNPFSILDILRGEARVLEGLHNLGIKGEQQGLLLRLPVNTVDDSYSLDIRHPAIMWLNDIENDPLYRSWPSGVQELLRATFPGVIRQIRRNFFNLVLFLDPLQEESVELVKLAELFYKHKIPLRIGFVFVVNTKDEIDGFSDAGVGFYRLLNYISDEYDLSQALMSMVSLFNDVDVGEALSSDTISKYMKRKFPKANSDRILGAESEYDGNRKDGAFYYKQSGLGALPLALFNGVPLSPDEMNPEELETILLQRIMDTTTTFQRAVFMGQLTEGSDIVDYLMEQANVVPRMNPLILSTNRKYLDFTANPVADDWSDTTMFSFLDSRDKTGVIAKRMKYFANNDVDGMASVTLWIVGDFQKVPGRKLLLNALKHVRASPGVRVGVIDNPNEKAWEDNTVLYRAIWASLLTQKNKAAAEFVQKLLKEESSRLLQQGTKMKDLLMQGMDADAFEKKFNTMEVDFIRSQRLFCRDVLKLGPGQRAVISNGRILGPLEDNEEFTVQDFHLLEKITLSGSAEKVKARVNQIGLKSKHASELVMKIDALLSAAHKEEVRRDVHFAKETHSVLRLSPRENEVFYDVVAIVDPLTREAQKISSLLIVLSQVVNVRLQVFMNCRAKLSEMPLKSFYRFVLESDVTFLANETVSPGPVARFSELPESLLLTLNMITPDSWMVQAVHSPYDLDNIHLQKVSGVVAAEFELEHLLLEGHCFDLSTGQPPRGLQFTLGMSQDPLMYDTIVMANLGYFQLKANPGAWTLRLRKGRSEDIYEILTHDGTDSPSNAGDVIVVLNSFHSKIIKVRVQKKADKISEDLLSESSESKSIWDSIASLWSTFEKSIAGGSSNKEQGEKQKEDILNIFSVASGHLYERFLRIMMLSVLRHTKTPVKFWFLKNYLSPSFKETVSHMAESYSFQYELVQYKWPRWLHQQTEKQRIIWGYKILFLDVLFPLAVDKIIFVDADQIVRADLKELRDFDLDGAPYGYTPFCDSRKNMDGYRFWKSGYWASHLGQRKYHISALYVVDLKKFRKIAAGDRLRGQYQALSQDPNSLSNLDQDLPNNMIHQVAIKSLPQEWLWCETWCDDVSKVTAKTIDLCNNPKTKEPKLMAAARIVPEWVVYDNEIKQLLRRVQKEEKQTSEERTQKAENQRDEL

SEQ ID NO: 4131 - protein, 614 aa, Laodelphax striatellus
MTQTPTLQKAVYKGDLTDGMSVLDFIMDQPNVMPRLNDRVLNLGKSRYVDLVGTSKPSELSKSVMLSLKYASASKKEEKSAHLLTHWVVSDLATEKGRTLLLNALDQMRSSGRIRVGFIANPSAGASDTKLEKLVVGAAETLSPDQAAIKIKRIFYRYVLEPEVQFTADGNLAAGPYAKFTNMPGAPLLTQNMHVPENWLVESIVSPYDLDNIRLEEVQSVVHSQFELEHLLLEGHCFEATMGNPPRGLQITLGTESEPVVVDTIVMANLGYFQLKANPGAWILRLRQGRSSEIFDITSHEGSDTPVNSTDIKVLISSFRSHVLKLRVTKKPDKIGMDLLGEDDDSQPGLWNSITSTFGSSKEEQAEAETINIFSVASGHLYERFLRIMMLSVLKNTKSPVKFWFLKNYLSPTFKDFLPRMAKEYGFQYELVQYKWPRWLHQQTEKQRIIWGYKILFLDVLFPLDVKKIIFVDADQVVRADMKELVDLDLGGAPYDDLQIVFWKHGYWRNHLQGRRYHISALYVVDLRRFRKIAAGDRLRGQYQALSQDPNSLSNLDQDLPNNMIHQVAIKSLPQEWLWCETWCDDDSKKYAKTIDLTRPPDMLILNYDKSTHV

SEQ ID NO: 4132 - protein, 1771 aa, Sporidiobolus salmonicolor
MKAVAWLLLALAGPPGLAAAHSSPPVSARIETAWPAPDLVTQYLCAPLLSLRPRRQLTHRLRNRETLALEVPAHLFPFISFLASHPTSHRSLDPPLRAASLSASEPYSSQGISAAFVPEGTLQHNETLAVLEAAAARSLLFRGKGVRQSMGLALANREASVAIEAMRGLWEEREREVTAGTTNGGGEGETTGAGATRAGCESWIDVAEKKACSVDEFWKVVGEEQKDGKLPIILPETLRPSERPRLYPFDHVSPPGNNPHLPRVVLYGSPTSPSFQSLFAFLYQLSEPKPLPVIDPKSSTPSAATPGAAAPHPPRLQFALRWKPSSGTIKSNEKLVLSGYGAALDVKKSDYLAIDDRMSAASAGEEGESSSALDRDAPLEIEGDMPLKMEPVKKSDIAELSVRATDFIMSSDAPFQAFTALTSSFPLMASHLSTVVRNVSSHLLSEVAANQMSFPALTMRPFFSLNGMALTDAQVDPFALLRLMRKERKYVTDLEALDKHLSSKAAREILINGQAKSGEQGKTQQRVEAEVLGELFDATDRDEGEHVILWWNDLEKDRRYKSWSTSVRDLLRPVYPGSMNLIAKNLNNVIFVLDLSQPAALALLAENVKQFVSRGIPVRFGLVPVVGESGDAESVETMLAQVVWYLVDALGRAPTMSFLTDLYTASPEAPITPDLLLRAYMRLAAQSTHVEGGPLASFHAIQDGVYTKSESLTSRLSKTREYLKRLGIPLAKGENEGEKSAIGAFFMNGAYFPIDDEFSQNLQRTLGLHTQFLQQEVYIGALTNDMDAKSFFADLPTTHKRRNPYIFPSAETNPLRIVNLVDAFKGVDPAVMESFYIEGVTGMVDNETGFDIEDPPAAATMFIIADLNEPAGIQLAKAALQLAVRPSSSLSFLMLTNVDPLEQDKNTSVRISFIHNPVEHYEAHPWTFSNLLYLLHSYQALEDVLPIEFINWIDLTLDVGGPLPRHGMTWTEENPLRSVLLKGVEGKQAGEASLFWEELQWLSHQLGFQPGQNGIVINGRVVGPFPDGAFGLADVRALLSYELEKRIYPVVAAIQGTDFDTSLLERSHQSHLFNLASSIVQEAYLPDSAASIFGTGAVERRRDYVALHGNHSAFTNGNLRSALYEIVVVVDPATELAQRWAPIIQTLASLDTVHLDVYLNPNFHLTELPIKRFYQYTFSSALEFDELTGKELQPSVRFDGIPEDVLLTFGIDAQQSWLAFPKTSVHDLDNIRLVDLPEWSRKKGVAAVLELESIIVEGHARDMPSSKPPRGLQLELRSGGKASPNEKRVDTIVMANLGYFQFKANPGPWRLTIRPGKSSDVFDMESIGANGWKSGDVSETGDSLVVSTLEGLTLYPRFRRKPGHELTELLDELADVAAKRESASLLNRLKSMIPFLAPQSGSTDLITTSKRADINVFTVASGLLYERMAFIMIVSVLRHTKSTVKFWFIQNFLSPSFKAFIPHMAREYGFDYELVTYKWPHWLRAQKEKQRTIWGRILFLDVLFPLELDRVIFVDSDQWVAVLCPLSHRALTFTSCRIVRADLKELIDLDLQGAPYAYAPMGNDREETKGFRFWETGYWKQHLAGKPYHISALYVVDLDRFRQIAAGDRLRQQYQGLSADPNSLANLDQDLPNNMQTSIPIVRPFSRLTCSQALIGASAIQYTLDRSWLWCQTWCSDESLEQAKTIDLCNNPLTKEPKLVRAKRLIPEWITYDEEVAALARRIAESSASSPGEVAAFGTKADELEQAVQQQKEREEVLGEMKGADLVKDEL

SEQ ID NO: 4133 - protein, 914 aa, Trifolium pratense
SSIIGVNILTIFCRPKVKSPPQEILLKLEKEPELKELSQESSKHVFNLGLSKLQCSLLMNGLVIDPNEEALQNALNDETQRIQEQVYFGQIKSHTDVLDKFLSEAGIQRYNPRIISDNKPRFISLSMSTFGEASILNDINYLHSPGTTNDLKPVTHLLAVDITSGSGIKLLRQGLNYLIEGSKDARVGLLFSGNQTTNLFSLLFVKVFEITTSSYSHKKNALDFLDQLSSVYQQKYILTSAVEVDGTQEFIDEICKLAESNGLPSKGYRSSLSEFSAGEVRRHLSEVEKFLYIALGSESGVNAVFTNGRVRLSLSPAVTCPIDESTFLSADLHLLESIELKKRTNHIVDIIEEVTWQDVDPDMLTSKFISDIIMSVSSSMSMRERSSESARFEVLSDQHSAIILNNENSSIHIDAVLDPLSPTSQKLSGILRVLWKYIQPSMRIVLNPLELRSSLALLRIEASCHEVSSLADLPLKNYYRYVVPSMDDLSNIDSSINGPKAFFANMPLSKTLTMNLDVPESWLVEPVLTVHDLDNILLENLGDTRTLQAVFELEALVLTGHCSEKDHDPPRGLQLILGTKTSPHLVDTLVMANLGYWQMKVSPGVWFLQLAPGRSSELYIFKEDDDGSKNKQSSKLITINSLRGKVVHMEVVKRKGKEHEKLLIPDDDDNLQDKKKGSGWNSNLLKWASGFISSSEQSKNAESNSLVIFVDADQIVRTDMGELYDMNLKGRPLAYTPFCDNNREMDGYRFWRQGFWKDHLRGRPYHISALYVVDLKKFRETAAGDNLRVFYETLSKDPNSLANLDQDLPNYAQHTVPIFSLPQEWLWCESWCGNATKSKAKTIDLCNNPMTKEPKLQGARRIVAEWPDLDLEARKFTARILGDDLEPIQSPDQSKDSTNDDSLKEEDLESKAEL

SEQ ID NO: 4134 - protein, 1487 aa, Hypocrella siamensis
MDVLRLSWPLATCLAFAVQTWAAPAVRVDMTAAFDAGPYLLELVETAAGENSSSYFPLLDRIANGHFAAASSDAELHQRILHTLRDDGHITTPEALATFDLALGLRSSAPRIEAHYQYYATTVEPFVAHQHCDAWVLLEGKQYCTPELDIMTRDNLSSLATQTLPFDRVLGSLIGTGKEAILYADPTSNEFAKYHQALSEAARSQRLNYRLRYRRSRTNTNKTLYVSGYGVELALKKTDYIVIDDRAAVQSTGKPHQSSRRVLTGAEEEGLFDLEPLSTTQLASIGIKAASFILESDTPFETLVQITGDFPRYASSIASHNASDEFVTEHQQMRAHMVRDGINFLWINGAQLIDRQIEPFALIDMLRRERRLVDGIRDLGFDGDQAITLLGHDAISSASSEEDPQRYDWTDAAEGGNIIIWLNDLEMDKRYESYPKRLSSLLQRTFPGQIPPIRKNIFHLVFPADLSIDEDLEFIAEVISIIDRGVPIQFGLVPLQTTDESKIQAKVAYYLAANYNLDAFLSYMGSLARVQDRSAADSVLSAITEAYPLLPQGQPLSAGEVAAAEDYVEKLGMARDWIARLQADTSARSLFVDGVAIPRDRKWLQTVSTIIVGDLQTIQQGVYHGILDEQASVADIFLDGAASRRSHYMVSNDDKSLRILNIAKLHDENTHFLDALPVLDAGAGAAKQDWVAITVLADVSSAIGLTLMQTVLSFKQQNPAVRVDVIDTQEDERLSFQVISALKANRDELAGSESLDDLKAILNEAASYSANEQYAQGRQKFLSEAGFPVGSQFLLINGRVVGPMMPAAPFVAEDLQVLVEFEQTQRIRPVFAALEDLELGEKISSPIAAAKVTSIIAVSAISGLPEGIFESAPTTRSTIYNTWNTSHTALQTGDPRTCSLHIVGLLDPASEKAQRWAPILRTIAGLDGAHVRLILNPVDKVDELPVKRFYRHVFEPKPNYNDDGSIKPPKASFKRLPSEALMTAGMDVPPAWLVASKLSMKDLDNIKLSVVEHDVEATYQLQHILIEGHSRDEKGSPPRGAQLVLGTAAQPLLTDTIIMANLGFFQFKANPGVYQIQLKEGRSSEIYAIESIGANGWEPTAGDEGTQLALMDFQGATLYPRLKRKPGMEESEVLDDSAKPSDANLMSKGLKLAEGLFGAKSKSPAEQKHAEINIFSVASGHLYERMLYIMMVSVMRHTKHSVKFWFIEQFLSPSFKEFIPSLADEYGFKYEMVTYKWPHWLRQQKEKQREIWGYKILFLDVLFPLSLNKVIFVDADQIVRTDMIDLVNFDLHGAPYGFTPMCDSRTEMEGFRFWKQGYWANYLRGKPYHISALYVVDLRRFRDLAAGDRLRQQYHALSADPASLSNLDQDLPNHMQFQIPIRSLPQEWLWCETWCSDESLVKARTIDLCNNPMTKEPKLDRARRQVPEWTTYDDEVAALSAKRGLGLRSNVAETPSDEQMDQDQDEDKDEDERSKKSPEHQHQKDEL

SEQ ID NO: 4135 - protein, 1615 aa, Jaapia argillacea
MLLRRIIVLPWLFIATRAATSPPLKVSLRTSWSAPPFLLEVIETIALENPASFFPLVDALTDPSLPPPSSPEATYHLALQTALKDGWLTDPSAKEMVEINLALHSATPKLEAMFEWYRDTQSQRGEGEDVDVDKECGSWVDWYGERLCEVEELVRLAGHETIDAPSSGSQISGTSSSKLKPKILPFDHIHPKTLARPPHTAILYASPSSSNFRALHSYLYSLSSGVNPRVEYILRWAPPPSKDGVGAEERSYLSGYGVSLDLKKTDYLALDDRRSGSKSSGAESGGRTIDESSEELVDSILELIESYPVPENYTRDSSHPLTEDELLAIGIQATQLITSSTNPLTTLTKLTQNFPSYASLLARRVVVDEELDQEIRNNQVGKVQGGIGAMWLNGGVVGEGEVNPFGLLRLLHRERPLVLSLTSEPLSLTPRQAITLLTHPTIAAAQGEEVGVLEGLFDASDRQEGGGVVVWWNDLRKDSRYKKWSESLEVLLRPSYPGTFPQTKHNLFNIVAVLDLSKTSSINFLSQAVSGIIQRGFGFRWGVVPVLSNDEGRKMGRLFYYMIENFGRAKTMGFFKKVSQIQTLTDPTATSINWPIIRSEYDTLVLAESESEIFVPRDLDSVVGDGEKEEELAKASAYAKRLAVDGSGNGELGHVFVNGKPFDMDDDFLRNMQAEIGQQLQFLQAMVYTGTITDADDDAIDNYFYDRPTTAPKRNKHIYPSNKPGRGLKIMDLAKVFGRDGGMQGPFIYPEKSDFVPVTVWVVADLDSDDGLLLVKEALESLTPESRTRVGFIHNPRDAPPPPHHVDQMHSSLKSHVLSNPFLYKLSSSRLLRVLGLSSQIATPNSGPQTVIMSEDELEGGGALDADVYDEFLKMSRVVVDRLGLNPGAGALVINGRVVGPVLPGEFEAADFKLLEDYEMKRRVEPVHEALKDVLPDIDANDKAGLAHLVSLASSIISSIQIPGPSEIGLFNTPQRPRTRNYQLLDGDYTSFRVGNNETALYHFGVILDPLSEAGQKWPSLLEWLSSIPEVFIEVYLNPAQYREIPLKRFYRYNVLPRLSFDENGQEIPARAEFQNLPIDPIYTLGMDVPQSWLPRPREAPYDLDNIQLSTLTDKEQQQGIEAVYDLDYLVIEGHARDTLTNSPPRGLQLQLTTSNSTAIADTQVVANLGYLQFRAKPGVFQLEIREGRGREIYKMESVGSEGWESPTVEKAGNEIALTSFEGLTLYPRLVRLPGMEMEDVLTIAVAPEAPVSKSLFEQMWDQMLSLFGSSPEPTTDLIVSSTKQADINIFTVASGLLYERFASIMILSVLRNTNSTVKFWFIENFLSPSFLEFIPHFAEVYGFQYELVTYKWPSWLRAQKEKQRIIWAYKILFLDVLFPMDLDKVIFVDADQIVRADLKELVDLDLHGAPYGYTPMGDDNTDMEGFRFWKTGYWKDFLQGRPYHISALYVVDLIRFRQIAAGDILRGHYQQLSADPNSLSNLDQDLPNNLQREVPIFSLNEDWLWCETWCSKDRLHRAKTIDLCQNPLTKEPKLARARQIPEWEEYDSEIARFARKLAEEGLIRSDVTATDVNALANAAAGKTSAEPSSEQTPPNSDVESESARLAEGHERDEL

SEQ ID NO: 4136 - protein, 1625 aa, Mucuna pruriens
MGCLCRSECWVFIVLVLFNIGSAFADAPPRPKNVQTALRAKWSGTPLLLEAGELLSKEQKDLFWDFIEIWLNTEKDAVRSQTAKDCLKKILECVRPLLREPLTSLFEFCLMLRSASPRLVLYRQLAEDSITSFPLGDENYSDDETEEKKKIERRKLDPLQVGVNLKIHGGKCCWVDTGEHLFLDVFELLAWLQGSAELVGDSFQRPEIFDFDHVYYESSIGSPVAILYGALGTHCFKEFHVALVKAAKEGKVKYVVRPVLPAECESKLAHCGSVGAGESVNLGGYGVELALKNMEYKAMDDSTVKKGVTLEDPRTEDLSQEVRGFIFSKILERKPELTYEVMAFRDYLLSLTVSDTLDVWELKDLGHQTVQRIVRASDPLQSMQEINQNFPTIVSSLSRMKLDDSVRDEITENQRMIPPGKSLMALNGALVNVEDVDLHLLIDLIHQDLLLANQFSKLKIPQGILRKLLSALPPSGSSIFRVDFRSTHVHYLNNLEEDAQYKQWRNNLNEIFMPVFPGQLRYIRKNLFHAVFVVDPTTRCGLEASFYFLKLNIFTLFIGYSIDMIISLYENNFPVRFGIVPYSSKFVTQLENHAMKEHNNKFDEDISTMIICLFSYINENHGGQMAFQFLSNVNKLHIESDGNADDALELHHVEGVFVDTILSKVKSPPQEILLKLYKDQKLKEMSQESSKFVFKLGLSKLQCSLLMNGLVIDPTEEALVNALNDETQRIQEQVYFGQIKSDTDVLANFLSEAGIQRYNPKIISDSKPRFISLSMFTFGEESVLNDIVYLHSPGTMDDLKAVTHLLAVDITSRNGMKLLQQGIYYLIEGSKNARIGLLFNVKQSPNLFSLLFVKLCSLYEQNYILTSPMEAESTQTFIDMVCELGEANGLPSKGYRSSLPEFPPDEVRKHLTKVQNSLYRVLGLESGANAVFTNGRVTYPIDESKFWSADLHLLESIEFKQRTKHIVKIIEEVEWHDVDPDMLTSKFISDIVMTLSSSMAKRERNSESARFEILNDQHSAIILKNVNSSIHIDAVLDPLSPTSQKLSGILRVLWKYIQPSLRIVLNPMSSLADLPLKSYYRYVVPTMDDFSNTDSAINGPKAFFANMPLSKTLTMNLDVPGSWLIEPVIAFHDLDNILLENLGDTRTLQAVFELEALVLTGHCSEKDHDPPRGLQLILGTNTTPHLVDTLVMANLGYWQMKVSPGVWYLELAPGRSSELYILKEDGEGSSAKQSSKLVTINDLRGKVVHMEVVKKNGKESEKLLLPDNADNAQDKKKGSGLNSNFLKWASGFICGNKLSKPAEKSSPEKGKGRRHGKTINIFSIASGHLYERFMKIMILSVLKNTHRPVKFWFIKNYLSPPFKDLIPHMALEYGFEYELVTYKWPTWLHKQKEKQRIIWAYKILFLDVIFPLSLEKVIFVDADQVVRTDMGELYDMDLRGKPLAYTPFCDNNKEMDGYRFWRQGFWKDHLRGKPYHISALYVVDLKKFRETAAGDNLRVFYETLSKDPNSLANLDQDLPNYAQHTVPIFSLPQEWLWCESWCGNATKYKAKTIDLCNNPMTKEPKLQGARRIVSEWPDLDLEARRFTARTLGDDQEAESTQSSNQSNDLSSKDSSNEDKESRAEL

SEQ ID NO: 4137 - protein, 1608 aa, Piloderma croceum
MRLTSLTSKWFSLAVAILGTSARSPPVRVALRSSWPAPPLLLEIIETAALENPGAFFPLVDVLTNPEILPSPYPSTPEAIHAFALSAAEGYLSKQGHPTFLTANLALHASTPKIEAFYQYYIDHDLDARRATVAKGAECGSWVDWYGEVVCDIETLVRLAGKETIDSAENSTSSPSPKVKTLAFDHIQPSPSHAQEHPRYTAVLYASLSSKNFRDLHSYLLFLSTGTTPRVSYIMRHIPPSDRGLSERNILSGYGVSLDLKKMDYLALDDRYSHGGSSENDIAEDSTHALSEETDHILQLLQKYPVNDTAAEANVPLTEDELLLIGFQSAQLIRDSSTPLETLRELSQNFPKYATTISRRVKIDQALEEEVKANHEKASPGINMVWLNGAVVDEKHMDPYALLRLLRKERSIVLSLTSLGLTPSQAIELLSHPTVSAAQNNKGVMDALFDASDRPEEGGAIVWWNDIEKDKRYSGWTTSLQTLLRPMYPGQFPNVRHNLFNIVLVVDLSQSSTLRFVAGSLSSIISRGFPFRFGVVPITENEEGTQMARIFRYLVEYYGRARTMRFLQNVAQSYLPHLVTVDWALVRSEFEVLAASPPDEHVPPDFDALLRGTSNYSIELDKGRAYAERLEATLASAPRGHAFINGKHFDMDDAFLRNMQAEMGLQLQYLQEALYTGKLSAETAGDISNYFYDLPTTAMRRNRHIYPSSSVDALRIVSLQQLYSRVGILSHEHFIYPRRRSGSDVVAESESVVSNRVPFTVYVVADLDSEAGLALVKEALDSLKEDSLARISFIHNPANQKSTESHTSLLISHLVHKDLLSKLSPNKLLQALGLASVVDGDDVQTALSQERILREISGGVALVDLDVEIFNDYVRSSRRLVRELRLDSGDHAVVVNGRVVGPIEPRELVAADFEALLSYELRKRTGPVVEALVSIKPSVDSLDQDNFAHLVSMASSIISASQIPDPSETGLFDVPPRARVRNYRFMDSAHTAFEFGDNATTLFQLGVLLDPLSEAAQKWSSLMDWLRTLPGVFVDLHINPSQYTELPLKRFYRYNIIDSLSFNTDGSEHGSQAVFSGLPVDPIYTLGMDVPPSWLVRPREAMYDLDNLQMGALSADDRVRGMEAVFDLDFLVVEGHARDPQSNAPPRGVQVQLTNGNGTSVDDTQIVATLGYLQFKITPGVFQLEIREGRGQDIFKLESVGNEGWDSLTVEEAGNEITLTSFEGLTLYPRLTRQPGMETEDVLIDVPATVEEPPSLMADVVSRISSIFTPKETDLVPSGNAQADINIFTVASGLLYERFVSIMILSVLRNTKSSVKFWFIENFLSPSFLEFIPHLAEAYGFQYELVTYKWPSWLRPQKEKQRIIWAYKILFLDVLFPMDLKKVIFVDADQIVRADLQELVDLDLHGAPYGYTPMGDDNPDMEGFRFWKTGYWKEFLLGRPYHISALYVIDLVKFRQIAAGDILRQQYHALSADPNSLANLDQDLPNNLQREVPIYSLHEDWLWCETWCSKDRLHRAKTIDLCQNPLTKEPKLARARAIPEWEEYDSEISRFARKLADDGLIRSNIVAVDVNVLANAGASSVVDTKDEVESESKETRPSDSDSQVRDEL

SEQ ID NO: 4138 - protein, 1536 aa, Scedosporium apiospermum
MKFQGLSLSLTAVLLAAVPVSAVPSISVSMRAAFQAGPYLLELIETAAAENSTSYFPLLDRVASGYFSGAATEKELYDRFLKLLVQDGHISEPEVLSTFKLALSMRSAAPRIEAHYQYYSTGVQPRFLEPLPSACDTWVLFNGSQYCDYGFGEPRRLVADAIHTSTSLPFDRVLGHGPHAILYADVVSSPSFAPFHNSLVEKARRGEISYTVRYRRTNGPDENDTPLPVSGYGVELALKKTDYIVIDDRDAASDGGGRGHDANHGSGSQVVLDEQEEVADLRPLSKAEVSSLGLNAASLIMKGENPFETLIRFTQDFPAYSARIAAHNASLEFIEEQRDNLGTVVPQGVNVLWMNGVQLIERQIEPFSLVDMLRRERKLITEAKSIGLTGREAVALLGHPNVTSAKVDGSPQRFDWRDNQEGGEVIMWLNDLEADSQYDDFPTSITALLQRTYPGQVPRIRRNIFNAVIPVDVANVDDLKVALQVLAYVNRLLPVRFGIVPFSSSEDSRNLRKVLYYLHDNYGLEGLFTYVELAIHGGQTVADSAIFEEAIAAGSPAEGFKPSTFEEVLASKPLTERLQHVDMWVSRLNANSPTLPVFVNGMVVPRVDNWLQGMGMKINSDLQMLRKGLQLGDINEDTRILGLFLDEAVKRRHPLIYADDEKALNMIDLGKVYREHAALLQSVPVLDAYSDSSKETWAALTVIADMTTEDGLNLLYSALKFKANNPGVRMDILHNPKASSNAAAAAINAALATNLDKLLEAGSIEEIRSLLPAQDPVPDTQYGARLSAYIASTGLEPGTKGLVLNGRVVGPISQDEAFAETEFQQLLDFEQKNRILPVYAAVADLGLGAVLSGPLAAARLTCLAARSTISDLPEGIFESAPTLRTSIFNTWKSKHTTIEVGEAESATVHIIGILNPASEQGQRWTPILKVLSQVDGVYIKLFLNPEERLEELPIKRFYRYVLDSEPTFDESGRVKPLDATFRGLPSEALLTVGMDVPPAWLVAAKSSVHDPDNIKLSLVKGNVDAVYELRNILIEGHSRMVTKDAAPPSGAQLVLGTEKDPHSSDTIIMANLGYFQFKANPGFYNIQLQEGRSSQIFEIESVGAHGYDASPGDEGTEVALMDFKGTTLYPRLERKPGMETADVLSYGAEEAKPESDSLLSRGFRAAAELLGGSDSKHALEKKDKSSDDQAEINIFSVASGHLYERMLNIMMLSVMKHTNHTVKFWFIEQFLSPSFKDSIPHLAKEYGFKYEMVTYKWPHWLRQQKEKQREIWGYKILFLDVLFPLSLDKVIFVDADQIVRADMMELVNLDLKGAPYGFTPMCDSRTEMEGFRFWKQGYWANYLRGLPYHISALYVVDLRRFRELAAGDRLRQQYHTLSADPNSLANLDQDLPNHMQFVIPIHSLPQEWLWCETWCSDESLRDAKTIDLCNNPMTKEPKLDRARRQVPEWTVYDDEIANFERRRKGLPAVGDQKETPSVQEQEQIKEKEKEEEEARGKEEKDGSDNDQPKPDEEPTFERNTKSRNWEEPLTRIKDEL

SEQ ID NO: 4139 - protein, 1330 aa, Pythium insidiosum
  MOD_RES (55)..(55): Any amino acid
  MOD_RES (106)..(107): Any amino acid
  MOD_RES (275)..(275): Any amino acid
  MOD_RES (300)..(300): Any amino acid
  MOD_RES (597)..(597): Any amino acid
  MOD_RES (608)..(609): Any amino acid
  MOD_RES (641)..(641): Any amino acid
  MOD_RES (932)..(932): Any amino acid
  MOD_RES (945)..(945): Any amino acid
  MOD_RES (1060)..(1060): Any amino acid
MPLLLICPLGVILRCEFMALATRGLLKMTATTASWRLLAGATALLAALGGQQHAXVEARGLAVNLTASWPSSRFYPLLETSEFLAEENPLWFWRYVDALESHMQEXXSKRDDVSALSTLAVDVAQEIAPHTKNILELSLSTRTYSVKVEMFRQLALDSGVRPCGPDVDAWAVFYREKQCAVAVACRAEDIKRSVELLTDLDDGNSAETCVATGLHDVELDRVDHKYPQPLRLKDTVILYGLVGSKSFYSFHNELKSLATARRLEYIVRHYPKDAXLETLLQGYGKVGDDEVDGDLDAADXSRDDDDDDDDLTSDEDVDGVFFSTLMRENDVIAAELKGFRDQLVKQHDQHEEIKAWQLKDLGLSATREILDAKNPLKRLRVLSQDFPRHAKKLALSRKSISDDLRSEAAARRSEVQTNGLLNRFLLNGILVDPMQRSFNIFDFMKTLKAEWSIAKKLAQLPLSEQDRETMLENVREAKQARASVRIRVRGPVDGTAPLYINNIETDLTSMDWPSSVAQLRRPAWNLIFLRKNMYEYVVAFDPVSPQGRQALSHIAFMRMRGAPIQWGLLASTKELVAAKGRDERDAIVKQYKDYSLXEKATGWHFAKXXFMARAKDAADDEGRGRAVSGFIEGVADESGDXTVQALLTCYVDATGGAFTRSKSEKEAVETLKSSEHDDSVMSMTEYLAKKHLPFECSLFNGELTDDMDLIDELLTNQGAYPSYFSLFGGDEDSEEDAKVTYMHQDGTITSPKKQTLLFWLDLGDRVHAAHVYEAVKAVQEDMGSLMRVGVVHRLSTASGGDGIGELVAGVIATVGDSDNEKHIGLVIEALRCVVKGKTVEATKSKMRGLVEKIDAWDADEVLASLMQVFDASADVACRDKTFEMYSPPNGLQLVLERDVGSVRLHRDTLVMKNLGYFQLQATPGVWDLHLAXGRAVELYEILDAXTERVLSSRNVIVSDFGSHVEQLLVRKRQGMEHEELLAPSKAGTKSKSDVEPISEDAGLIGSYWNSMLSLFGKKKDKAQKDDAKAVATATGSDSERTGETIHVFSLATGHLYERFXKIMMSSVLKRTKNPVTFWLLENFLSPDFKDSIPALRQKFGMDIRLVTYKWPNWLRQQTQKQRIIWGYKILFLDVLFPLGVQKIIYVDADQVVRADLKELWEMDLKGSPYGYTPFCDSRNVGYQFWRQGYWKDHLRGRPYHISALYVVDLALFRQMAAGDILRAIYDQLSADPKSLANLDQDLPNYAQHQISIFSLPQEWLWCESWCSDESKANAKTIDLCNNPKHKEPKLDMAKRVISGELFQESWLELDQEIREAEQEYVRVATTTSTS

SEQ ID NO: 4140 - protein, 1689 aa, Klebsormidium nitens
MARQLCIQFLLAAFLLLGLRHVHAAPASKVPKGVNVVLRSKWEGTPLLLEAGELLAEHDSPSFWHFLDAWTAQTPTPNLESNDSWCAEQILSQATQNFTQPQASLFHLSLSLRLASPKLVVYRQLASESLERLGLASLATTAKSKDDERWKVTRNPASPGGAMCCWVEAPGKSVLRTARELEEELAEESGATAEEVPRYAFDHVHPASKRGARLFVLYGALGTPCFAEMHRVLSEAVQSGKGVAYIYRPVLPSGCESAASPCARIGTQKPVDLAGFGAELALKNMEYKAADDSEVKKDGSVTSDGPAAEDLTQEVNGFIFSKLVERRPDKEAELLTFRDVLLSSGAADDSDKISVWELKEIGLQAVQRIVQAREPLRLMQDINQNFPNVASSLSRTPLNASVRAEIEANQKMVAPGRTLLAINRALVPDVDSLDLFSLIDRVSADVTLGAALARLGLPADVSGELLALPEPPDDVGGVRVDFQGDGVHWLNDIESDSQYRMWRSSLQELLMPTYPGQLRQIRRNLFSAVFVLDPASTAALKIFPTVMLFYQRSIPVRFGVMLVSPTHLAGIEREEEGQAVAAPAKLAEDLSELVTQVFLYLEEELGREHGFRFLAELARAWGGDADEFDDFTDDVSNDSPLTLAHVEAAYAALVRQTRGSVKRKNLGDFLAGIHGETYREGSLAGTEFAHKKGLAAAAPVMLMNGKVHPAGDVQATLVQAIQEETQYIQQEYYYGRLKERMNILEYVLHSGSQPRYSPLILKRNAQPSDASERYVSLAGSVADQTRFISYLHHPGTADDVKPVTHWVVANLGGKRGLGVLKQAVGHVAGADSAQARLAVLLNGEGEPGALERVVLAALQVPSRRQKIVPFLQRLLSSGALVESLRSATGPVSTETTDFVLRLAAEAGLREADLRSSLTEPASLSQMLEDHRRFCEDVLGLPRGTSAVVTNGRVTALPDSAPALHADDFSLLESLELRARAEKVLLIIEDAEFSDVEPDDLTSDFLSDVILGVTSALAARKRAAGGTANFGLLKTRHSAIVLEGDPSSSISIEAVVDPLSPSAQKLTSLLVLLHEWLNPSIRIILNPVSGLSDIPLKNFYRYAAPSRLDAPSPAPPAVSFSHLPPSRTLTFNLDVPEPWLVEAVQAPYDLDNLRLEQLGESRSMHAVYELEALMLTGHCFDSKTREPPRGLQLALGSGQKLGEGEKSPFMVDTIVMANLGYFQLKAAPGVWNLSLVPGRSTELYALGGGRAGGIRRGGEHGGGGERFQGKVVAHGGDKARREREGEAVGGGRGGWQGGGFETGGCVGSRGGVQVGDGAGAGQEVAAIEGRGACIKKGRPCAVKRDSSSGEELASTVVAPAASNETIHVFAVASGHLYERLMKIMVLSVIKQTQRPVKFWFIKNYLSPRFKDFIPHMAREYGFEYALVTYKWPSWLHKQTEKQRIIWAYKILFLDVLFPLDLKKVIFVDADQVVRTDMAELYDMDLKGAPLAYTPFCDNNKDMDGFRFWKQGFWKDHLQGKPYHISALYVVDLARFRRMAAGDHLRVFYESLSKDPNSLANLDQDLPNYAQHMVPIYSLPREWLWCESWCGNATKAQAKTIDLCNNPMTKEPKLEAARRIVAEWPALDEEQRRLTDRVEAGEFDDVAGSEDPPTTARDKKLDSGSVEEIQSDNLEEKGNQRQEDTETAAEL

SEQ ID NO: 4141 - protein, 1440 aa, Wickerhamomyces ciferrii
MLKQFTGVFLLLSLVFAQIDIQLQANWENPPFALRLLETVATENESYYLSSLSKIAGLNLNEDDDDDEGEGPASNDEELYHSIFNLLTPKEQSLYDIPLANKYHSPRIISHYNYYNNTVLPKFQSKLIKKCGGRVPKTWLKFNDVVYCKPDDVFALMTDSSNEIDKEILEFDRIIGDQGPLLILYGDVNDPSFKEFINNLYDNAKYGKLRFIWRYVPQNIDEREILSGYGVDLTLKRTDYLVIDDRDVNNKNVKRDQIKQDAQQVLKNQESSNSFLDIYNDDIPGVNQQDLKDLDLKIASFISSSQNQSENFQNLIHIVQDLPKFTSYLSELEINDELLESTEFNEKLGLTSDSSAIFLNGLPIDESDLNVFGLYKAIKKELSLVENFSDLKLDPKITKDLIGKFALLSMVKNRKTLKTRYNIETNEHNPIIFINNIESDPTYENIPKDLNIFKQKHQFGQIPPYKENIHNVVFVMNFSDEEQLLTLQRIFQAVVQRGITQRIGFIPLISNEEDRIHANNIYYLLENKGFKKAARYVFQIGTTPNHSVENLTDEDYISKYLTPFVKKFDVYEPSIIVNNIFYPFDSNWPYALTRQVSEDVNLITSAVFAGAIKEGDSIKKLLYEDATDFRNTLIIPENKRQLDYKYISPQFQEIIKASSNYIFEFTNTNEDSDKSATLTFGGNLGSRFELEQFLEILKFTQNADFSLKIRIIETSKEATFIGKIRQSLNKSIDHAIEVVQGIIEDNQFTELDFDPTIKSLLQSIDIDSSKFLLFNGRYIELNEKIIDDVSLNHLADYEFENRLYLASKVLKKHESIANSVSQDWFESFASLITKSFYVETDLFTPAPLPRFDFSALNLNNAISFGDKDKSDINVLLVIDPVEEISQKLISLIQSIKDLSFISLDILIQPKKELKELPVKRFYRSNFQSSIKFNKNGKLDESSFVSFNKVPEKTLFTLDIDVLPSWVVVTKDSISDLDNVLLEQSGPVTGIYELKNIAVEGNAFDVDTLEPPTGLSVQIEGSDTNVMTNYGYLQLKGNPGIWNFEIKQGKSSDIYSLLTTDDFYSTEREKTNEKIKFSLLNLDGVKLFPRVIKKEGKENESLISLTGESIDVVQDEEEESKPKLGFFQKLFPQKKKKQADINIFTIASGHLYERFLSIMTASVMRHTKHTVKFWLIENYMSPSFRKFLPHLAEKYGFEYELITYNWPSWLRGQREKQRTFWGYKILFLDVLFPQDLEKVIFVDSDQIVRTDLKELVDLDLEGAAYGYTPMGDSREEMEGFRFWKQGYWAKMLGDEYKYHISALYVIDLKRFREIAAGDTLRQHYQALSKDPGSLSNLDQDLPNNLQPKLKIFSLPQDWLWCETWCDDESLKTAKTIDLCNNPLTKEPKLDRARRQIPEWTEYDDEITALREEVFPKVELSVGEEIKPGESNSNDDLDHDEL

SEQ ID NO: 4142 - protein, 1303 aa, Glarea lozoyensis
MLTDLDVFEEAYALCMNLEDPQQIPSRDSMVRIGSQDGNLKLSTRETAADENSTSYFPLLDRIADGYFSKSSTDKELYEKFLEILKEDGHMPDTESLSSYQFALSMRSAAPRIEAHYQYYYTAAEPSLAGARTESCPSWVLLNNKQYCSPALDTANADIEGNQQVQELQFDRIIGNISAPASILYADITSPTFGHYHKTLVKTAREGKTSYRIRHKKALSQNSDSHIFPGYGVELALKRTDYIVIDDREGEQETVEIDSEKKEVKFEDEEFADLKPLSSSELLGLGLKASSFILESEKPFDTLVKLSQDFPKYSSAIASHNPTKEFVAEHEYNRAQLVPAGYNVWWMNGIQMDKRYEDWPTSLQALLQRTYPGQLPTVRRDCFNLVLLVDFTSPEDVHLIVEQLRGFVQRKLNIRIGLVPIVQSVHSLEQARVVYYLVDSYGLSTAILYLEKSLAAGKLSAPSKSVFEAAIEGRNPKPEKVTRAAIQTAIFQDFFEHDSWVPSLFMASAAKRRNSLIVPEDEKNLKIFDVNELLVDNQDLFHVMPHIDVGTESAKEDWAHMTVVADLESEGGVKLLATAAIFREANPSIELAIMHNPSDGIVDTGFSYDLFARMEEQPAKIQTVNGITDMLSSEKSVEVEPIEQAAKAYWHQAAPFIKSLNLLAGENAILLNGRLVGPIPSSVDISNEDMIQLLSYEKSKRGVPVYSSMEALGLAEKISSPQDAAKVISMVAISTISDTPDGMFEQASTRAVSEMDSDTENTFRTRRGELPVKRFYRYVIDSKPSFNEDGSLKALKASFTGVPQEALLTLKMDVPPAWLVAPKVSIHDLDNIKLSSVKSDVEALYELEHILIEGHSREVPGGAAPRGAQLVLGTERDPHFADTIIMANLGYFQFKANPGYYKIKLQEGRSEEIFNIDSIGAKGWSPAPGDENSEVVLMSFQGTTLYPRLSRKPGMGDEDVLESKTDSPMDFVSRGLNFAQGILGKGKSIETKTSENAEINIFSVASGHLYERMLNIMMVSVMKHTKHTVKFWFIEQFLSPSFKDFIPYMAEEYGFQYEMVTFKWPHWLRGQTEKQREIWGYKILFLDVLFPLSLDKVIFVDADQIVRTDMIELVNHDLKGAPYGFTPMCDSRTEMEGFRFWKQGYWKNFLRGLPYHISALYVVDLHKFRQIAAGDRLRQQYHQLSADPASLSNLDQDLPNHMQAMLPIHSLPQEWLWCETWCSDEALKEAKTIDLCNNPLTKEPKLERARRQVPEWTVYDDEIAAVDRKRKGLPVEGKNEKSRTMEVMIETPETKKKGDKDEL

SEQ ID NO: 4143 - protein, 1736 aa, Amanita thiersii
MRRTGVAFLATAALAGATSPPINVSLRSSWNSPPFLVELLESFSLEFPNTFFHLLDIVSTPSSRLLHGQQSPRDIHQETFRLAAQSGILTDLSDLSAVDSTLALHAATPAIEALYNYYHDRHGKEKNARCIKEGKGASWVDWYGRVVCDVKELVELANAQTHDSSSTNEGGDNTHPSHSRPKLLAFDHVHPSPSRVITAPERTAILYADLGSSNFRSLHEYLYAQSQGSEPKIEYVLRHVPPNSYFSNQKEEGKAEDSRSSLTGYGVALDLKKTDYLVLDDRHSSGSGTADSQRKTSESTTEESDPLLNLLKSLPALEPKPIPRPPPLGKSAEVEEVVVDEAEEETIPPKDPNAPLIEAEILELGYKASQLIISTSLQRDNSGSLNDTIYQLTSAPTDFPFSLPFQQAHLSPLDMLTLLSQNFPKYAQTLARRIEVASEVEEELRMNSLIAQTGSSVVWVNGGMVITHGGEVVPSQLGGRGGGSAVDLLTLKRVLRRERGWVKSLEAIGMSRKEAVQVISDSGGVVPEQGKENGDAGKNKRKESQKKKGRNANMSDQVLDGRIDASDRSEGGDVILWWNDMDKDERYQMWSPRLMTLMRPMYPGSFPAVRRNLFNIILIMDFTKTQSLQFISGTMVNIVDRGLPLRFGLVPSIDTPEGHSIAKLLYYMMKETDNATTLEFLRRMMQSVEQSTENVSLDQIKAAFDAVIREYQAEADDELGGATFMSVTAGQSLPEGINAYIERVDARIGPDPSAPLGHAFFNGKYLEFSDMNDFIRDMQMEISYQLQYLQQQIYTGTMKDDDDITNWFYDQPGVSKRRNKYIIPATGNSASGDGNVLRIVSLPDTFDKTGVEWQKVKSGFLYPPGNGPTPNSVYVVADFDSEEGLDLVKEALSSLNEESRTRLTFIHNPSINGEDQKQTADHRPPSQLIAQLVMSGKLSGSGVNPQNFGKTLGIEVVPIEGVETMEEEQAQKPLGTSDSTSSLESLLNSSGGEAEQQEYLKVSRLLAREFGFTPGQSGLIVNGRIIGPIERRGFIAADFKALEEYEYSKRVEAAVETVERVCPWSLDADRAEYAELVSLTSSVLAAIQTPDPSEVGLFDAPPRPRQRTYHALARNLTMFTYGDSSTAMYHVVFVLNPLSETAQKWSSMITWLTAVPDVYIEVHLSPHKQQEIPLKRFYRYNAKPVLSFDNNGNEIPSQTIFDGLPTDPLYTLAMDVPSSWLVRPREALYDLDNIQLTQLSPSDTSVDAIFELDYLVIEGHARETVTQAAPRGLQLQLVNSRGHPIADTQVVANLGYLQFRAKPGVFRLEIREGKGREIYNVNSAGNEGWDSPTVESGGTEITLTSFDGLTLYPRFARNKGQEKADVLESDDLDGDSSGSLFEGVASRVKSLFQGAKQSKPSTSMVESNGQSEINIFTVASGLLYERFVGIMILSVLRNTNSTVKFWFIENFLSPSFLQVIPHMAKEYGFQYELVTYKWPSWLRAQREKQRIIWAYKILFLDVLFPMDLKKVIFVDADQIVRTDLKELVDLNLHGAPYAYTPMGDDNHDMEGFRFWKTGYWAETLQGKPYHISALYVVDLVRFRQDILRGQYQQLSIDPNSLANLDQDLPNNLQRLVPIHSLHEDWLWVSSKNRLDRAKTIDLCQNPLTKEPKLARARQIPEWEEYDAEIARFTRRLAEEGKVRSGIAAADANVLANAGNTQASPQSNDNADGKIKPDVNSPEENDKAASDHAHDEL

SEQ ID NO: 4144 - protein, 1509 aa, Bipolaris oryzae
MRASASVLGAKALFVLTAFRHMGTLASPSINVALRAAFNPAPYLVELLETAAEENATAYYPILDRVAEGYFDDKTTDQELYTAFVDLLYADGHITQPEALASFEFALSVRSAAPRIEAHYQFYNTSVEPSLSAKQTEACDLWVSFHGKQYCSVHLDEPFGDIASERTYQLPFDRILGNSSALPAILYADITAPRFKKWHKTLSTTAKQGKTSYRIRHKPSPKAPTSPLVVNGYGVALQLKRTDYIVIDDRQATESDKNAAQKTMETGLNDEEDVADLKPLSKDEVSDLGLKTASFVLQSEDSMNTLLKLVQDFPKYSSIIAAHNASDEFLQGLEKNHDQWLMGGVDFIKVNGLNIPTRDVNPYSLLAHLRRERKLMNGFRSQGLSVSEVVSLLSHSAIAKNNAGDSPQRYDFRDTAEGGNVIIWLNDIEKDPAYEDWPTSLQALLQRTFPGQLPSCRRDIHNAIVFVDLTSTQDVTTLLDSTFNLIRRGIPLRWGVVPQSGSSDAIEQAKIIYHLLDAYGVSAVEVYLQASLDGKKLAQPDQAIFDATVKTSTLIDERTALSFQDVLASEELDQRIANSKQYVSRLAGDGPQSPIIINGVAIPGNEEWLSSLSKRITFDLREIQKAIFEGNFNEDSWVPQHFLAQAASRRNPYIIPEDEKNITLIDMAEFENTHSHVYNKMPRVRASESSSKSDWVHITLTADFDSENGLSLLKSLADFREANPNAEIVLIHNPVAKAEKSGVSQDILESFSKTGDKFTADTLLELLAREPSSVSFPEESRLFWKAADPIYEALGLKPGQNSIIVNGRHLGPIPEEIEFTKDDLEGLVSYEMSKRAEPLSKALDDLGLLNKIESPFNIAKIQSLAALSTISDVPEGMFEQISTIRRNDDEKWNTEHTAIVKGDKDKAVFHIVAAIDPATEVAQKWVPILKTLGDMEGVHLTLYLNPKNNLQELPIKRFYRYVLEARPHFNPDGSVGSLKASFSGIPKEALLNLGMDVPPSWLVAPEESIYDLDNIKLSTIPAGSNVDAIYGLESILIEGHSRDTTNGGQPPRGAEVVLATEKDPHFADTIIMANLGYLQFKANPGFYNIQLKSGRSQQVFNLDSAGPISWAPQPGDETTEIALMSFQGATIFPRLSRKPGQETADVLAPEESLASELVGKGAQKVNQFLGKIGLNFDSEKVLQKGADLLSGKAVKKGTQADINIFSVASGHLYERMLNIMMLSVMKHTKHTVKFWFIEQFLSPSFKSFLPHMAAEYGFEYEMVTYKWPHWLRQQSEKQREIWGYKILFLDVLFPLDLEKVIFVDADQIVRTDMYELVQHDLEGAPYGFTPMGDSRTEMEGFRFWKTGYWANFLRGRPYHISALYVVDLVRFRQLAAGDRLRQQYHALSADPNSLSNLDQDLPNNMQFNLPIHSLPQEWLWCETWCSDEDLAKAKTIDLCNNPQTKEPKLDRARRQIPEWNVYDEEIAALAKRVKGEREIAAGLVDVQELEQVREKKEKDAERVVEHSEL

SEQ ID NO: 4145 - protein, 1656 aa, Salvia splendens
MGEARFRSRCFLCVIVVLVLCGLFSPLSAQSRSPKNVQVALRAKWSGTPLLLEAGYSLSLSLILELLSKEWKDLFWDFVESWIHAVDLDSDLRTAKDCLKKIAEHGKSLLSEPLASVFEFSLTLRSASPRLVLYRQLAEESLSSFPLADDGGTSEPSETAKLDISEALLLGKNVKSPGNKCCWVDTGGSLFFDVKDLHKWLENPIDTKDSAFQYPEIFDFDHVHPDSTAGCPTAILYGALGTECFKEFHMALSEAAKNGKVKYVVRSVLPSGCEQKTSPCGAIGTGDSVNLGGYGVELALKNMEYKAMDDSAIKKGVTLEDPHTEDLSLEVRGFIFSHILERKPELTSEVMAFRDYLLSSTISDTLDVWELKDLGHQTAQRIVHASDPLQSMQEINQNFPSVVSSLSRMKLNDSIKDEIIANQRMLPPGKSLMALNGALLNVEDIDLHLTKFRVLRLFNMAHQELTLAEQYRKLKIPPSTVRKFLSVLPPSETHAFRVDFRSDHVHYINNLEVDAMYKRWRSNLNEILMPVFPGQLRYIRKNLFHAVFVLDPASPCGLEASFPFCTIDTIIALFENNLPMRFGVILYSAKLVEGIEANDGELPVARLKDDEDISSLIIRLFNYIKENHGAPTAFQFLSNVNKLRMDSGAEDSPEVHHVEGAFVETVLPRVKTLPQETLLKLEKDQTLNELSVESTMFAFKLGFAKLECSLLMNGLVYEPNEEALMNAMNEELPRIQEQVYYGQINSHTDVLDKFLSESGVQRYNPKIIADGKVVKPKFVSLCESILVKESVLNDLHYLHSSETFDDVKPVTHILGVDATSKKGMKLLHEGIRYLIGGTKYARIGVLFNVNDDATLPSLLFMEVFKTAVSSYGHKKGVLQFIDQLCSFYEKEYMSSSGATENHQALIDKVVQLADANGLPSKGFVSACSGFSAENFRGYLKKVTQFLYRTIGLEFGVNAVITNGRVVRLFDGSTFLSHDLHLLESLEFKQRIKHIAEIIEEIKWEGIDPDVLTSKFISDIVMAISSSTSTRDRSSEGARFEILNADYSAVILQNENSSIHIDAVIDPLSPSGQKLAALLRILSKYVQPSMRLVLNPMSSLVDLPLKNYYRYVVPTIDDFSATDHVVQGPRAFFANMPLSKTLTMNLDVPEPWLVQPVVAVHDLDNILLENLGDTRTLQAVFELEALVLTGHCSEKDHEPPRGLQLILGTKHAPHLVDTLVMANLGYWQMKVLPGVWYLQMAPGRSSELYVMKEDGEGAGDTTLSKRITIDDLRGKLVHMEVIKKKGMEREKLLLPADDDSHSSKKKGSQNGWNSNILKWASGFIGGKEQSKKDVSSSLKPGSGGRHGEKINIFSVASGHLYERFLKIMILSVLKNTDRPVKFWFIKNYLSPQFKDVIPHMANEYGFEYELITYKWPTWLHKQKEKQRIIWAYKILFLDVIFPLALEKVIFVDADQIVRADMGELYDMDLKGRPLAYTPFCDNNKDMDGYRFWKQGFWRDHLQGRPYHISALYVVDLVKFRETAAGDQLRVVYETLSKDPNSLSNLDQDLPNYAQHMVPIFSLPQEWLWCESWCGNATKTKAKTIDLCNNPMTKEPKLQGARRIVAEWPDLDLEARRFTAKFLGEDIEPQEQVALPTPEIQKPAADYSAEDAESKAEL

SEQ ID NO: 4146 - protein, 1504 aa, Protobothrops mucrosquamatus
MLFLSVGPRGAQSAPRKAVTARLAAKWPATPLLLEASEFIAEESNEKFWQFLETVKELTIYQKGVSEHSYYDLLLKKAGQFLSNLQINLLKFSLSLRAFSPTIQMFQQIAAIEPPPKGCNAFVVIHGKSTCKTNEIKKLLMTAASRPKPYLFKGDHKFPVLKEPALVVILYAEVGTKDFATFHNVLSEKAQKSEFVYILRHFVKKRSTEKMYLSGYGVELAIKSTEYKAVDESQAGATRNRTEEEDNKNSEVQGFLFDTLTENHPDLKDNLKELKKYLIESSDNTEPLKLWELQDISLQAASQILSTPVYNALKVMKDIAQNFPVKARSLTRVLVNQQMRKEIEENQKHLHESLELKPGEARLFLNGLPIDLDLRDPFSILETLKIEGKAMHVLHSLGIKEDFPSKFMRLASQSQDASYALDIRHSAIVWVNNLERDAMYNKWPSSFQELLKPAYAGMMRQIRRNLYNMVLFIDPLQEEAAGFIKLIELIYTQKVPLRLGFVFILNTDEVVDGNDDAGVALWRAFNFIADEVDIPQAFVSILYMYRQVDEGEILSVHNVKRILHRQFPQADVEEILGLDSEYDDKRKAGAMFYKKTGLGPLPQALFNGVPFNRKEMNIAELETSLLKIIDATEAFQRAVSMGLLNDHKDAVDFIMEQQNVVSHINDIILGDEKRYLNFESPSVPIDVNDYSTFFFLDSQDKTFVISENMNYVTKQDDALIYPVTIWIVADYDKPDGRQLLSTALKHLKTSSHIRLGIVNNPTSKITEDSTIIARAIMAAFLTQKNVHLKNFLGRILKEETAKALAEGTKIKKFFFPAMDADALEKKYNTLGVDMIQTHQAFCQEVLKLLPGEMAVISNGRILGPLKEDELNAKDFDLLETITLNTAAAKIKSLVKEMGIDHKRGSNLVMKVNALLSSLPITDDRQDVEFFKDQHSILKINPEQSEPYFDIVGVVDPLTREAQKLSHLLIVLGQIVNMKLRLFMNCRSNLSETPLKSFYRLVMEPELSVGSNNFFPLSSGATFLEIPESLLLTLNMAIPESWLVEAVNSSYDLDNIHLKDVEGVVSAEYELEYLLLEGHCYDVSNRKPPRGLQFTLGRRNNPFKVDTIVMANLGYFQLKANPGSWILRLREGRSEEIYEIFQHEGTDSSGSQEEIIVVLNSFRSKIIRIQVQKKPDSENEDLLSEVTTEEEEDSMTSFTGRTWKANLEKKIDVLNIFSVASGHLYERFLRIMMLSVLRHTKTPVKFWFLKNYLSPTFKALIPHMAKEYGFDYELVQYKWPHWLHQETEKQRIIWGYKILFLDVLFPLAVDKIIFVDADQIVRSDLKELRDLNLRGAPYGYTPFCDSRREMDGYRFWKSGYWASHLGKKKYHISALYVVDLKIFRRIAAGDRLRGQYQALSQDPNSLSNLDQDLPNNMIHQVPIKSLPQEWLWCETWCSDESKEKAKTIDLCNNPKTKEPKLEAAVRIVPEWTDYDSEIQKLLNRIRNEKTNGTPFHPKDSKHDEL

SEQ ID NO: 4147 - protein, 1324 aa, Ophiophagus hannah
MMTGPMPLFVAGMLFLSIGRRGAESAPRKAVTARLGRFTGRWGDEEEARWVRLGAWRGVTAPAMRTVLFPRNASSGILYISFIFLFFFNIVSEHSYYDLLLKKAGQFLSNLQINLLKFSLSLRAFSPTIQMFQQIAALEPPPKGCNAFVVIHGKSTCKINEIKKLLMTAPSRPKPYLFKGDHKFPVLKEPAIVAILYAEVGTKDFATFHNVLSEKAQKGEFVYILRHFVKKRSTEKMYLSGYGVELAIKSTEYKAMDESQVEGTRNRTEEEDNKDSEVQGFLFDTLTENHPDLKDNLKELKKYLIESSDNTEPLKLWELKDISLQAASQILSAPVYNALRVMKDIAQNFPVKARSLTRVLVNQQMRKEIEENQKRLHESLELKPGEARLFLNGLPIDLDLRDPFSILETLKIEGKAMHILHSLGIKGDLPSKFMRLASQSQDASYALDIRHSAIVWVNNIETDAMYNKWPSSFQELLKPAYAGMMRQIRRNLYNMILFIDPLQEEAAGFIKLIELIYTQKVPLSRLGFVFILNTDEVIDGNKNAGVALWRAFNFIADEVDIPHAFVSLFYMYRQVEDGRILSVDNVKRILYRQFPQADMEEILGPDSYYDDRRKGLLNDHKDAVDFIMEQQNVVSHINDRILDDERRYLNFESPSVEILTFFFSDDALTYPVTMWIVADYDKSDGRQLLSTALKHVKSSSHIRLGIVNNPTSKVTEDSTIIARAIMAAFVTQKNFHLKNFLGRILKEETAMALSAGTKIKKFFSPGMDTDALEKKYNTMGVDLIQTHQIFCQEVLKLLPGEMAVISNGRLYFCLAYSFYRLVMEPELSVGPNNFFPLSSGATFLEIPESLLLTLNMATPESWLVEAVNSSYDLDNIHLKDVEGVVSAEYELEYLLLEGHCYDVSTRKPPRGLQFTLGRRNNPFKVDTIVMANLGYFQLKANPGSWILRLREGRSEEIYEIFQHEGTDSSGSQEEVIVVLNSFRSKTIRIQVQKKPDSENEDLLNEVTTEEDDSMGSFTGRTWKTDLEKKTDVLNIFSVASGHLYERFLRVMMLSVLRHTKTPVKFWFLKNYLSPMFKALIPHMAKEYGFDYELVQYKWPHWLHKEIEKQRIIWGYKILFLDVLFPLAVEKIIFVDADQVVRSDLKELRDLNLRGAPYGYTPFCDSRREMDGYRFWKSGYWASHLGKKKYHISALYVVDLKIFRKIAAGDRLRGQYQALSQDPNSLSNLDQDLPNNMIHQVPIKSLPQEWLWCETWCSIESKAKAKTIDLCNNPKTKEPKLEAAIRIVPEWTDYDSEIQKLINHIRKEKTDRNPSHPKESKHDEL

SEQ ID NO: 4148 - protein, 1603 aa, Rickenella mellea
MKRLWGLGGALVASINIGVRASSSPQVKVGLRSSWPEVPLILEVLESVAVENSDAFFPLLEALTAQNTPTTQQAIHEFALETAVSLGYLKEPGALASAELHIALHAATPKIQAFYQYYADQHFAEISNCTSWVDWYGERICDLDTLMRLVGHESIESTARNSSESYVCSQPKILTFDHINPPRSRNLQIPPRTAIFYASPTSTNFRDFHTYLLKLSSSPMPRVEYVFRHVPPEGRNVVERSYLSGYGVSLDLKKTDYLALDDRRSKQPGQNEETSDDTVTSNNDYIFSLLEQLYPENKTMDMNAPLTKEELKGKANIGIKATQLLHDSKDELGLLTILSQNFPKYATSIARRVVINESLHNEIQDNQPKAQGGISMAWLNGLAIPETDMTPLGLLRLMRKERSIILSLTSLGLSPSQAVELLTHPLVGEAHSDSGVLDGLVDASDRPEGGSAIVWWNDFTKDSRYVRWDSSLLGLLRGLYPGQFHQIRLNLFNVVLVMDLSQTSSLNFIAGAVKTIISRAFPFRFGIVPSVETLDGQKMARIFYYLIDNLGRAKTMTYLSQLTQLSSPMENLSPGIDWEIARAEFDALIAEHPPQDGDVPTDFDSIVEDGDSQPTFIRLERARAYAIRLDAKLASSPTGHAFVNGKHFDLGDDFLRHMQLEQQAQVQHLIEKVYSSQLTEGDAERMDTYFYDLPETTKKRSPYIFQTTETGDLRIHNLPDLFHRMGVQPTSGQFIYPTESDQHTLTTYVVADLDSEAGIALMREAVDSLENGSPSRLSFVHNPAPVNSPEDSPPHTRISQLVAHLIAKDQLARISHSTFKAILDWRMEDDATNPTSDTPVSQIPLGSDVDYDGSIDAEMYKRFCHTSLLVARELGLSPSDQAVVVNGRIVGPLTAGSFMVDDFKTLEEYELRKRVRPVAEALRNMTITPDDLDRATYSTLISMASSVIAAVQIPDPSEQGLFNTHHRVRHRQYRLLSGTYSAFDFGEASKSAFNFGFLIDPLSESAQKWSGLLMWLATIDSVYAEVHLNPATYREMPLKRFYRYNLRTRLSFNEDGSENKAQTLFNDLPSEPIYTLGLDVPPAWLVRPREADHDLDNIQLSALSSSERLRGVEAIFDLDFIVIEGHARDALTNSPPRGLQLQLTSLDSKPIDDTQVVANLGYLQFKAKPGVFQLEIREGRGRDVYAMESVGNEGWNSANVDQVGIDVTLTSFEGLTLYPRLRRRPGMEKADVLDEFVIGSSEPKGLFDNLASRVASLFNSKKEEAVPVKPQADINIFTVASGLLYERFASIMILSVLRNTNSTVKFWFIENFLSPSFLEFIPHFAEAYGFDYELVTYKWPSWLRAQTEKQRIIWAYKILFLDVLFPMDLKKVIFVDADQIVRADLKELVDLDLKGAPYGYTPMGDDNYEMEGFRFWKTGYWKDFLRGKPYHISALYVVDLVRFRQLAAGDILRGSYHQLSADPNSLANLDQDLPNNLQREVPIFSLDEDWLWCETWCSKDRLHRAKTIDLCQNPLTKEPKLSRARQIPEWEEYDSEIARFAGSLADKGVIRSHIAAVDVNALASAGAAAAAPPTEDSGPSGSQILDEAQPTEQAPEPTIRDEL

SEQ ID NO: 4149 - protein, 1591 aa, Coccomyxa subellipsoidea
MLIAPQVLQVVLSIRQLSPRLEFFRTQAAAADIQPGSCCFVDIGGASVSAEEELIKKLAEVGEGDYAVPDQAQLQPFDHVLAPAGAAVATVNTELRRATAVVLYGAIGTKCFRRMHALILSAAEKGAGKLVYVYRPVLAEGCLAGESCVGLGSGGGLPLPGFGVELAIKNMEYSALDDSKVEAEKEAAKEAGEEDEGPLEVEGFLFKRLIERRPEAHQALLSFRDHLLASSSDNEALKAGHSLAPADRAVYCRRKPGHENVLVWDMKELGLQAAARIAASSEPLRALTQMAQNFPNLAAALSRVSVPKALRSELKKLHRVLQGGSSFMLVNGIPTDIGTFDLYTLMEQIRKEVRLMDKLKETGLQPADITALVQLRSEMKEVAAEDLRIDLRSSEAIRWLNDIESGRQYWHWGQQLASLLQPMFPGQLHRVQRNLYSAVGLIDPGSAQGLQVAGVLLELFSATWPVRCGAILLPPDTIQRVKQSGAEVAASAAWEDLSASERAALAYIYLENAAGAPAAFKFLSRARAEHLMGEDAGDALSWTSVEEAFLAAWGDLPDTRNRDLTPAAALQELSEGPKEVMEELVKGVAFTISKGVAGVGTAVWVNGLLVTSSEGVPWEQMIPYQLQVEQQRLQEQIYFGRIQDSDEDILEAILRVFNAAPKYNPTLLQSDSDGAAKSPKQVALVGPDLSPMQEPWSQLGYLHHASTQDEVKGITHWLAGHKLVLGALGHLEAESSQGARVALVHNPADVTADISVLARAVTAASRLQSRRPKILPFLKSLLESHAGVGSVEEVVALAKDAGLNEKALEADLTASEAAAARLAEACRKALGLQAGAAAVVTNGRVVPLANADSLVTEDFGLLTLYADAAQVAKQVAAAVMTAQAEGRTVSAESAGADGDGADEAEEWTSDQLSNAAAVASSVLAQHGAVQQGAGKTAKLIAALRGLSPQVSNITVEGAGVAVEIWAVLDPLSKTAQRVAPVLQFLADTLQPSIKASLVFLNPQAELSDLPLKSFYRYSLPDISASGEGRLSQPGLPAAVFTGLPSGRILTLNMDVPEAWLVEPVRADLDLDNLRLADLGAAPSLQAEFELEALLLTGSCVDIAARSREQMTPRGVQLVLGTPQQPALVDTIVMSNLGYFQLKAAPGAFDLQLAPGRSRSLYLVDNSTAGVLAQEAGEEGAISTGVSIDSLGGRTMRLNLRKRPGFEGEDVLGTGSEGETGSVWGKVSSWLAPGSKGSPGRAGGLSAEEDPDCIHIFTVSSGHMYERLQKIMVLSVLRTTKARVKFWFIKNYMSPQMKRFLPRMAAHYSFDYEFVTYKWPSWLHKQTEKQRIIWAYKILFLDVLFPLSLRKVIFVDSDQIVRADFAELWNMDLKARLFSAFHGAPLAYTPFCDNNREMEGFRFWKQGFWKDHLRGRPYHISALYVVDLVRFRQSAAGDQLRVVYDQLSRDPASLSNLDQDLPNYAQHQVPIFSLPQEWLWCETWCGNATKKYAKTIDLCNNPLTKEPKLDSARRIVAEWPGLDEEVATFTAEVEADLAAEAVAGGEAADSPEQPAKVGGDIIQHHDEEDHGREAGGEKGSGSASEGHDASEL

SEQ ID NO: 4150 - protein, 1491 aa, Schizosaccharomyces octosporus
MMISNKSRRYIISTTFIQNTLILSHYLKSIFLDTLKNLFGKMRWNKWLTFVPFLSLCFAAKPIDVKVSTAFSKPSFVALLAESLHEENRDSFLWFLDNLPSIRKDDLITDEQLYNLTVESLKADKILSQEELTTFSYSVALLSGAPKLAAFSSIVSSHAEDCNTFLVLNEQTNLCFSDLPEESLIFSENYQPSPLDYKVIGDNLSEGLPVAVIVSDFGVDLDKFHKLYSSLAKNKKCNYILRYAPSQDTELEKLYVSSFGAHASLKRTDYLVMDDREIPMSSNENNTSRIDKSKKKKEVLFDLDSDELETVTQNEIASLDLLASEAIINSRNPLMTFKLLSQDFPMYAQHLVSKVSISDDLIEDVNHLQSQAIPEGKNAIWLNGISIDLEETDAFSILSWLRKERRILSGFQKLGIEPSKASKVLSSEQFDVTEAQFKFFRFHSQDDLEDNKAIFWMNEVETDTRYSKWPKSNMQLLTPIYPGQLHLLRKQLHTVIYPIFPSSDSSISLLSELVQFSRRPSPVQTGLVCVAPEEDEFGKTICRAFHYVARTNSKPSALKFLFKCLAGDPSAGAWALVEEHMPVEDYDEETFHKIKTSLNSNIYDTILSKSFQWSSRLGLDPESQEVIVNGRIIAHDENYDSNMYSIFIEDIPEIQLAVAQEMVSEEENLLDYLLKDAPHTRNPLIYPSSKSKIKQVDMLNLLDDTGYTHSDLLTIGDKKAKYSIWLVTDFASEEGLELTTTLAEAVSKFESSNLVLVQSDLENELPALITQLSSSSHHTTEHLLKVLNKNTKKKQSKLTCKVKSKLAKYSEASKAVVAKINNPSQSVLILNGRLINSISVDKLGVQDLEMLLSHEKSNYIDKLDNALVNATELKKKGILPFVSSYLKKLEFDYVRGSVPGHEKAMFPRDNFHSQLPPSSLTIGTDNFDSCTYHFVAILDPLSKASQKWSAILESISHLDGVGVRIYLNPSKGLSDFPLSRFYRYSIEHEPVFRYDGKFKDSGVEFDKLPAETLLTMDIESRDTWVVMQEEVDIDLYNIKLEHTSSEVLVEPISAVYELKNILIQGFSQEENVKSPPRGMQLALETTKHEHFTDTIILANLGYFQLKANPGIWNLKPLPGRSSQFYTITTLNRLDSGKEKQVVLDSFEGATLYPVMRRNPGFESSDILDEDMSPQRFFDKMKKKLNFFKNKNKDPTINIFSVASGHLYERFMYIMTKSVMQHTNKKVKFWFIENFLSPSFKHSIPVLANEYGFEYEYVTYNWPEWLRKQDEKQREIWGYKILFLDVLFPLDLHKVIFVDADQIVRADLQELMDMDLQGAPYGYTPMCDSREEMEGFRFWKQGYWKKFLRGLKYHISALYVVDLDRFRKMSAGDLLRRQYQLLSADPNSLSNLDQDLPNNLQHLIPIHSLPQEWLWCETWCDDQSLKKAKTIDLCQNPLTKEKKLDRARRQVSEWTTYDNEISAMLRNAEESRLAFTSPVQDLPDNNKETDEL

SEQ ID NO: 4151 - protein, 1485 aa, Capronia epimyces
MRLSGLSWSAAVVALWPLSLLIPSALSSHSVNVALETSFAAGPYLVELLETAALENSSSYFPLLDRIANGAFLELQTEQELYSKFIEVLQHDGHLSSPESLSSFKFALALHAAAPRVEAHFQYYNTSVQPHLMAAQDAVCPVWVYLDGQQYCSPELDRAQQAVSLPAVTEELPFDRVLGSNADGLASILYADITHPLFGQFHNVVSQTARDGRSTYRVRYRPASVTERKSLFVSGYGVELVLKRTDYIVIDDRDAASSDTPDEDRTSLDNVKDDELSDLKPLTTSEVVNLGLNAASFIASSSDPLQSLLQITSDFPRYSSLLASANASKEFLVEHRSNRERFLPSGYSVFWINGVQIEPRQINAYSLLDHLRRERRIIGDIRDIGLTSSEAINLLSSEVIAEAQANEVPQRFDWRDDIEADKVLIWLNDLEQDKRYASWPSALRNLFQRVYPGQLPQLRRDVHNLVVPIDMGSIKDIELVATSLQGLVRRQVPIRVALVPIGSGAIADDYTRVSYHILDTYGLAPLVAFFSDVAASKKLLPSPEKSFQKAILGRSVREGKRALPYDDVLISEDLLQRLQARNDYVSRLALSSSDPPFIINGVVLPRTDNWFELMSSRLFADLQLLQQAVYQGIIPEDSWVPQFFLLQASARRNEIVFPHDPKDIKIVDISRLAAEFPDALNILPRVPGAAATLLSDRAHLLVVTDVDSEDGRGLLMEVLAFRQQFPEIDVLLLHNPASDTQSSKLACAIYALAQDNGRDLTPEELRLILETESNLADAVHGAETCAAFWSAGVGLTRSLGFSHGQSGLWLNGRVIGPLNREFTAHDLESLLELERRERITPVTTAITSLGLEERFSNALDLAKVTSLVARALKSDLPEGLRESVPLIRMDRFKIWNGTHTSIKVSNTDDPSIQVVAVVDPASEIVQQWVPILQALSQLHGVSVQIFLNPKERLSELPVKRFFRQVISSEPSFNEDGSLVTPTASFSGVPKDTLFNLGMAVPPSWLVAPKKSIHDLDNIKLGNLAEGENIDAWYELEHILIEGHARDVTVGPPPRGVQLLLGTEEEPRFTDTIVMANLGYFQFKANPGYWQISLKPGRSSKIFNIDSVGPNGYSAQPGDETTSVALLSFQGLTLFPRLSRKLGMEAEDVLESSGSGGPMDYISKGASFASSALSSLGLKKTSTTNAEINIFSVASGHLYERMLNIMMVSVMKHTKHSVKFWFIEQFLSPSFKSTVPELAKHYGFDYEMVTYKWPHWLRGQKEKQREIWGYKILFLDVLFPLDLDKVIFVDADQIVRTDMMELVQVDLKGAPYGFTPMCDSRTEMEGFRFWKQGYWETYLKGKPYHISALYVVDLKRFRQLAAGDRLRQQYQALSADPNSLSNLDQDLPNHLQHTLPIYSLSQDWLWCETWCSDASLTTAKTIDLCNNPLTKEPKLDRARRQVPEWTEYDEEITSVIKAAKSQEDESTFGQDVEQKGVEAERKRDEL

SEQ ID NO: 4152 - protein, 494 aa, Galeopterus variegatus
MSGTNDISSLGPVAKFLDIPESPLLTLNMITPEGWLVETVYSNCDLDNIRLKDTEKTVTAEYELEYLLLEGHCFDTMTEQPPRGLQFTLGTKNKPVMVDTIVMANLGYFQLKANPGAWILKLRQGKSEDIYQIVGHEGTDSEPDLEDVIVVLDSFKSKILKVQVQKKPDKIKEDILTDKDEKTQGMWDSIKSFTISLRREEDKKEQDVLNIFSVASGHLYERFLRIMMLSVLRNTKTTVKFWFLKNYLSPTFKEVIPHMAKEYGFQYELVQYKWPHWLHQQTEKQRIIWGYKILFLDVLFPLAVDKIIFVDADQVVRHDLRELRDFDLDGAPYGYTPFCDSRTEMDGYRFWKTGYWASHLLRRKYHISALYVVDLKKFRRIAAGDRLRGQYQVLSKDPNSLSNLDQDLPNNMIYQVAIKSLPQDWLWCETWCDDESKQRAKTIDLCNNPKTKEPKLKAAARIVPEWVEYDTEIQQLLNHLENKKKNKILTHDEL

SEQ ID NO: 4153 - protein, 1628 aa, Aquilegia coerulea
MDRHNMRNSIHCLFLIIFIVFLSLVGSSVSAENRRPKNVQVSLRAKWPGTSLLLEAGELLSKEWKDIFWEFIDAWLNMESDSEPLTAKHCFQNIVKYGHSVLVEPLASLFEFSLSLRTSSPRLVLYRQLAEDSLASFPLEDETNSEYVPGDSAGVISTSPKSNVGKCCWVDTGSSLFFEVSDLLSWIRMPSDLAVDSFGMPELFDFDHVHFDSMDASPVVILYGALGTGCFRDFHVHLADAAKRGRVKYVVRPVLPYGCEEITSPCGAVGTNDSLHLGGYGVELALKNMEYKAMDDSMIKKGITLEDPHTEDLSQEVRGFIFSKILQRKPEMTAEVMAFRDYLLSSTISDTLDVWELKDLGHQTAQRIVHASDPLQSMQEINQNFPTVVSSLSRMKLNDSIKDEIIANQRMIPPGKSLMALNGALINIEDIDLFLLVDMVHQELSLADQYSKLKLPHSTIRQLLSTLPPSEANSVRVDFRSTHVHYLNNLEEDVMYRRWRSNLNDLLMPVYPGQLRYIRKNLFHAVYVLDPASICGLESIDTMISMYESNFPIRFGAILYSSKLIKKIEENGGEIPLLSVGEDNFHIEDDISSLIIRFFGYIEENHGTQAAFEFLSKVNRLRSASEEPLEETLEVSNVEGAFVETLLSRVKSPPQDILLKLEKGTEFKEMADASSLFVYNLGLSKLKCCLLMNGLVFEPTEDAVINAMNDELPRIQEQVYYGHINSRTDVLEKFLSESGYHRYNLQIIGDGNIKKRFVSLSASVLGSESVLNDINYLHSPGTVDDLKPVTHLLSINVSSKEGMKLLREGIRYLVGGSKRARVGVLFNTEYDAGSPTSIFVKAFEFSAASFSHKRKMLDFMDKLCSIFEREYMFKLDIESASSFVRDVCELAGSFSLPVEEYKAALSDFPVDLKKHFDKVSHFLYRQLGLDYGGNAILTNGRVMVPVEGSSFLSHDLVLLESVEFEQRIKHIMKIVEEVDWQDVDPDVLTSKFISDIIMFVSSSMAVRERNSDTARFEVLNSKYSAVTLNNENSSIHIDAVIDPLSPSGQKLSPLLRVLWKWIQPSMRIVLNPLSSLVDLPLKNYYRYVLPTMDDFSSVDYSVYGPKAFFSNMPLSKTLTMNLDVPEPWLVEPVVAVHDLDNILLENLGDTRTLQAVYELEALVLTGHCSEKGHDPPRGLQLILGTRSMPHLVDTLVMANLGYWQMKVSPGVWYLQLAPGRSSDLYAMKENEKEGQELTFSKRITINDLRGKVVHMEVVKKKGKEHEQLLPSDEVLEEKNKENLNTWNSNLLKWASDLIGGNEHSKKRKGALQENRAGGRHGITINIFSIASGHLYERFLKIMILSVLKNTPRPVKFWFIKNYLSPQFKDVIPHMAREYGFEYELITYKWPTWLHKQKEKQRIIWAYKILFLDVIFPLSLEKVIFVDADQIVRADMGELYDMDIKGRPLAYTPFCDNNKEMDGYRFWRQGFWKEHLRGRPYHISALYVVDLVKFRQTAAGDNLRVFYETLSKDPNSLSNLDQDLPNYAQHMVPIFSLPQEWLWCESWCGNATKSRAKTIDLCNNPMTKEPKLQGAKRIVSEWPDLDTEARRVTAKILGDDADTHEAITFSEKASGVSDTPEDMESKSEL

SEQ ID NO: 4154 - protein, 1622 aa, Leucoagaricus sp.
MKHALRLLGPALAALASKAAGPPVKVSLTSSWPAPPVVPEILETVALVNPDGFFPLLDQLTDPQMYIFAQSAAPEALYQSGITSAIGTGILQGASDVSEVQLNLALHAATPKLEAFYQHYEDKHNNSRGAACGSWVDWYGEVVCDIESLVQLVGHETIDSSEKANAELTYPRPKILTFDHIYPPPSQTLDRPYRTAILYATLDSKNFRELHTYLYAQANKPVPHIEYVLRYVPPQVPREAKNYLSSYGVALDLKKTDYLAVDDRLSSSKTSGKQEEQITDEAVEREVDPIIALIQAHPEDGSAPDAKTPLTEEEIGRLGHKVIQLITESESPLSALTRIAQDFPKYSTSLARRVQVSPQITGELASNAQKVQPGMNLFWINGARVEEKDVSVFSLLGLFRKEKSLMRNVVGLGLERSEALQVLTHSAVASAQKDGGVTDGLFDASDRTEGGGVVVWWNDFEKDKRYARWSPSLYNLLQPMYPGMYPNVKHNLFNTILVMDLTQTSNVHLLATTVANIVNRGLPFRFGLVPMIDDEDSLKIAKLFYYMINTYGRRKTLAFLGELVDIQLSVEEQPKHIPFSTVETAYESFILNLNQDDEADSQTDAESEKPTTHATLNAILESVNEEEQGAAPVEKLRKYIERLGGSKKESTSGRGHAFLNGRYLTLDEDFLRALQTEAGQQMQWLQEKIYTGAISDEADKRPNMATYFYDLPTTSKRRNRYIVPSTHGGLRIFNVPGVLASSGLGAVGLVKSGAWIYPDLDSVTSSLLVVADFDTEAGEGIFKQALESLTKGSQTRITFLHNPSSTPSSSDLEKNLLSSVIAHLISTHALSKLTPEKLAIALGYSLSFIAAGQTSKQTPLSTKNAFSTLGVDLSEIQSGAYARYVKASRLAARSFGLKGGETGVVINGRVIVPLEKDQLVAADFAALEDYEYRKRAVPVVQALTSVKENARQLDKASYANLVSMLASIISSSQQPDPSEIGLFDAPLRPRSRSYRLLDSEHTSFEVGDNTTALYHVAAVLDPLSSTAQRWSSLLNWLSTIPEVFIEVHLNPNWYTDIPLKRFYRYNVLSSLSFDEAGSEVPAQVAFEDLPIDPIYTLAMDVPTSWLVRPREALYDLDNILLSQLSSDDTSVDATFSLDYLVVEGHAREVKSHAPPRGVQLELVKTSNKSPIDDTLIVANLGYLQFKAKPGVFQLQIREEGRGRKIFKMESVGNEGWDSPSVEEGGDEITLVSFEGLTLYPRLARLPGMEKEDVLEDELEHEPTVLESLTSKLMSMFKTNHVDESAGKELSVVKQQADINIFTVASGLLYERFVGIMILSVLRNTNSTVKFWFIENFLSPSFLEFIPHMAEKYNFQYELVTYKWPSWLRAQTEKQRIIWAYKILFLDVLFPMDLKKVIFVDADQIVRADLQELVDLDLHGAPYGYTPMGDDNTEMEGFRFWKTGYWNDFLKGLPYHISALYVIDLVKFRQMAAGDLLRSQYQHLSADPHSLSNLDQDLPNNLQREVPIFSLHEDWLWCETWCSKDRLHRAKTIDLCQNPLTKEPKLSRARQIPEWEEYDSEIARFSRELAKEGKIHSRLATAGADVLASAGAAPPKDSGTTERPEEYTKKPMANDEVPSRDEL

SEQ ID NO: 4155 - protein, 1727 aa, Phytophthora megakarya
MRPTNSVLYASCVLRGSSAFGSHLTRSSCILVSTAAIFSTRRRSRRSLGVSCTSRGGGVSFSKTSAKAASPEYGGILRFTRRGRWSSGALGSNRTLRCMMAGPMPLELICPLGVILRVPLFHFHVDTLSAMWSTWLSAGLTALVAAAQPSLTAARGVHVNLTASWPSSPFFPLMETSEFLAEENPLYFWQFLEQLETRTAYVEFMGSDVDALGGLAVTVAESIAPGSKNILELMLATRTYSVKVEMFRQLALDSGVRPCGADADTWAVFYNNPHCVEAVVHADTWAVFYQESHCVEAVACSGDELDTILRNKKLQNKDQSCVAAGVNDVELQVDHKYPHIASDSNETAPSAILYGLVGTEKFHAFHSKLVKQAQKNKIQYMVRHYPRDSPLDTLLQGYGVALDIKNMEYKTIDDSKKTEEEEDATAGNESDEDEDEDEEEIDDEEVEGFLFKPLMISKKTEEEEDATAGNESDEDEDEDEEEIDDEEVEGFLFKPLMARHGAIADDLKEFYDLLIKKADGEQDQVLKAWHLKDLGASATRAIVDAKNPLKRLESLSQDFPMQAKKLAFSRKSISTELREGIASTRMQAANRRLKNKFIMNGIAVDPMERSFNVFDFMKTLKEEWSVAKQLGRLPMNQSELEDMLEHVRETNREQPAVRVHMRGTMGGSTPLYLNNIETDPNTANWSPDVNALRRPAWNLIFVRKNMYECVLALDPLSGAGRAALSHIGFMRMRGAPVQWALLVSSKELMASNTADERLALVEKYKSFQGADKATPWHFAKLLMLAQSKDTALAAAKDEENKKAQSGDEESNEEEETDRVVPIRIASAFLQRVGDEGSSDVLVERLVEAYAEAAEEVGTTEDNEDEALTCLKSDQFDKEVLAMTEFIHLKHLPLDSFVFNGVVQTNLDIQRSMMANFGRDQPLYVNMAHRDLLNDDMDLVDELMTAQDAYPAYLSIFETPEDTPGDVEVHTPKHLYADDVDGRLEAAAQHAVSYLHAPGSRALPKKQTVVFPADLNDPRDADHAYRVIKAVLEDSEESLRVGVVHQLNGEIKNKKDDNNVGDLAAAIFSGIGDSDNEVYMKFALETLSCIVKKKTITVMKDKLRGIWKKTEKEGGNKKVYKKVLKLLSSKSGKWLTSKQRSRLTEFNTLLRSRFPPAFAEVSEEESSKVALPHLFINGRQVTLPPQSLSDEDVTTIVNFDLKYRTQPVAKALIKRSVTLKVKEADNLSFEVMKTTGIVDKYVKTDRASRLDVDENSLNTVRLSGDPSLRVAAYVDPLSEAAQVMSSMLRMLHSQLNATIELVLVPADEYTEFPLQRFYRYLFDKKSSLAATSVEFRKLPVQPILTMKIDTPEAWNVQTLLAGDDLDNLRVDPDSPTAVKSTTSAVFRLESLLVYGQCRDATFNMYSPPNGLQLVLERDVGAQLLHRDTLVMKNLGYFQLQATPGVWSLHLAKGRADDIFDIIDPDTEVPLENYPIVVYDFGSHISQLFVRKKEGKEHEELLQSVEDAASEDKSKSESESTGKDLRSYWNSMLNMMGKHDDELEKKTVESSDEAEKDNALVQQKQRTGETIHVFSVASGYLYERFVKIMMSSVLKRTNNPVTFWLLENFLSPDFKKSIPVLREQFGMDIRLVTYKWPNWLRQQTEKQRIIWGYKILFLDVLFPLGVQKIIYVDADQVVRADLKELWELDLEGKPYGYTPFCDSRNVGFQFWRQGYWKDHLRGKPYHISA

SEQ ID NO: 4156 - protein, 1481 aa, Aspergillus campestris
MRPVSGLAASCRLAAVGAALLTPLVHASPSVNVALQASFDSPQYLVELLETAAEENSTAYFPLLDRIADGAFDDTITDKELYDRFLQIVSDDGHLRTPESLSSFKVSLAIRSASPRIAAHYQYYNASVQQTLMAAQDAACPVWVHTDGKQYCSSAMERAQQDVSGELDPRELPFDRVLGDLALPPAVLYADVSSPMFKDFHLALSALAKEGQISYRIRYRPSQHRSPRPLYVSGYGVELALKRTDYIVIDDRDAEQRDGKPSNAEGDAPDDLKPLSSSEVSRLGVNTVSYVMDSDSPLDTLIKLSQDFPKYSANVAAHDASPELLQDIRSSRLQLLPPGTNVMWINGVQVDPREIDAFSLLDTLRRERKLIEKFRDLGISATEAVDLLSHEYLGKALAQDAPPRYNYRDEIEGGRIIIWMNDVEKDARYEQWPSSVRAYLQRSYPGQLPAVRRNANNIVIPVDLSTMEGVQVVINNIKIFVQNNIPVRFGLVPVASSPGSSAQLKVAHYLQETFGLASLLQFLEETAAKKSAASPDQACFEAATQDQTARADRQVLSFEEVLKDKDLDALVARTADYQKRLGIEGKKPPILVNGAPVSSGESWMQEMSVAISKDIQTIQRGVAEGVIDDDTVIYEYLLSDAFDRRTSWVVPEDPKDIQVVDIATVSDSREEVLRELPHIASQSDDALDSLHLLVVGDFDSGNGQALLTAALESREKHPEVEVLFLHNPTTHGSSTGASAALYRSLKGDKKGDATQVLADVASYDGAEAPEIAQFWEAQQPLVKDLGFAPGARGVVINGRTVGPIRDDIAVVLDDMDQLFAYEQKKRIGPVAKAVKELGFGSKLSGPLAFAKLTSLTTLSTISDVPEGISQPMSEVRLNLFGKWEDSRSTITVSGSEDPAITIVASIDPTSEVAQRWLPILKVLSELASVRLRLFLNPREQINELPTKRFYRYVLDSEPSFDDDGALSRPTASFSGVPVDALLTLGMDVPSPWLVAPKESIHDLDNIKLSSVRDGADVDAIYALEHILIEGHSRDTTIRSPPSGVQLVLGTDDNPHFADTIIMANLGYFQFKAQPGLWKIDLKPGRSERIYNIDSVGSLGYSPQPGDENTEVALLSFQGKTLFPRLSRKKGQENEDVLETGPQPGTAMDYVSKGLNFASGILSSVGVGSKGEEKHADINIFSVASGHLYERMLNIMMVSVMRNTNHSVKFWFIEQFLSPSFKSFLPHLAKEYGFSYEMVTYKWPHWLRAQSEKQRQIWGYKILFLDVLFPLSLDKVIFVDADQIVRTDMYDLVTMDLEGAPYGFTPMCDSREEMEGFRFWKQGYWKNFLRGQPYHISALYVVDLNRFRALAAGDRLRGQYQMLSADKNSLSNLDQDLPNHMQHQIPIKSLPQEWLWCETWCSDASLTQARTIDLCNNPQTKEPKLDRARRQVPEWTEYDEEIAALTKKFALEQEVLQKEQEQIHGEEEDEDGDDSGWDKDEL

SEQ ID NO: 4157 - protein, 1956 aa, Nylanderia fulva
  MOD_RES (1529)..(1529): Any amino acid
MGVLIFFYTLLLCSTQLGADKKINKYVTTLINAKWNETPLILEAAEYLSDENPSYFWKFIDAYSRKISDLVIATEKENYDIILELVKKYLSEAEIAVFKLGLSLRIYSARVEMFSQMAVNKNVSLYGCNNVVNVGGTFTCSLQDIDTLLEQDTWETADTYDVDHRYLSASESDKVIILYGQIGTPTFIDFHQKLKNIAETKEINYILRHYVKNRADKKLRLSGYGVELQMKSTEYKATDDSDIKDNTGKSSEVANDGMEEIEGINFMILKKLYPDQQAELDKIQMHLLETSHEIGAFKVWQFQELSHQAAERIMKSPSVDALNVLTDISQNFPMQAKSLIRTKVNSDMKKEMKLNQEIFMAGLNIQPTDTALFINGLFFDLEAIDVLTLLESLRSELRVMEALHKIGFSNKKMSKLLALDLSGSTDNQNFAMDIRDSAINWINDIENDSRYSKWSRSLTELLRPTFPGMLRNIRRNLYNLVLIIDPLSEDSMSLIALAQSLYAHSAPLRVGLVFVTNFNTSVTGLMDASVAINNAYHYFADTKSSKEALHFLSELGNYIGPYGADIDDIKKVIRSKDSSASIIYILGEESEYDVGRHLASDFIKRCSFKKFPQALLNGIPLTPSQINSESYEEAVLSTIMSQTPALQKAVYRGELTEGDDVVDFLMNQPNVMPRLNERILKVDKNAWLNLIGTIPDDDDYTKWSSPDLSTYLMTKMQYFFVPRRNNVRHLYSFWIVVDLRSSSGRQLLREALEYVESNTDARISIIVNAEDNLKNSKSDINKIVLAALNALSPEKAILYIRKIIREENAALITDGSFEIEDESVAALLENQNPILLLHQHYSKNVLNLETGAKAVLCNGRIIGPLDSGEEFTSEDFSLLERFSQSTYGEKLFMKLMKDQFYNEDDYEEENNITDDMIMKISSLLVPRPQTRNRYDVPFHGDDNSVIKIPAADPDKVAFNFIAIVDPVSRGAQKLGPILKTVQQALNCNIKVFLNCLDKNSDMPLKSFYRFVLEPELQFTPEGDISGSIAKFTKLPTSSLLTQYIHAPENWLVEVVRSVYDLDNIKLDNVAIGVHSEFELEYLLLEGHCFEAIVGNPPRGLQFTLGTEKQPVMVDTIVMANLGYFQLKANPGEWVLRLRQGRSAEIYDFSTVEGQDVIQNGNDVKVLISSLRSHVLKVKVSKKPDKAGLDLLSDNEKDSGLWNSISRTFTATDESEDQDEKLNIFSLASGHLYERFLKIMMLSVIKHTKTPVKFWFLKNYLSPTVKDFLPHMAKEYGFEYELVQYKWPRWLHQQTEKQRTIWGYKILFLDVLFPLNVKKIIFVDADQVVRADLKELATLDLGGAPYAYTPFCDSRTEMDGFRFWKQGYWRNHLQGRAYHISALYVVDLKRFRRIAAGDRLRGQYQALSQDPNSLSNLDQDLPNNMIHQVAIKTLPQEWLWCETWCDDASKRYAKTIDLCNNPMTKEAKLQAAMRILPEWVGYDEEIKALQQKLENANRQTEKDSAWPLSIVRAPTSFAFLLVDELPRNFXGDMENNSVINGNSSVNLQTVQQNTKANEFKDKAIYGYGTSIPPNNNEDEESEISTRKVIFCVHGKLSGCCTVVKSSVDENAAVDYRQNPITPEDHCHRERNEEIDKKARKKLLIASVLCVIFMIAEIIGGVLSNSLAIATDAAHLLTDFASFMISLFSIWVAGRPATRKMPFGWYRAEVIGALTSVLLIWVVTGILLYLAVERIVHKNFELDAMVMLITSAVGVAVNLVMGLSLHQHGHSHGGGHDHGGNNDVENVLDDDFKGEDSKKNINVRAAFIHVLGDFIQSVGVFIAALIIYFKPTWIIVDPICTFLFSILVILTTVAIIKDVVNVLMEGIPKGFEYSQVESTFMQIDGVVKVHNLRIWALSLDKTALSAHLAIKPGTSPQNILRTATRNIHDKYKFFEMTLQIEEFNERMENCKQCKALSQ

SEQ ID NO: 4158 - protein, 1084 aa, Miniopterus natalensis
MTVSFIQYLGSPIDIKWINDLENDYLYVAWPASCQELLKSLFPGKIPSIRRNFHNLVLFIDPAQEYTLNFIKLAEVLYYRKIPVRIGFVFIVNTDDEVDGTNDAGVALWRAFNYVAEEYDVSQAFVFITQMYQKVKSQNIITVDNVKSVLQDKFPQADILDILGINSRYDDKRKAGASFYKVTGLGPLPQALYNGESLNHEDLNIQKLERALLQKMMDVTIYLQREVFMGTLNDRTNAIDFLMDKNNVVPRINHLILYSEQQYLNLISTSVTADVEDFSTFFFLDSQDKSAVIAENMYYLTQEDEDVISSVTLWIIADFDKPSGRNMLLNALKHMKTTFRSRLGVIYNPTSKINEENTAISRGILAAFLTLKNNFLGNFLRKLAREETATAIYSGDKIKTFLTEGMDKDAFEKKYNTVGVNIFRTHQLFCQDVLKLRPGERGIVSNGKFLGPLNENFCEEDFFLLEKITFTNLAEKIKGIVENMAINSKNKSDLVMKVDALVSSLPTPESRYNVAFLKENHSIMKVNPQENDMFFDVIAIVDPLTREAQMMAQLLIVLGKIINMKLKLFMNCRSKLSEAPLKSFYRFVLEPELTLVSNNVIEPVAKFLDIPESPLLTLNMITPGGWLVETVHSNCDLDNIHLKDIERTVIAEYELEYLLLEGHCFDTTTEQSPRGLQFTLGTKNQPVAVDTIVMANLGYFQLKANPGAWILKLRQGKSEDIYQIIGHEGTDSQVDLGDVIVVLNSFKSKILAIQVQKKPDKIKEDILTDKKEKKGMWDSIKSFTRSLHKEKDKKETDVLNIFSVASGHLYERFLRIMMLSVLRNTKTPVKFWFLKNYLSPTFKEVIPYMAKEYGFQYELVQYKWPRWLHQQTEKQRIIWGYKILFLDVLFPLAVDKIIFVDADQIVRHDLKELRDFDLGGAPYGYTPFCDSRTDMDGYRFWKKGYWASHLLRRKYHISALYVVDLKRFRRIAAGDRLRGQYQALSQDPNSLSNLDQDLPNNMIYRVAIKSLPQDWLWCETWCDDESKQRAKTIDLCNNPKTKEPKLKAAVRIVPEWVEYDTEIRQLLDHLENKKKNAILTHDEL

SEQ ID NO: 4159 - protein, 1563 aa, Ciona intestinalis
MCSNLIFFITTLVCLSSIIEISKADPKSIVTSLKSKWKSTPLIIEASEFMASESTDAFWKYVETIMGFDIAHQTDISARTLYQTALKAAHITFDDDKMDSLNMQLLKFALSLRTYSPRVEMFHQLAVINGLTGCDIFFDVHGQKTCEYSEVHQLLKSAKMQDLQPSTVFKQDHVFPESKSSDSTIILYANIASTEFKQAHDLLKRLAKAGEAKYVLRHFIRSRPDKGVQLSGYGVELAMKSTEYKAIDDSVVKDDGSSASLLDDGEVEVEGFNFSTLARVHPQLTKQLAELRGHLMESTNEMQPMKIWQLQDLSFQAATRVLNAPKNDQLKILKDISQNFPTRVRTLVKQQVPDELRHEIKQNQRSFEQFDIDQGQAMFLLNGIQIDVDETDMFKLLDMLRSEGKLISGLKKLNLNSNQIQKAMKLNVHPEASGKHILDIRESAIIWANDIETDERYKRWPANVHELLRPAFPGTLRRVRKNMFHLVFVIDPTHADAKYLVEAAEIFWANDVPLRIGFSFLVDDSAEIDGNDDAGVALVRAYNYARDEMDDNEKSFSFLTNVYKSLKEGSIITVEHIIQRLKQKFKSADIDDILGSSSEFDSNRKLGKSFQSRTALVGPVNVLMNGALLSDDDISDDMFEQVVLDKIMEETPVLQRAAYMGELSNNGDPLEYLMSRNGVVPRFNDRVLSAEANFFDLLGNAKKESVYLNPKQFAKLSNSDKTATISEQLSTLYLSKTDSSKHIRPITMWVIADVETSAGRSFVYSALKHVKTSSNTRLAIIHNPKNTDHLTSSSKYMRAVEAAILTQQNNHARNFILKLLKPENAAKIASSDSLSEFYVGGMAESAFEKAMTSDPKVSLAHITAHSDWSTTVLNLEPGQNAVLANGKLIGPLDQNEVFVADDFLLIEILMYSSSGEKIQEVVKSMQLQLTPPEKSDIIMKLTSHLSSQPKVEAERRDLSPPFAEHSVVDLPSSDPERSSYDILAVLDPASNIAQQIIPVIEVLREVLDANVKIYMNCKEKLSDLPVKRFYRFVLEPELSFKVDNKLSDGPLAKFSDMPNKSLLTLTMHPPEGWMVEAVSAVHDLDNIKLSEIRNKLVSADYELEYLVLEGHARDVTTGQPPRGLQFTLGATKDKVTVDTIVMANLGYFQLKASPGVWYLNLRHGKSSDIYDIVSHENTDSSTGDVIVLMDSFKSKVIVVKVSKKSDKSDSSLLEDDESEGKKEEGGGGGIWNSIKSSLGGGGGESESKEWEEGASNSSDVINVFSLASGHLYERLMRIMMLSVMRHTTSNVKFWVLKNYLSPQFKDFIPHMAEEYGFEYELVQYKWPRWLRQQTEKQRTMWGYKILFLDVLFPLNVEKIIFVDADQIVRANLKELRDLDLEGNPYGYTPFCSDRTEMDGFRFWKGGYWAQHLAGRKYHISAIYVVDLKKFRQIAAGDRLRGQYQGLSQDPNSLANLDQDLPNNMIHQVGIKSLPQEWLWCSTWCSDDSLSRAKTIDLCNNPLTKEPKLEAAVRLVKEWPDYDEEIKTLQSKFSPEGNQSSKSKDKETGFASTLDKSAGKHEEL

SEQ ID NO: 4160 - protein, 1200 aa, Neotoma lepida
  MOD_RES (163)..(163): Any amino acid
  MOD_RES (538)..(538): Any amino acid
  MOD_RES (783)..(783): Any amino acid
  MOD_RES (1143)..(1143): Any amino acid
MTLGIVADLSFQTAARILAAPVELALVVMKDISQNFPTKARAITKTAVSPQLRTEVEENQKYFKGTIGLQPGDSAFFINGLHIDLDTQDIFSYTSFLPADSSFLKLWVNNLEVDSRYNSWPSSLQELLRPTFPGVIRQIRKNLHNMVFIVDPVHETTAELMSXAEMFLSSHIPLRIGFIFVVNDSEDVDGMQDAGVAVLRAYNYVVQEVDGYHAFQTLTHIYNKVRTGEKVKVEHVVSVLQKKYPYVEVNSILGIDSAYDQNRKEARGYYEQTGVGPLPVVLFNGMPFEKEQLDPDELETITMHKILETTSFFQRAVYLGELPHDQDVVEYIMNQPNVVPRINSRILTAKREYLDLTASNNFFVDDFARFSSLDSRGKTAAIANSMNYLTKKGMSSKEIYDDSFIRPVTFWIVGDFDSPSGRQLLYDAIKHQASFSDFILGGELWSVLFVSEAPIGFKTSNNVRISMINNPSQEISYANTPIFRAIWAALQTQTSNSAKNFITKMAKEETAEALAAGVDIGEFSVGGMDVSLFKEAFXSSKMDFILSHALYCRDVLKLKKGQRVVISNGRIIGPLEESELFNQDDFHLLENIILKTSGQKIKSHIQQLRVEEDVASDLVMKVDALLSAQPKGEARIDYQFFEDKHSAIKLKPNEGETYYDVVAVVDPVTREAQRLAPLLLVGLLFYRYVLEPEISFTADNSFAKGPIAKFLDMPQSPLFTLNLNTPESWMVESVRTPYDLDNIYLEEVDSVVAAEYELEYLLLEGHCYDITTGQPPRGLQFTXGTSANPTIVDTIVMANLGYFQLKANPGAWILRLRKGRSDDIYRIYSHDGTDSPPDANDVVVILNNFKSKIIKVKVQKKADMVNEDLLSDGTSENEAGFWDSFKWGFSGQKTEEVKQEKDDIINIFSVASGHLYERFLRIMMLSVLKNTKTPVKFWFLKNYLSPTFKEFIPYMASKYNFQYELVQYKWPRWLHQQTEKQRIIWGYKILFLDVLFPLVVDKFLFVDADQIVRTDLKELRDFNLDGAPYGYTPFCDSRREMDGYRFWKSGYWASHLAGRKYHISALYVVDLKKFRKIAAGDRLRGQYQGLSQDPNSLSNLDQDLPNNMIHQVPIKSLPQEWLWCETWCDDASKKRAKTIDLCXNPMTKEPKLEAAVRIVPEWQDYDQEIKQLQILFQEEKEMGTLREEKTQDGSQKHEEL

SEQ ID NO: 4161 - protein, 2267 aa, Trichuris suis
MFRKRTVRNLRRKTANSDSSEGERENAESGPTANVPPPVDTIPAPSHVTGSAASLLSFAEDVEEEGCTVKFEKKSKVRRTPKSLLKQESGEMVFTKSYKSKPTKPLESESKEKVETTITQSSNRTEVLVVESDEAVVEVLSEVPSDDDDEEFQDVLIGGRIPDANLIHKARKKRERAREGTALPEVITFKDPDKNRSTRRLVREEDDSESDEERYKFYSRLESKAEEERREVQANFVSVEQDSDEERDDELERWEQEQMRKGVSFQKLAYYKKEISACAGLDSHREDGSKPSGPYSEINEPLPMDLEVDLEQTEAAGSFVSGSRRTKQFPAEFYDDASAIASADDAYHKCMKKVKESLKECEENHQSRLNTLTGLHERLEENEQMETQLSNAKPSLIMQYNFFQRLNVYVNSLLDCLNEKVPKIDILEKEAIDYLQRRSDYFIQRQKVDINDQYDDCMASASGLKAKSTDPEKVMRIAEREARRTRRRLKREKCDSSESHCEGMSSDDEDTSARISEFCSKKDSWAKSAEELFVDVADEYGKFESVCQRFSEWYDKYPVFYREAFVTLCLPKLLSPFIRLEMLGWTPLEVNYKPLDSFHWYQSLLLFGCGSGLPEEHCIVVLIPTVVEKVVCPLLTELVKKVWRPASSSQTELLCSFLRHLFSTYPTLTGESKRTTQLLDAVYNRFEKMLNDEIFLPMFPKDILDVRSTGAFNFSERQFWFSVKCLKNALLLRGVLSDHSVKKLVFDGLLNRHIIARLQSTPAVDMSVWTKTEALCDLIPLEWTNCPINEWSQSRFEPISGLLKKLSKNLNGTKTTGARATQKNVIAYVQSKWADTPLVVEASEFMAHEGDGYFWKFIEVLGKNETDLGSATDEGIYERLIGIAKSVLDSKSRVKLFQFALAIRCHSPSVEMYRQLSLSLSGRPAGHVFVDVHGQLSSNINSLDELLSQAKQRSPAIFSFDHIYATRSNKAKKWTILYANLESNEFIAWHDLLKSRAIKGELNYVFRHLPRVGKGKVPLSGYSVELAIKSTEYKAQDDTKIRSKPTAGANLTDDGDEEEADLDGFNIRLLKLLHPELRDRLDEFKLHLLEADELAPLKVWQLQDLSFQAGQRVLLAAKEDVLHTLQELSQNFPLMARSISLTAVKPEFRSEVETNQEAFSEIGIEPGNSAMFINGLRIDLDEIDIFSLLDKLKKEERLLAGFFDMGFRKETQSLLYRISSETSWSKFALDYTQWLPDFVNDLENDPQYRQWGNSVQLLLQPYFPGMIRPIARNFFTLIFAVQLGDDNARSLLQIAKSLYEHVAPVGLILATNPDKKISGYSDGGVALLNAYNFIKGDTSIERALKFVLHVYNRVPSGNVTPSDVIDVFKQKYPDEDLSNVFDVDSDYNSGRQRWAQFAQNSGLSKLPSVLLNGFPMADNDVTSDQFEEAVVLEVSQVTSELQKDVLEGKLTDGVDVQKFILNKPFVLPKLNPKVLATDNEALILTDVMEYKVRTVDELKELGRKQQNQYIVQSRRYLTKNDESVLRPVTLWVVANVATKDGRDLYLAAIRSLKQLPNERVGLIHNVAPNDRVGYAIASLIQACLKLPLHQAKVIITKMLEKQLKTIDELEKLDIHGVDWSFLRNELTKKGEDIVAIDSYYSTHILNIPSGKVGLIINGIILSDVTSKDFSSTEDFALIEKYLLSSGCKVIASQIRKWNVPHDDGRSSDLVMRVFSLLKAYGPDTKRQWVTPLMQNNSCVDILSKDMTSATFEVVAIVDPLSASAQQISHLLSTIGHVVNADIRLCMNCKPKLSDIPLKRFLRVAIPTQLEFNQDGSLKRQPVARFSILPQKQLFTLNVIAPHSWLVEATEAAYDLDNIKMSDAFTDVVGIFELEHLLLEGHCFDEVTGSPPRGLQFTLGTAEQPVMFDTIVMANLGYFQLKANPGAWLLRLREGRSKEIYKVNSLDGSQVANDEDMVVILDSFGGRTVKIKVAKKPDKYEEELLPTSGEEDEESSLWQSISKKFTSPKDDYDVLNIFSLASGHLYERFLRIMMLSVLKHAKSPVKFWLLKNYLSPHFKAFLPFMAKRYNFSYELVQYKWPRWLHQQTVKQRVMWGYKILFLDVLFPLDVKKIIFVDADQVVRTNLMDLMRLDLEGAPYGYTPFCDSRKEMEGYRFWKSGYWKQHLGDRKYHISALYVVDLKRFRQIAAGDRLRGQYHGLSKDPNSLSNLDQSAMRIIEEWRDYDAEIKKLLDEYDRQRGIDRSASNEEEEEEEPQQPSGPIPHGEEL

SEQ ID NO: 4162 - protein, 1551 aa, Cryptotermes secundus
MQFLVIALLVHVFCGAAGGASKQKTKSVTTLIEAKWEVTSLVLELAEYLRDENENFLWEFVDGVCALDPPIADLENERAKYDTALDVAGLLMTPAQISVLKLALSLHIYSPKVEMYSQMAIERGVSALSCPVVADVAGKLTCYVKEMKKFISEKEGGDQSHVETFGLDHHYPGSQNNTLTVVLYGELGTQEFAEFHQVLKTYAVKGDIDYVLRHYIKERPNRRVRLSGYGVELQIKSTEYKVQDDTEVKGDKSQDSYEQDDEDDEIEGFNFSRLKHLYPDKKENLAKLRQHLLESSNEMAPLKVWQVQELSLQAAERIMSSPKEEALKVLTNIAQNFPLQARSLVRTVVKDELKQEIKRNQELFASSLNLQPADTALFVNGMFFDLDVVDVISLLEVVRQELRVMEGLHKIGISDSHMSSLLALDFSSSGSSSSPEYAIDIRDSAVMWVNDIENDKQYRRWSDSLMELLRPTFPGMLRSVRRNLYNLVILANPAKKETRPLLKLAESFYVHVAPLRIGLVFTVDPDQSVSGNMDAGVALLNAFNYVSDVKDAYHGLAFITDVYATLKEDRDVVVEDVISLLSSKFRSADVDEIFGEDSEYDTGRRLARDFVERSGFRKIPQALLNGIPISEKHLNADDFEEAVLSEIMNQTPVFQKAVYKGDFTDGDNALDYIMNQPNVMPRLNDRVLNQDKNQYLDLMGLPLAGEIPLTLESFSGLSPRDKTATIISRGVQYFLKKQHVDTTVTALHIITHWIVTDLGTADGRQLLIHALDQMRSSGGISVGVLLNPPTVEQFQQVDRIVLAAPRVLQPGHASQFIIKILSDDSLVEALNNGQKDLSDISVPGVDLMELSEALKEDSFELLKVQQLYCRQVLNVPAGARAIVTNGRILGPLEQTEKFTLDDFSLLERYSMNSYGDKILQTLKKTTEHNADDYDDVLRDSNVLMQAVALLVSRPQSRNRFEIPVHTDIHSVIKLPPHNVSEPAYDIAAIVDPVSRGAQKVGPILSVLQEVLNCHIKVYLNCVEKNSDMPLKSFYRFVLEPEIHFTSDGRQTSGPMARFANMPTSPLLTQNMQVPENWLVESVRSPYDLDNIRLEDVDSVVHSEFELEYLLLEGHCFETTMGNPPRGLQITLGTETQPVVVDTIVMANLGYFQLKANPGAWILRLRQGRSADIFDIVSHDGSDTPANSTDIKVLISSFRSHVLKLKVAKKPDKMHMDLLSDDSDPNSGIWNSITSTFGASKTTEEEGDERINIFSLASGHLYERFLRIMMLSVLKHTSTPVKFWFLKNYLSPTLKDFLPHMAKEYGFEYELVQYKWPRWLHQQAEKQRIIWGYKILFLDVLFPLDVRKIIFVDADQVVRADMTELRDLDLSGAPYGYTPFCDSRTEMDGFRFWKQGYWRNHLQGRRYHISALYVVDLRRFRRIAAGDRLRGQYQALSQDPNSLSNLDQDLPNNMIHQVAIKSLPQEWLWCETWCDDASKQYAKTIDLCNNPLTKEAKLTAAMRIISEWKDYDLEIKKLQNKINMNQTDEEREFMSGESTTWKADDHEQHSEL

SEQ ID NO: 4163 - protein, 1486 aa, Exophiala oligosperma
MQLPRLLQNSVAGGLLCAALFTPLTGASPSINVALETSFSAAPYLVELLETAALENSSSYFPLLDRIADGAFVDLQTEKELYNKFIEVLQQDGHLSNPESLSSFKFALALHAAAPRVEAHFQYYNHSVQPHLMAAQDAACPVWVYLDGQQYCSPALDRAQQPVSMPEAEGELPFDRVLGSDVDGPHSILYADITHPLFGQFHSIVSQTAREGRSTYRLRYRPSTLSARKPLYVSGYGVELVLKRTDYIVIDDRDAQKSEASKPEQISLQQAQDDDLTDLKPLTSSEVVSLSVNAASLIASSPDPLERLLQITCDFPRYSSVLASTNASKEFLAEHRANREQFLPSGYNVFWINGVQIEARHINAYSLLEHLRRERRIIGDLQKIGLAPSEAVSLMSSEVIAETQANESPQRFDWRDDLEENKVLMWLNDLEQDKRYAGWPSSLRALFARVYPGQLPQVARDIHNLVVPIDMTDVKDIELVTTALQNLVKRSVPIRVALVPTGTGAVADIYSKLSYHILDTYGLGTLMSFFTEIASSKKLPASPEKAFTTAIKGRSLREGKEVTPYEGILQAEPLDAKLKARDAYVKRLALGSANRPFVVNGVVLPRSENWFEVLSSRVFSDLQLLQQAIYEGAIEEEGWIPGILLFSAAARRNELVFPSDPKNVEIVDINRLTNDFANEFAALPRILGNAATLLSDRAHVFVIADLSTAAGRAFLQQALDFWEAHPEADLLILHNPLPDSELHSVASGLHALTQHGRDLTVEQVRTLLEQDTILPEGEEEAGRFWASYWGLLNQVGLEMGQNGLWLNGRVIAPVDDSFMATDFESLLEYERRERMAPVTTAITSLGLEERFGDALDLAKVTSLVARSLKSDLPEGLRESAPLIRMDRFKIWNDTHTSFKISNGDNPTIQVVAVVDPASEVVQQWVPILKTLSHLSGVSVKIFLNPKDRLAELPVKRFYRQVVSSEPTFDSEGSLQEPTASFQRIPRDILFNLGMTVPPSWLVAPKECTYDLDNIKLSSVADGDNIDAVYELEHILIEGHARDVTTGPPPRGVQLLLGTEQEPHFTDTIIMANLGYFQFKANPGFWHITLKPGRSSKIFSIDSVGPQGYAAQPDDETTSVALLSFQGATLFPRLSRKPGMEDEDVLEASGGAMDYLNKGASFASSALSSLGLKTKSSNNADINIFSVASGHLYERMLNIMMVSVMKHTKHTVKFWFIEQFLSPSFKSTLPDMAEHYGFDYEMVTYKWPHWLRGQKEKQREIWGYKILFLDVLFPLDLDKVIFVDADQIVRTDMMELNKVDLKGAPYGFTPMCDSRTEMEGFRFWKQGYWETYLRGKPYHISALYVVDLKRFRQLAAGDRLRQQYQALSSDPNSLSNLDQDLPNHMQHVLPIHSLSQEWLWCETWCSDESLGVAKTIDLCNNPLTKEPKLDRARRQVPEWTEYDEEIASVLKEAAGKRSSRQLPEVDEVAGKKEDIVAADDERKRDEL

SEQ ID NO: 4164 - protein, 1483 aa, Oidiodendron maius
MRAMSFPWGLTGALLASTYLHSLCVSASPSINVELRASFSSAPYLLELLETAGDENSTSYFPLLDRIADGHFSKASTDKELYDQFIQVLKEDGHMSDPHTLSSFQFALSMRSSAPRIEAHYQYYHTSAEPYLQADQEPSCSIWVLFNDKQYCSPLLEEANGDVSGHSQAQELQFDRVLGSRSAPATVLYADITSPSFGQFHKSLVKAALEGKTSYRIRHRNPTSEFKPLTIPGYGVELALKRTDYIVIDDREDNEAKTSNSDSETKVKFEDEEFADLKPLSSSELLNLSVKASSFIMQSEEPFDTLIKLSQDFPKYSSAIATHNATDGFVTEHEYNRAQLVPAGYNVWWINGVQLIERQINGLSLLEILRKERKLIKGVTNLGFTVREAIDLLAHTEISTVKVDNEPPRYDWRDDIEGGSTIIWMNNLEKDKRYAEWPESLSAMLQQTFPGQLPSVRRDCFTLVVPVDFTDMQDVYLVADTLLSFVKRKLALRIGIVPIAKTSNAAEQAAIVYHLLDTYGLAAATEYLGVSYNSKSVEHASKSNFESVIKGKGLRPDKTSHPFDDVLKSDEYKNQVQFSQKWIQRLGANSDVPPMFVNGVAIPRDENFLQAMSSRVSTDLRAIQAEIFKESIEPDAWLPSYFLTDAVLHRNTLVAPEDDKSLRIFDVNKLMDGSLDILQKLPRVEVDPSSAKAEWAYMTVVADLNSEAGGKLLSTAVSFRKANPSVELVVVHNPAPEATNNTVSNYLFSYMRGRSYNTVQNADELIAHSNAAAVDGTGLFQEEANRYWQTASSLVRSIAFQPGQNGLLLNGRLLGPVPDTLELELADFEQLLSYERSNRISPAYAAVDALGLLDKITEPLVAAKISSIVALSTISDTPDGIFEKAPTIRLSFNDVWNSSHTVIEIGDISTASIQMTLLVDPASEQGQRWLPIIQVVSELDGVYLKLFLNPKGRLQELPVKRFYRYVLGSKPTFDESGDLQSLGASFTGVPQEALLTVGMDTPPAWLVAPKTSIHDLDNIKLSSVKSDVKAIYELKNILIEGHSREIPGGAAPSGAQLVLGTEREPHFADTIIMANLGYFQFKANPGFYKINLQEGRSSEIFKIESIGSQGWAPVPGDESSEVVLMSFQGATLYPRLSRKTGMETEDVLEATADSPLGFVSRGLNFAQGILSGKTHEVQQETQAEINIFSVASGHLYERMLNIMMVSVMKHTKHTVKFWFIEQFLSPSFKDFIPYLAAEYGFQYEMVTFKWPHWLRKQTEKQREIWGYKILFLDVLFPLSLDKVIFVDADQIVRTDMIDLVNHDLKGAPYGFTPMCDSRTEMEGFRFWKQGYWEKFLRGLPYHISALYVVDLQRFRQMAAGDRLRQQYHSLSADPNSLSNLDQDLPNHMQTVLPIHSLPQEWLWCETWCSDESLKEARTIDLCNNPLTKEPKLDRARRQVPEWTVYDDEIAGVDRKRKGPKEPEDKTESKTVGAKEGTSSKDEL

SEQ ID NO: 4165 - protein, 1642 aa, Trichinella sp.
MEVLIFHLENSNPLNLIESEVICGNESCFITELSSMTVFCANFTVESLLDATVRSMWVFPLIVVCFVSPVLVSPRKAHKNVIVSVRSKWPSTSLIMEASEFMSKESNEKFWQFIEAVIDKHQNSLGNKTDREVYNGILQIGDQILKSKARLEFLKLALTVRVHSATVEMHRQIAATSLDVQNGKSVYAVVHGKQISDLQQLDTILKHAEALARPVTYEFDHIYPGSKQGSVCVLLYADIENPHFKPWHLQLKKLVQRDGISYILRHYPKMNDDMVALSGYAVELAIKSTEYKAVDDSDKQTGSESGVSSSEEEVTDLNGFNLHLLEADELTPLKVWQLQHLSFQAGQRVILAPKEEALRVLRDISQNFPIMARSLTRMSINPNFKNEVEENQADAFSKLNIEPGDSAFFIDGIVIDLEEKDIFNLIELLKNEEMLISGLLKLGIRRKDFTLLYAMKGNDPNAEYAVDYTQWSPHYINNLESDAAYRNWGNSIHAILQPYFPGMIRPIAKNFFTLIFVLRLGDRASQNLLSTAYQMYEHVLPIRIGFIFVVNNDKSVSGYDDAGVAMLNAFNFIKEDRSVSKAIMFLIKIYNTSMRETISVEDVHKLFKSSYRDENLKSVFNSEEYNQGRSSGVDFIKESGLSMVPMVLMNGYPFTAEEISPEHIEEAILSKVMRFTVDIQKDVYEGNLKENMDVQQHLLKKPTVLPKLNYNILQMENIFLDMTDTSKYGAMSVEKFSHLDSSGKTQFIIESILYLTKNDDDILRPVTLWIVADVESDDGQQFFLNAIKYLKYSVDMRIALIHNPKSEAQATKGTASLVQACIQFLPLYQSKAVIGKIFANKITTLEDLINLSPSGISWPEFKKAYNSMSDIWMQLHVHYAKFVLNLDPGVEAIVANGKVLAPLSASDFNSLKDFNFIERYLLTSGCNDIAQHLKIIPYLDKSPKALSDLVMRLYAFLRRYNANEKRHWPIIENYHHSCVQIEASDPTAAQFDIVAIVDPLSPAAQKMSHLLVILSSVLNVHMKVCMNCKSKLSEIPLKNFFRMVLPRELEFADDGSLKAQSSARFSALPQKQLFTLNIIAPQSWMVESVEAVYDLDNIKMEEVKGDVVAKFQLEYILLEGRCFDERSGSPPRGLQFTLGTFHEPFMFDTIVMANLGYFQLKANPGAWILALREGKSAEIYEVKSVDGVVQNQTTSVVILDGFSGRMIHVKVAKKNDQLENELLAESEDAESESLWQSISKTFQSGEKYDVINIFSLASGHLYERFLRIMMLSVLKHTKTAVKFWLLKNYLSPGFKEFLPYMAGHYNFSYELVQYKWPRWLHQQTEKQRIMWGYKILFLDVLFPLDVKKIIFVDADQVVRTDMLNLMELDLEGAPYAYTPFCDSRKEMDGYRFWKQGYWENHLAGRKYHISALYVVDLKKFRQVAAGDRLRGQYHFLSRDPNSLSNLDQDLPNNMIHQVKIKSLPQEWLWCETWCDDKSKKFAKTIDLCNNPMTKEPKLQSAMRIIEEWKDYDSEIKDLLDQRTKDKWNITEQKIVDIGFQFTAYFLVFLEESWNRAMNKENQVQDNRKAEITRDDLPPATGSINNATEMKARQRGMIEKMLRKYVVGIKNQNSLIKLRIMPANSLGTLRLSNRRLSKQMIVI

SEQ ID NO: 4166 - protein, 1506 aa, Paxillus involutus
MALALPCVLFALTGGVLSAFNVHGASPPVAVSLRSSFSGSDPLLEAFETVAMEEPSVLFPLLSAFSLPEKPLTPQNVHEAVFDIASTHLDGPALASARVLLALHAASPRLAASAEYYDSHIANLTDSHKLRSPECASWVDWYGHIVCDADTLLQLASSENNTLATTRPKRLPLDHVHQVTASLEEPRYTALHFADPTAPSFSSLHGALLSLEPKVEYVLRWAKGTVEKGETELSSYLSGYGVALDLKKMDYLVLDDRDQHQGDSAAHDTSSGDNVEDADKRPSSEEIISCVFDSLPYIDEEAEARARTGEPLSSEEIANLGLKAIQFMMSFSSRPQAGPLYIHQCWDNHHQVPFPAVDLFSTLSTSFPLYATSLARKIKVLDELRDEVHENWAKAAPGVNMVWVNGRVINENEGSAGSIFGLLRTLQRERGLVKSLVDLGLTSSQAIELLMYPAHSATQNPSIPLETPRKGTTRGSAKAFVVQDDGVEIAEKKTFAISPKFTEFLDGLIDASDRQEGGGVVLYWNDLEEDQRYAAFSPSLQGLLRVHTMSLFSPMLRIRLNLVNVIFVLDLSETRSLSLLGSLSETFVARGFPVRWGFIPDFQGDSLKMARLVYYLKQKYGRDRMMAFIQGISHTHAERRLSSLSWQIVHETFNTLSAGDDFAAIARGDVPIIHEATGEDVLVRAQRYARRLGVGLQGATGKGHAFVNGRYFPVDDNLFRQMSTEVMAQLQILQEMVYTGEIMDTDASLMSTFFYDLPSTFSRRNPYIFVKSAPGGGHLLDAMGLRMFNLPELFSKAGFEEKDGSFILPSDSDALPITMYVIADFDSPEGLELAKEALRFVTNSVRTRVTFIHGPGEMTTGVVSTFISTLVHSGRLSEVPPSRMLEVLADRLDEQLGAFKDELMAGKQLTNAKLFRILQTNRLVARELGLKPGQRCILVNGRLVGPFESGSDFDAEDFEMLEGFEIKQRVGRVMEAIDAVLDGGDALDVFRRAHLVSMASSIIYADQQPDPSEAGLFDSAPKPRTQNYRSLSAGYTWVSHSVTLQRVHASRLAHPFSPCQVSERAEGIKWVGCLQFTSVSFDNEVVECKDRLNATRPFFGGKLTKLDVVEIIEGFTRAHKPRWWDVHAQVRYDFEPKRGHQSQVYCKWHLSNGPDHCSDMESFVSKMSSLFKSRDEDKDVEVIKKQADGQADINIFTVASGLLYERFASIMIQSVLRNTKSSVKFWFIENFLSPSFLEFIPHMAEEYGFQYELVTYKWPSWLRAQKEKQRIIWAYKILFLDVLFPMDLKKVIFVDADQIVRADLKELVDLDLHGAPYGYTPMGDDNHEMEGFRFWKTGYWHDFLAGKPYHISALYVVDLVRFRQMAAGDILRGSYQMLSADPNSLANLDQDLPNNLQRDVPIHSLHEDWLWCETWCSKDRLHRAKTIDLCQNPLTKEPKLSRARQIPEWEEYDNEIAQFARKLAAEGKIHSSVATADSNILAGSNSNVQPGASGEAKDSSLSHDEL

SEQ ID NO: 4167 - protein, 1418 aa, Schizosaccharomyces cryophilus
MKWSIWLGFFPFISLCFAAKPIDVRVSTTFNKPSFVALLAESLYEENRNSFLWFLDNLPLIRTDGLSTDEHLYNRTVQYLKADNVLSQEELTTFTYSVALLSGVPKLAAFSSVVSSHPEGCNTFLIFNDQTNLCFSDLPQGSFLYTGNYQPTPLDYSVAYFSEALPVAVIVTDFGTDFDRFHELYSSLAKNKECNYVIRYAPAPNATMEKLYVIGSSDEKNEVLFDLASDQLETVTQDQIATLDMLAAEAIVTSKTPLKTLKLLVQDFPMYAQHLVSKVRLSEDLIEDVNNLQSYSIPEGQNAVWLNGIPIDLQEADAFTILSWLRKERQILSGFQKLGIEPSKASKVLSNEQFDISEAEFKFARFHCQDDLEDNKAIFWMNEVETDTRYSKWPRSNMQLLTPIYPGQLHLIRKQLHTVIYPIFPSSDSSFSLLSELIQFSRRPSPVQTGLVCVATEDDEFGKTICRAFHYVAKTSSKPNALKFLFKCLASDPSAGAWALVEEHMPVEDYDEETFPEIKKSLNSNIYDTILLKSLQWSSRLGLDPESQDVIVNGRIIAHDKHYDSNMYGIFIEDIPEIQLAVAQQMVLEEENLLDYLLKDAAHIRNPLIHPSSKSKVKQIDLLSLLDNIGFTYSDLLTVGNKNAKFSLLLVTDFASQEGLGLTSMLAEVLSKFESSNLILVQSDFDNELPTLISDLSSYTNPTNEDLRKLLKNNEKKKPAKLTSKIKSKLAKYTEVSKAIVGNIDEPSQSMLILNGRLINSFSIEKLGLEDLEMLLSQEKGNYIDKLDNMLDNASQLQNQGILPLLSSYLKKLEFDYVRGSVPGREKAMFPRDNFYNQLPVSRLTIETENFSSCMYQFVAILDPLSKISQKWSSILESISHLDGVGVRIYLNPSKSLSDFPLSRFYRYSIEYEPVFDNGGQFKDSLIRFDTLPADTLLTMDIESRDTWVVMQNEVDIDLYNIKLDHTSPEENVEPVSAVYEIKNILIQGYSQEEGLKTPPRGMQLALETPKQEHFADTIVLANLGYFQLKANPGIWNLKPLSGRSSQFYNIKALDKLDPSEEKQVVVDSFEGVTLYPVMRRNPGFESSDILDEDMSPQRFFDKMKQKLNIFKIGKKEPTINIFSVASGHLYERFMYIMTKSVMQHTNKKVKFWFIENFLSPSFKHSIPVLSRHYGFEYEYVTYNWPEWLRKQDEKQREIWGYKILFLDVLFPLNLHKVIFVDADQIVRTDLQELMDLDLHGAPYGYTPMCDSREEMEGFRFWKQGYWKKFLRGLKYHISALYVVDLDRFRKMSAGDLLRRQYQLLSADPNSLSNLDQDLPNNLQHLIPIYSLPQEWLWCETWCSDQSLKKAKTIDLCQNPLTKEKKLDRARRQVREWTTYDNEIATLLRTAEEESSHLTSSPSVQDQPQNMEKDMDEL

SEQ ID NO: 4168 - protein, 1520 aa, Scheffersomyces stipitis
MFSRWYFSLLVVLSVQFVVAENQKTGPDQNTLSVQLQAPWKETDFELNLLESIAAANESLYVSSVLKLAGISNIEEEVEDLEDFEDEDLELSRKSHKDKYELLMKNIDNEETRATINFTLVNKYYSPRIESHYDHYASDVEAELSERLKTECAVDSFGNKLDTLDVWLLYNNKLYCSKDELYALQTDSRSDVQPLLFDRVIGTNEKAPLVVLYGDHKSDQFRDFFENLYESANIGKLRFVWRYLPPKTVRKNDILTGYGVDLTLKRTDYVVIDDRDVSSKISNSKKKSSKPKLDIRKDLHKIAALQELFPIDKSSLQSLGLKLTSFVKSNKQKSSYDTLVQILEDFPKYVSFLADLPRDNNEILVGDIVDSNEKLGLSKESFGLYVNGSPIHRLELDLLKLFEKIKDELDFINKLQELGFTIEQAKFLLTKFALLSAVKQTQFRNGNTIMGKNENRFKVYDYAFTKTSKRGVVFLNDLENDNSYSHFTTNSREAYLGPESYRLRPNQIPPSRENIHDLIFAVNFGNREQLRVLFTLSKVILDNGIPQQVGIIPVQGEDPLDLILAEKFYHIVATSSPQEALAFLYKYLESKSVDETQNLIDTITIPIGQEIGPEAFQDVLLRFSIDQASVIFNGVIYELTSPNWQIAMSKQLSQDIALLKSHLRNGNAEGKSLKSLLYENAGTERNLRIIPIEPSDTLYKAVDEDLIKYSTLIRKDTTEGIAGTFWLVGDLNKKICQTQLLNLLISFKKSKYDYQIRVINSGTTSAVLNKVKKSFKLDKLSSPKIDKVIELFKSEFREVSASSNNTIIKFLESKQLPSHHDFLLFNSRYFRLDIPLSKKEIELLLEYEYSQRLSLFDDILKAYPEVFHGQQIDNFSLPASVGSREDWMDLVTSVVTKSFHFDDRSFITDVSRFDFSKLNYGNCIDVNTYEVTKKIDILLIVDPLDEYSQKLATIVKSVADIPFVNTRILLQPSTEEVEDITIKRFYRGVYESSSPMFVDGKWSSNSSASFESLPGSELFTTDLDIPTRWLTTLKESPIGVDMDNIKFDNYNNKNAYGVYELRNILIEGYARNVANGNAPSGISMKLAKSGSITDTIVMSTMGYLQLSALPGIWKLFLDSGKSSKHYSLLSASSNKFEANTASLEYVDIGIFNLNGQLIFPRLRKNPGYEGVEFSNDAEADKNEGIKNAGIIQSVFKMDKPAKEADINIFTIASGHLYERFVGIMTASLRKHSHRSIKIWIIENYISSHFKRLLPYLSEKYDVEFELISYKWPNFLRKQREKQRSIWGYKILFLDVIFPQDLHKVIFVDADQVVRTDMQDLVDMNLEGAAYGFTPMCDSREEMDGFRFWKQGYWTQVLKDDLKYHISALYVVDLDKFRQIRAGDRLRSHYQKLSADPNSLSNLDQDLPNNMQRSIKIFSLPQEWLWCEAWCSDESMKTAKTIDLCNNPLTKESKLERAKRLIPEWTVYDEEVQELVVKATEEYYEKKEKESEEFKKLEEQERSREEEEEEEEDNDIDHDEL

SEQ ID NO: 4169 - protein, 1047 aa, Ectocarpus siliculosus
MNINTEEGGESAEPPLYGGGRGLDWLHPSGTSDYAKGVSVVSVVDPSSRKGLRALEQALSLLVSENGGSGGGGPEEKADGPSGASLNDNDNDDGAEDGGAGDGVTLPRSGLRLAVVFDAASSSPERSGGGGGGGGGGGVPAAGGGRWWLPAVFEAVGSRSPDKSPRFLLSVTRAAMSSPGPDGEAKNAADTVETLAREAGLSPSLRAAVAKAAAGGEASSSARRRRMARLARSVAGTARGESCALVNGRRVMSSGPALRPTESIHRVLVDWRASGPRWFHILGAELQSTVISQLASFLLRFHQERRQMIPDAVALGEILVQTVAEVAAARGGGRGDSTNKKKRKKRKKNAAGGGGGGAVNDDGVVSVLRLGPDGHLRRGTVGGAAAAAAAAASGEQEQDADGPGDAAAGDAVADAVVDAAPSDAVGDSAGDAAGGGAAGGDIAGGDATGDGAGDANGAGDGQAAAEAEGAGGEGVVEEDEGGEELGMGQVAVELVAVLDPLSVAAQRASTLLSLAQEVLGLPVTLLLLPSLDVSELPLKNFYRLVLGPASGSVAAFDRLPARDILTQRLDTPEPWNVQASAALQDLDNLRCDDSAGCGDNGTFTTSAEYTVKGLLLTGRCYDVTSSPPSPPQGLQLVLRPSPSTPSSHTTGGGGGGGGVTADTVVMENLGYFQLQASPGVWDLELADGRASEVYEIIDGGGRGGSGSGGVVNSAAHAAALEVQRRLETERAAEGASPAAESQAIVVRNFYSRYEPVLVRKRPGMEDVGLLEADDGFAASASGDNAAAGAPAPAGIWSRVSAATENVRGLVGLAGEGEGVGMGEVKGGEAERLHVFSLATGHLYERFLKVMMMSVVKRASMPVTFWLLENFLSSSFKESAQALAEEFGFRVEFVTYKWPEWLRRQSEKQRIIWGYKILFLDVLFPLSVDKVIYVDADQVVRADLKELWDLDLQGAPYGYTPFCSSREETLGYQFWRGGFWQAHLAGRPYHISALYVVDLKAFRRMAVGDSLRSIYNSLSQDPNSLSNLDQDLPNYAQIRRGTGKVPYM

SEQ ID NO: 4170 - protein, 1510 aa, Tuber magnatum
MRLPNFGGRLSVGLLLLSPCVRLVSCGPAVNVALKASWNGAPFLLELLETAAEEVGPSYFPLLDRIAAGDFADIGSDRALYHAFLRVAQGEGFLVDQEELASFNFALSIHAAAPRIEAHYHYYGNSLEPMMGRLYEATCEVWLQWSHKQVCSTGGDFKDMLNDRRKLQFDRVLGTHEDKPAAILYADIEAPTFKQFHEVLRDYAKQGILTYRVRYKPRTNKKGRPVILSGYGVELALKKTDYIVMDDRDVSGGGDVNKGEYTQTPIGELDDQEIQDIKPLHPKDMSFLGMRAASFVMDSEDPLTTLLKLLQDFPKHASSVAAIDVKPDVMDALQGNWDSFLGSGQNALWVNGVQLESSDINAFALLEHLRRERRFVNSFRTLGVNSSEAVQLLSHQILANSRQDEAPQRFDYRDSIEGGKSIIWLNDLEEDLRYREWSAAVGMLLRRVYPGQLHPLRRNIHHLVVPVNLASRDDLALITEQLRLFVDRKIALRFGIVPLTGTPEAVAQAKVFYYLNGSYGLPVALRYLELALGSGQFSKPNAKVLDQVIKEAELIEGRTALSLEEVLSSETVGEHIRASKSWAGRLGANSLIPPVFINGLSLPRDEQWMQTMSARLQADVQLTQRAVYEEIANDETDFATLLLGNAATRRNSYIFPEGEESIRSINVEKLLQEYAHIFEKLPTIISDKPDKLVESTIWVIGDFDEEDGYELLRGASELQKLAPGVNLVFINNPQLVSENPALSTLLHQLHQVGFFKGPEQLRQLLEEMPDVKSSSWRFPDHIESGNFWRESQVMLEVAGFKPGQRGVIINGRVVGPVPIDEEFGAEDFVQLLEYEHSRRILPVLKAANEIGVLEKLKGSQSSARLTNLVALSNVPEVPTSMFQGPSLARTDAFDRLWKKEHVAIESGDRGEAIFQVVASIDPASELAQKWVPILKVLSEMKGVYMEIYLNPQRVVAELPVKRFYRHVLNSAPIFDEHGDLTDPQARFENVPELPLLSLSMDVPPSWLVTPKESPYDLDNLRIQSLKDRLKGTDIEALYELRSILIEGHSTDIINGGPPKGAQLVLGTEKEPHFADTIIMANLGYFQFKANPGYYKMELKEGRSKEIFRIDSTGTKGFQQGKHGVTVEDSEIALLSFQGATLFPRLSRNPGMEVEDVLKQSTGVPKNVGDFATKFLRMAENVLVNIGFLAPVADSKPQADINIFSVASGHLYERFLYIMMLSVMKHTDKSVKFWFIENFLSPSFKDFIPVMAREYGFGYELVTYKWPHWLRGQKEKQREIWGYKILFLDVLFPLDLDKVIFVDADQIVRTDMRELVDLDLQGAPYGFTPMCDSREEIEGFRFWKQGYWKNFLKGLPYHISALYVVDLKRFRQIAAGDRLRQQYHQLSADPNSLSNLDQDLPNHMQSVLPIHSLPQEWLWCETWCSDESLKTAKTIDLCNNPMTKEPKLDRARRQVPEWTAYDEEIAALARRSLKKERGEESEAPRRVEKEEETVEAPGGREGEQPVIREEL

SEQ ID NO: 4171 - protein, 1604 aa, Coleophoma crateriformis
MAIFKLPWGLAGTLLASTYLHSLCASASPSVNVGLKASFSSAPYLLELLETAADENATSYFPLLDRIAEGYFSKASTDQELYNQFVEVLKEDGHMANAETLSSYKFALYLRSSAPRIEAHYQFYQTAVEPFLDVEESTSCPAWVLFNSKQYCSPTMDVAQGNVKGNLQLQELPFDRILGNADAPASILYADITSPTFGLFHQVLTKTAREGKTSYRLRHKASSNAEPKPLIIPGYGVQLALKRTDYIVIDDREGATEPEMTSSETEVKFEDEEFADLKPLSTSELVGLSLKACSYIMQSEKPFETLLKLSQDFPKYSSPVAAHNASEAFLQEHAYNRAELVPAGMNVWWINGVQMIEREIESLSLLGKLRKERKLINGVRELGLTGPEAIELLGHEVVAGVKARDEPQRFDWRDDLEGGQVIIWMNDIEKDKRYEDWPKTLHSLLQRTYPGQLPPVRKEIFDVVIPLDLSNLDDVKVIVETLQSFVKRKISVRFGFVPLSETSAAAEQAKVVYHLLETYGLSAVVAYLEAAASAKKLSSASDTILKTVVEGRKIRTDKTAHSVEKILSIGTYDERVEAAQKWASRLAMDSKAPAFFADGVALPRDENWLQAMSARASTDLQAVQNAVYQEILTEEWIPAWFLSGAASRRNPYVIPEDEKTLRIFDVKKLLDEHSSIYNVLPRLPAEGTSTSADWTNIVLIADLVTEGGWKLLLNAVKWRELNPSAELVILHNPAQPGHGFSVTDNLFTHVRDAQGEAFESLNQLKSTLRWDGMVEDSDIREVAGQFWKAATPLVQALSLTPGQNGVLVNGRLAGPLPEIAAAEFTTDDFDQLVSYELTKRIRPAYAAMEALGISEKITNPLVGAMISSIVAISTISDVPEGMFEQASTLRMNQFSIFKAEHTVIETGDNTTASIHLEILVDPASEQGQRWIPILKAISELEGVYMKLFLNPRERLQELPVKKFFRYVIDSKPSFDESGALKAPGASFTGVPQEALLTLGLDIPPAWLVAPKVSAHDLDNIKLSSIKTNVDALYELEHILIEGHSREVVSGSAPRGAQLVLATERDPHFADTIIMSNLGYFQFKANPGLYKINLKEGRSSEIFEIASLGSKGWSPRPNDNTQEVVLMSFQGTTLYPRLARKAGMEAEDVLEAKVDSTMDFVSRGLNFAQGILSGKGKDLEEKHADINIFSVASGHLYERMLNIMMVSVMKHTNHTVKFWFIEQFLSPSFKDFIPYLAAQYGFKYEMVTYKWPHWLRSQTEKQREIWGYKILFLDVLFPLSLDKVIFVDADQIVRTDMIELVNHDLKGAPYGFTPMCDSRTEMEGFRFWKQGYWKNFLRGLPYHISALYVVDLRRFRQIAAGDRLRQQYHQLSADPNSLSNLDQDLPNHMQSVLPIHSLPQEWLWCETWCSDESQAVAKTIDLCNNPQTKEPKLDRARRQVPEWTVYDDEIAAVDRKRKGIKDEVVLEKNTKSRAWEEPITKKDEFTYGNVEIDVQVIDVQVNNAGINSSSNKNATFRENYQAGFDTNVSGIAVMNDTCLPLIGTSKYPQRRIVTLASGLGFNSDKDACEGGALMARAAVEGEKKELFLKIIDDEGKHAEFRLVIR

SEQ ID NO: 4172 - protein, 1529 aa, Trichosporon asahii
MKWLAGAAAFAAVAAAAPQSSVPFSVGVETAWSAPPLLLEILETAYDESASSYFPLLRLITSHIVGLRKTPESQYEHALQLMGSHHICSGDESTFNLALSLHTTAPRIEAAFAQYAKLDEAALGVTDCAAWVEFQGKAYCDAEKLRAAVERGIDGNSTEVPIRTLPFDHVSGAEPKAVFYYSPSPDALPLLNYLDKHTKSVPEFAYVVRYRPTGERTRKTPLSGYGVEMALKKTDYLVVDDRARAKGGVGVNAITVIKNAKNPLKAFTDLSQNLPKYTAALARKVSAPDSIKKRARITGHEYPVSPLFLLNGKLTGRLLNAIRSERPYINTLLDIGFTPKEAVELMSDEVIGTAQASTSPSEGLVDASDREEGGNVIGWMNDIENDAHSVTNSQYMRPVYPGQLHLVRRNALNAILAVDLSKKIGLGTVANEALGFVRRGVPVRFGVVPVGDNTAGKIFFYINEKLGREAANDYIKTLDTITEGGKVTDVAVETAYESITESAVGEWPPFDAVLKSKLVTKRSQRAQDWLERVGITPSEATGGTLMVNGKPIAIGVGWTRALQNELISMTQMLQQLIVGGAVGEDSDLSTVFYDLPSTLKRKAKYIVPKQGEKLVVYNLADVFNGTADVLAENFVYPAEGCRSRLGFVNVQPPGGSGLFSSLLYELISTGQLNTIKPSQLIEFIDELNSRETNIDQLTLDEIQAGQAPQELDTEGKDEPLNAFTGAGWTVGVTAEAGKFWSVGNTVAHRLGVNGTQPYVLVNGRLIGPIDEPDVLRPKAFGLLEDFEGKKRVDPVAQLVASMSIGDGKDIPRSIQIGDFENALYHFGVIVDPISETAQRWSGLLELLSSLDRVAISVHFDVDPRPKEIKVKRFYRESLRAQLSFDVDGNEVSPDVRFVDLPSSPIYTLGMSVPQAWIISPTDSPLDLDNLMLGQLGEPTHVLFDLKQLVMDGHAREGVSTPPTGLQLQLRAQGEDEVVSDTQVMTNLGYLQFKAPPGVYDLAIRPGRGEEVYELQSAGNEGWESPSVQDAGNIVTLTSLEGNTIYPRFTRKEGMETADVLEVDEPAGWLSKIKSAVGLAPVKKSRHADINIFTVASGLLYERFASIMMLSVMKHTKSSVKFWFIENFLSPTFLKFLPQMAEHYGFEYELVTYKWPAWLRAQSEKQRIIWAYKILFLDVLFPMDLDKVIFVDADQIVRTDMKELVDLDLEGHVYAYPPMGDDREEMEGFRFWKQGYWKNELRGNPYHISALYVVDLQRFRAQTAGDRLRGMYHALSADPNSLANLDQDLPNSMQQQIPIFTLDKDWLWCQTWCSDESLKTAKTIDLCQNPLTKEPKLSRARQIPEWDSYDREIAEFAASLGASELGGSVDELAGTLEKAQGLKDSDAPSSSDDATMDSAEEEGLKEEIAHEKQVQAEQDEALEEILADADAPVSFESDRPESKRKTGPADSQKGGVKADIKADAKDPRQHPADGRAAVRDSVNEEEVEVLVTYSDEPGAVWEPALKRDNTEPDAEKEEGEQTEEVVHDEL

SEQ ID NO: 4173 - protein, 1742 aa, Oesophagostomum dentatum
MLSKVHFSEFISKESNQLFWKFVNDIAGRCSKLDWSKASDEQKYELGLEVASGMLSDSSLDLLKLSLSFRVFSPSVQLFEQLGSDYSLDCAAFFEVHGTVGCTAKELENAVNSAKGVFSEELELLSTDHVYGKETSPKIVAVIYGDVGSKEWLELHQKAFKLASEHKVQYVLRHYLKRTGRSQQLSLSGYGVELAIKNTEYKAVDDSNVKKEVDEGNLHGFNFKLLNCFARELHPDASDSLDAFRIHLKEIEELAPLKQWQVQDLSFQASQRIVNDGAYHAIDTLKELSQNFPTHARSIARETVTRELRQEIELNQKEHLSDAGLSPGESMVFLNGIGLDVDSLDMFQLMDFIKQEERVSSGFFNMGFRREYLSLLAEMDFTEEKTKYAVDYRDAYPVYLNNLDTDKRYQHWRNSVKLLLEPYYPGMIRPIARNLFNLIFVVDPAERNSRNLMRIAYSFFKHEIPLRIGLIFAVNNEKGVSGLNDSSVAILNLFNFLAIDSSEHEALRMVNEMLDTYRTQDEINPADIKTWFEKNYKDADYQDVFGPNTDYDRGRNTGAEFLVKSAIGKAPKVLLNGYVLDDDGITGDKFEETVMMEVMRITPKLQSAVINGNLKDRVNVANWIMEQKDVMPRHNERIQNAAAKKNVLDIAVTSECKAKTLLDFVPLTNSEKTQCILTNIDYFKKSEEDYTAPLTVWVVADVEDAKGREIVHSALKYLDKSHKMRLSVILNPKDEELACKENSVSSLLHAATRLLPHDQAKKFVSKLIKLENMEDLRNGAHSIEDLFGKEMNLQHFNKERRNIGCDRIKMESHFAREVLGVPAGERAFIANGLIVGPFDETEEVVDADVELLEKIIHSQGAAVIATSIDNWEVDKKNGYSSDVVMRSFAMILKNAVARKRTWILSVILNPKDEELACKENSVSSLLHAATRLLPHDQAKKFVSKLIKLENIEDLRNGARSIEDLFGKEMNLQHFNKERKITLKIFAIVLLSVILNPKDEELACKENSVSSLLHAATRLLPHDQAKKFVSKLIKLENMEDLRNGAHSIEDLFGKEMNLQHFNKERRNIGCDRIKMESHFAREVLGVPAGERAFIANGLIVGPFDETEEVVDADVELLEKIIHSQGAAVIATSIDNWEVDKKNGYSSDVVMRSFAMILKNAVARKRTWIVLGEDEHSTVTLPAEDSNRPVMDVVAVVDPLSGSAQKLAPILDLLRKAVNCDLKIVLNPKAKLSELPLKRFYRYVAAPELQFDKAGNVAANQAKFTGLPSKQLLTLSLHSPSAWMVENIFAEVDLDNIRMELAPSDVTALFSLEHILLEGHCFDEVSGSPPRGLQFVLGTANNPTQFDTIVMANLGYFQLKANPGAWILQLREGKSKDIYELLDHPTTKVNKNGSIRVLIDSFSGKTIRVRVTKKKGMEQRTLLANDDEENSGIWSAISSTFVFFVLTNENHDSINVFSLASGHLYERFMNIMMLSVMKHTTKPVKFWLLKNYLSPQFKKNLPLLSAEYGFEYALVEYKWPRWLHQQKRSIGLCGVTRLTLMRILFLDVLFPLDLQKIIFVDADQVVRADLMELMNYDLGGAPYGYVPFCDSRKEMDGFRFWKQGYWANHLAGRRYHISALYVIDLQKFRQIAAGDRLRGQYQGLSSDPNSLSNLDQDLPNNMIHQVKIKSLPQEWLWCETWCDDSSKAKAKTIDLCNNPMTKEPKLESAIRIIPEWTEYDNEVKRVLKKAQEQNTSTSSEHTEL

SEQ ID NO: 4174 - protein, 1525 aa, Aureobasidium namibiae
MVRYQHLAVKTALFLGLQVFGTTAAPSVNVGLKTSFNSAPYLVELLETAADENATAYFPLLDHIAEGRFDHASTDRDLYYLFKKTLQEEGHLSKAEDISSFEYALSIHAAAPRIEAHYQFYNTTIEPTLKSRLDLNCETLLHFNGQQYCDADLSSSTANSVDQERILDLPFDRIMGDKQSKTPAILYADLMSPSFRQFHKTVRQTAKSGKTSYRVRYRPSLSIPGFPLAVSGYGIALDLKRTDYIVIDDRKADESDDTNNDASSAKLTDEDVADLKPLSSKELLRLDMKASSFVMDSADPFNTLLKLIQDFPKHSAAMSNHEVSEAFRKEHLANREVFLPSGYNVIWINGLQILARDFDAYAMLEHLRRERKLVNSAGELGLSGKEAVRLLSHSSISEAASAQEPQRYDWRDELEGGKVIIWMNDIENDRRYAEWPTQVRALLQRTYPGQLPPVRKEIHNLILPIDFANYKDVELVVESLQSFVKRKVPIRFGLVPKVSGPASTEQAKAVYHLLDTYGLGVALEYLQKLSSSQGRKLAGPVQSIFETATKGRKLRKDRVSAPLQELLKDTVIDARVTSAHTYLARLGASGPTPPFFVNGIPLPMSDEWLQEMSQRVSTDLRTVQKAIFEEQLDDESYIPEVFLSRASARRNPWIIPEDENSIRQVNLASLSDLAEGAIGSIPSLPANKDTVSNDLVHLVVIADFDSGVSQQMLSELVTLRKEEYDQVEILLVHNSAKPLSTSSFAVQLFKTMMLGPVVSLEALEALLSRDNSNTKIADEDVVAAQTFWSSADRFLDDVGFGSGEQGILLAGRVVGPMPSFAQFGRDDFETLLSYERMKRLMPAAAAIKGVNIADKANTALSFSKLSNLIALSSKSDVPEGMFDSVPPARADVFSGWAGSHTLIERGDAETAAIQIVAAVDPASETAQRWVPILRVLSELSGVHLRLYLNPKERLDELPVKRFYRHVLESKPRFDEQGSLEGTLAHFEGLPADALLTMAMDMPPAWLVAPKDSVHDLDNIKLSSTQGKDIEATYELESILIEGHSRDVTLGTAPRGAQLVLGTNKEHFADTIIMANLGYFQFKAKPGFYNLTLQKGRSEEIFKIDSAGTLGYSPQTGDETTEIALTSFQGATIFPRLSRRAGTEDEDVLESAKTTADHITDKADKILAKVGLGSVKSSEVLSKAQKFGSGLLSGTTGSTTDISTLPHADINIFSVASGHLYERMLNIMMLSVTKHTTHTVKFWFIEQFLSPSFKAFLPIMAEEYNFRYEMVTYKWPHWLRGQKEKQREIWGYKILFLDVLFPLDLDKVIFVDADQIVRTDMYDLVTYDLQGAPYGFTPMCDSRTSMEGFRFWKQGYWKNFLRGLPYHISALYVVDLVRFRQMAAGDRLRQQYHQLSADPNSLSNLDQDLPNHMQHVLPIHSLPQEWLWCETWCSDETLGVARTIDLCNNPQTKEPKLERARRQVPEWTIYDDEIAALAQRKVGEGKSPIAGSAGGVGIQAEMQEQDAKKQKEENEKKEKGKGHDEL

SEQ ID NO: 4175 - protein, 1586 aa, Gracilariopsis chorda
MGATRRLLLPLALLLTLLIGAGARSLHVALHAAWRRTAVSAEALAWLSAQRSSSSSTPLFLSRLCAQIDADPSPSTSVQSEHDRVIAAVSPLLANQSLITHTFNWLLHSAQLSPLVALHFSTAQLVLSRFNASVSDTPPVFALRADAQLRSAQLITSVDHIHASCPSCPSISADTSLSFLRPLTREVILSTSSSRSSPFIFIFADVSTAQFCRWYTALTAPIQARSHRIVLRFWRPPQQQPTRSFNPSLQSFGVHVTLKSTEYKVVDDRVFDTKLFPECGYTDAACASTHPSNRSVAWLHRPDNVTFTPLQALQFITRHNAPQQPQNLTDVLTSLSSFVEDMPSVTRSQPFLSTDDYVNTTLEKQLARSVYRVRESIGERQYLFINSRPFHLSSLTRATEKLFRCLSSVSIASAHLPQLFADHVASDRVYASLHATPVRKSASLRVHLPLQHLVHRSLVPLNDLFSDSRYKKWDPLQLNSSEDIENFVAAVDKQRKKASSSDDESSSATTPSASQQYSNIVKVRAHHLSLQLIVDPGDVQQFAYLSIPQSVIQANLPIQVSVLLVPNGKTSSLIAAAFHYLLKLKGRKTAVRFLTMILEILEYLGAFSPVPLSPQLVDMAFSRVAAKEGSPYSSAAQVLEREADINVKLEEALRFAQDMNLFGGDSTSQEVSNEEDDQVNSLNDEDKRKRKMSMLCVLNGVVVKDAVSDVIPLAIAEQERIANLLKNHQVMDALLKANTTFDRWVAADPDLIVVQRLGKKMKTRERASTVTTSEDVLPPMTAAALFDLRTHLEEIRYIAPLSLTEPDTPVEHTTTVWLAGIDQVSDEFKTVEKILREVAQSDVAEKIRTRFAVLDPTSVINQEVLGCTTSISCLDEAVVVVNGKRLPASLFASVDDVVVELSSYFDGVDRSDLRNDDMRLVHRLHVNEISSACEVSEGETESEVTFSTVRDVVLEHAHSSMLYPEALGDGLLVSKPLSVLAVVDPTSPDAYVLTSLLEQLEKAFDSDKLALGLVVLPKSRTLRKKLELPKTYRRFVLQSVAAFQEESGNRLPPRASFFGLPQDRVLTVSVEAPRAWFVSSYATNYDMDNVVLETLPEGSTELHSEYELSNLIVEGSCIDEDESPPQGLKLYLENENGVSVDTIVMANLGYFQLKVPGPGLWNLRLADGRSSELYSLVGMEMYKELTKTVYRADEAGQVGIVIESFDGGGGILLRVARKGGTEGKSLLKSENEGSEKDKMSTRSAGGMLGKVKSGIANIYDRWMQQSVADMGNGDGSVRAKDNRIHVFSVASGHLYERFLKIMMTSATKHASRAVKFWLLENYLSPSFKKVLPLFAKEHGAEVGMVTYKWPGWLRAQTEKQRIIWAYKILFLDVLFPLDVERIIFVDSDQVLRGDLAELMDIDLRGAPYGYVPFCDSRKEVEGYRFWKSGFWKDTLRGAKYRISALYVVDLKRFRESAAGDTLRFIYQSLSADPNSLSNLDQDLPNYASSAASMGGRVRMFDLPQEWLWCESWCDDESKQEAKAIDLCNNPMTKEPKLQSAKRIISEWVGYDEAASALTEKLYGELSGGGGARDGEESIRREEKEEL

SEQ ID NO: 4176 - protein, 1470 aa, Diuraphis noxia
  MOD_RES (413)..(413): Any amino acid
  MOD_RES (1323)..(1323): Any amino acid
  MOD_RES (1374)..(1374): Any amino acid
MGKINHYSRYTSSEYDYGRQYQPKKQNRKKKRIYTKNDPSNLFFIVCLFFVFFIFTNQSVNKNSKKGKYVTTMIDTKWSMVPLVLEMAEYMAEENPYSLWSFVDSISQLNPALSELDNDQIKYQTALSKAGLLLSNSKLRLLKFSLSMHTYSPRIEMYAQMAADRGVQCSTSVEIDGELVCSIEGLKKVLQRINAEGSKHLCETYHIDHHHPSSKNRSNIAILYGELGTAEFASYHTVLKQYAQEGTIDYVLRHFVKEKSEQKVRLSGYGVELHMKSTEYKAEDDSVVKDKNDINRNEDEEDISEIEGFDFKRLVELYPDKKQDLLKFRTHLSEVSGELAPLKAWQFQELSLQAAQRIMSGPPQDAIQTFIHIAQNFPTQARSLANVKVSKELRDEVSKNQDSFSMGLNLQPXDTVLLLNGMYFDIDITDMSTILDSVTQELSIMEGLYSIGITDKKAVSSMLALDFGNVKGKSYAVDIRDSAIQWINDLETDAIYKRWPSSVDDLLRPTFPGMLRSIRRNLYNLVIVCDPASKSSWPLLKLTDSFLNHQSPLRVGIVFNVSPKPAIGLNDASVAILNAYNYIVEQTSKPLSAFNFIINIYTSISEDRDIIVDDVLNKFKKQYPKAIIDEIFGEDSDYDTARVLAKEYVAKTGFRKLPQVLLNGVPLQEKSLVEEDFEEAVLVELVTQTQTLQKAVYKRELTDTDNVVDWLMTQPNVMPRLNSRVLNTDSSKNLQLSDKHEFVLKSMNYITFAKKSSINSITHWIVGDFSKLSTFKLIKNTFEHLEEIHFDVSKIDIQLYRNFAFEALNFESGQCGVITNGRILGPFDEDEDFLTDDFALLEQHTLKGSVNKILNILEDSDLTNITSDMIMKASALINSRSQTKNRHSIPDVSTKHSVIKLSANNEDEPVFEINVIVDPVSRGAQKVGSIISVLSTVLNANINVYLNCVDKNSDMPVKSFYRFVLEPEVIFDKSGHLSPDPIAKFSNMPTSPLLTQILHVPDNWLVESIESPYDLDNIRLEDVEMGVYSRYELEYLLLEGHCYDSVNMNPPRGLQMTLGTKSNPVVVDTIVMANLGYFQMKANPGAWMLRLRQGPSADIYDIISHEGSDRSPNSMDIKVLISSFRSHIIKVKVAKKPGKQNLNVLGDDDAENKGLWNSITSSFSSGSPDKSTDETINIFSVASGHLYERFLRIMMLSVLKNTKSPVKFWFLKNYLSPTFKNFLPIMAQEYKFQYELVEYKWPRWLHQQTEKQRTIWGYKILFLDVLFPLDVKKIIFVDADQVVRADMKELVDLDLGGAPYAYTPFCESRKEMDGFRFWKQGYXKTHLQGRRYHISALYVVDLKRFRKVAAGDRLRGQYQALSQDPNSLSNLDQXLPNNMIHQVSIKSLPQEWLWCETWCDDASKKSAKTIDLCNNPLTKEAKLTAAMRIVSEWKDYDNEIKRLQIKQSEHEDKVFNIETQSKGPESHTEL

SEQ ID NO: 4177 - protein, 1519 aa, Rhizoctonia solani
MRSLSALGTLGAASLVAAQTAFSPPVKVSLTTSWAAPPILLEILETTAAEHPGRYFEILDALIDRSSDGLLGPITEPVHKPKYVYSTALAHLITRGFLTEPNALSAFEKNMALHSATPKIQAFYQLFGDPSKAPECQSWIEWSGKQACTSEEADALLAGASNGGYTQIFPFDHVQESTSGECTSHAIFYASLSSPNFYDLYSHLRSKSETPGFCYILRYSPPKDTLITGEQSRNILSGYGVALDLKKMDYLALDDRGPRGKDEDSDSTTNESIVWEDYVSSLLSEHPHEDLDLTAPLTEEEISSLPLRATHLVMSSEDPLKALSHLSQNFPKHVVSVARRWDPARTEDLKAKHGSVEAEVQANMHMVSGAGNMFWLNGVALPEADINPFRCAYTSLWLPNSSLICAFICSLLRLLRREHQTVNSLMNANLTPEQAIHVLTNPEIGKASVASGPTDGVFDASDREEGGGAIIWLNDIEKDKRYTRWPSSLTVLFRPMYPGQFPTLRRNCFNVIAALDLSRTSSISFVVQLANNLISRMLPFRFGYVPLIETAESRQIARLMKWMMDEYGFEKTAQYFSVAITPSDTVDLKLLETAYVQYTTQMPPQSGNVPEFSSFSADPLQIQVVGHQFVPDEELQPAAAYAKRLRLGAQDGSGKGHVFINGKHFAYDDVSRVNFFQEQLYAGTLVDAPETDVSVFMYDLPTTAKRRNKFIYPSGNLRVYALDNLFHSVGATKLLKDSFVYPAGGHPVPLTISVVGDMDNEETLNLAIEGLRGMSDDAKYRLGFIHTPTVNPSDLPSTQQPLVSPMLARLAATGNYAEFPPSELAQILEEAKQLVVNAAELNVQDNPVLLNLNNRLTGITNEGVDYEELKRTNAAGNALAKAIGLKNGERALVINGRVIGPLAGSDFVAEDFGSLANYEAAKRVTPVVTALNAVREDLTELDRPAYADLIARVSSIISSVSVPDPSEEGLFQSKSLARQRPYNELIGKDCSSTFEIGDNSTALFHVGLLLDPLSEPAQKWSSIVEWLATVPQTHIHVRLNPAAALTEIPLKRFYRYNIQPRLTFDQDGFEMRNLVEFHGLPVEPIYTLAMDVNPAWLVRPYISEADLDNIHLASLSDPKAGVEAIFHLDHLVIEGHAREENNAPPRGVQLQLTSLDGNPTADTQVVANLGYFQFRTGPGAFRLEIRPGRGRDVYTIESAGNEGWNSGHVNATGTEITLTSFEGHTIYPRLNRKPGMESADVLAEPEKEESIWSRSLWGSKPTDVVSESKQADINIFTVASGLLYEEFIPHLAEKYGFQYELVTYKWPSWLRAQKEKQRVIWAYKILFLDVLFPMDLKKVIFVDADQIVRTDLKELVDLDLQGAPYGYTPMGDDNEAMEGFRFWKQGYWKDALRGKPYHIRLRGQYQALSADPNSLANLDQGDSARFDRAKTIDLCQNPLTKEPKLARARQIPEWTSYDNEIAEFARSLVDSGKIRSRAISGSVDALASVGKKVTTSTTEESPVPTQNEEAESHREHEEL

SEQ ID NO: 4178 - protein, 1583 aa, Piromyces finnis
MKYWNIFSIFIYTLIVLNVKCEDIKKDSPPVKISLQTPWDNTPLILEALEFISKEKPSLYFPLLSKISKEKDFPKTAYDQYQYAMNLPEVSELEIESLLKLSLSLRSEAPLIQSHYHYYNASVIPSHKANSKFDNTCQNWLDWYGSQICEMESFKKIAQISLVDGKYTMNKSDKKSPIPLPTDHVKGSSSGKENGFVIFYGDILSENFGEYLDELLRINEEAGLSFVIRYKKSSDEQYNNNPITISGYGVEMAIKNTEYKVIDDRKLKKDDKENIKKSHEKIPNIPSKEFGLNRLIETYPKLEEEFNKFNDLLQKQEIPVLKKLLKNETEDLGTKLIQYITTSSNPLYVLNQLSSNYPKISHIINQMPLIEEYSSEIKYLQKLFYVPDYNSLYVNGLEIDTKNLNPFSILRIFASENKSIKQLNSLGYSNKDSVNLLNSANDEKEDKRSSDIEYYDVRDDIVSWWNNLESDSRYEKWPKSLREILQPLYYQGQMHRIARNLYNALFVVDISKNNVLEIFTEIFVFIERGVPIRFGVVPIVGLEKKTEINSAAGVIFEVFMREYSKKSAKNFIVKLLEESKGSDINEAILKKVTEKILDDNKLKLLDDDISLRNYDDILEYGIKKYYKELKNFSEKFGISSESPALFVNGAYSEFSMDWKQVMMASVMNEMDSILRKVYYQEYTNKDNIYNKILDAPNVRKRKNIYIYPSDENPIKFIDLLSIKNIDNLKYFSNSGKLGSHASIWTISDLSSHKGIKLALEAIKYIQDKSGKSSRVSIIDSASVDNKRASVIRNIINQASMVSIPKNVDYTEVDFIKELLEARLNLDDDASEELILKKAQELNSKYGNLILQKDVDYINQKPAVDVSKIVELTLGDKKDMQAIVINGRLIGPWKNTVTFTDEDIKLSYEFEYKHRIRILIGKVRAYGKTLDWGDVTIKEWYSSLIMKTTSIVASCDTADKVKTDFNDSGSDRIGSGYIKKFKSKYSNFNTGNDETAKYHLTAVIDPASKTGQKIASFLMIISKMKEVFIEVQLYSPKPNEDVQELDRYYRYAFDTEMTFDDDNNQILPTAEFENIPIDPLFTVGIDAPQAWLVTPVVSVHDLDNICLKSVEDNGVNAIFELKNILIEGHARDMRLNTPPRGVQLILGTKSYPSMVDTIVMANLGYFQLKANPGVWELQLRSGRSAELYQIINVGDSINSWLDDRNDELVKLYEDYGITTALTSFEGSTVFLRVDKKKGMEREDVLSEEGTNTNSDNKDDDKIWGKLKKKLGINNNNNKNNSTETKKSAEKINIFSVASGHLYERLLSVMTLGVMKHTQTPVKFWLIENFLSPSFKNFIPHLAKEYGFEYELVTYKWPHWLRAQSEKQRTIWGYKILFLDVLFPLDLEKVIFVDADQIVRADLKELVEMDLHGSPYGYTPFCDSRKETEGFRFWKTGYWEKHLRGKPYHISALYVIDLVKFRQMAAGDRLRGEYQMLSADKNSLANLDQDLPNNMQDTIPIFSLPQEWLWCETWCDDDSLKTAKTIDLCNNPLTKEPKLDRARRLLPEWSVYDNEVAEFEKKVEMMLNNNEEIKSEEKAKGKDEL

SEQ ID NO: 4179 - protein, 1480 aa, Aspergillus ruber
MVSTKSLVASWRLYAIVATGLTGLVRTSPSVNVALQASFDSAPYLLELLETAAEENTTAYFPILDRIADGTFDDLSTDQDLYERFLKIVHDDGHLRTPESLSSFKLSLAVRSAAPRISAHYQFYNTSVQHSLMAAQDAACPMWVHYDGSQYCSSAMERAQQDVEGESNLRVLPFDRVFGDESLPPAVLYADIASPMFKEFHQTMTALSKEGQLSYRVRYRPPQHWASRPLYVSGYGVELALKRTDYIVVDDRDAKQRGEKDIAPGTEGKEDSPDDLKPLSSSEVDRLGKNTVSYVMDSDTPLDTLVKLSQDFPKYSAHVASHNATGELLEDIREKRGRMLPPGANLMWINGVQMHPSKIDAFTLLDHLRRERRLIDKFRDLGIPAQEAVDLLSHPLLGEALVQDTAQRFNYNDEIEGGSVIIWMNDIEKDARYEQWPDEIHAYLQRSYPGQLPAVRRNLHHAVFSVDLTDAQDIQLVIEPMQMFVKRKIPVRFGLVPTVSSPGAIAQAKVAHYLQDKFGLSSLLQYLEESLKKKKTASPDASCFESTTKDRNIRPGRQPLSLEEVLATDEYETIVSQTASYQSRLGINPGKRDFFVNGIPLTREESWTQELSMQVNRDLQMVQQSIFEGTIDDDASFAKFLLSDAVDRRNPLIIPQDPKDVRILDVGKIADAHKDALNELPRLASSAENVLGSAHVLVVGDFDSESGVQLLTVALNSQKDHGQAEVLFLHNPDGQKVAKESARLYKSLKEGKKIDATQILVDVQRSAISDAEAERICQTWAALQPLARDLGFAPGKTGVVVNGRAVHIPDGSALDSEDVNLLLAYERTRRIMPVAKAVDDLAFGAKFSEPLEFAKLTSLAALSTISDVPEGMFESSSDIRLNLFGKWTASPSVLTVSNSEDPTINIVVSIDPTSELAQKWLPILKVVSELAGVQLKIFLNPQDKINELPIKRFYRFVLDPKPSFAADGSLAQPTASFSGVPLEALLTLGMDVPSSWLVAPKDSVYDLDNIKLSAVKNGNVDAIYALEHILIEGHSRDLTDRSPPRGVQLNLGTEENLEYADTIIMANLGYFQFKTQPGLWKISLKPGRSQQIFNLDSVGSLGYSPKVGDDNTEVALLSFQGKTLFPRLSRKKGQEQEDVLETGPKPGSAMDYVSKGLSFASGILSNVGVSTGARANEHADINIFSVASGHLYERMLNIMMVSVMKNTNHSVKFWFIEQFLSPSFKSFLPHLAAEYGFTYEMVTFKWPHWLRAQREKQREIWGYKILFLDVLFPLSLDKVIFVDADQIVRTDMHDLVTLDLDNAPYAFTPMCDSRTEMEGFRFWNQGYWKTFLRGKPYHISALYVVDLNRFRALAAGDRLRGQYQMLSADPNSLSNLDQDLPNHMQHNLPIKSLPQEWLWCETWCSDEALGVARTIDLCNNPQTKEPKLERARRQVPEWGVYDGEIAALGERVRQQYVSEEQGGQVDAESREGSGWDKDEL

SEQ ID NO: 4180 - protein, 1488 aa, Thermothelomyces thermophilus
MLRLRQHSRPPLIWWSCCRSILPSNADHSSRTFRETAASENATAYFPLLNRIAQGHFLEATTDKALYEKFIEVLRRDGHMDGEALSTFRLGLSMRTAAPRVEAHYQYYTTAVEPSLPDDQDKCGQWFLVGGKQYCTPALDVAHGDVRGDAQERVLPFDRKIGTGPREIILYADITSPDFGNFHQAALKLAQNGEGTYRVRYKRNPAQRREALSVNGYGVELALKRTDYIVIDDRDTGSGEAPPDQTPNPIGSSQVVLNEEEEITDIKPLEKSELAPLGMKAASFIMQSDAPFETLLKLTQDFPKYSTFLAAHNVSADFKAEHAGNRRVLLPEGVNILWMNGLQLIERQIQPFGLVELLQRERKLINGVLDLGLSGQQAISLLGHPEIAQARSGDEEPRRFDWRDEIEDGRVIIWLNNLEKDKRYREFSPSIYAVIQPMGHGLPQIRKDIFNLVVPVDFTKPEDVEMVTTQLLGFVRRLIPIRFGLVPLTPTGEAIEQAKVVYYLLENHGLSAVVSYLEKSLEQRKTARPDQNILLEAIKDRPLRPEASPLPFNDIFTSETHEKQIHLAKHWVERLRAGGEIPSVFLNGFAIPRDEHWVKVMNQKLMVDLQALQHAAYFGQINDNVWVPGMFLENAVARRNSLIFPEDATDLKVLNVKKIYTEHHDVLSKVPIIEADDQSIKADWAALTVITDLDSLDGQKLLYFALQFRRDQPGVRVDIVHNPKDVTRSASQLNQRIKARESELSAVSRLLDLETILQSGEAQADPGYDAALAAFLATAKLQAGDNALILNGRVVGPIQSAEDFSKEDFDQLLSAERASRILPVHKAVEDLGLDDKISGPLDAAKVTSVTALSGISDLPQGIFGSAPSLRTTAFNKLNSTHTSFEVGDPSRATIFLVAIINPASEVGQKWAPVLKVLSELEGVHLKIFLNPIEELGELPVKRFYRYVLESAPSFDEHGKVKALSANFAGVPLDTLLVAGMDVPPAWLVAPKVSVDDLDNLRIKDIKTRRGTEHIEAVYELESILIEGHSREMPAGRPPRGVQLVLGTERDPHFADTIIMANLGYFQFKASPGVYNLRLKEGRSSDIFSMESAGAQGWTPVPGDNTTEIVLMDFQGTTLYPRLKRKPGMEAEDVLEESSANAGTGSAMEYVSKGLKFAEGLFGRAKSTPETKSLSATQHADINIFSVASGHLYERMLNIMMVSVMRHTNHTVKFWFIEQFLSPSFKNSIPHLAAHYNFTYEMVTYKWPHWLRQQKEKQREIWGYKILFLDVLFPLSLDKVIFVDADQIVRTDMYDLVTHDLHGAPYGFTPMCDSRTEMEGFRFWKTGYWANYLRGLPYHISALYVVDLRRFRELAAGDRLRQQYHTLSADPHSLANLDQDLPNHMQFQIPIHSLPQEWLWCETWCSDETLEEARTIDLCNNPQTKEPKLDRARRQVPEWTEYDEEIAALLKRRREEQQEQQAGEVEKNTKSRKFEEDRATETTSVKDEL

SEQ ID NO: 4181 - protein, 1443 aa, Ceratocystis platani
MISHSSETAAGENATAYYPILDKVANGYFNGISSDKDLYDAFLRLLSEDGYVTSPDMLSTFNFALSMRTAAPRVEAHYQYYATGIEPHLGSHASDKDCNVWALIDGQRYCSPDLVLAKDKGTTIKGLQATNLPFDRILGAGVPAVLYADISDPAFAPFHKAMVAAARKGEVSYRLRHRRTASHGTPEPLPVNGYGVELSLKRTDYIVIDDRETGDQPAVKDTTDDLQVVLNDDEEVADLKPLSKAELLNLGLSTTSYIMQSPNPFDTLVKVSQDFPKYSAKLAAHEIASEILEKRPKRDVNTPAGRNMMWINGVQQIERQIEPFNLLEALRRERKLIQGVRSLGLNARQANALLGHNAITGSKISEDSIRYDWRDNLEGNRVIMWMNDLEKDPGYAQFDRSVKALLRQNFGQIPPIARNVFNLIVPIDFTNAADVSLAGQLWGLSQRGLPIRFGIVPLLPSNTATEIGKALYHLYHKYGFEVMLQYVSEAGVVGTLEIQKKVFDAVISGVSKAAEGGDTPISLADILTADSSNDQIEKTRNWIKRMEASSDVPPFLVNGVMMARTERWMQSMSQRLQIDLHLIQNAIREKALTDDGEPLEFFLQDAVLRRNKYINPSGEKDPRVLDVGKLYVDHKNLFDKIATIEPLEDTTKEKWAAMTLVVDLTSDAGLQMLLDAFAFVEANDGVRLDIIHNPVETRGSSRVNKALLVNDPDAQNVNQLRDLLKPDGHAADESFDISLESFLLATNIQPGSSMVILNGRMIGPIADEDAFTQDDFQQFLLNERRVRIFPVYTAIDDLELGDIISNPLEVAKLTSITALSTISDLPQGIFDSVPTIRSNIWDKWDDSYASFEVGDAEESNVHIVVLLNPVSEQGQRWAGILKVLSELDGVYIKVFLNPSEKLTELPLKRFWRHVLASQPTFDAETGKVEKLHGLFKGLPSEALLNAKLDVPPLWLVAPKVSVHDPDNIKLSTAKGNVEAVYELQSILIEGHSRDGATTPPRGAQLVLATEKNPHQEDTIIMANIGYFQFKANPGFYSIQLLPGRSSDIFEIESVGAKGFRPVAGDKGTEVCVMSFQGKTLFPRLVRKPGMETADVLEVGDEGDSLLAKGKKLASGLGLFSSKNKGQEEQAEINIFSVASGHLYERMLSIMMVSVMKNTKHTVKFWFIEQFLSPSFKDFIPFLAEEYGFKYEMVAYKWPHWLRGQKEKQREIWGYKILFLDVLFPLSLDKVIFVDADQVVRTDMIDLVNVDLEGAPYGFTPMCDSRVEMEGFRFWKQGYWANYLRGKPYHISALYVVDLKQFRRLAAGDRLRQTYHSLSADPNSLSNLDQDLPNHMQFQLPIHSLSQDWLWCETWCSDESLKEARTIDLCNNPETKEPKLDRARRQVPEWTQYDDEIAAVDRRRRGPATEEKRGAKTEEEPEAKNTKSRSWEEPPAVVTEKDEL

SEQ ID NO: 4182 - protein, 694 aa, Rhincodon typus
IQGMDNDAFEKKYNTIGVNFLRTHRMFCHDVLKLLPGQEAVVSNGRILGAFNENETFHPEDFSLLEKITLSTSEGIKAHIKQMGVDSKSGSDLLMKVDALLSSMPKMESRKDVKFHQNQLSVVKIKPQDGVFYEVVAIVDPLSREAQRIAPLLLVFNLVINMKLKVFMNCRPKLSELPLKSFYRYVLEPELVFTADNNLSAGPIAKFLEMPEVSLFTLNMFTPESWLVESLHSPYDLDNIHLEEVEGIVSAEYELEYILLEGHCFDVTTGQPPRGLQFTLGMKHNPVMVDTTVMANLGYFQLKANPGTWLLRLRKGRSSNIYQIFIHEGTDSPDDADDVVVVLDSFKSKILKVQVNKKPDKINEDLLSGVDTEDKGIWESITSFTGLRSDQTENKKDDVLNIFSVASGHLYERFLRIMMLSVLKHTKSTVKFWFLKNYLSPTFKEFIPEMANEYRFQYELVQYKWPRWLHQQTEKQRTIWGYKILFLDVLFPLAVNKIIFVDADQIVRTDLKELLELDLEGAPYGYTPFCDSRKEMDGYRFWNSGYWASHLGGRKYHISALYVVDLKRFRKIAAGDRLRGQYQALSQDPNSLSNLDQDLPNNMIHQVAIKSLPQEWLWCETWCSEESKKMAKTIDLCNNPRTKEPKLKAAVRIVPEWNDYDNEIKVLLKRLEGHGNNRYTKSKCQSPASGRDEL

SEQ ID NO: 4183 - protein, 356 aa, Piromyces sp.
PQAWLVTPVVSVYDLDNICLKSVEDSGVNAIFELKNILIEGHARDMRLNTPPRGVQLILGTKSYPSMVDTIVMANLGYFQLKANPGVWELQLRSGRSAELYQIINVGNNIHSWLDDRNDELVKLYEEYGITTALTSFEGSTVFLRVDKKKGMEKEDVLAEEGSSNNNDSDDKIWGKLKKKLGMNNGGSDTKKPAEKINIFSVASGHLYERLLSVMTLGVMKHTKTPVKFWLIENFLSPSFKNFIPHLAKEYGFEYELVTYKWPHWLRAQSEKQRTIWGYKILFLDVLFPLNLDKVIFVDADQIVRADLKELVEMDLHGAPYGYTPFCDSRKETEGYRFWKTGYWEKHLRGKPYHIR

SEQ ID NO: 4184 - protein, 462 aa, Rattus norvegicus
MITPEGWLVEPVHSNCDLDNINLKDIERSVTAEYELEHLLLEGHCFDMTTEQPPQGLQFTLGTRSNPDVVDTIVMANLGYFQLKANPGAWILKLREGKSEDIYEIIGHEGADSETDVGNVIVVLNTFKSKILKVQVKKKSGKIKEDVLADKHEDRGMWDSIKSFTESLQKDGRKDNNILNIFSVASGHLYERFLRIMMLSVLRNTKTPVKFWFLKNYLSPTFKEVIPHMAKEYGFQYELVQYKWPRWLHQQSEKQRIIWGYKILFLDVLFPLAVDKVIFVDADQIVRHDLTELRDFDLDGAPYGYTPFCDSRTEMDGYRFWKTGYWASHLVKRKYHISALYVVDLKKFRRISAGDRLRGQYQALSQDPNSLSNLDQDLPNNMIYQVAIKSLPQDWLWCETWCDDESKQRAKTIDLCNNPKTKEPKLEAAARIVPEWVEYDTEIRKLLDHLENKKKSTIHDEL

SEQ ID NO: 4185 - protein, 1516 aa, Strongyloides ratti
MKWQYTLLLLFFILKSTYSSNNDGKLVITSLVAQWNHTSFIAEIAEFIGKEDPTLFFKYIDLLTEKNDINIDNLEKEYEVGIKLAGEILSESRLDLLKLSLSLRVASPAIELFQKLGKEKIDGKNCIAFVEIGDKFICSANELEEIFTNGNNLNAETYSIDHIFYSKKIRNNEIIGTIILYGNYASKEFGQLYNICKKASKNGKINFAVRFYDSQEKPDAMPVSLSGYGVELSIKNTEYKAIDDSNEKKDNFEDDLPELNDVQGFNFNILKKKHVDLVEQLKQLKVFLAESDELTPLKQWEVQDISFQAAQKVFNEPNAEAAIETLVDISQNFPIRARSISQVAVDPKLRKEVQENQERLNDEFEISPGENSIFINGINIDADSLDIYSLLDTLKQEETLANSFYEMGFRREYLSLLFSLDFSESKESFAVDFREAFPEYINNLDKDPEYKRMGNSVKLMLQPYFPGMIRPIARNFFNLIFVVDPGKVDQIVLLKIAHSFYSHQIPLRIGIIFDVSNEDDVNGMNDIGVAVVNFYNYAKSEKNAAKALNLCMKMFDSLMDDLTIENIHKFFKKNFKDVEIDEVFGKDSDYNQGRATGRSWIIRSGLGKSPKVLLNGVVFDQSSLSADKIEEAVMNEVSKQTPYIQKAVMNGKLTDKDNVMNWIMSRPTVLSRLNNRILNNGGEYLKMTNVMPCKVKNVNEFNKLSDVEKTQCIITKMKYFTRSDVESTKPLTIWLVGDMEQFESREMLRNALKFLKKSKFSRIGLINNPKDGMKNFGKVTKIINSIIRLLPQNIIKQILPKILAESVIKKIENDQFSIDEFAVNGMSTDNFNKEAKLLSNEQLKFEVSYAKSVLNLNHGDRKYIVNGKSYGTLEEKEIVEVDDFDLLEKMAISKGANKVASQIDRWGVEKDNGKSSDVVMRSISVIGNSNTKKTRHWVVLANDQKSVVHSISQDDKKAVLDIIVVTDPLTKGAQKLSAILKLILRSCNADLKIVLNPQDKLSELPLKRFYRFVADQEISFTTDGKVISPVAVFENLPKKQLLTLNVISPDSWMIQPIFAEYDLDNIKMESVEKNIVAKFELRNILLEGHCFDDITGSPPRGLQFELSNYNRKIKYDTIVMANLGYFQLKANPGIWNLELRQGRSEEVYNIVEHKNTESQNGSIVKVMVDSLPGRVIKIKVSKKADKLEENLLSDDKDSYEDDDDEENSIWSSVTKYVSGEKYDEINIFSLASGHMYERLMRIMMVSVMKHTKHPVKFWLLNNYVSPQFRNSLEPMAKKYGFSYELVEYKWPRWLHKQTEKQRIMWGYKILFLDVLFPLHVKKIIFVDADQIVRTDLMELMNFDLNGAPYGYTPFCDNKKEMDGFRFWKTGYWANHLAGRRYHISALYVVDLVKFRKIAAGDRLRGQYQGLSADPNSLANLDQDLPNNMIHQVKIKSLPQEWLWCETWCDEKSKKNAKTIDLCNNPLTKEPKLDAARRIVPEWIEYDEEIRELLEKNKISNLVKENEDKNKNTHSEL

SEQ ID NO: 4186 - protein, 407 aa, Nestor notabilis
MANLGYFQLKANPGAWTLRLRKGRSEDIYRIYSHDGTDSPPEASDVSVVLNNFKSKIIKVKVQKKLDMMNEDLLSDGTSENESGFWESLKWGFTGGQKNEDVKQDKDDVLNIFSVASGHLYERFLRIMMLSVLKHTKTPLKFWFLKNYLSPTFKEFIPYMAKKYNFQYELVQYKWPRWLHQQTEKQRIIWGYKILFLDVLFPLAVDKILFVDADQIVRTDLKELRDFNLDGAPYGYTPFCDSRREMDGYRFWKSGYWASHLAGRKYHISALYVVDLKKFRKIAAGDRLRGQYQGLSQDPNSLSNLDQDLPNNMIHQVPIKSLPQEWLWCETWCDDSSKKRAKTIDLCNNPMTKEPKLQAAMRIVPEWQDYDQEIKQLQSLFQKEKETGIPAEMPGHHTHDPAAHVEL

SEQ ID NO: 4187 - protein, 1774 aa, Gregarina niphandrodes
MKIIIPWLAVVGGLKVRVQAPWESPSLAGQIFQGIRFLEESANWGDSLVAKWIGGVTAPSSDGRSRAQREEDLVCGTFNIPDPDGGLPLESGCPLGTGSFVLHSKLMGTVLDGLVANGMFVPPLQQQQAISKEEFQLLFQLNNIHASKEDHNIREHHGSEPLVYSSKILNHSSKNVEREDMPRHGWYSVYRITDGRVIAGGWTEDPQQFASSLVHVEHEPTSSRLLQFLEPASLWTQRRNKGVTELPDGEYHIFHSDLMLADELVSLAQFVNNDRHNAYRYYHYPTLENFAVRNWAASLVLKNPEYKTSNEAETSDKIHLKNVDDEELNDHHAHKDMLSGKTISNLHDLISDKANLSSLGVATMTFMRTEVEKYLRHEKSVCDDYVVDAETVKMSCIKGISSNLLSHAPDVFGKFNSTVAKLIMKGSHSLDRVVQTRLNGVFVDGKRAHIIPSTHQSLRSMTTGFISDFLLKWLWPMALHDEIIRSTFVKHIKDCDIIARKIGSPERWKGSEKNEKVTSSLIGLVRQASRILGDFNLDESRARWNPTLFLERMGIGETQWLHTQNDEVRQLGVVEYAKALQYGLMSDITIIDWGSVEPNFHFADIIIYVDRKRLELIPRLIGELQANGLRWLVVLNDPDQPELTSRLLKSHDDYETIIQAIRELSSSKDEGDNSQGDDNSQKDPQDGDLTSRANSFTPPINTIWVNGRGIKIDDTVDNPFMDEMAIELVKAMLETDAVLLQNGLLGFSKPNGVLTHIRSLRDLAALLEGKWYRNELVDGDTSKLDTELNHESFNLGNFWMEASNMVMVDEKLVHLYSPSEINKVLKVEENGDSISPIRTLTKTMGTSFLTHSVNILVYEGSSLAKQSRIEAPFVVWIVLNADDESRPIPNVYKLRATDQLDDQLDDQLDDQEYIISPFPVNVRVSFVKDGRLCYPATSGSIDLEDLICLGSIIDGELDHKVGTIILGNMYMHLDEAAIVMNDRSKNVRQRSRTFLRHVKSRIQALVNAQIGIYRRSLTTNNISRLSETGRLPYLSPITFHTMVPDLQEKNIILEAVSHLYHSLLNKNTQDYNDWMEDQQLEKELFSKPSLRGLRMASIIDDNDDARIKLLIDPLSSMGQIYSNLAEYVNVYLGLNTQVILTSHWSYKDLPINKWFDFVQQPPLMFQLQKSRKISGPDSKSTGSKSTGILRSSFIGAKFLNNLTDEIVTFKIDIAPQLHIRSDESEVDMDNIKLDILKDDVIVNYRLDGFRIEGSIHEVGGSVTGGVPIRLVDIETNHTFDETISLSQPNYFQLVAPDIGQYKIMIDNTTITHANYTEGRGARKYNFDVNQIMGNHNMSDHNMITINSWNYDLWPRADSIIKIMSTFTGSEVLFDNIPIRYQLPIIGTLLQRVEGVFAGSLFGRCTQLIYAIGEHILEPYEPYVARVYSSIWRWYYGPDDDVQKGDDRVHIFSLASGHMYERLLRIMMLSVSHNTDRKLTFWILEDFLSSKFKEYANKLQYSLNTEKDLIEIRYVSFGWPQWLRSQVDKQRQIWANKILFLDLLFPRNLNSIIYIDADQVVRGDIGDLWDLDMKGHVYGFTPFCNDRDETSQFRFWEHGFWYDYLKGRPYHISALFKVDLKLFRERRVGDVLRTMYNKLSADPNSLANLDQDLPNAIQDFVPIFPLPKEWLWCETWCSDKTKSKAKTIDLCNNPKTHEHKLKQATRIIPEWTDYDNRLKILIGDEGIPNTHPQQNLNTIAHTINTIAHTTNNKHVPNNHVPNNHATIKDDAPDEL

SEQ ID NO: 4188 - protein, 749 aa, Equus przewalskii
ETSVHSRLGVIYNPTSKINEENTAISRGILAAFLTQKNSFLRNFLRKLAKEETAAAIYSGDKIKTFLTEGMEKNAFEKKYNTVGVNIFRTHQLFCQDVLKLRPGELGVVSNGKFLGPIDENFHAEDFYLLEKITFTNLVEKIKGIVENMEIKSKNMNDLIMKVDALVSSLPTHASRYDVTFLKESHSIIKINPQENDMFFDVIAIVDPLTREAQKMSQLLIVLGKIINMKVKLFMNCRGKLSEAPLKSFYRFVLEPELMLMANDNIGPVAKFLDIPESPLLTLNMITPEGWLVETVHSNCDLDNIHLKDIERTVTAEYELEYLLLEGHCFDVITDQPPRGLQFTLGTKNKPVVVDTIVMANLGYFQLKANPGAWILKLREGKSGDIYQIVGHEGTDSQPDLGDVIVVLNSFKSKILEVQVQKKPDKIKENVLTDKDEKKGMWDSIKSFTRSLHKEKDKKETDVLNIFSVASGHLYERFLRIMMLSVLRNTKTPVKFWFLKNYLSPTFKEVIPHMAEKYGFQYELVQYKWPRWLHQQTEKQRIIWGYKILFLDVLFPLAVDKIIFVDADQIVRHDLKELRDFNLDGAPYGYTPFCDSRTEMDGYRFWKTGYWASHLLRRKYHISALYVVDLKKFRRIAAGDRLRGQYQALSQDPNSLSNLDQDLPNNMIYQVAIKSLPQDWLWCETWCDDDSKQRAKTIDLCNNPKTKEPKLKAAARIVPEWVEYDAEIRQLLEHLENKKKNAILTHDEL

SEQ ID NO: 4189 - protein, 1512 aa, Corynespora cassiicola
MRVLASLLSVKALFILSAFKHIGAHAGPSINVALRASFASAPYLVELLETAAEENADAYFPLLDRIADGYFDGAKTDQELFVAFVELLEQDGHITEPETLASFQFALSVRSAAPRIEAQYQFYNTSVEPSLEAEQGEGCDTWVAFGGKQFCSPQLEESHGAVKSERMYALPFDRVLGNASSPLSSILYADITAPSFSKFHKTLSKTAKEGKTSYRVRHKPSANAPKTPLIVNGYGVELQLKRTDYIVIDDRSAEQGENAAQKPLETELNDDEEVSDLKPLSKDEVSDLGLKAASFVMKSDQPMDTLLKLVQDFPKYSSAIVGHEASEEFVAEHSQNREQLLPSGYNVLWINGVQIPAREVNPFTLLEHLRKERRLVNGIRSQGLSGSDAIALLSHSAITETQAEDEPQRYDFRDEIEGGKVIIRMNTIEKDSRYESWPSALTSLLQRTFPGQLPAVRRDIHNVILPVDLTSEDEVFVIAETLLGLVKRGVPIQWGLVPQTRTEGQMAQAKVVYHLLDTYGLSALIKYLNAAKEAKKLASPDKSIFDATVKDAKLRKEREPLELANVLKSEDLEERVAAASKYLARLAADGPKAPLFVNGVPVPNDESWLQLASQRISMDLRQVQKAVFENVIKEDNWVPQQFLASAAPKRNPLVIPENEKDITIINMAEFEDKHSEVFEKMPRVDVATKSSEGTWAHLTLVGDFDSESGLALLRSVAQYRQDNPNVEVVLIHNPQAGAEQSNASADIFEAWVKSSKKLTSQKLLDTVTEEPSFSPTSANSTAFWKVAEPIYEALGLKQGENAILVNGRKVGPISANYAFSKDDVETLISYETTKRIEPISKALQALEIQTGNPLELAKIQSLVALSGISDVPEGIYESTSTQRIDIFNKWSDEHTAIVKGDNNTAVIQIVASIDPATELAQRWIPILKTLSEMDGVYLKLFLNPKQMLSELPVKRFYRYLLDSKPTFNEDGSVDNLEAHFSGIPKEALLNLGMDVPPSWLVAPEESIHDLDNIKLSSLSSGTNIDAIYGLESILIEGHSRDVTNGQPPRGAEVVLATEKDPHFADTIIMANLGYLQFKANPGFYNIQLKAGRSQEIFNLDSAGTKGYAPQAGDETSEIVLMSFQGTTLFPRLSRKPGQENADVLGADEPESFASEIVEKGTQKVNQFLSKVGLGFNTEKVLAKGAELLSGGKSASKGVQADINIFSVASGHLYERMLNIMMLSVMKNTEHTVKFWFIEQFLSPSFKSFLPHMAAEYGFSYEMVTYKWPHWLRGQTEKQREIWGYKILFLDVLFPLDLDKVIFVDADQVVRTDMYELVSLDLEGAPYAFTPMCDSRTEMEGFRFWKTGYWANFLRGRPYHISALYVVDLQRFRKLAAGDRLRQQYHSLSADPNSLSNLDQDLPNNMQFNLPIKSLPQEWLWCETWCSDESQKEAKTIDLCNNPQTKEPKLERARRQVPEWSVYDEEVARLARRVRGEGAVVEGGSVQERLQEEERERKEREEEERVKGFKQEL

SEQ ID NO: 4190 - protein, 1731 aa, Raphidocelis subcapitata
MIARAAILLLALGALFAAPLGVRAAQKGASITVRARWQGTPYLLEAAEFLADESPQTYWRFVEGLGELKREPSSPAECWRATLSQAGPLVLPPVAKLLPVALGLRQYSAKLELFRQLAAQLHPNATASSCCFADVEERLIPGDDLAALEAALKAAASAKPAAGAPSAVELHAFDHVYNPQQQGAPGAAHAVVYGPPGTRCFAHMHRIARDAATASAAAGARPIVYAHRPLLGEACRSGEAPDCLFVGAEEQLVLPGYGVEAVLKNMEYSAMDDKKQKEKAAAGQQPPGAASDAAAADGDGAGDGAPLGEVKGFRLDALAARRPELRQELLTFRDALMAGEDDEAIKVWDLADAGLQATSRISQSSDPLALLQEISQGFPSIVSSLTRQQVPPSLRTAVAANQRLVSPGANILMLNGMLVEVNNFELYAFLDRLRIELRMVGQLQQAGLKPQHALQVLEERSEDVSAAAASDLRLDLAPYSKLPWLNNPEKDKRGGGQVRGGIMALMQMYPGRLRPLAANAFSLLYAGDAVSPQGLAVGRILAGMHERRLPVRIAMLPLAPDAIHRAAAARAGVGAFADPPPWKEMSPQERFARALLTLRDTFGGPAALQFWEGLAKGAEQREPASSLKSLKAAFVAAWEGAAKGPLTKKGQVAAKKAAAVAWSDLESGSGYSSEAGMALADLSAFALRKGLAQADKSVLWVNGGLHVLPEGVSDWLELEREVTYIVAGEHQFLQEQIYFGRIGEGEPLLPSIMELSTTVRRWNPAVLGGGDDDGAEEGAKKIVVAEALASPDAAALTYLHPAVEEGQVVGKGTAWGESQVYPVTHWVVADLSSQRGRALAAAALDRLLSIDDDDEVADARAALLMAPAADAATPSLLDALVARGLRAYRAAGASAADGALLRLLRALLRSPDAAALAAEPLGGAAAGKRDLPALLLPLARAAGAVPDGAAAAAAASALGGVDAAALAEAAADVDALSRLARGPLGLEPGAAAVITNGRVILDWSPRGAAGGGEAGAGGAEGLTAEDFGLMQMYAQEMQPGAAIAAAVRAAAKPYLPPRNMSDAALLAASAIGAQIYPDSRFGSLQAKQISGILGSLKGKAVRAGAPQGPDTLLQLVAITNPLTREAQRMSQVLRFVSEVLGPAASIQLHLNPKLDLSDMPLKSFYRYALPEFPRDEDGSLGLPGAPSAYLPRLPPKRVLTLNLEVPEAWMVEATKSVYDLDNLRLADVPEAVAYAEYELEALMLTGSCTEALPGGRRGAPPRGLELRLGTKAEPRRVDTLVMSNMGYFQLKASPGLWQLSVAPGRSSDIFGIVPPASGGSAAAAALASSTATYIDSFSGHHISLRVRKRPGMEEEQLLPAADGADADADAAAGGGAKGKGKAGKKGKGKASPAAVPSNDVINVITVASGHMYERLQKIMFLSVIKNTKSRVKFWIIKNYMSPHHRRVVPEMAKAYGFDYEFITYKWPHWLHKQTDKQRIIWAYKILFLDVLFPLDTGRVIFVDSDQVVRTDLAQLMTMDMKGAALAYTPFCDNNKEMDEFRFWKGGFWANHLQGKPYHISALYVIDLPRFRQAAAGDNYRIIYENLSKDPNSLANLDQDLPNYAQHKIPIHSLPQEWLWCESWCGEATKAKAKTIDLCNNPRTKEPKLQAARRIIAEWPALDEEQANFTAAVDARYAQEQAAATGEDAAVAGAGAGEQGQAAAAAAGEQGGGGGGGGGDGDDDGGSDKTEL

SEQ ID NO: 4191 - protein, 1454 aa, Aspergillus tanneri
MATLCTTCCRTIFFKLLESAAEENSTSYFPLLDRIADGAFDDAVTDKEIYDRFLHVVEEDGHLKTPESLSSFKLSLAIRSASPRITAHYQYYNASVQHSLMAAQDAACPVWVHSDGKQYCSSTMERAQQEVSGGMDARELPFDRVLGDTSLPPAILYADVASPMFKDFHQTLSALAKEGQVSYRVRYRPPQRWSPRPLFVSGYGVELALKRTDYIVIDDRAAEQRESDNAGPSTYSDAPDDLRPLSSSEVARLGVNAVSYVLDRDDPLDALVKLSQDFPKYSSRVAAHNVTMELLHDIRSSRLQMLPSGMNVMWINGVQIDSRQMDAFSLLDLLRRERKLIEKFRDIGVSAQEAVNLLSHQFIGEALAQDAPQRYNYLDDIEGGRVLIWINDLEKDARYASWPSDLEAFIHRTFPGQLPPVRRNANNIVVPVDLARSEDVGFVVRNIQGFVIKGIPARFAIVPVASTPGSSAQLKIAHYLQETFGLASLMHYLEESSSQQKVASPDKGCFEAATKERKIRPEKQILSFEEVLKSEDLEDLVSKTLSYQNRLGITGDASQSFVNGAQVIRKDSWMQEVSVRVSKDLQVIQQGIVGGEIEDGTSLSGLFLSQAFDRRSLWAIPEDPKDIRVVDLVKVSDSQKETLGETPSIVSMKDDALDSAYLIVVGDFDSEQGHQLLTATLEHREKHEEVEVLFIHNPGEHTSKMDASIKLYRSLKGGKQVDAAQVLADIKSSDYSAPSAGDAEEISKFWADKRPLIQEFGLPHGANGLVINGRTVGPIDADVTSGDLDQLLAYEQTKRIGPVTRACKDLGFGSNLSGALAFAKLTSLTTLSTISDVPEDIFESTSDIRVNIFDKWNDSRSVITVSNSEDPAITIVASIDPSSETAQKWLPILKVLSRLASVRLRLFLNPREEIKELPTKRFYRYVLDSEPSFNDDGSISRHTASFSGVPVEALLTLGMDVPSSWLVAPKDSVHDLDNIMLSSLNSGSDVEAVYALEHIMIEGHSRDLTTKSPPRGVQLDLGTDNNPSFADTIIMANLGYFQFKTQPGLWKINLKPGRSERIFNLESVGGLGYSPQPGDENNEVALLSFQGKTLFPRLSRKKGYEMEDVLETSSKSGTAMDYVSKGLNFASGVLSSVGVGSKGMSEKQADINIFSVASGHLYERMLNIMMVSVMKNTKHSVKFWFIEQFLSPSFKSFLPHLADEYGFSYEMVTYKWPHWLRTQREKQREIWGYKILFLDVLFPLSLEKVIFVDADQIVRTDMYDLVTLDLEDAPYGFTPMCDSREEIEGFRFWKQGYWKKFLRGKPYHISALYVVDLSRFRALAAGDRLRGQYQMLSADPGSLSNLDQDLPNHMQHHIPIKSLPQEWLWCETWCSDESLTQARTIDLCNNPQTKEPKLDRARRQVPEWTEYDDEIAALSKRVALGHQQKEEEMQPNLVDEEDDEGSPEWDKDEL

SEQ ID NO: 4192 - protein, 1534 aa, Orussus abietinus
MLFINNRTQSNIKMWIFIFLYSLLITSSHTLADKKINKYVTTLINAKWNDTPLVLEVAEYLNDENSNYFWSFIDKVSNRTDDLANSATERERYNILMEIVSDFLSPAELAVLKLGLSLRIYSARIEMFSQMAQNRNASGLGCNNVFDVGGKFTCSLDELEKLIEEDEWPQAVTYSVDHYYLGKQNSNRLVVLYGELGTPEFVEYHERLKTLVKTKNIGYILRHYVKDRLDRKLRLSGYGVELQMKSTEYKATDDTDIKDNSGKDAESVNDGVDELDGINFAILKNLYPDKRTELDQLQTHLLETSHEIGALKVWQFQELSHQAAERIMNSPVDEAIKALIDISQNFPMQAKSLIKTKVSGDMKKEMKLNQELFSASLSIQPTDTALFINGLFFDLDAIDILTLLEALRSELRIMEALHKIGFNSKKMGKLLALDLSSGADGQDFAIDIRDSAIIWINDIENDARYSRWSPYLNELLRPTFPGTLRNIRRNMYNLVLIIDPLSETSTALVSLMESLYLHTTPLRLGFMFITNYDPSVTGLSDPSVAVNNAFHYFLETRGPKDALNFLIDVGGFIGKDGLGVSDVKKAIKTRDPSANVNYILGEESEYDVGRHLASDFVKRTGFKTFPQALLNGMPLPPDQLNAESFEEAVLSTIMSQIPMMHKAVIRGEITEGDDIIDFIMNQPNVMPRLNERVLRVEKSTWLNLIGKAPKDEDFTKWGAQDAFTWLMDKMHYLYVPRRSSLHHLYSFWIAVDLNKPSGRELLLEALEFLKSNTDVRVTILVNNEPHQDFGQDINKIAIAALSALPVEKSVDYVNQLIIEDNVKLIQQGSFVIQDEAVQNQMKEQDLVLAVHRHYARNVLNLESGARAIVCNGRVIGPLDEDEIFTTEDFSLLERFSQSTYGDKLFKNLIKSRLFNDIEDDDDDEYEKSDVTDDMIMKISSLLVPRPQTRRRFDVPFHGDEHSAIKIPASDSDGVAFNLVAIVDPVSRGAQKLGPILNTLQQSLNCEIKVFLNCLEKNSDMPLKSFYRFVIEPELQFSPEGDLAEAIVRFTKLPTSSLLTQYIHAPENWLVEVVKSVYDLDNIKLDNVAMGVHSEFELEYLLLEGHCFEAVMGNPPRGLQITLGTEIQPVMVDTIVMVNLGYFQLKANPGEWILRLRQGRSAEIYDISSVDGQDVIQQENEVKVLISSLRSHVLKLKVSKKPDKIGMDLLSDDDQNSGIWNSISRTFTATDEPKDQDDKLNIFSLASGHLYERFLKIMMLSVIKHTKTPVKFWFLKNYLSPTLKGFLPHMAKEYGFEYELVQYKWPRWLHQQSEKQRTIWGYKILFLDVLFPLDVKKIIFVDADQVVRADLKELATLDLEGAPYAYTPFCDSRKEMDGFRFWKQGYWRNHLQGRSYHISALYVVDLKRFRRIAAGDRLRGQYQALSQDPNSLSNLDQDLPNNMIHQVAIKTLPQEWLWCETWCNDESKEYAKTIDLCNNPMTKEAKLQAAMRILPEWVGYDEEIKALQQKIENDNRQAEKEVEELVNDSAKHEEL

SEQ ID NO: 4193 - protein, 1637 aa, Eucalyptus grandis
MKACCRSGFWIVVVLAVCLGVASVHGENRRPKNVQVALRAKWSGTPLLLEAGELLSKEWKDLFWEFIEVWLHSEGNDAKPSTARDCLKIILGHGNSLIGHSLAPLFEFSLLLRSASPRLVLYRQLAEESLSSFPLADDFSSSNVNPGFPSETEELKRKLDSLPVGGNPDSPNGRCCWVDTGGELFFDIAELNLWLQNPERSGDVFHQPELFDFDHVYLDSSIESPIAILYGALGSNCFKEFHGTLVEAAKKGKVIYVVRPVLPSGCESKVGVCGALGTEDYVNLGGYGVELALKNMEYKAMDDSAVKKGVTLEDPRTEDLTQDVRGFIFSKILERKPELTSEIMAFRDYLLSATVSDSLDVWELKDLGHQTAQRIVHASDPLQSMLEINQNFPSVVSSLSRMKLNDSVKEEILANQRMIPPGKSLVALNGALINIEDVDLFLLMDLVHQEMSLADQFAKMKIPQSAIVKLLRTLPPPESSMFRIDFRSSHVHYLNNLEEDPMYRRWRSNLNEILMPVFPGQLRYIRKNLYHAVYVIDPGSVCGLESIDMVISLYENNFPVRFGVILYSSNFIEKSEINGVSRHAEDNGGQTEDLSSLIIGLFFHVKENHGTHLAFQFLSSINRVRSESVDSEDDTLERHHVEAAFVDTLLPKAKSPPQDILLKLEKDHSVQLLSEESSLFVFKLGLHKRGCCLLMNGLVLDANEEALMNAMNDELPKIQEQVYFGHINSHTDVLDKFLSESGVSRYNPLIIADSKARPRFVSLSSLVLQGKSVLNEINYLHSPETMDDLKPVSHLLAIDVTSEKGMKLLREGIRYLMGGSKIARLGVLFNANQSADSSSLLFMRVFEFTLSSYSHKERVLYFLDQLSLFYENKYILVSSLATETTQEFKDKVYELADENGLSSDAFKSMLLEFSVNKMRGDLNKVAQCLYKLLGSGSNVNAVITNGRVLFPIEDTFLSDDLRLLESLEFKQRIKYIKEIIEEVEWQDIDPDLLTSKFFSDVIMFASSAMAVRERSSESARFEVLNAQNSAVLLGNANASVHVDAVVDPLSSSGQKLASLLRILSKYVQPSMRIVLNPLSSLVDLPLKNYYRYVVPTMEDYSTIDYSINGPRAFFANMPLSKTLTMNLDVPEPWLVEPVIAIHDLDNILLENLGETRTLQAVFELEALVLTGHCSEKDHEPPRGLQLILGTKSKPHLVDTLVMANLGYWQMKVSPGVWYLQLAPGRSSEIYILKEDGEGSQNEPSLKRIMINDLRGKVVHLEVVKKKGREGEKLLVSSDDEQQSQEKRGAQNWNSNILKWASSILGGSEESRSRSAAQEHGKGGRHGKPINIFSIASGHLYERFLKIMILSVLKNTQRPVKFWFIKNYLSPQFKDVIPHMAHQYGFDYELITYKWPTWLHKQKEKQRIIWAYKILFLDVIFPLSLEKVIFVDADQVVRADMGELYDMDLKGRPLAYTPFCDNNKEMDGYRFWRQGFWKEHLRGRPYHISALYVVDLVKFRETAAGDNLRVFYESLSKDPNSLSNLDQDLPNYAQHTVPIFSLPQEWLWCESWCGTATKSKAKTIDLCNNPMTKEPKLQGAKRIVSEWPDLDLEARTFTAKILRDEFELQEAVASDKSQGSQSDESSVEELDLESKSEL

SEQ ID NO: 4194 - protein, 1523 aa, Callorhinchus milii
MWVLVAVTLGSICLSTVTADSKAVTTSLTTKWPSTPLLLEASEFLAEQSKAKFWEFVDSSQEFYEENHAGTDLLHYQFIQRQAATFLSHVQVNLMKFALSLRAYSATVQMFQQIAAEEPPPKNCVAFVNVHGEKTCSPDNLEMLLKGSLERSKPYIFKGDHIEFPLKPELPVVILYGEIGTKEFSKFHGLLRSKSMMGTINYVLRHYVATPSQERVFLSGYAVELVMKSTEYKAKDDTQVTGSEMNATAINENDPVDEVQGFLFGKLKTLYPKLQEELKELRKHLIESTNEMSPLKVWQLQDLSFQTAARILAAPSADALMVMRDLSQNFPTKARSITRTVVNSDMRNEVEENQRYFKETLGLHPGDSALFINGLNIDMEVQDLFSVLDLLRNEAHIMEGLHDLGIQGEDLHELLKLNVHPGDNDYGVDIRNPAVYWINNLEIDSKYNSWPSNVKELLRPTFPGVIRQIRKNFHNFVLIVDPTDDSTPELFKVAEMFYSNNIPLRIGLVFVVDDSEEANGLKDAGVALLRTFNFISDEVDNTKAFQTIISIYNKVKQGERLKIEHVIGTLEKAYPYIEVTSVLGADSVYDTNRKEGKAYYKQTGLGPLPVALYNGMPYQKEQLDPDELETVTMHKILDNTGYFQKVVYMGELNNDQDVIDFIMSQPTIVPRINSRILNSERQFLDLSSKVVYGVDDYSQFAFLKSDEKAAAVANSISYLTKRDNNYIRPVTFWIVGDFDEPSGRQLLYESLKHLKSSNNLRVGLINNPSKEPTEENSVNARAIWATLKTQNINNAKNFITKMAKEETAKALSEGADIMEFAVGGMDNEAFKAMFNSPDLSVILSHGSFCTDVLKLKKGQRAVISNGRVVGPLEESEIFNQNDFHLLESIATETAEKIKSKIQMLVIEEDHASDLVMKVDALLSAQSRGEPRIDLQFFAERLSVVKLRPKEEQVYFEVVAIADPVTRDTQQLAPLLLVLNQLVNMNLRVFMNCQPKLSEMPLKSFYRYVLEPEIAFMADGSFAPGPVAKFLDMPQSPLFTLILNTPESWMVESVRTSYDLDNIYLEEIDGGVAAEYELEYLLLEGHCYDVTTGQPPRGLQFVLGTSANPAVVDTIVMANLGYFQLKANPGAWALRLRKGRSEDIYKIYSHEGADSPPGTEEVIVVLNSFKSKIIKMKVQKKPDHVQEELLSDGNAENEGFWESIKRGFTGGPKPEEIKPDKEDVINIFSVASGHLYERFLRIMMLSVLKQTKTPVKFWFLKNYLSPTFKEFIPYMAKQYGFQYELVQYKWPRWLHQQTDKQRIIWGYKILFLDVLFPLAIDKILFVDADQIVRTDLKELRDLDLDGAPYGYTPFCESRREMDGYRFWKSGYWANHLQGRKYHISALYVVDLKKFRKIAAGDRLRGQYQGLSQDPNSLSNLDQDLPNNMIHQVPIKSLPQEWLWCETWCDESSKKKAKTIDLCNNPMTKEPKLEAAVRIVPEWQDYDQEIKQFQKQFQEGKLNAFAHVGTENVTSIEDHVPHSEL

SEQ ID NO: 4195 - protein, 1510 aa, Hydra vulgaris
MTKFLIILQLLVLCSCSEKFVRIELDAKWRQTPLPIEASEFIARQSNIKFWKYIESFQSAFNASAKELYNEALAKAGLMLSSTELDALKFSLSIRVQSPKVQFYQQMADSFQQKCNIFFQTSDRNIACNLDDALRVKKNIPDNSLVHEFDHIYPGSEHNSHLLIVYANFYIPEFKEAHQKIVSMLSSSNIKYILRHFYQIHQKELKVALSGYGVELAVKSTEYKAIDDQKVEDLKMKESVVDGAEDDEVEGFLFKKLREIHPDLQEQLLKFKQHLKDKNKELTPLHQWELQDLSFQAAQRVMSASSQDQLKLLKDISQNVPMIARSLVKTAVNENLRNEIKENQQEFESSQILPGDAALYINGIKQSVDDLDIFNVNELLESEAIGLSVLNQLSLDLSKTSQLLALNLVPEHESLILDTRSDAVQWMNDLEKDSQYHYWPSHLQEMLRPTFPGMLRYVAKNIFHVVAFVDPLTHEGIKLLEEFNKLISQSMPARFGVVFVTKAGLSDKAEDDASAGLLRAFSFIKSDKNVKDAFKWLSTLYRNSGNEPPKPSGVISLLQSWYGKSEASDALDPKSDYDDLRKISNKFFKKIGLKTLPSILVNGETLSKEEMQDLESSVTEKILSQTADVQQAIYNGNHHNYPTIYDYLMSQPNVVVRLNSLIQNTKGSYLEMLSTRKEFTTDISLLSKEDASSFFAESAQYFIQDSGATTIWVIADATTSHGKSLVINALKYVQKQKNARLALFLNGKESDEITLNDALLIIFRLRKTLISGIAKFAVKFLEENDFKKIIENEDELEKIATGITGINKKRLFELFSSKDDLEKVKQDIKRNTVVINNVFGGYESLVIANGRIIGPLSQEDGFVVDDFQLLQNFENNRGGYKILEIIESMNLPSLPSEGHARYKSDLVMKISAALSKRKDQKRSTFTFKKDQHSVIKLKPRRNDVSFDIDVILDPLSKSAQKLVPIVMTLYDAFNVNLKIFLNCKGQHSELPVNRFYQYVLQPELLFNKDGEIINDQAATFLSLPHSALLTLIMDTPQSWLIEAVGSNQDLDNINLGEASTYVYGDFELENIIVEGHCSDSNTHQPPRGLQFILGTEKEPDQFDTIVMANFGYFQLKAFPGSFVLQLREGRSSQVYEMDSLTGGEELSPGQNYTVFIDSFSGKFLKVKVKRREGQAKTDLLSDDSGDSSSENDFGIWHSFTSYVKSEAKSSKNTDGKIHIFSVATGLLYERFLRIMMLSVLKHTKTPVKFWFLKNYLSSSFTTFLPHYAEKYGFEYELVQYQWPRWLNAQTEKQRIIWGYKILFLDVLFPLNLERIIFVDADQIVRADLKELMDMDLEGAPYAYTPFCNDRPEVEGFRFWNHGYWRNHLGGRPYHISALYVVDLKRFRKVAAGDRLRGQYQGLSQDPNSLANLDQDLPNNMIHQVEIKSLPQEWLWCETWCSDESKKYAKTIDMCNNPQTKEPKLQRAIRIAPEWTEYDDIIRMLQEQVFKNSSNLEKTSSNPTQDSKEEL

SEQ ID NO: 4196 - protein, 1363 aa, Saccharomyces eubayanus
MRLLALACIFFYAPFCALAHSLRYGIPESAQVWSILVHLLGDLDEQLLAELYPLVTGLDDETDTQGCLIASTSDALRKQHGKEDVADLLELYGSLYPMGLLQEDVSSITDQDEINGNYFIMNGKRYDKPDDVFYLKSKDLTSQQKIPDINVIQPYDVVIGANPNAPVLVFYGCPTVDNLDFEEFNRNLYMEAMNEEAKIRFIWRSTCSLDGESVEYPLNFPLGITLQNGSNLNSIPQLKKILSTIPNDVSVETNHELYDLDPEELHELDLKVTSLISKFYQEKNDTLATLHFTKNIINNFPLVSKQLTEIVLDNEDIKASNEKLNSKGFDYNMLGLYVNGQNWKITSLDPYNLLNALKIEYQNLLKITNLLQTHEASKGMLDSKFLLNRFSQFSLGKLQNLQPIKMDLHTIPGFSDSVIYFNDIEADPQYNELIDSVQAFFEKSKFGELPEIRQNWSEIIFVIDFAHLEDNDVKEALSGLVRAINVIFQGYPQRVGLLPYNSGSDDSVVNKIYELKNSTNGLAELKTFLETMLLADGLTANTDASKYSPVPDVHGLLDELQIGETSIIINGEAYPFKKNTWNYLIAKVIKKDTEFIRKELSVSSPKNKQVKVRDLLHYKSANLRHNKYTPNYFADSLYSTVNNTALENIGKDRVTTYTKDKRYNILHTITLVDDFNSIHALERLQNLLGSSFVGVRVRVIHLGDLSNAWTQLQHSFSDSDSKSSINKLINNLKVKNGKSKTSRKNALNQLGLHKWLPDIPLFELEKGTFIVLNGRFIHLDPKEVPETKHFEAIIKREAVRTIDSVFSLDLLFPGFSQERMDPDFIEMTSSILTKLFYQSTNIYGNGIDYTTESSLPRMDLNQFFEPNNLTIFDDGKSSPIDLLLILDPLEERSQLILSLVDQVKHLKFINVQVILMPTVDLNIVPIRRLYVDDREVIKLVTSETSLVDSEVDMEMDAPKSFVIDSEFQLKELLIELHAFSNKTALSAGNIDGIGGVCLELVDHLGNIIDKTITMDTFGYGQFRTDRFLKGCSIRSCDPRYTVHSFSTDGHPGFIPSNSLDILSYNPHRIAVKITEEPSYGEEHKEGGSDDATINIFSVLEPGLDEEEKYKQMVLSILSKCSKLQQVNFFILEQQSISDSLKKFCEYVNASGEMRGTITFLKYEWPQWLRPQRFSSRRRDVSKFLFLDVIFPQNISQVLYMTPNETPFDPFDLFQFQGLKRAPLGLFRMSGNGYWKEGYWEKMLRENNLEFYSTEPGFLVNLERFRQLDVGNKYRIHYQRVSSDARSLVNIGQDLVNNLQLEVPIRFLKASYKSKLITDDEHVSEWKERIDAFVSSSSDGKASEEGKSRNNQGYEDSIPLHDEL

SEQ ID NO: 4197 - protein, 1398 aa, Phaeoacremonium minimum
MDQESLSTFKLALATRSAAPRIEAHYQYYRTAVEPILRKTEDDCLDWVLIEGQQYCSASLDQPQGSVDGRQDRQLPFDIILGSGSGSVLYTDITSSQFGQFHKILSEKARKGEGSYRIRHRVTSSAGLEALPVSGYGVELALKRTDYIVIDDREAGDDATQKPTSEVNLDGEEEVADLKPLSTSELSELGLKAASFVMHSESPFDTLLKLTQDFPKYSTSIAAHNVSADFVKEHQANRQALVPSGMNVLWMNGVQLIERQIDAFTLVDMLRRERKLIHGAMDLGLTGKEAVSLLGHSSVASSKADNEPQRFDWRDEIEEGQVIIWLNDLEKDKRYAEYPKTLMALLQPAMPGQLPPIQRDIFNLIFPVDLTKAEDILLVVDQLQGFVKRKLPVRFGLVPLVSTPESLDQAKVVYHLLENYGLAAMVTYLQSIGDGKKTPAADKTVFDKVIKDRKPRAEATPLPFNDVLRSEHHERQTELALHWAERLKANGPVTTLFANGIAIPRDDNWLQPMSQRLGLDLRAVQEGVYYGMIGEDTWLPGYFIEKAASRRNVILFPEDDKSLTILDVNKLYTEHKDLFHQLPVIEANPDSTKENWAALSLVADLSSEEGRKLAVSALQFRANNPGVRFDIIHNPADAAGAHVINNVLKSKVDDLVSIETVESFATVLNAAKKSSDDGFGVALARFLKTAAILPATNVLILNGRVVGPIPTAADFTTEDFQTLLEFEQANRILPVYEAIEELGLTEKMSGPLAAAKVTSITALSTMSDVPEGIFESAPTLRISAFNTWNSSYTAFEVGDASTATIHFVATLNPASEQGQRWVPILKVLSELDGVHLKVFLNPRDRLDELPIKRFYRYVLESAPSFDDSGKVKSLSATFKGLPSEALLTAGMDVPPAWLVSSKDSVQDLDNIKMSSVKGDVNAIYELKHILIEGHSREPGGGPPRGVQLVLATETDPHFADTIIMANLGFFQFKANPGFYNIQLKEGRSSDIFSIESVGALGYSPAPGDEGTEVALMDFMGTTLYPRLVRKPGMENEDVLEDIKPAEPAGGAMDFVSKGLKLAEGILGGSKDKPKTKSVSDQEHAEINIFSVASGHLYERMLNIMMVSVMQHTNHTVKFWFIEQFLSPSFKDFIPHMAAEYGFKYEMVTYKWPHWLRQQKEKQREIWGYKILFLDVLFPLSLDKVIFVDADQIVRTDMYDLVQHDLDGAPYGFAPMCDSRTEMEGFRFWKQGYWANYLRGLPYHISALYVVDLRRFRELAAGDRLRQQYHTLSADPASLSNLDQDLPNHMQFQIPIHSLPQEWLWCETWCSDESLTKARTIDLCNNPQTKEPKLDRARRQVPEWTVYDDEIAALDRRRKGLAADGNLLPEDEAQKVVAGEPNTKSRRLDEPETRKRDEL

SEQ ID NO: 4198 - protein, 1528 aa, Culex quinquefasciatus
MEKYHYLLLAVACWFTTGAYGESKSHPITTQLSAKWGRTPVQLEIAEFIEEENAHLFWDYIDLLNKIPGGLYSIDTEEGRYRKAVELAETLLGVGQTNLLKLALSLHSFSPKVQAHLQIGQEVLKQGDCDTSAFVNVGGKVACDQTELRSILKSSNKDQANVETYSLDHIYSGSENNSLTAILYAQIGTTQFKDFHDVLKAEADTGKVKYVFRHFVKKMSSKKMRLSGYGVELHLKSQEYKSQDDSPRQQEQEAIVNDDSLESEVEGFDFIKLKGRFPHLSHSLDRFRNALLEKHEEIAPLKAWEFQELGLQAAQRIAQIQGEEALQILQFTAQNFPTQAKSLLGQTVSEDFKKEMKHNIEILGRNLNLQPPDSALFLNGLFFDADTIDTITLLDTLRTEMRVLEGLNKINIRGKTATPLLGLDLASTAKEFAIDIRDSAITWINDLENDAQYKRWPGSVMDLLRPTFPGMLRNIRKNLFNLVLVIDPTADESTGRDIVKLAESFVVHSAPVRVGLVFDTRGSAEEKDYRAITCAFNYAHQKKGSTDALGFLTDLFSTTQKRQIKHEDVRKQLKKSFSKLKMEEIDEIIGEDSDFDYGRQLSQEFVGRLGLKATPQALLNGVLLPQNTLNSDDFEETILTEIMQQTPTIQKAVYKGDLNDGEPVIDFLMKQPHVMPRLNQRILSTDEPTFLDVSGNPHPDLEDVSALAQLSNSDLTATLMKNLKYMGGKSTYEKFLGHRLHFHTVWVVADLKQPSGRKLLKNAVRFMKSTSGTRVAFIPNSDGADASRSEAKKHLNALAWAAINTLQPDEATELILNLLKLADEEKRYDVPESVSGFLPATQVHLKMLRVYCQRVLKMKASKNGLVANGRVLGPFDEDEYFDSEDFGLLEKFINLQYTDKIRRALKEASSDEDNVEVTSDTIFKLVSILVPRQQSKSRFAIPSDIQDNHTVVKLPPKSNDLPFFEIVAVLDPASRGAQKLSSMLVLLRNVINCHVTLILCAVDRHSDMPVKTFYRFVVEPELQFTADGKLSPGPYAKFVGVPANPLLTQSLNVPENWLVEAVRSVYDLDNIKLSEINGPVHSEYELEYLLLEGHCFDTTTGSPPRGLQITLGTEEQPIVVDTIVMANLGYFQLKANPGAWILKLRHGKSADIYDITSADGPNTIHSAEDGTRVVISSLRSHVLKLRVTKKPGKANADLLSDDKDSHGGIWDSISSIVGTGESQDQEVLNIFSVASGHLYERLLRIMMLSLLKHTKTPVKFWFLKNYLSPQFIDFLPHMSEEYGFQYELVQYKWPRWLHQQTEKQRIIWGYKILFLDVLFPLDVKKIIFVDADQIVRADMKELNDFDLGGAPYGYTPFCDSRQEMEGFRFWKQGYWKNHLQGRRYHISALYVVDLKRFRRIAAGDRIRGQYQALSQDPNSLSNLDQDLPNNMIHQVAIKSLPQEWLWCETWCSSETLQHAKTIDLCNNPLTKEAKLTAAQRIVPEWKLYDQEIKRLQAKVDELEHEEGQNLHSEENSTKNDEAGQHTEL

SEQ ID NO: 4199 - protein, 1510 aa, Polistes canadensis
MWILVFFYSLLLCSKGLKADKKVNKYVTTLIDAKWMETPLFLEAAEYLNDENPNYFWKFIEAYSENVASIQNGTEKDNYELILKLAGKHLSPAEIAVLKLGLSLRIYSTRVEMFFQMAENKNVSTLDCYNVIDIGGKFTCSIFEVNELIAKDKWTKRDTYSIDHYYLGSQKTDKVIIMYGQIDSPMFMNYHTKLKSIADTHGINYILRYYVKDRLDRKLRLSGYGVELQMKSTEYKATDDSDIKDNTGKGSETNNDGIEEIDGINFVTLKTLYPDKKAELEELQTHLLETSHEIGALKVWQFQELSHQAAERIMNSPTDEALNVLTDIAQNFPMQAKSLIRTKVNNEMKKEMKLNQEIFSGSLSIQPTDTALFINGLFFDLEAIDVLTLLEALRGELRVMEALHKIGFNSKKMGKLLALDLSSNVDNQEFAMDIRDSAIIWINDIETDVRYSRWSPALTELLRPTFPGMLRNIRRNLYNLVLIIDPLNEDSMALISLASSLYTYVAPLRIGFVFITNYDTSVTGLLDASVAVNNAFHYFIESKSAKEALEFLLGLYIGSYPITVDIVKQAIRKIDSSANINYILSEESEYDVGRHLASDFVKRSGFKKFPQALLNGVPLPATRLNADLFEEAVLSTIVAQTPALQKAVYRGEVTQGDDVIDFIMNQPNVMPRLNERILKIDKNSWLNLIGTVPKDNDYTKWTPQDASSWLMEKMQYLFVSRRSSLHHLYSFWIVVDLKLKSSRKLLQEAVIYIESNPDARISLIINNNDVDFEYDLNRIALAALNSLPTDKVLQVMHKIVKEDFESLAEYESVNEHLKDQDKLLEFHTYYAKQVLGLEKGAATVVCNGRMIGPLDTNEEFTNEDFSLLERFSQSTYGDKLFKNLIKSPSEDDDDYERTDITDDMIMKITSLLVPRPQTRSRFEVRFHGDEHSVIKLPPVNPDEVTFDLIAIVDPVSRGAQKLGPILKTLQQTLNCQIKVFLNCLDKNSDMPLKSFYRFVLDPEPQFTADGHLNGAIAKFTKLPTSSLLTQYIHAPENWLVEVVRSVYDLDNIKLDNVAIGVHSEFELEHLLLEGHCFEAVMGNPPRGLQITLGTEKQPVMVDTIVMANLGYFQLKANPGEWHLRLRHGRSAEIYDITTVDGQDVIQDGNNVKVLISSLKSHVLKVKVSKKPDKANMDLLSDDDKNSGIWNSISSFSKFWTFTTGDESEDQDDKLNIFSLASGHLYERFLKIMMLSVIKHTKTPVKFWFLKNYLSPTVKDFLPHMAKEYGFEYELVQYKWPRWLHQQTEKQRTIWGYKILFLDVLFPLNVKKIIFVDADQVVRADLKELATLDLGGAPYAYTPFCDSRKEMDGFRFWKQGYWRNHLQGRSYHISALYVVDLKRFRRIAAGDRLRGQYQALSQDPNSLSNLDQDLPNNMIHQVAIKTLPQDWLWCETWCDDSSKKYAKTIDLCNNPMTKEAKLQAAMRILPEWVGYDEEIKTLQQKIENETRQMEKEDNESTTEDHTKHEEL

SEQ ID NO: 4200 - protein, 1690 aa, Moesziomyces aphidis
MRAISLLSTSYAWLALLFALSVTLPAQRVVAQAPSVKVQLRASWSRFSLPSRGSPFLLELLEAARSQRPSSFFPLIDALTSRHSPAELRAASDEFLANAVEDAIRSLALFGAIDSLANQELDAWRMALALQNSAPRVEAFAQLYKTMQLNEIWQTRTSDSPCDSWVHHQGQALCSAQELCEAFGVDASQAELRQSHGAAFGHHRATSKPNKGDRPSVILYADPYSNNFRELFSTLEEYASQSAAPFTYTLRWRPALDVAGTRSQDEAAPMLAGYGAILDLKKVDYLVIDDRKLKDDSEVGDVGSSTDSHGEEQVAARKASDNLRWLQEQIGTDTETEQNLGLSSLSEDQIADLGIKAARLIMSSADPLRAMKELSQNFPTHAAALASSTKWDDDDASASLVEAVLGLSSMRIQPGSSELWLNGQNTNARDFMPLALLDTLRSERRWSRALQHSLAGGGLNVTEAADLISSSLVGRAFLAQSEGSSAAATFDASDRIELKTAPEGTSMGAITWLNDLEKDEATSDWSDDLMDLLRPMWPGKFPRLSRNLFNVVLVLDLSQKESCRFLVETAIQSLGRVGLHWGLVPGGLEHDANTDSIRMARLFWFVLQEAGPQLLSDVLRKASASKSGSADKINVSVAVKEAKFALKNLDADGSLAARFDAVLSGDDSNYTQREALTKAYIKRLRATRAESSTGHVFVNGQHHPFHPQIVHILHQAIQEQIQVLAPQIYYGQISSSTPGLDTLFYDAVGALSYRSALVPGSSSASRAEKGSAADAKHESVDLFSALLDDTIPSAAATQVFQFFYPQAVAADSRTGGATGALLNSTVWVLADLDSHQGSTLLLQAFEALGRDNAPFRLGVLHTPTESSEKASNEHLLSTLLYRLIGEKRLDQLQAATMVEAIKHLQQLLEQKIPIRGMGELLDIVGLPTSDTQRHEERYDLAANQRAARQFWDSTGSIIASKYGLSSAAILVDGHLASNFDVESIEARDVTALVDYEAGQKLPYIEQALKLLRENIDEMSPRERQDLMFAALSVMNGVYEESRAGQGIFSAKGHSRSGLPDQLGTKDHIFEIGERATSDIRITLLVNPLSESAQRWSSILEMLSKLHGVYVRVILNPDIKLRELPLKRFYRFSAPHRPQFGPDARATAAELRFFDMPEEAVLTLGLDAPAPWLTMPVEAVYDLDNIRLADVPSTSRAKGVKAVYELKHILIEGHAREESAGTAVSVPRGLQLLLETPDASTSLDTIVMANLAYFQFKAQPGLWKLRIRPGRSDELYQMQSVGGNGWNSASVDVTGEDVTLDTLSGLTIYPRVVKRAGKQHEELLEELDAQGRPMKKARSDGAGAEEGIAASASALLSSAKHKVASWASKVSSTDNKVVAARKHADINIFTVASGHLYERMTYIMILSVLKHTSSSVKFWFIENFLSPSFKEFIPHLAREYGFEYELVTYAWPHWLRAQREKQRTIWGYKILFLDTLFPLDLSKVIFVDADQVVRTDMKELVDLDLQGHVYGYPPMGDDSEDMDGFRFWKQGYWKDYLRGRPYHISALYVVDLNRFRLFAAGDRLRGQYQALSADPNSLSNLDQDLPNNMQASLPIFTLDKEWLWCETWCSNDWLHRAKTIDLCSNPKTKEPKLERAKRQIPEWNVYDQEVAALAQRLVDQRIVGASVVAPDSQVAANEPVSQDSHHPHDEL

SEQ ID NO: 4201 - protein, 806 aa, Larimichthys crocea
MNQPNVVPRINPRVLSTSRTYLDLSDTNNHFIDDYARFSTLDTKEKSTAVANSMNYMTKKDDGYIRPVTFWVVGDFDKPSGRQLLYDAIRHMKTSNNVRLGMINNPSTAPSAETSRVARAIWAAMQTQSANNAKNFITKMAKEETAAALEKGIDIGEYAVGGMDVSLFKDSYEGPKYDFLLSHAAYCRDVLKLKKGQKAVISNGRIIGPLEEEEVFNQDDFLLLESIILKTSGERIKSKVQHFGTEEDRASDLVMKVDALLSSQPKGEARVEYDFADDRYSAVKIRPKEGDVYFDVVAVVDPVTRDAQKLAPLLLVLKQLVNVNLRVFMNCQSKLSEMPLKSFYRHVLEPEVVFQADGSFSPGPMAKFLDMPQSPLFTLNLNTPESWMVESVHTRYDLDNIYLEEVDNIVAAEYELEHLLLEGHCFDVSSGQPPRGLQFTLGTASDPVIVDTIVMANLGYFQLKANPGAWILKMRKGRSDEIYKIYSHDGTDSPADSDDIIVVLNNFKSRIIKVKVQKKPDKFNEELLSDVTEENDTGFWKSLTRGFTGGGKPEELKQEKDDVINIFSVASGHLYERFLRIMMLSVLKNTKTPVKFWFLKNYLSPTFKEFIPDMAKQYGFQYELVQYKWPRWLHQQTEKQRIIWGYKILFLDVLFPLAVDKILFVDADQIVRTDLKELRDFDLEGAPYGYTPFCESRREMDGYRFWNALYVVDLKKFRKIAAGDRLRGQYQGLSQDPNSLSNLDQDLPNNMIHQVPIKSLPQEWLWCETWCDDSSKRNAKTIDLCNNPMTKEPKLQAAVRIVAEWT

SEQ ID NO: 4202 - protein, 1493 aa, Aspergillus saccharolyticus
MVSGSAIVASWRLTSVVVASALSCLAHATPSVNVALQASFDSAPYLIELLETAAEENSTSYFPLLDRVAEGAFDDAVTDKELYDRFLEVVNTDGHLRTPEALSSFKLSLAVRSASPRIAAHYQYYNASVQHSLAAAQDAVCPVWVHAEGKQYCSSTLERAQQGVMGTSDPSELPFDRVFGDPSLPPAILYADLASPMFKDFHQSLTALAREGQFSYRVRYRPPQHWSSRPLFVSGYGVELALKRTDYIVIDDRAAEERGSDTSGSQIPMNTEEDDLDDLRPLSSSEVSRLGPGTVGYVLDSQSPLDTLVKLSQDFPKYSPRIAAYNVTRDLLQEIQSSRLRMLPPGLNALWINGVQIDARQVDAFTLLDHLRRERKLIEKFRNLGLTASESVDLLSHKFLAAAMVQDGPQRYNYRDEIEGGSVIMWLNDLEKDARYESWPSDLGGYMQRVFPGQLPSVRREANNVVIPVNLANADDVNLIVKSIQVFVKNKIPVRFGLVPIPSSTKSIAQLKVAHYLQETFGLGSLMSYLETSASKSKLSTPDKAAFQAATANRNVRPDKQPLSLDEVLENDALNTIVSKTSGYLKRLGVTDDASHSFVNGVPIPRKENWAQELSARVSRDIQAIQQSIADGELAEDTWLPGLFLSDAFDRRNPVIVPEDPKDVRIIDMAHVGETHGELLDSVPRIPSTQDDVLASNHVIVVGDFSDEPGFELLTAALGSLKDHAEAEVLLLHNSGPNATIWTGSYTIHRYLKKEDSVDAAQLLEKITGTDAWLREDRKEVDDFWAAHEPLVKGLGLAPGANAIIVNGRVIALPVDIKLTSEDLDQLLAYEKQKRVAPVAKAAKALGFDAKLRDPLALAKLTSLAALSTVSDVPEGIYESTPDVRVNLFERWDESRSVVTVSNSDDPAITIVASIDPTSDVAQKWLPILKVLSELANVRMRLVLNPRDELQELPTKRFYRYVLDSEPSFNQDGSVARPTASFSGVPVEALLTLGMDVPSSWLVAPKDSVYDLDNIKLSSVKEGTDVDAIYALEHILIEGHSRDLTTKTPPRGVQLILGTEENPQISDTIIMANLGYFQFKAQPGLWEINLKPGRSEQIFRLDSLGNEGYSLHSNDDTSNEVALLSFQGKILYPRLSRKKGQEMEDVLETGVKSGSARDYVSKGLNFASDILSSVGINGSPKDAASGKQADINIFSVASGHLYERMLNIMMVSVMRNTEHSVKFWFIEQFLSPSFKSFLPHLAAEYGFSYEMVTYKWPHWLRAQTEKQREIWGYKILFLDVLFPLSLDKVIFVDADQIVRTDMYDLVSLDLEGAPYGFTPMCDSRHEMEGFRFWKQGYWKNFLRGQPYHISALYVVDLSRFRALAAGDRLRGQYQMLSADPGSLSNLDQDLPNHMQHYIPIKSLPQEWLWCETWCSDESLAQARTIDLCNNPLTKEPKLERARRQVPEWTAYDEEIAALGRRLKLQQEAEGVKEEPAAAAAAADDDEGWNKDEL

SEQ ID NO: 4203 - protein, 1543 aa, Rhizopus microsporus
MLRISTAILGLVTLSGLLSKAYASSPTVDLTLVAPWSAPDFLLEVAETIAVHNEESYYRFIDIIRTQQESYNWTPRKVYEEAVKAAASLKEIDVDLLKLSLSLHEAAPRIEAYFQYYNQLVTANLTEYDHQCDVWVHIGDKQICDLELLTDTIKDLKDTAYVNLLPFDHITDDTLQKPTVVLYTDSFSAKFNMFYTWLKDAADQHKIAYIIRYRPPVSDSMKKSLYLSGYGVEMALKKTDYLVIDDRKTQDGKSQHVLKEKLLNFGKKLNHALFDTTEEANIQPLTPSEISQLGLKAAQYIAKSNNTLETMSLLAQDFPKYAKSISMIELDKEFENEVLENQYSSVQGGLNAVWINGKALELRQVDPFYLVRLLRDEKKLIQSIQAIGFSPKEAIEILSNPALSEGESMGNDIISGVYDVRDTPENPFVIWWNDIEKDTRYEDWPSNIMEILKPTYPGQLHPIRKNIYNLLLVEDLASTASLSRIVNEIQTMIKRTIPIRFGLIAFVEDDNSASTLMARALYYFIKNNGKADAIQFLETILELTSSNGLDRATTEMIERAFNGHMSISHENLNSEQVIDQSQAFITATRQFMKRMGISQLKPNEGIMFMNGKLLEFDEERPWIHSLMPHLTEQTRFIQTMAYNQEFDPDLDYYEYTLSQPNVVQKRNPYILVSHTNPLRMHTFDAITASKGLKYFQNDNESLVKTNLWVVSDFDTANGLKLLLEAILFAEANPKVRVAFIHKSIHKVSTKDTNDTKFSDLLCKLIYEQDTNLTTLKEILQNTNLFAGIDGYSSQNPGEVTIQINGDGLEPVPIIPGTPITEMVAKAQREKWSNLNTALVKDGLEPDFTGIIMNGRVIGPLSLSENIQFTNQDFEILYQYENTKRIMHVEKAIVESGKDLQNNTSDAVMKLTAIIENDKAQATQDAIESREPVHRIRQYQKIPRTQYTQFIAGGYSDDTFLEIGLIIDPLSEAAQKIAPIVHTLSEIEGVSVVTYLNPVSTLQELPLKRFYRYVFDKEPHFDTITGEKQVPTAYFANLPVKPLYTLGVETTNAWHVTVKEANMDLDNILLTSIPDNQHGVSAVYELQSILVEGHCLDSINKSPPRGLEFELISPSGLDKKDTLVMANLGYFQLKASPGIWKLALREGRSSSVYSIQDVGANGKWNWNTEFNGSKGIDDTLALISFEGLTITPLVHKNPGMEDEDVLEPAQPKSKKNAGGLWSSINQKIFGTKETENASSLANKATNAEINIFSVASGKLYERFLSIMMASVMKHTKSTVKFWFIENFLSPEFKDFVPHMAKEYGFDYEMVTYKWPAWLRAQHEKQRTIWGYKILFLDVLFPLSLDKVIFVDADQIVRTDLKELIDMDLHGAPYGYTPFCSDRTEMDGFRFWKEGYWKNHLRGKPYHISALYVVDLVRFRQLAAGDRLRAQYQQLSADPNSLANLDQDLPNNMQHIVPIYSLPQEWLWCETWCSDESLKKAKTIDLCNNPLTKEPKLDRARRQVPEWETYDKEIDELRKRITAGGSSSLPKQDEPSIKKHLKDEL

SEQ ID NO: 4204 - protein, 1520 aa, Thraustotheca clavata
MSLRCMPHMVLWLLMAIAAVCTGRHVEVNLTTTYLSSPVAPVLETSAFLAEINANWYFEYIDAVEIRMNAIQIKDNINYTAVALDAALDVLPVNATIAKLLPFVLATRAQSPKIEMFHQLAIESAYKGCGLEYVNATAWAVVYHESGCAAHVVCSIDDFNPTMLTPASDTKSCASSGEHDFELPVDNVYNKELGAPTVTVYGIIGDAKFQPFHKKFIALAKDKKIRYIVRHAPQDNTLPVNLHGYGVSLNIKNMEYKSFDDSRSPHSKLTPTDVDQDEFIVSVMMKKGGETISALKEYQLEFEDFSHINATDDEAPWQLTQLGYLAAQDILTAVEPLQRLQLLSQNFPKYASSLTLTTEPVPFDVMQAMNHARGLVATNQLLNKIVINGMDFDINDFTFNPFDFLKMLTDEVQQGDSLRALNLDDASLSSLHSAMTTLSTRSTDVRIRVRGPIDGTAPIYLNSIESDAITAEWPTDISILSEPAWSLIFLRKVMYEVIVILDPTTTEGAAAMNEINFLLMRGAPIQVGVLWTSNDVLSVSEDERASYLPSTQDKDQATAYHITKLYLSARDHGADTAKQFISGILELNGGVSVKEALMIYTQAVTHQFDDSDAIEEARQLLLKTKPGDPVWDMTDLVLQKQLPLNSHIFNGVVRQDLSIQDSLMSHFGRDQPLYQDMARNGKLAQDSDFVDELLSQESFYSVYTQWLDPSYKVPEVSLELSQEDVWNQVYYMHMAQTAHQPKKQNLLLVLFRCPLFVDLDTYFGAKSAYIALKTTLESPQARVSIIHTSSKPTLGNRVGYILQQLGHTDALPYYSVVLEILRLMSKSKPEVEVLLHVRVLLQVHIDNNPEDKILPQLIAWLESAPNFEHPLVALLNLQSQGLLVNGKLLELKQNQVMTPDLLAVVMQHEADNRSKAVAKALFLPYKHKTLDTNSAASVSHSLYKVLEIVDSYLKTPRVAPLFQTVDHATTYSTKSASLLDVVAYLDPLTEASQRASVFLRMLESVLDAKITLVLVPTPAYNDFPLKRFYRYRWGSSAIFKNLPLPPVLTMNIETPELFNVQMTESDCDVDNVQGDAKAVYAVKSLLVYGQCIDRTMPYHPTPPNGLQVVLERTAGTELWHRDTVVMKNLGYFQLQATPGVWQLELAKGRATELYHMIEADEPTQQTRIIVHDFLSAITQLKVKKRPGQEYSRLLDEPEGQKSNDKKEDEEDQSYWKSLLSWGSGTKQVKPVADTRQGETIHVFSVATGHLYERMLKLMMLSVMKRTQNPVTFWLLENFLSPDFKNSVPALQAKFGMDIRLVTYKWPNWLRRQTEKQRIIWGYKILFLDVLFPLGVQKIIYVDADQVVRADLNELWTMDLHGKPYAYTPFCDSRNVGFQFWRQGYWKDHLRGKPYHISALYVVDLIKFRRMAAGDTLRAIYDQLSADPNSLSNLDQDLPNYAQHQIPIHSLPQEWLWCESWCSDESKAQAKTIDLCNNPKHKEPKLDMAKRVISGEYFKESWLDLDEQVKAAEKAYAMEMN

SEQ ID NO: 4205 - protein, 1502 aa, Valsa mali
MIRLSQLPWGLVASLLAATVFQTQSVYAGPSVEISMKAAFPSPPYLIELLETAAQENASSYFPLLDHIADGYFAEVSTDKDLYESFLNLLQEDGHISSPESLATFNLALSTRSAAPRIEAHYQYYHTGVEPTLQGEQEGCDAWVVWQGQQHCLPSLDPGQARGQVSERQERDLPFDVSLGDGPSCILYADITSPRFGPFHMVLSEKARNRECTYKVRHRILSYESLEALPVSGYGVELQLKRTDYIVIDDRKAKEEKTQKSIESEVVLDGEEDVADLKPLSKSELTPLGLKAASFIMQNEKPFDTLLKLTQDFPKYSTSLTTQNVSEEFFLEHKANRVQLVPTGANVLWMNGVQIVERQMDAFTLVNLLRRERKLINGVTDLGLTGEEAIALLAHEAVAAAKTTDEIQRFIWHDEPEDGKVIIYLNNIEKDKRYEEFTKNLASLIQGGMPGALPQIRRDIFNLVIPVDLSKEEDISLVLQQLQEFIKRKLPVRFGIVPLAFTEASERQAKIVYHIVETYGLGTMMAYLQAAVDAKKHGDADKGLFDSTTVDRTLREDATALSFEDVLASDHHQEQTTLSNHWAERLKANGPIPVLFVNGLPMPRQGNWLPPMSQQIGADLQALRQAYFYGEIDESQWIPGFFLENAAKRRNTLIFPSDPKALTVLDVNKLHLEHPELFGMIPVIEASSDSTKENWAVLTLVVDLTDPEGFKLATSALQFRANNPGVRLDVIHNPADPAEAHQINTALKAGQSELATADPEELLQAIIDKAEGLPEDDLYDSALRQFLAAVGIRSGQNMLILNGRIIGPILSAAEIDTEDYQLFLDVEQRQRILPVYEAIEDLGLAEKVSGPLAAAKVTSITALSTMPDLPEGMFETASPLRISAFKVWNSSHTSFEIGDKSTATIQLAAVINPASEQGQRWVPILKVLSELNGVYLQVWLNPKDKLDELPVKRFYRYVLDSAPTFDESGKVKALGAEFKGVPSEALLNVGMDVPPAWLVASKQSIHDLDNLKLSSIKSNVEAVYELENILIEGHSREPTGALPRGAQLVLSTEKDPKVADTIVMFNLGYFQFKANPGFYNIQLKDGRSSDIYYIESVGAKGYKPVHGDEGTEVALMDFMGTTLYPRINRKPGMEKEDVLDMSAEGGALDFVKQGFKFGKDLLGLKTKSASDEEHAEINIFSVASGHLYERMLNIMMLSVMKNTNHSVKFWFIEQFLSPAFKDFLPSMAEEYGFKYEMVTYKWPHWLRQQKEKQRQIWGYKILFLDVLFPLSLDKVIFVDADQIVRTDMYDLVQHDLEGAPYGFTPMCDSRVEMEGFRFWKQGYWANYLRGLPYHISALYVVDLRRFREIAAGDRLRQTYHTLSADPNSLSNLDQDLPNHMQFHIPIHSLPQEWLWCETWCSDETFPVARTIDLCNNPQTKEPKLDRARRQVPEWTKYDDEIAALDQKRKGESSAALEDGEQKVIRGDGQELKEAEEGLERNTKSRAFEGEDPSATGHVKDEL

SEQ ID NO: 4206 - protein, 1302 aa, Valsa sordida
MVLSEKARNRECTYKLRHRRLSYESLEALPVSGYGVELQLKRTDYIVIDDRKAEAKSQENTASEVVLDGEEDVADLKPLSTSELTPLGLKAATFIMQNEKPFDTLLKLTQDFPKYSTSLATYNVSEDLYLEHRTNRAQLVPTGANVLWMNGVQIVERQMDAFTLVDLLRRERKLINGVTALGLTGEEAIDLLTHQAVAAAKTTDETQRFIWHDEPEDGKVIIYLNNIEKDKRYEEFTTNLASLVQGGMPGSMPQIRRDIFNLVLPVDFSKEEDIALVVEQLQAFIKRKLPVRFSIVPLAFTEASERQSKIIYHLVETYGLGPMMAYLQAGLDAKKIGDANKELFDSAIVDRTLREDATALSFEEVLASEQYEEQIRLSKHWAERLKANGPTPVLFINGLPMPRVGNWLPLMSQQIGADLQGLRQAYFYGEVKESQWIPDFFLENAAKRRNTLIFPSDPKALTVLDVNKLHLEHPDLFGMIPVLEPYPDSTKENWAVLTLVVDLVDPDGLKLAASALQFRANNPGVRLDIIHNPTDSTEAHKVNSVLKASESDLVAADSEELLKVIVDTAEGLTDDDDLYDSALRQFLSAVGIRPGQNMLVLNGRIIGPIESAADIDVEDYQLFLDVEQRLRILPVYEAIEDLGLADKVSGPLSAAKVTSITALSTMPDLPEGMFETASPLRISAFNIWESNYTAFEVGDKATATIQLAAVINPASEQGQRWVPILKVLSELDGVYLKVWLNPKDKLDELPVKRFYRYVLDSAPTFDESGKVNALGAEFKGVPSEALLNVGMDVPPAWLVASKQSVHDLDNLKLSSIKSNVEAVYELENILIEGHSREPTGALPRGAQLVLSTEKDPKVADTIIMFNLGYFQFKANPGFYNIQLKEGRSSDIYYIESVGAKGYKAVHGDEGTEVALMDFMGKTLYPRINRKPGMENEDVLETSAEGGALDFVKQGFKFGKDLFGVKTKSASDEEHAEINIFSVASGHLYERMLNIMMLSVMKNTKHSVKFWFIEQFLSPAFKDFLPSMAEEYGFKYEMVTYKWPHWLRQQKEKQRQIWGYKILFLDVLFPLSLDKVIFVDADQIVRTDMYDLVQHDLEGAPYGFTPMCDSRVEMEGFRFWKQGYWANYLRGLPYHISALYVVDLRRFREIAAGDRLRQTYHTLSADPNSLSNLDQDLPNHMQFHIPIHSLPQEWLWCETWCSDETFPVARTIDLCNNPQTKEPKLDRARRQVPEWTKYDDEIAALDQRRKDKGSAALEGDEQKVIRGDGQELKEADEGFERNTKSRALEGEDPLATGHVKDEL

SEQ ID NO: 4207 - protein, 1447 aa, Colletotrichum fructicola
MVRPYQLPMGIALTLLAASNVAAVPSVTVDMKAAFPSGPYLLELLETAAGENATSYFPLLDRVASGHFADSKTDKDVYDKFLQVLRDDGHITTPDALSTFKLALSLRTAAPRVEAHYQYYRTAVEPKLESDTQDGCEVWAELGGKQYCTPALDAPKDTKLTEAKALPFDRTLGSGSEAVLYADPTSPGFGAFHSALAQKARNGEVEYRLRYTKPAGSYEEALPKKITSEEVLDAAEEVTDLKPLAKSELEQLGLKAASFVMQNQNPFEALLKLTQDFPKFSTSIAAHNVSEKFLAEHQLNRQQLVPSGMNVLWINGVQLIERQIEAFTLVDILRRERKLIDGVRDLGFSGGQAVALLGHPKVAESKADDEPPRFDWTDDIEEGKVIIFLNDLEKDEQYANYPTELMSLLQRVYPGQLPPIRRDIFNLIVPVDFSKIEDLSVVSQLNTFVKRKLPLRFGLVPLTPTEESVGVAKILYYLLDSYGMEAFVDYLDAALQDSKTDKADAACFEKAIKDRELLPEATAVAFEDVLQSEGAQQVIKLAQQWAKRLNANTPIPPVFIDGVPVPREGNWLQAMSVKAANDLQTIQRAVYMGMVDEEMWIPDFFIEKALKRRNTYIYPENDKSLKILDVNKIYTDHDDLFSKVPVIEAYADSTKENWAVLTVVADLTTDAGADLLLSALAFRRNNPGVRLDVVHNPKNPASASSVNKALKSSDKLAEAETIADIKTISEAADSDSDAIYAAALNDFHSFAAIKPGSNLLILNGRIVGPFAAEEPFEADDFQYLLEFEQKARILPVYSAVDELGLTDKIAGPLAAAKITSVTALSSMSDLPEDIFETAPSVRVSAYDTWNSTYTAIEIGNPETSSIHLVGLLNPASEQAQRWAPILKVLSELEGVYLKLFLNPKDKIDELPVKRFFRYVLDSEPTFDETGKVRALEASFKGLPSEALLNAGMDVPPSWLVAPKVSVHDPDNIKLSSIKANVHASYELESILIEGHSREGKATQPPRGAQLVLGTEKEPHFADTIAMANLGYFQFKANPGFYNIQLKQGRSSEIYTIDSIGAKGWNPVPGDEGTEVVLMDFQGTTLYPRLSRKPGQEESDVLFVEEDNSLVGRGLKFAGGILGKKTKSISDEEHAEINIFSVASGHLYERMLNIMMVSVMKNTKHTVKFWFIEQFLSPSFKDFIPHLAEEYGFKYEMVTFKWPHWLRQQKEKQREIWGYKILFLDVLFPLSLDKVIFVDADQIVRTDMINLVNHDLEGKPYGFTPMCDSRTEMEGFRFWKQGYWANYLRGQPYHISALYVVDLRRFRELAAGDRLRQTYHSLSADPNSLANLDQDLPNHMQFQIPIHSLPQEWLWSDESQREAKTIDLCNNPQTKEPKLDRARRQVPEWTVYDDEIAALDRKRKGLPAEAPKKEDTKIECDKTVEEKNTKSRNWEEPPSEKTHVIDEL

SEQ ID NO: 4208 - protein, 1440 aa, Phoenix dactylifera
MLRSASPRLVLYRQLAEDSLSSYPSDDETNSEHVMGDLSEPISRVKAEPFLINRNPRSPGGSCCWVDTGSALLFNVTELLSWLDTSAKLDVGSAEQPELFDFDHIYFGSSIASPVAILYGALGTECFKKFHVTLVEASKKGKIKYIVRPVLPSGCQAASSYCSAVGSSDVVNLGGYGVELALKNMEYKAMDDSTVKKGVTLEDPRTEDLSQEVRGFIFSKLLERKPELTTEVMAFRDYLLSSTISDTLEVWELKDLGHQTAQRIVHASDPLQSMQEINQNFPSIVSSLSRMKLNDSVKDEILANQRMVPPGKSLMALNGALINIEDIDLYLLMDLVSEELSLADQFSELKLPQNAIRKLLTAPPPLEINAFRVDFRSAHVHYLNDLEKDVMYRRWRSNINEILMPVFPGQLRYIRKNLFYAVYVLDPATACGAETIDMILSLYQNSVPMRFGVILYSSKLIKSLKEKDSSLPMSSVDNDTKNGEDISSLIIQLFLYIEENYSPQLAFQFLSNVRRSGADDLSEETLEAHHIEGAFVDSILSKSKSPPQEVLLKLEKESKFKEAAWESSIFVFKLGLSNLRCSLLMNGLVYESSEETTINAMNAELPRIQEQVYYGHIHSNTDVLDKFLSESGYHRYNPQIIGDGKGKNKFTSLFTSYLGMESILRDISYLHSRGSVDDLKPVTHLLAVNATSRIVIKLLREGIHYLMEGSKRARVGILFYASGGASSPALLLAKIFERTASSFSNKEKVLDFLDELCSLYESQYMTSSLLDSESLHTFTEQVCELAGANDLPSDDYRALLSSFSVDMIKKQMDKVANFLYRQLGHDFGSNAVITNGRVFILNDENSFLSDDFSLLESLEYEMRIKHILEIIEGVEWQDVDPDDRTSKFYNDVIMLVTSSLSTRERSSDQAHFEILNAKYSAVILNNQNSSIHIDAVVDPLSPSGQKLAPLLRILWKCIQPSMRIVLNPISSLVDLPLKNYYRFVVPTMDDFSAVDYSVNGPKAFFSNMPLSKTLTMNLDVPEPWLVEPVVAIHDLDNILLEHLGDVKTLQAVFELEALLLTGHCSEKNHDPPRGLQLILGSRHIPHLVDTLVMANLGYWQMKVSPGVWYLQLAPGRSADLYVLKESEDGRPFHPSSKLITINDLRGKLVRLEVAKKRGKEHEDLLNASDDIQLQEKKKGNQNIWNTNILKWASGLISGNELSRKGDESPLGHEKGGRHGETINIFSIASGHLYERFLKIMILSVLKNTQRPAKFWFIKNYLSPQFKDVIPYMAQEYGFEYELITYKWPTWLHKQKEKQRIIWAYKILFLDVIFPLSLKKVIFVDADQVVRADMGELYDMDLKGRPLAYTPFCDNNKEMDGYRFWRQGFWKDHLRGKPYHISALYVVDLVKFRQTASGDTLRVFYETLSKDPNSLSNLDQVIFLRPHHYFCCCKRDLFNLF

SEQ ID NO: 4209 - protein, 1508 aa, Pyricularia pennisetigena
MIQLSRLPWGLRVSLLAALAQLQLFPLASGAPSVEVSMQASFQSPPYLLELLETAAQENGTAYFPLLDRIASGHFAKANTDRELYEKFLQVLQEDGHITSPDALSTFKLALSMRSAAPRIEAHYQHYRTAVEPKLQGKVDNCPEWILKSGEIFCSVDEAKGVANIVGDVLSRDILFDQQLGDSSEGVVLYADITSPSFGAFHDTLATAARNGGPSYRLRHRSIATASKQPLYLSGYGVELALKRTDYIVIDDRANEKTAQDDSAQKPLVGGSSEIVLNGDEEVADLKPLSASELEQLGLKAADFILRGEKPFETLLKLTQDFPKYSGSVSAHNVSAEFRTEHNANRMVLQIPSGSNILWMNGVQLIERQIQSFGLVDVLRRERQLINEVRDLGLSGREAVDLLSHSDVASSKANDEPPRFDWRDEKEDGKVIVWLNNLEKDKRYESYSPHIMTLLSGGMPGQLPPIRRNIFNIVLPVDFSKASDLALATSQLIGFVKQRIPIRFGLVPLAFTPEAEGQAKVVYHLLQTYGLSSLMAYLESCLDGSTAGANQEAFDAAIKDRAVRSDSTALSLKEVLESDAYTNQVTLAKQWSSRLGAHSAVPPLFVNGFALPRDLENRWMGMMSGRISSDLRSLQEGIYYGTINDETSVIDIFLEGASSRRNHYIFPENSNGLTILDINKVYTDHDDLFSKAVVIESSPDSTKEAWALLTVLVDLDSKNGREILLSALKFRRINPGVRLEIVHNAVQKTSHDINSNLKEQSDRLLAAESDEGLVAILDEIRHAPQTNIGLEYAQALERFQRAAHFEPGNSILMLNGRVVGPIESASEFGESDFQTFLEFEQNSRIIPVYKALEELGLGDRLSDPVAAAKLTSITALSTISDLPDGAFENPPTLRISSFKLWNSTHTGFEVGDPSKASIFFTAVIDPASELGQKWTPLLKVLSELEGVHLKVFMNPRDRLEELPVKRFYRFVMDSAPAFDEAGKLKVPSASFKGLPSEALLNLGMDVPPAWLVAPKVSVHDLDNIKLSSVTSDVTAIYELENILIEGHARSTDSGTPRGVQLVLGTDSNPRVADTIIMANLGYLQFKANPGIYDITLEKGRSSDIFYVESIGAHGFSPVPGDETTEVALLDFLGTTLYPRLRRNPGKEDMDVLEESGAAPSGTAGGAMDFVNKGLKFAESILGTARGKAKEKSPSELQHAEINIFSVASGHLYERMLDIMMVSVMRNTNHTVKFWFIEQFLSPSFKDFIPHMAAEYGFKYEMVTYKWPHWLRQQKEKQREIWGYKILFLDVLFPLTLDKVIFVDADQIVRTDMYELVQLDLQGAPYGFTPMCDSRTEMEGFRFWKHGYWERYLKGLPYHISALYVVDLRRFRELAAGDRLRQTYHSLSADPNSLSNLDQDLPNHMQFSIPIFSLPQEWLWCETWCSDETQPMAKTIDLCNNPMTKEPKLDRARRQVPEWNIYDAEIAALDRKRKGLPVSGDAVSEKAEKNPKSRTLAVEPENTHIVDEL

SEQ ID NO: 4210 - protein, 1266 aa, Friedmanniomyces simplex
LVRLGLKAASFVMASDAPFDMLLRLSQDFPKHSSAIAATNVSTDFVQEHRANRDLLLPPGFNVLWINGVQIMPRDLDAYSLLEYLRRERKMINSVRELGLSGPEAINLLSHEAITASAVDQEAQRYDWRDDNEGGNIIMWMNGIEKDKRYMEWPSSISALLQRTYPGQLPPVRRSIHNLVITVDFSNYADVLTVIESLQNFVKRKVPIQFGLVPRFASDAGRQQAKTVYYLLDRYGLGAALAYLTNSVAGAGRKFSAPQEKYFAQAIEGRKLRRDRTVVSFADVPSDATLDERLLSAQAYFRRLGAGQATPPILINGVAIPHTDDWLQTMSQRVSVDSRMVQEAVYTSTVSQDDYLPDLFLASASLRRNPLIVPEDDKDIRHINLGELPNLSAFPSLPANPDTIDRELVRLTVAADFDTREGFEQLMEALLFRQQHDNVELAVLYVPSGNATSGAFAGECVQRDPCVKHIQSALDKYETLRATRYTDEEASSSVELSSSQRFELYRTMWAERMVGGSANDQTLQNARAPATVTSAIGVQAGQMALVLNGRVVGPVSSSQIIEVEDLETLLTYERKKRLLPAALAIEGLGLQEKASTPLAFAFISNLIALSQVSDVPDGIFEAAPTVRTGVFKQWNSTHTAIKTGGMENANVQIFSALDPASELAQRWLPIIKALSELDGVATTLFLNPKERLEELPVKRFYRHVLESKPLFDADGSLKSLSAHFGGLPAEALLNIGMDLPPSWLVAPKDSVHDLDNIKLSAVKTGADVEAIYELEHILIEGHSRDVTLGPPPRGAQLVLGTEADPHAADTIIMANLGYFQFKANPGVYNLALQKGRSEEIFRIDSAGTKGYAPQPGDNVTETALMSFRGATLFPRLSRRVGMEEEDVLEAPQSALENVAEGAERLLSQVGLSGAKTRKYLSKAAKFGSALIQGKSKPTDIPTEAHAEINIFSVASGHLYERMLNIMMLSVMKHTKHTVKFWFIEQFLSPSFKTFLPLMAEEYGFKYEMVTYKWPHWLRGQKEKQREIWGYKILFLDVLFPLDLDKVIFVDADQIVRTDMYELVQHDLEGAPYGFTPMCDSRTEMEGFRFWKQGYWKNFLRGLPYHISALYVVDLKKFRQIAAGDRLRQQYHQLSADPASLSNLDQDLPNHMQMALPIHSLPQEWLWCETWCSDAALKDAKTIDLCNNPQTKEPKLDRARRQVPEWTLYDDEIAGVAKRHKAGEAEGRPVADDAADAGVQGEEESIQERLQREDAESERERKRHDEL

SEQ ID NO: 4211 - protein, 1510 aa, Helicocarpus griseus
MAFRFHFYPWRLGGLALLAASSLFTSTVSAGPSVNVALTASFNAAPYLVELLETAAEENSTSYYPLLDRIAEGAFAELTTEKELYEQFIQTLQDDGHLTSPESISSFNFALAIRSTAPRIEAHYQYYNTSVEPSLMVAQDAVCTVWAHYEGDQYCSPSLKYAQQSVSGDLDERVLPFDRVLGDPSLTPLVLYADIASPLFGGFHQELSQKSRDGQFSYRIRYRPSPAEPSRPLYVNGYGVELALKRTDYIVIDDRDAEQSILKDGGAAKPTLAPVEDLKDEPPADLKPLSASEVSTLGINAASFVMSSEDPFGTLLRLSQDFPRHSSAIASRNATPEFLQEFRENRAAMLPAGYNVMWINGVQMDPRNIDAFSLLDHLRHERKLISGLRGFGLSGQQAVDLLSDPVVAKIQVADDSQRYDYRDEIEGGGVIIWLNNLEKDHRYDGWPDDLHSLLKPTYPGQLPPVRRDIHNVVIPVDLASLADVEIIVGNLQMLVKRKIPVRFGLVPIIHKSHSLEQAKIAHYLLDTYGISTFVAYLRASLSANRIGSPDEASFTAALEDRKPREDRTPLAFKDVLNSEDYDSALANTSSYLKRLAIGGGPIPFFVNGVSFVRDEGYLQNTVATVGRDLEELQRAVIEGAIEEDTWVPSFFLSDAMQSRNPLLIPEDPSAIKTVDLNEKYEKHPILFNTLLRIAATSKSDHPLLEWTSIILATDLDSDTGAKQLHHILELHEKHPEIEILLLHNGKGTASSNSLSSRLYSFQTGRDLDPVAVAATLDAIAAGQDAPDLDSDHASAYWETVQVLSKELDMEAGETGMVVNSRMINVPSTTVFDTQDLERLLTYEQSKRIGVLAHTAFTLGLENKISGPLSLAKLLSLITLSAASDVPEGLYDSGPQLRTNLFERWNTTHSAISVSNSEDPSINIVAAVDPTTEPAQRWIPILKVLSELSGVSLKLFLSPREHIQELPIKRFYRHVLEAAPSFNDDGSIVKPQATFRGIPREALLNLGMDVPHSWLVAPKESIHDLDNLKLSLIKEGTDVDALYELEHILIEGHSRDITLSAPPRGVQLLLGTEKNPHFADTIIMANLGYFQFKAQPGYWKITLKPGQSERIFHLDSVGGQGYKPTPGDDNNDVALLSFQGKTLFPRLSRRPGHEEDDVLSPGPKPGTAKDYLTKGLNFASGILSSITTTNTHPQETHADINIFSVASGHLYERMLNIMMLSVMKHTTHTVKFWFIEQFLSPSFKSLLPHLAARYNFSYEMVTYKWPHWLRAQTEKQRIIWGYKILFLDVLFPLSLDKVIFVDADQIVRTDMYDLVTLDLEGAPYGFTPMCDSRTSMDGFRFWKQGYWHKFLRGLPYHISALYVVDLNRFRAIAAGDRLRGQYHQLSADPGSLANLDQDLPNNMQRVLPIKSLPQEWLWCETWCADEELGKARTIDLCNNPMTKEPKLERARRQVPEWTVYDEEVAKVQREVMEGKIGVEEGDGEVGDDVDVSADADADADEKRREHRKDEL

SEQ ID NO: 4212 - protein, 1453 aa, Candida parapsilosis
MACKWSVSFFKIMIPWQWTTKVLLIVSTFSIYSSANDTGLLTVDVKAPWKRIDFVSNFIESIAGFNASLYIPTLEAIFGLGDSDVSEGRTDKEIYDYTMKQLSLEPSAIDFVNFNLVYKKYSPRVASHYFHYETTLQQFGDRLKTECTKDSFGNQVETKNGLVPAWVLYNDKIYCSVNDLFALQTDKSNQETFLFDRVIGDSDDAPLLTFYGDPTVDQTREFLKVLYEEAQNGKLRFVWRYIPSVSKRVDSLPGFAVEVPTKNIEYYAHSKLDLNKDFDTIKSSRAISKIGNNVNELGIKLTSFILSNKIKLSKFELLQTILNNMPIFYSYLNKLPQSINYKKVQSKVVGNEQVGLSKESFGIYINGSPIHPLELDVYKLYDKISDELSTVKNLVELGFNSVQAKLLLAKFGLLSAVKQAQFRTGNTLMGNNENRFKVFQHAFNRNDATKGGVVFINDIESDRNYGEYSTDRQEAYLGVESRKLKPNQIPPLKENVHDLIFALNLASKKQLKAFFTFSKIILDSGIPQQVGVLPIIGEDPLDEQLAIRLYHITKLSDQKEALALLYKYMESTGPDEIQELLKKVDVPTNFRVDFDTVLNKFSIDQPSVVVNGVIHDLFSSNWQVAMSKQIEQDNSLIKTQLRQGDVNGNLKDIIYNNAKSERNLRIHPLDPSEIIYKKIDHDLMRSSIAFKKVDKELNNHATIWLVSDFRDSKMIDQLVTLLNLMKRKSIQVRVFNVGNTKLFSKLAGKMRLTVLTNADINAIISTLKEGGEVSTGLNEDLVHSLEQKHMPVRHSYLLVNSRYFRLDPVILNMEELSQLIEYELTQRLRLINEICVTYVDEFPQALYEYNSMGSGLDDMDWFDLVSSIVTKSFHVDDKTFVNDVNRYDFGSLDMSNSIDYKKHDESKQVDVLVIMDPLEDNSQKLINILDAVKDFSFVNVRALFQPKLEYAREELTERFYQGVFPPSIPYFEGSGKWDDTFLATFDALPVATCSINMDVPKRWVVVAKSAPSDIDLNSFKLDKNPISVSFEITNLLIEGNARDVNTGKAPNDLQLQISNGTHTDNTLVMTALNYFQLKALPGVHSLSVKSNHSLLSASDNKFDPNIVEIETAPMSLFSLNGLVLQIRVSSNRERIVEKSKHADINIFTIAGGHEYEKLVSIMIASVKSHNLKKSIKFWILSNFISPQFKVLIPHLIEKYSVEIELVTYKWPTFLRKQSNRQREIWAYKILFLDELFPQDLDRVIFVDADQVCRTDLTELVNMDLEGAPYAFTPMCESNKETEGFRFWKSGYWAEVLQDDLKYHISALYVVDLSKFKSVEAGNRLRAHYQKLSSDPNSLSNLDQDLPNNMQRQIKIKSLPQEWLWCETWCSSETFNEAKMIDLCNNPLTKENKIDTAKRLIPEWVNYEKEVLALIDQVTDTVEEEVEEDEENFTIDESHGEVDSDDDALYHDEL

SEQ ID NO: 4213 - protein, 1560 aa, Salvelinus alpinus
  MOD_RES (1314)..(1314): Any amino acid
  MOD_RES (1504)..(1504): Any amino acid
MADAGSYQAGFGPRMWQHCALLLSLTLLPVVSGGADSKGVTTSLTTKWASTPLLLEASEFLAEESQEMFWDFVEANQNIKGDHDDTDQAYYDLIMKRASALLSTVQLNMLKFALSLRAYSATVHSFQQIASKEPPPSGCSAFFNVHGEKSCDTEKLAALMETAAERPKPYLFKSDHRFPGSNPDIPVVILYAEIGSSEFTMFHQLMLSKANKGLATYVLRHYLASPSSRRVYLSGYGVELAIKNQEYKAKDDTQVQGAEVNATLMGENDPVDEVQGFLFGKLKTLYPELKEQLKELRKHLVESTNEMAPLKVWQMQDLSFQTAARILAAPSSDALNVMRDLSQNFPTKARSITKTVVSSEIRKEMEENQKFFKGTLGLQPGDSALFINGLHIDLDTQDIFSVFEVLRSEARVMEGLRSLLIETPFIHDILKLNVQPSDSDYAVDIRNPAINWINNLETDSRYGSWPYNVQELLRPTFPGVIRQIRKNFHNLVVILDPTHESSAELLNVAEMFYSNNIPLRIGLVFVVSDVDEVDGMEDAGVALLRAFNYITEELDAPAAFDTIISMFNRVPSGGKLSVGDVVKVLEKKFPYVEVGSILGPDSTYDDNRKEGRGYYLQTGVGPLPVVMYNGMPYQREQLDPEELETVTMHKILETTSFYQRAVYMGELATDQDVVDFIMTQPNVVPRINPRILSTARTYLDLSNTNNHFIDQYARFLFLDTREKSTAVANSMNYMTKKDSITIHSSVNPPYLTPHQHYHTILHLYDGYIRPVTFWVVGDFDQPSGRQLLYDAIRHMKTSNNVRLGLINNPSDSPSEENSRVARAIWAAIQTQTANNAKNYITKLAKEETAKALETGGDVTQFTVGGMDVALFKSAFEGPKFDFLLSHAVYCRDVLKLGKGQRAVISNGRLIGPLEDGEVFNQDDFLLLESIILKTSGERIKSKVQQFGVEEDRASDLVMKIDSLLSSQPKGEARIEHAFADDRYSAVKIRPAEGDVYFDMVAVIDPVTRDAQKLAPLLLVLKKLVNVNLRVFMNCQSKLSDLPLKSFYRYVLEPEVLFQTDGSFSPGPLAKFLDMPQTPLFTLNLNTPESWMVESIRTRYDLDNIYLEEVDSIVAAEYELEHLLLEGHCFDVSTGQPPRGLQFTLGTPSDPVIVDTIVMANLGYFQLKANPGAWILKLRKGRSDEIYKIYSHDGTDSPADADDLIVVLNNFKSRIIKVKVQKRPEKFSEELLSDGSQENDSGFWESLTRGFTGGVKTEESKQEKDDVINIFSVASGHLYERFLRIMMLSVLKNTKTPVKFWFLKNYLSPAFKEFXPYMAEQYGFQYELVQYKWPRWLHQQTEKQRIIWGYKILFLDVLFPLSVDKFLFVDADQIVRTDLKELRDFDLEGAPYGYTPFCESRREMDGFRFWKSGYWASHLAGRKYHISALYVVDLKKFRKIAAGDRLRGQYQGLSQDPNSLSNLDQDLPNNMIHQVPIKSLPQEWLWCETWCDDNSKKKAKTIDLXNNPQTKEPKLQAAVRIVAEWSDYDQEIKRLQNRVQERGAENHTTQKDKPDDTHTEL

SEQ ID NO: 4214 - protein, 1560 aa, Perkinsela sp.
MPCPHNLTLLLCVIQYVLGTTHVATPDVRVNMKSPWQETSLLHESIMYAEERNLFWPFVSESSRKTLNTGNDIASDHRSQYEHAQEVMSAILPNNESHLFETALSTRFFSPKVEGCRKAIKKRTRHVFEHTEIPWGSPFLEVQTNHTIWIAESPEKAEAFLKFRNFSALSEIPRKNDDAFQKLEAHTEKACFYQWKDSSRVKPSTSDKIHLTLFGVMGKLVTSLIHTSVIGELSRNPADIQYSYCEISNECIGEFEEVHDSDIGLSGYDVSFIVKSTEYIAHDEKRSPTPINTGGSDLLTTIGVDFDMLKRRYPSVSTRLEAIKASIATAHRTENTIDPTKILLEDSDISTFGQKASAFIIRSSNPFQNFEAVAQNLPRFIQEINSLKLSLNNRRVVQSISRSQMENDLLYQGEASLILHGRIISVIDTDIFALIRTLLTDLTFFQSTRAVIDLCIPSDALEVRNRLLQIFLNDKSDDRSEKYLPAHRLHISTNDIHWLNDLENDEIYASFPADPNRLYTSPFPIPIRKNLFNLVIAIDPSLKSSLKLLLDTFQKYRELVGIRVGVSFVTADGSASRGNSVEYTIAAMYQILTLEKGPVAGVVFLSRLFHYSIDERITASNVEDVLQDLFHIGSHTIMDRRSDVCQRVAAALDRSHRNQLGAIAPSCFLNGVRVSFTDDIQHAYLKEIEHIRPLVVSGRLTSATADCYTAVLEAFRGIERYHSMHWESSENLSGPDLMQLAHMMQELVWFTRGDKCDDLAQLSYVFLLDISTKSSLTDFFEALSYVKSDAIPSERVAFLVHSANFPLHQLMVNFLRVVIKLHDAEILSEAVEIAMEMYEKSHDDQADAIVSFFRKHNEDISVPSDSPCAYAFVGTDVHWPAGHSVVFLNGQIIRLTKYAQSGHPVTCMEYRTLSRLSREHMQWAMQAISTLDMTEIGGTCVSNAIAIATGLRYADMENNGERIGSMPHATEESLDGFPLPLRNNSVSQFPLFAETNYSLSAIIDPLSVHAPKALSLLQFLRDITGCEASVFLNPAQELTTRPVLHFTEHFLSQKLKFHPSGQVMQPSCHFPTLPGNLLLSLTLRTPESWVVYPQVAPIDLDNIRLAAESHNSPMEISYKLHGLILQGSCPEIAERVPPAQLTLRLDGLDEEKKTTGETHVMGNIGYFQLPLLPGFSTLRVSRNEDDYTMLGVQSTEREGLNVSKTDASGEFLLFHASFAATNVVVDVTQLSAEMDQTVSTLPATIHNSSAPKVKPSMLQRLLSHLWPQNTLAETNQTVHIFSIASGHLYERLLRLMMFRVTATTKAHVKFWFIEDFLSPRFKRLLPHFAEKFHCSYELVSYKWPKWLRRQINKQRTIWAYKVLFLDVLFPQSVDRIIFVDADQIVQSDIADLYNTDLRGKSVAYVPLCVTNSRNETNGYRFWNAGHWKEHLRGKPYHISAIFVVDLRKFRADGAGDIYRSAYESLSADPNNLANLDQDLPNYLQDIVPIHSLPEEWLWCETWCDDKSLRKARTIDLCNNPLTKESKLAVAKRVIPRWEEWDNELVRYEENILQNKIVSGE

SEQ ID NO: 4215 - protein, 1637 aa, Corchorus olitorius
METRFRSRFCTLILLACVIISGFTFVGAQNRRPKNVQVAVRAKWSGTPLLLEAGELLSKESKNLFWEFIDDWLHVPKTADDLHSAKDCLKKILKHGSSLVSESLASLFEFSLTLRSASPQLVLYRQLAVESLSSFPLADDSYSNDGNGVDANETITTKKLDPLLVGVNPKSPGGKCCWVDTGGALFFDVAELLLWLQRPNELGDSFQQPEVYDFDHIHSDSNTMSPVAILYGALGTDCFREFHVTLVQAAKEGKIKYVVRPVLPSGCEAEVGLCGAVGATDSLNLGGYGVELALKNMEYKAMDDSTIKKGVTLEDPRTEDLSQEVRGFIFSKILERKPEFTSEIMAFRDYLLSSTISDTLDVWELKDLGHQTAQRIVQASDPLQAMQEINQNFPSVVSSLSRMKLNDSIKEEIIANQRMMPPGKSLMALNGALINIEDVDLYLLIDLVHQELSLADQFSKLKIPHGTVRKLLSTVIAPESDTFRVDFRSTHVHYLNNLEEDAMYRRWRSNINDILMPVFPGQLRYIRKNLFHAVYVLDPATVCGLQAIDMITSFYESSFPMRFGVILYSTQFIKKIEMSGGELHSSASVHDGEIEDDKSSLIIRLFIYIKENHGTQTAFQFLSNVNRLRMESSESTDDALEMHHIEGAFVETVLPKAKSPPQELLLKLEKEQTYKDLSEESSMFVFKLGVSKLQCCLLMNGLVFDSSEEALVNAMNDELPRIQEQVYYGQINSRTDVLDKFLSENGVSRYNPQIVVDGKVKPTFVSLASSIFAGGSILNDINYLHSPETVDDVKPVTHLLSVDITSKRGINLLHEGIRYLIGGSKGARVGVLFSASQHADLPSLLLVKTFEITAASYSHKKKALEFLDQLCSFYELNYLRSPVAAESTQAFIEKVYELAEANELSSKEYKSSLPNASDQKLRENLNKVAQFLYRQFGIASGVNAVITNGRVTSVDAGVFLSHDLHLLESVEFKHRIKHIVEIIEEVDWQGVDPDMLTSKYVSDIVMFVSSSMATRDRSTESARFEVLNAEYSAVVLENENASIHIDAVVDPLSPSGQKLSSLLRLMAKYVHPSMRIVLNPLSSLVDLPLKNYYRYVVPTMDDFSGTDYTVNGPQAFFANMPLSKTLTMNLDVPEPWLVEPVIAVHDLDNILLENLGDTRTLQAVFELEALVLTGHCAEKDRDPPRGLQLILGTKNTPHLVDTIVMANLGYWQMKVSPGVWYLQLAPGRSSELYHFRDGGDDGSQEKSLSKRITINDLRGKVVHLEVAKKKGKEHEKLLISADDGKGSKENRGQSGWNSNFLKWASGFIGGSEQSKKSNETSVEQGKGGRRGKTINIFSIASGHLYERFLKIMILSVLKNTRHPVKFWFIKNYLSPQFKDVIPKMAEEYGFEYELITYKWPTWLHKQKEKQRIIWAYKILFLDVIFPLSLEKVIFVDADQVVRADMGELYDMDIKGRPLAYTPFCDNNKDMDGYRFWRQGFWKEHLRGRPYHISALYVVDLVKFRETAAGDNLRVFYETLSKDPNSLANLDQDLPNYAQHTVPIFSLPQEWLWCESWCGNATKSRAKTIDLCNNPMTKEPKLQGARRIVSEWTSLDYEARKFTAKILGDELENPEPVASPEVSSTDSSSEDTESKAEL

SEQ ID NO: 4216 - protein, 1637 aa, Actinidia chinensis
MEPQFRSGFWVFIVFVIFFGLSGDLVSVESRRPKNVQVALQAKWSGTSILLEAGELLSKEWEGLFWEFIEVWHHSEVDDSHTAKDCAKKIVKYGQSLLSEPLASLFEFSLTLRSASPKLVLYRQLAVESLSSFPLSDDTNSHSVDGGVSEASENMENKKAEPLLVGMNPRGIEGKCCWVDTGGALFFDVAELLMWLDNPKEPSGDSFQQPELYEFDHVHFDSSIGSPVAILYGALGTDCFREFHAKLVAAAKEGKVKYVVRPVLPSGCQSITGQCAAVGTSDPVNLGGYGVELALKNMEYKAMDDSAIKKGVTLEDPHTEDLSQEVRGFIFSKILERKPEVTSEIMAFRDYLLSSTISDTLDVWELKDLGHQTAQRIIHASDPLQSMQEINQNFPTVVSSLSRMKLNDSIKEEIIANQRMIPPGKSLMALNGALINIEDIDLYLLADMVHQELSLADQYLRLKIPPSIVRKLLSTLAPPESNAIRVDFRSAYVHYLNNLEVDAMYKRWRSNLNEILMPVFPGQLRHIRKNLFHAVFVLDPGSTCGLESIDMIISLYENNLPMRFGVILFSTKFIKTIEMNGRSAPMENDSHIGEDPSSLIIRLFIYIKEHHGTQMAFQFLSNINRLRIESADPAEDAPEMNHVEGAFVETLLPKATSPPQDTLLKLEKEQTFSELSQESSMFVFKLGLIKLRCCLLMNGLVIDANEDALMNAMNDELPRIQEQVYYGQINSHTDVLDKFLSESGVPRYNPQIIADGKVKPKYVSLSRAILGKDSVLNDVIYLHSPGTVDDLKPVTHLLAIDITSIRGIKLLREGIQYLIEGSKNARLGMLFNANTRVGFPSLLFMKVSEVTASLYGHKEKVLDFLNQLCTFYEHEYVLASSVDAESTQAFIDKVCDLADANGLPSKSLRIALSEFLVDKFGDHLNKVGQLLYSQLGFESGTNAVITNGRVIHIDDSTFLSHDLHLLESVELKNRIKNIVEVIEEVTWEDVDPDILTSKYISDIIMLVSSSIAMRERSSESARFDILNAKYSAVVLNNKNSSIHIDAVIDPLSPSGQKLSSLLRVLWKSIQPSMRLVLNPLSSLVDLPLKNYYRYVVPTMDDFSSTDYTVYGPKAFFANMPLSKTLTMNLDVPEPWLVEPVIAVHDLDNILLENLGEQRTLQAVFELEALALTGHCSEKDHEPPRGLQLVLGTKSTLHLVDTIVMANLGYWQMKVSPGVWYLQLAPGRSSDIYVFKEDGDGSQGMPSSKRITINDLRGKLVHLEVAKKKGKEREKLLVPSDDDNSSRGKKKGNQNGWNSNFLKWASGFIGGSEQSKKIESTSVERGNGVRHGKRINIFSIASGHLYERFLKIMILSVLKNTNRPVKFWFIKNYLSPQFKDVIPHMAQEYGFEYELITYKWPTWLNKQKEKQRIIWAYKILFLDVIFPLSLEKVIFVDADQVVRADMGELYDMDIKGRPLAYTPFCDNNKDMDGYRFWRQGFWSEHLRGRPYHISALYVVDLVKFRETAAGDNLRVFYENLSKDPNSLSNLDQDLPNYAQHTVPIFSLPQEWLWCESWCGNATKFKAKTIDLCNNPMTKEPKLQGARRIVSEWAGLDFEARRFTAKILGEDVDPLEQVASPSQTQNSEGTVASEDKAEL

SEQ ID NO: 4217 - protein, 1508 aa, Batrachochytrium dendrobatidis
MHAGISSVLIVTINLLYVAATSSSSSASPPIHVWLKTVDEWSAPPFALEVIEFAAEEVQDSVFPLLSLMAKNDLLDASKKPKQIYDALFSSQTASAPIIQRFLSSHASLGLAKLSLAIHSSAPRIQAHYRFYLQTIVPSLSKHKDFDPSCPVWVYWNGRQICDVGAIDTLFESSLNSSNSDYTVLPFDHTYQKHNSPSLVAIIYADVLSSEFKPMLSAFMNAAENHPLQLVLRYKPSTFAKQPLFLSGYGVELAIKNTEYKVEDDRTLNSDTIETFDGDLVSTSTSEDAFLFEAIPIIKSLTKEDIYDIGIRTASYIAQSATPLDTLVLVTQNFPKYAHILASYHIDDEVRETTKKVMQISTAPNQLYLNGHTVDLSRIDTFELFRMIRKESKIMGKLRQLGWTTAQAIELLSAPLLESLDRSWGECFDTRFESIIWLSDVEKDSRFSFLPASIRDIMRPTYPGQLKYVRKNLLTTVLMLDLTKSSHITVATTVFGFIEATTPLKFGIVPLVNDEHGEHPCNMIAMIFYRFKESGRKKHIKSMIEMLAKFAETEEGVTASVVKSIFSKITNKEYSEIFGEPSEKTKVLLKDLFAYSERLGVTRSDGAIFSNGKYIETNGLWQKTLVETYFSMVEYLTKAVYSGQVDDNTNLWGHFMTLDNVFRKRNALVFPSSKQAISLVNWLEYSASKVFDTLPWMYRSADAEFAEISLIVVGDFSTPPGLDFALAAVNSVAANDHPVRVAFLHNGSTDSKDTEVFIDEAAFHILQLSTSKEGSTPIEALKAAATNSDKFERTSESSEFNTLRHEGLAAVVAATKLLPGEYAVIANTRVISHIPVSRLFDQHDFESLLSFESQNRASQMTKLIASLRDKDLSPAELSNLHFKSQSLVIAANTATKTPQHEATSIKRVSSSKFAAIRNAPGTFSTSGFDEATIHFTAIIDPISNVGQKLASVLAGFSKVDGVAIEVFLNPQYHADLEKLPLFRFYRYVLRSEPEFDTQGNLAPVGASFDRIPAAPLLTLGMDVVGAWLVRPTKSIHDLDNIKLSSLPHFPRAVGIEADFVLQSILVEGHATDIHSGGSPRGLQFVLGSETDPNMVDTITMANLGYLQLKANPGVWHLRIREGRSRTIYNMDSLSYMSSNGTFVESSKLGDDGALVVVDTFEGVTVFPNVNVRPGMAGKDVLADSDQAKPGFWNTVKQGVKEVFGGGISTLETINVFSVASGHLYERFLSIMMLSVKRQTKNPVKFWLIENFLSPSFMEFLPYLAKMHKFDYELVTYKWPKWLREQTEKQRIIWGYKILFLDVLFPLKIDKVIFVDADQVVRADLKELVDLDLHGAVYGYTPFCSDRTEMDGFRFWNQGFWQGHLRGRPYHISALYVIDLVRFRGVAAGDRLRQQYHTLSADPDSLANLDQDLPNSMIHHIPMYSLPQEWLWCETWCSDESLKKAKTIDLCNNPMTKEPKLERARRILPEWEGLDQQVHATRAEFDAARQAAAKLTVVKANDGSDRDEL

SEQ ID NO: 4218 - protein, 1505 aa, Blastomyces dermatitidis
MTFRYHPFPWRLGGLALFGASLLFTSNAIAGPSVNVALTTSFNAAPYLVELLETAAEENSTCYFPLLDRIAEGTFAEITTDQGLYERFTQLLQEDGHLTHPEAISLFKFALSLRSTAPRIEAHYQYYNTSVEPSLMAAQDAVCTVWAHYDGDQYCSPSLEYAQQSVSGDQHDRILPFDRVLGDSSLPPLILYADITSPLFGGFHQELIEKARDGQFSYRIRYRPSGSEVPRPLFVNGYGVELALKRTDYIVIDDRDAKQRVLQDNDAEKPTLAPAEDLEEEPPADLKPLSASEVSTLGMNAASFVMSSDDPFATLLRLSQDFPTHSATIASGKASSKFTKELKQNRAALLPEGHNVMWVNGLQIDPRTIDAFSLLNHFRREGKLINGFRKFGLSGQQGVNLLSNPVLAKSHAAGDPLRYDYRDEFEGGGVIIWLNDLEKDHRYNGWPSDLKSLLRITLQGQLPPVRRDIHNVVIPVDLTSPEDVRIVAETLLILVKRMVPIRFGIVPLVHNKNTLGQAKIAHHLLDAYGIGALISYLQASLSADKVASPDRASFTSALENRKLREDRTPLAFEDALESDNYDPILSNTKSYLERLAVKGEVLPFFVNGVAFMRDESFLQYMLASLSKDLEDIQRRVYEGTIDEDVWVPSHFLQGALQGRNPLLIPENPTEILTVDLDEMYMNHKDIFDTTLRIPAAAESEHPLLDWSSIILVADLDSDAGAKQLTYLLELHKKHPGVEILLLHNGESSSTSQALSTRLYSIRNGRDLDPAVITAALGSENEEPSDSAAASAYWKTVQPLVKEIGFGTSEIGMVVNSRVIGPMPSSTTLDIQDLEQLHMYEQSKRVGVLSRAAFELGLEANISDPLGLARLQALASLSATSNVPEGIYGSGQTARTDIFEKWNGVHSAISVSNSDDPSIHIVAAIDPTTEIAQRWVPILKVLSELNGVSLKLFLNPREEIKELPIKRFYRQVLESAPSFNADGSIAKPQAIFRGIPGEALLNLGMDVPPSWLVAPKESIHDLDNLKLSTLKEGTNVDVIYELEHILIEGHSRDVTRGVPPKGVQLLLGTEKNPHFADTIVMANLGYFQFKARPGCWKITLKPGQSERIFRIDSVGGHGYIPTPGDENNDVALLSFQGKTLFPRLSRKPGHERDDVLDADHKPASAAKHFLSKGLNFASNILHSITGPAQETHADINIFSVASGHLYERMLNIMMVSVMKHTKHSVKFWFIEQFLSPSFKSFLPHLAAEYGFSYEMVTYKWPHWLRAQTEKQRIIWGYKILFLDVLFPLSLDKVIFVDADQIVRADMYELVTLDLEGAPYGFTPMCDSRTSMEGFRFWKQGYWEKFLRGLPYHISALYVVDLNRFRAIAAGDKLRGQYHTLSADPASLSNLDQDLPNNMQQVLPIKSLPQDWLWCETWCSDESLATAKTIDLCNNPLTKEPKLERARRQVPEWTVYDEEIAAVQRRVLEEEREAKGGTKGGDQNVPRDDGGDDGKGKSEKGTRKDEL

SEQ ID NO: 4219 - protein, 1608 aa, Tarenaya hassleriana
MGSRPRSRFCVVAFVLLLLVCGAWAQNRRPKNVQVAVRAKWEGTPLLLEAGELLSKESKHLFWEFTEVWLGSDDDDSDCNSARDCLLKISEHASSLLTPSLTSLFRFSLTLRSASPRLVLYRQLADDSLSSFPLSDDSSLCCWVDIGSSLFFDESDLLSWLASPPAAEDSVQGPELFDFDHVHLDSRARTPVGILYGAVGTSCFRKFHVLLSQAATKGKITYVVRPVLPSGCVGRTRRCGAIGAWDNVSLAGYGVELALKNMEYKAMDDSTIKKGVTLEDPRTEDLSQDVRGFIFSKIMDRKPELRSEIMAFRDYLLSSTISDTLDVWELKDLGHQTAQRIVHASDPLQSMQEINQNFPSVVSSLSRMKLNESIKDEILSNQRMIPAGKSLLALNGALLNIEDMDLYMLMDLAHQDLSLAHEFSKLKIPDEAIRKLLLASPLPEPDSYRIDFRSMHVHYLNNLEEDAIYRRWRSNINEILMPVFPGQLRYIRKNLFHAVYVMDPATVCGLESVDTIISLYENKFPVRFGVILYSENLIKKIEKNGGQILSSDTVNDAHVKEDLSTLIIRFFLYIKEHHGIQSAFQFLGNVNRLRTESADHAYDDIELQHVEGAFVETILPKVRSPPQDILLRLEKEQTLKEASEESSLFVFKLGLAKLRCCFLMNGLVFDSVEEDSLINAMNDELPRIQEQVYYGQIDSGTDVLDKLLAENAVHRYNPQITTNGKSKPRYVSLASSSGRGEFVLNDVTYLHPPETSDNVKYVTHLLVVDVATKKGIKMLHEGVRYLIEGSKAARLGVLFSSYQNAHPHSLLFIKVFKITASSFSRRGNVLAFLDQLCLLYEHESLFKIKSPTGVATSQMFIDKVIENAEAYGFSSKAYESCLLESSDEKLLEHLMKVNQFLSWDLGLESDMNAIITNGRVIFPVDERTFLSHDLQLLELVELSQRIKHVREIIEGVEWRTMDPDLLTSEFLSDVFMFVSSAMATRDRGSESARFEILNSQYSAVVMGNETATIHIDAVIDPLSPVGQKLASLLRVLGKHVETSMRIILNPVSSLADIPLKNYYRYVLPNMDDFSSTGFVVNGPRAFFANMPLSKTLTMNLDVPEPWLVEPVIAIHDLDNILLENMGESTTLQAVFELDALVLTGHCSEKDHEPPRGLQLILGTKSRPHLVDTLVMANLGYWQMKVSPGVWYLQLAPGRSSELYILNGDHDEGQDQFLSKRITIDDLRGKVVHLEVVKKKGKEQEKLLVSSDGENGVQQKERESWNSNFLKWASGFIGGGEQSTKGDNKKELGKGERQGKSINIFSIASGHLYERFLKIMILSVLKNTKRPVKFWFIKNYLSPQFKDVIPHMAQEYDFEYELITYKWPSWLHKQKEKQRIIWAYKILFLDVIFPLSLEKVIFVDADQVVRADMAELYDMDIKGKPLAYTPFCDNNKEMDGYRFWRQGFWKEHLRGKPYHISALYVVDLVKFRETAAGDNLRVFYETLSKDPNSLSNLDQDLPNYAQHTVPIFSLPQEWLWCESWCGNASKPKAKTIDLCNNPMTKEPKLQGARRIVSEWSGLDLEARRFTAKILGEDMELNELLATTDKRNHPSSDVSSKQDLESKAEL

SEQ ID NO: 4220 - protein, 1495 aa, Aspergillus steynii
MIFNSNSVASWRLTAIVAVVLACLVRASPSVNVALQASFDAAPYLIELLETAAEENSTSYFPLLDRVADGAFDDAVSDKQIYDRFLQIVDEDGHLKTPESLSSFKLSLAIRSASPRITAHYQYYNASVQHSLMVAQDAVCPVWVHSEGKQYCSSTLERAQQDVLGEMDSRELPFDRVLGDLSLPPAILYADVATPMFKDFHHTLSALAKEGQISYRVRYRPPQHWSPRPLFVSGYGVELALKRTDYIVIDDRAADQQGSNNAEPSDSEGDAPDDLRPLSSSEVARLGVNAVSYVMNSDDPLDTLVKLSQDFPKYSARVASRNASTELLEDIRSSRLQMLPAGMNVMWINGVQIDSRQIDAFSLLDHLRRERRLIEKFRDIGVSAQEAVSLLSHEFLGEALAQDAPQRYNYLDDIEGGRVLIWLNDLEKDSRYQSWPQELEAFLQRTYPGQLPAVRRNANNIVVPVDLSSLEDLNFVVTTMSAFVKKGIPARFAIVPIASSVGQKSQVRVAHYLQETYGLSSLLQYLEESLDKNKAASADKGCFETATKERKVRSDRKELSFEEVLKSDDLENVVSQAVHYQYRLGITADASQSFINGAPVARKSNWMQEVSIRISRDLQQIQQGIADGEIEEATSLPGVFLSKAFPRRSQWVIPEDPKDIRVVDLTKVSDSQKSALSETPLIASTNGDALDSAYLIVVGDFDSESGFQLLTAALEHREKHNEVEVLFIHNAEKQTSAKGGSTTLYRSIKTGKQIEPAQILANIGSAAISPPSAEEADEIAQFWAGQQSLARELGFASGVNGVVINGRAIGPIQHDVTSDDLGQLLVYEQEKRIGPVARACKDLGFGSNIPGPLAFAKLTSLTTLSTVSDVPEGIFESTSDIRMNLFNKWNDSRSVLTVSNSEDPAITILASIDPSSETAQRWLPILKVLSKLASVRVRLFLNPREQIQELPTKRFYRYVLDSEPSFNDNGSISRPTASFRGVPVEALLTLGMDVPSSWLVAPQDSIHDLDNIKLSSLNSDSDVETVYALEHILIEGHSRDLTTKSPPRGVQLNIGTDNNPDYADTIIMANLGYFQFKTQPGLWKINLKPGSSERIFNLDSVGGLGYSPQPGDDNNEVALLSFQGKTLFPRLSRKKGHEMEDVLETGPKAGTAMDYVSKGFSFASGVLSSVGVGSKGSLSQKQADINIFSVASGHLYERMLNIMMVSVMKNTKHTVKFWFIEQFLSPSFKSFLPHLAAEYGFQYEMVTFKWPHWLRAQREKQREIWGYKILFLDVLFPLNLDKVIFVDADQVVRTDMHDLVTLDLEGAPYAFTPMCDSREEIEGFRFWKQGYWKSFLRGQPYHISALYVVDLNQFRALAAGDRLRGQYQMLSADPNSLSNLDQDLPNHMQHHIPIKSLPQEWLWCETWCSDESLSQARTIDLCNNPQTKEPKLDRARRQVPEWTEYDDEIAALSNRVDVERQREEELRAESRQEEEQEEDDSDDVDEDPAWIKDEL

SEQ ID NO: 4221 - protein, 686 aa, Papaver somniferum
MKGQHKFLSDLIMFVSSSMAMRERSSESARFEVLNAKYSAVVFDNDDASIHIDAVIDPLSPLGQKLAPLLRLLSKFVQPSMRIVLNPMSSLVDIPLKNYYRFVLPTMDDFSSSDFAINGPKAFFANMPLSKTLTMNLDVPEPWLVQPVIAVYDLDNIVLENLGDTRTLQAVYELESLVLTGHCSEKDHEAPRGLQLILGTKSRAHLVDTLVMANLGYFQMKASPGVWYLQLAPGRSSDLYVLKEHEDGDEVLPFRKQITIDDLRGKLVHLEVVKKKGREHDQLLSSSDDANNLDERKYIIVSWFSRRVVSTGFNVVSDQGNSKSWNTNLLKWASGLIGGSEHEKRKGGSVERKDGRHGKTINIFSVASGHLYERFLKIMILSVLKNTHRPVKFWFIKNYLSPQFKNIIPHMARDYGFEYELITYKWPTWLHKQKEKQRIIWAYKILFLDVIFPLSLEKVIFVDADQIVRADMGELYDMDMKGKPYAYTPFCDNNKDMDGFRFWRQGFWKEHLRGRPYHISALYVVDLLKFRQTAAGDNLRVFYETLSKDPNSLSNLDQDLPNYAQHTVPIFSLPQEWLWCESWCGNSTKARAKTIDLCNNPMTKEPKLQARRHISNSKIHYSSCPEQGAKRIVTEWPDLDLEARRFTARITGEEIDDAKETITTSTQAKSEASSIVEEDKESKSEL

SEQ ID NO: 4222 - protein, 1599 aa, Echinops telfairi
MRGPHAGATLLVTVSRCPSPTGSGRPRGGRSRRPERGVCGPGAPRCEGLGPASPRYGDVEGSVRGATAPGPPSPGTLPASPPVRSSAASLILCFWLTLQHSLATTVPSVRSLATVACHVFGKLRCPGVIPEFLAEESNEKFWQFLETVQELAIYKKTESAYSYYNLILKKAGQFLDNLHINLLKFALSIRAYSPTIQMFQQIAADEPPPDGCNAFVVIHQEHTCKINNIKKLLKKATSRPRPYLFKGDHKFPTNKENLPVVILYAELGSKAFSKFHKALSEKAHQGEILYVFRHYIQKPSSQKMYLSGYGVELAIKSTEYKALDDTQVKTANNTAVEDETEADDIQGFLFGKLKEIHSDLRENLTAFQKYLIESNKEMMPLKVWELQDLSFQAASQIMSTPVYDAIKLMKDISQNYPIKARSLTRIAVNQQMREEIQENQKVLRDRYAIQAGDTTLYINGLRIDKDTNDPFSILDMLKLEGKMMNGLQNLGINAEDISKFLKLNSHTWEYNYALDIRHSSIRWINDLEHDDLYVTWPTSCQELLKSAIPGNIPFIRRNFHNLVLFIDPAQEYTLDFIRIAELFYYHKIPLRIGFVFILNTDEEVDGKNDVGVALWRAFNYFTKEHGVSQAFIYIVQMYQKVNNQNILTVDIVKSVLQDKFPHADVQDILGIHSKYDGDRQVGASFYKMTGLGPLPQVLYNGLPFKHDEMDFKNLEMAVFHRMMDTCIYLQREVFTGALNDRTNVINFLMDKNTVVPRINSRILHMKPKYLNLIPTSVTADVEDSATFFFLDSQDKSAVIAENMYYLTQEDENVISTVTFWIIADFDKPSGRKLLSNALRHMKTSVHSRLGVIYNPSSKVTEENTVISRGILTAFLTQQSKDLRNFLGMLAKEEIATAIYSGDKIKTFLTEGMDKNAFEKKYNTVGMNIFRTHQLFCQDVLKLSPGEIGIVSNGKFLGPLDEILYAEDFYLLEKITFSSFVEQIKGIVKNMETRSTNLSDLVMKIDALISSLPKPSSRYDITFLKENHSIIKINPQENNMFFDVIAIVDPLTRETQKMAQLLIVLNKMINMKLKLFMNCRGKLSEAPLQSFYRFVLEPEVMLGANDINSLGPVAKFLDIPESPLLTLNMITPEGWLVETVHSNCDLDNIHLEDMERAVTAEYELEYLLLEGHCFDELTEQPPRGLQFTLGTKSKPVMVDTIVMANLGYFQLKANPGAWKLKLRQGKSEDIYQIVGHEGTDSQRDQENVIVVLNSFKSKILEVQVQKKPGKSKEDILTDKDEKTKGMWNSIKSFTIRLHKEEKKKEEDVLNVFSVASGHLYERFLRIMMLSVLRNTKTPVKFWFLKNYLSPTFKEVIPHMAEEYGFQYELVQYRWPRWLHRQTEKQRIIWGYKILFLDVLFPLAVNKIIFVDADQIVRHDLKELRDLDLGGAPYGYTPFCDSRTEMDGYRFWKTGYWASHLLRRKYHISALYVVDLQKFRKIAAGDRLRGQYQALSQDPNSLSNLDQDLPNNMIYQVAIKSLPQDWLWCETWCDDESKQRAKTIDLCNNPKTKEPKLKAAARIIPEWAEYDTEIRQLLELIEHKKKASELSPSVPVNSAIC

SEQ ID NO: 4223 - protein, 1598 aa, Tetranychus urticae
MKINLIHICLCLLLVFDITTGDNEDNVNVLTSRSSSKSSKSVTISLFSKWNQTCLYSEASEYLWEESHNLFWTFLETLTSQPVADRYISSSSFQDDYERILQLTLPLLSPSKKSILKFSLSLRSHSPTVEMFNQMSKDKRVDLGLDSDGNGESNAIIGSDIFCPTFVEFSRPSSQNDIPFACDVESAKSTLTQLLSAQTSFISPLIYKSDHIHPESSSQANYITAILYGHFPSSSFSNLYNFLKTQVIDTGRIKLLIRHYIPFVKPGKVSLSGYGVELAIKSTEYKAQDDTRVKGEATSAALALQSDDGPDELEGFVFSKLKQSYPDSAEKINEFHTHLIETMKEIATFKVWELQDMSLQAAKKIISSPKEDQLRLLKDIAQNFPSLSRTLINIPVDNDLKKEVERNQHIFMHHLNLGTSDSALFVNGMFFDMDTTDIFTLLHYLKKEVKLIEGLHKVIGQDQAKIKKLIKLDVNDDKQEYQIDIRDSAVMYVNDIENDKMYRSWSSSLQDMLRPTYPGMLRNVRKNMYHLVLIIDPSKKESFDIIKLAESFYVHKAPLRIGFVFAVNKNMSVNGFNDAGVALLNAFNYITETKTPYDGLSFLTDVIASIKSNSIEEKDLNPESVVNLLKAKFPKADLDLVFGSDSNYDTGRKLAWDFLQRTGLTSPIKVLMNGVVLKQNHLNSELFEEAVLTEIMRQTPTIQKAVYKGELTESKDILDWLMSQKTVMPRLNQRILNNKGKIIDLVPDETLASPSDETDIVSSTLSLNNFQARIKYIISNEKRCSPITLWIAADYEKKEGRRILLSALSYLRSNNQHMRLGIIYSNVGLVSQTIEAALSSIRDAKSTLSFLIKYLVEVEHDTSLDNVLNAHELVPAEAKDDFKEVFKNIQLDTTLFNLHHEFISKIIELDDSKIGVVVNGRVIEIPTNESFVEDDFSLVERHGMLNFGQKILEVLDTNDKSDPAICSNLVMKISNVLSSSSINKMRHELQNFGSEHSAIILPSSTPELPTLDVTAIVEPLSRGAQKLAPILMALQKVFNINIRVYLNCIEKHSDMPLKNYFRYVIDSEMHFADTQGSKLLNTDAYFGNMPLSPLFTLGMITPENWLVESVTSPYDLDNIHLEEIEGPGVWADFELEYLLLEGHCFEQSTGNPPRGLQFILGSKSDPDVSDTIVMANLGYFQLKANPGAWTLRLRPGRSDDIYSIVSHENTDPVSDSSNVVILISSFQSNVVKIRVNKKPDKQDEELLYDDGDDDENSLWGSISSWTGGSKKKQTNGVQEKETEKLNIFSLASGHLYERLLRIMMLSVIKHTKTPVKFWFLKNYLSPTFKDFLPTMAEKYGFEYELVQYKWPRWLHQQTEKQRIIWGYKILFLDVLFPLDVKKIIFVDADQVVRVDLTELRDLDLEGAPYGYTPFCDSREDMDGFRFWKTGYWANHLHGRKYHISALYVVDLQRFRRIAAGDRLRGQYQGLSQDPNSLSNLDQDLPNNMIHQVPIKSLPQEWLWCETWCDDGSKSKAKTIDLCNNPKTKEPKLTAARRILPEWEAYDNEIKELMREYEESKQSSTMVNEIEVESKDTKPTMPGPEKKTEAKDSAHHTEL

SEQ ID NO: 4224 - protein, 1264 aa, Coccidioides immitis
MPPALCEWLWRRTDLETDGLYVIDDRDAEQSSSSSSSSSEKAKATHGTAKDLKEESPADLKPLSASEVSTLGINAASFIMNSEDPFETLLKLSQDFPRHSSIIANTNATTEFLVELANNQAHMLPAGYNVMWINGVQLDPRRTNAFSLLNHLRYERKVINNFRELDLSAGDVVKLLAHPVVARSQATEEAPRYDYRDETEGGGVIIWLNDLEKDRRYSNWSRGLAALLQRTYPGQFPQARRDVNNVIVLLNLADRTDLRMLVSQLQMFITRKIPIRFGMVPTLPDEASMQQIRVASYLHQTYGLKTLLTYFENALEGAKSQIVWPSKDSFNAAVQDREHHADRPKLTFEEILSSDHFEPTIITKTKAYLKRLSSDGPNPPMFVNGAIIPRDEHWMQPLVTRLAQDLEEIQQAIYGGLYDDDSWLPIHFLDGAVLTRNPLIIPEDPGAIQIRDLHAAFKSRRSAFDALPRIRASSDSNLENWSSLILIADFDSEDGIKQLGSVLEFREKNPGIEVLLLHDSHLDFSGRVSAELFNLMKESRDVDVSALKSILEVGSERLLTQEPDVERRRNYFSSFSPLARELGSNQGGVDIVFNGRLIGPIPSSSLFGVQELEQLLAYERQRRLEPLFGAVKSLELKDVIDGPFKLARLTSLVARSTKLDIPEDIYDSGPALRTNSYEKWSTEHSGFTLSHADDPVIQVVAVIDPASETAQRYIPILKVLSKLSGVSVKVILSPIQPLKELPIKRFYRQVFESEPSFNDDGSVRRPEASFTSIPEDALLTLGMDVAPSWLVAPKESIYDLDNIKLSSLREGANVDAVYELEHILIEGHSRAVTHGSPPRGVQLLLGTEKTPHFADTIIMANLGYFQFKAQPGCWRITLKPGPSERIYQLDSVGGMGYVPKPGDETNEVALLSFQGTTLFPRLSRKPGHEEDDVLEAGSKAGSVKNYFSKGLNFASDVISSITGSQKEKHADINIFSVASGHLYERMLNIMMVSVMRHTKHSVKFWFIEQFLSPSFKSFLPHLAKEYGFSYEMVTYKWPHWLRSQREKQREIWGYKILFLDVLFPLSLDKVIFVDADQIVRTDMYDLISMDLEGAPYGFTPMCDSRTEMEGFRFWKQGYWKKFLKGLPYHISALYVVDLNRFRELAAGDRLRGQYQSLSADPNSLANLDQDLPNHMQHAIPIKSLSQDWLWCETWCSDEALKTARTIDLCNNPMTKEPKLERARRQVPEWTEYDDEIAELGRRVAREQGQAGDEKNEKMRERDEL

SEQ ID NO: 4225 - protein, 1852 aa, Chlamydomonas reinhardtii
MCTPVLSSKPKGASLTVRARFNATSYLLEALEFLAEEEPALVWKYLDAMGSAAPPRAAGEGDGCWQRLTTEATRLVSPSVGKLLPLVLGSRQYSAKLAMVAQLAAQFHPGQTSCCFVAVGGATLTDPAQLPAALKAAAATAATATAAATAGGEHAEAEQLFPFDHVYPTTAAAAAAAATATADGDSSSTGSSTAPAAVLYGSPGLGCFGPLHAALRAAAEAGRATYVFRPLLQPHCESAAGCAASGAGGPLLLPGWGVEAALKNTEYSALDDKGNKDKEAAADSGAGGSDALGSGEAAVVRGFRLDVLAARKPTLRQELLTLRDQLLTAAEDDADGSGSLKVWDLADVGLAAAQRVLGSSDPLALLAEVAGNFPGLVSSLSRQLLGAGGGGKGRGLVSSLSRQPVNGSLRSAVASNQAAGLSAGANLLLLNGLAVDVNSLDYYGFLGRLRAEMRLRDALVSPPAPAPATAAATASTATASTATAATAGGLGLPGDVAATVMALRAEEGAGAAAGGGGGVESEPRLSLGSASTMDKHVTWLNNLDKDAKYQRFGRSVNELLSVYPGRLKPLGRNMFTAVLVAQPLCAASLQLAAAVEQMWQGGYPLRFGVVFELPAVQGRLATSRRYPHLTGATQAPAWEDMDASERFGRAFATLREAFGGPAAWRLWGKVAELVGSGEAQDPGSAVEAAFKAAWAAAARSPPPGARAKAAARKSAADALTMLQEGSGYAAEVGMALTDTAAWLQGRGLVTAPPPTPAGQAGEDAEDCSRAPLVWMNGLAGRSAGGGGGMMGGGGGPAEDLLYKLMGEMQRMQEWVYFGRLADDTAGGDVLQAVLGLAGAVERLNPRLVGPAAARNAKVVPLAPLLRGPARQQLAALWRDTPASSSSSASSPSSSSPSASSLDDDEDAEAEEAEEQQAGGKKGGGKKGAGKKADKAAKADKGPLRLHVPAVTHLVAADLCGEGGEGRELVAEALRFLSDGPPAAVREARLLLAPNPADPQEPPCLLEALATAALQQAAAGRATRAQALSFLRRLLSDGPLVSRLAGPLAGGSAEEATVAVKMAEEAGLDSSSLLGSLTSLVDAALLPGGGGLRRSSQVPALAGRTRLAAALTGGGGGGGAGGGAGGGGGLGLAAGEAAVVTNGRVTRVYRPGGERHELVAEDFPLLHMAVGGVASAVAAALSKAHAAAPLPGVPPYPAAATDAAAAAAATTDALSDLTAATAAALAAASAAATPEAPAGAAGGAAQLGPAASKQLQSVMAKLRKSKIAVEIPGSSSSSSSPSSSSSPSSSSALRLEVILNPLSRPAQRLSGLLLALREALGADVVLALNPQRDLTEMPLKSYYRYALPQGLSPAATAAAPPGTPAAHFARLPPRRVLTLNLETAYAEWELDSLMLTGSCVDVTASGRLTPPRGLQLHLGTPAQPHVVDTLVMANLAYFQLKAAPGLWLLSLAPGRSRELYELTGSTGTSLHDDDNEEEEEGEGEEGEEEGRAVAVVAAGGGKGVAVGVSDPAVSTQVLISSFTGKHMILRVRKRPGMEDEDVLKQGGEEDDVVEIDRPMHELEDDEYADEDDDEAPARKPSSLLGRVSDMITGKGGKDGAAAAAAKKLPGGDVINVFTVASGHMYERLQKIMVLSVVRHTKSRVKFWIIKNYCSPQHRAVLPALAARYGFDYEFVTYKWPTWLHKQTDKQRLIWAYKILFLDVLFPLGVERIIFVDSDQVVRTDLAELYHMDIGGAPYAKTIDLCNNPKTKEPKLTAARRIIGPLWEELDAQQEAVTREVQARLDAAESGLPLLAGATEAATEAAAEAVEAAGAGTGAGVEEDWAVGDAPQQQQQQQQQQGGGAAGGADRTEL

SEQ ID NO: 4226 - protein, 2170 aa, Mucor ambiguus
MTATPRILKAILGLVTVGLCNLKHVSASAGTDASPTVDLTMIAPWSAPNLVVEVAETVATYNKSAYIHFIHDFVALEQQSASWTPYQTYKEAVKVVSALGVDETNFFKLSLAIHEAAPRIEAYSQFYRESIVPGVSAYNDDCDVWAQIGDQQYCDITQFIDALTSQSATSTKPIELLPFDHIVSKSQENPTVALYTDRFSVEFAKYHDALNQHSVSHVIRYRPSTAHVPVPLYLSGYGVEMALKKTDYLVIDDRSTQKASNMKDKIVNMGKKFGQSLFQATQKETIEPVTPGEIHRLGFKATQYISRSNNPLATLNQLVQDFPKYAKSVSELDVDIELEEEILENQLNFLRSGMSAVWLNGKGLEFSQMDPFFLIRALRKERQLIASFEQLGFKPKDAIQVISNPAFTVASQASNSANAEIFDMRDSPEEPFVIWWNDLEKDKRYDDWTTSMEDYAKPQYPGQLLPVKKNIFNLIMVEDLGQQGSIARVVSELHMMIKRLVPVRFGIISIMKERDSVSTWMAQSLSYLIEEHGKGAGMNFLTTVLETLHAEGKSEPTPEIITNAFAKTVSSSGKPKSGKKITFEEALETQASYTQASSQFLQRMGITELGAQDGIMFINGKLLEFNEERPWIQVLMPALHEITRGLQKMVYMGDFLDDKFDYYQHVMTQHYVATHRNSFIVPSNAHPLVIREFPTARKSDALRYFQVGEQDASINLWISADLNTAHGLKLASEALLYAESNPKVRVALIHNPASASTDDEPEISVPVVDEQHHKPTFSDLLGSVIFTNKDTHMEQLVTLVGNAIEQLDSGSFEGNVVPEAIIPGSPVIEMEAKAQSIHWRNLVSALERDGLDTSFQGIVVNGRVVGPIPSSAVFSKENFVALVDLEHSKRIAPIEQAIAQVKYTMPADKDVADVLTTISVLIETDKAVTSKSLVEENEPVYRHRVYENIPKTKHTRLVIGDPENAFLQIGFIIDPLSETAQKWVPLINTLASLEGVTVTMYLNPVNGLQELPLKRFYRYVFDKEPHFDSVTGVQEIPTAYFGDLPTDPLYTLGVETTNAWHVTVREANMDLDNIVLKSLGKEESGVSAVYELENILLEGHCLDSNSKSPPRGLEFEIATPSNHSHRDTLVMANLGYFQLKALPGVWNLGLREGRSSAIYSIEDIGTEGKWNWDASKQNKKAEQGSGVLALTSFEGITVMPLVHKNPGMESEDVLESADDRKQHGDGSGLWSSFSSKLFGGGKKDQDVAIAKPKQADINIFSVASGKLYERFLSIMIASVMEHTQSTVKFWFIENFLSPEFKDFVPHMAKEYGFDYEMVTYKWPAWLRAQREKQRTIWGYKILFLDVLFPLDLDKVIFVDADQIVRTDLKELVDMDLQGAPYGYTPFCSDRTEMDGFRFWSEGYWKTHLRGKPYHISALYVVDLVRFRQLAAGDRLRAQYQQLSADPNSLANLDQDLPNNMQHIVPIFSLPQEWLWCETWCSDESLKTAKTIDLCNNPLTKEPKLDRARRQIPEWENYDNEIDQLRKRVSLGHPPAVVADEHGEQIVISGKKEHLKDELLFSAVAPVRSKKSTRRVHHTNHNNIHDSNEDILRIIKLYNQGTMKTINDEATLNGIKYPCLLKYRASNFYVFLTAALSIFTSIYSNASLSSITLYVIESQIKPTQSSLHSGMDVLSDDAVIYVLSSFYLSGLLLGSFMFGWLGCQIRQRKYLLLIGTCASILAGGALMVSIEYWMLFPAKFLQGLSNASIWLMCTALIADVWPQSKWGSMIGFILCTYPLGMSSGLTIGGVLFEHASHKACFLCALALSCWTLLMQLFVIERCTIPSDWIDSKETVQMDQETEMQEHHFKDMQRELNVMEEGAMWSKSSSMSTINLRDQPIIFEKEKESNIKSSAKVVLQNLLVVRLVRSAELMACLYQLIAITAILGALKPSLMIKLEFQMSVLNMAYRNIVLSTFLLPCAVSAVANGWLCDRFGTKIVGLTSMIISIPAFIWVGVPHQNIQSVVSALAVSGITLSGISVSAIYSTIKVMQNILLQQQFEKTKQQQQQYQQQNMSAIFATICLVFGVGLFLGFFLSKLNDIIGFFWLCFVFSMLLVTCVPLIAYFPKGTLFRKSGSQTGFSASTSKKSIVNNTRPESFAESILSDDETTLGSSSRSDCNVTLESKSIIVIP

SEQ ID NO: 4227 - protein, 1485 aa, Aspergillus mulundensis
MLFRSGIVASWRLSCIVIATLASRTASSPSVNVALQASFDSGPYLIELLETAAEENPTSYFPLLDRIADGTFDDYVTDKELYDRFLQVVVEDGHLSSPESLSSFKLSLSIRSASPRIAAHYQFYNTSVQHSLMAAQDAACPVWVHSDGKQYCSSAMERAQQDVEGELDGRELPFDRILGHQSLPPAILYADVASPMFKDFHQTLSALAKEGEISYRVRYRPPQHWSSRPLFVSGYGVELALKRTDYIVIDDRDAEQRGSNSAESAETEEAPDDLKPLSSSEVSRLGLNTVSYVADSEDPLDMLVKLSQDFPKYSATIAAYNASAELHSEIKANRLGMLPPGASAIWINGHQIDPRQIDAFFLVDHLRRERKLIESFRGLGLSATEAVNLLAHDLVTESVAQVTPQRYDYRDEIEGGNVIIWMNDLEKDARYQSWPSQLTAFLQRTYPGQLPPVRRELNNIVFPIDLTSIEDVDLIVTTLQVFVKRKIPVRFGIVPLATSEGSIAQLKVAHYLQETFGLASLMAYLEEAAKKHKLATPDMTVFAAATQDRTPRAEKQALTLEEVLNKDELDTSARNTAKYQDRLGIQAESPLIIVNGIPVLRGENWPQEMSAKVEKDLRLVQQGIAEGLFEEDAWLPNFFLSQAFGRRVPWIVPEDPKEVELVDLGKVSAHTGDLIDKVPRVAALVEPLESVHMIVVGDFGTKAGLKMLISALEIQVKQDKTEILLIHNPENPSSNAAAPALIYRSLKEGNAVDSARILADILSPASSDADPQEATEFWSQFRPLVEALGLSSGTNGIIVNGRVVKPTQDVTVEDLGQLLLYEDINRIGTVTKAAKDLGLASKISDPLSFAKLTSLVALSTVSDVPEGLYETPSDARVQFFEKWSDSGSVITVAGPDAPTITIAAAIDPTSEMSQRWLPILKALSELDGVKLKLFMNPREEIRELPIKRFYRYVLDSQPSFGDDGSVLRPTATFSGVPVEALLTLGMDVPPYWLVAPKDSLHDLDNIKLSSVKAGSNVDAIYALEHILIEGHSRDLTTKSAPRGVQLVLGTEENPYSADTIIMANLGYFQFKAQPGLWTINLKPGRSEQIFNLESLGRLGYSPQAGDDSNEVALLSFQGKTLFPRLSRKKGQENQDVLESGPKPGSAKDFMSKGLNFASNVLSSAGLTSKGSEANADINIFSVASGHLYERMLNIMMVSVMKNTKSTVKFWFIEQFLSPSFKSFLPHLAAEYGFQYEMVTYKWPHWLRAQKEKQREIWGYKILFLDVLFPLSLDKVIFVDADQIVRTDMTDLVNYPLDGAPYAFTPMCDSREEMEGFRFWKQGYWKNFLRGSPYHISALYVVDLNRFRAVAAGDRLRGQYQMLSADPNSLSNLDQDLPNHMQHHIPIKRLPQEWLWCETWCSDDSLSQARTIDLCNNPLTKEPKLERARRQVPEWTEYDDEIAALAERVQGSEVEVEVEEQILADEIEREREEAKEEHAEWKKDEL

SEQ ID NO: 4228 - protein, 916 aa, Phaethon lepturus
RIGFVFILSTKEEIDGKEDAGIALWRTFNYIAEESDTSQAFTSIINMYHEVKDGTVLTVNHVKDVLRSEYPHADVQSILGVHSEYDEGRKAGATFYKKTGLGPLPQALFNGVPFNREEMDAAELETVILQRIIDATGFFQRAVFMSLLNDHVNAMDFLMDQHNVVSRIKPTILGAERRYIHFRSTSVPFDVEDFSTFSFLDSQDKSAVISDNMKYLTKKGEDALYAVTIWIIADFDKPAGRRLLSNALKHLKTSSHARVGILNNPSSKIKEDNTAIARGILTAFLTQNNSNLKSFLSKLTKEETAKSLAAGTKITKFLIPGMDDNTFEKKYNTLGLDLIKTQQMFCQEVLKLLPGQMAVMSNGRVLGPLDENEFYADDFNLLEKITYSTSAEKIKAIVKEMGNNSKSGSDLIMKIDALLSSLPKTEMRQDAELLNEQHSVVKVDPQQNEPFYDVIAIVDPLTREAQKMAHLLIVLKDIINVKLRLFLNCRSKLSEVPLKSFYRFVLEPELTYGINKHLPSEPVAKFLELPESPLLTLNMVTPESWLVEAVNSSCDLDNIHLQDMKETVIAEYELEYILLEGHCFDVTTGQPPRGLQFTLGTKNNPVMVDTIVMANLGYFQLKANPGAWTLRLRKGRSEEIYQVFSHEGTDSVADLTDVIVVLNNFRSKIIKVQVQKKPDKINEDLLTDGRTGKKGNQVSVTRFSEEIPTEEKEKKSDILNIFSVASGHLYERFLRIMMLSVLRHTKTPVKFWFLKNYLSPTFKDVIPHMAKKYDFKYELVQYKWPRWLYQQTEKQRIIWGYKILFLDVLFPLAVDKIIFVDADQIVRSDLKELRDLDLNGAPYGYTPFCDSRKEMDGYRFWKSGYWASHLGKRKYHISALYVVDLKKFRKIAAGDRLRGQYQALSQDPNSLSNLDQ

SEQ ID NO: 4229 - protein, 1538 aa, Cercospora zeina
MATRSWGNWKAAALASLLACSNALPSVNVAVRTAFGAPPFLVELLETAAEENNTAYFPLLDRIADGYFDSSTTDEQLYKAFRSLLQSDGHLGKEDLSSFDYALAIHSAAPRIEAHYQYYNTSVVPTISKKREGYAGCDTWVYVPFSGQKYCSPDLNEKSAESLGQPGASVKQLPFDRILGDVNSEKPSILYADLSSDSFRKFHKTLSQTAKDGKTSYRVRYRAFEGVETRPLTVSGYGVELALKRTDYIVIDDRQDGENVGKDEGKSAAETTLSEEEVSDLRPLSQSELRKLGVRAASFVMGSEDPFATLLRLSQDFPKHSTSIAATNISKAFIDEHAKNREVLLPAGYNVMWVNGVQVMPRDVEAYALLEHLRRERKMIKSVQQIGLGGSEAIELLSHEAIIEAQVEQDAPRYDWRDEAEGGDLIIWLNDLEKDKRYADWPKSANALLQRTFPGQLPPVRKEVHNLVLPVDFADFNDVLLVSEQLRSFVQRQVPIRMGLVPRVRSETSTEQTAIIYYLVHNYGLGTALKYLEQSLEAAGRKYHKPNEKIFQAVKAAGKLRPNKEDVALENVLNDKTLSDKVARSKKYISRIGSTDPTPPVLINGAPIARTEDWLQVMSQQVSVDLRAVQQAVYTGELGDDDYLPTLFLSKASFRRNPLVVPEDDKSLKFLNLGDHPELEDLPSIPADPKTIERELVHLTVVADLDSEQGFGQFMEAMLYKREHDNVEVAILHVPRDGDSKSRVISDLQKSGAEAVVEALMAQYDTLRAGDDDLEARGKISEVLRLAASRDTTPELDEAVRKRWAQFSRLITAIGVTPGKKALLANGRVVGPVSDDVPIEASDIEALLTYERTRRLLPASLAIEALGLQKKASTPLAFARISNLIALSLISDVPEGIFEAAPTVRTDIFRKFESNHTAINIGHLDTATIQIYAAVDPASEAAQKWIPIIKILSEFDGVHVRLFLNPRDRLEEIPIKRFYRHVLSSKPAFEADGSLAPTGAQFRGLPADALLNMGMDLPPAWLVAPEVTVHDLDNIKLSAVKNDIEAVYQLEHILIEGHSRDVTVGPPPRGAQLVLGTDADPHFADTIIMANLGYFQFKANPGVYSLAMQKGRSEEIFHIDSAGASGYDQQGSDNSTEIALMSFKGATLFPRISRKPGMEEEDVLEPSKSALETLADGAGDLLAHVGLGDGAQKFLGKAAKLGSGLLSKSGSATNAPERKHAEINIFSVASGHLYERMLNIMMVSVMKHTKHSVKFWFVEQFLSPSFKDFLPVMAETYGFEYEMVTYKWPHWLRGQKEKQREIWGYKILFLDVLFPLDLDKVIFVDADQIVRTDMYELVQHDLQGAPYGFTPMCDSRTEMEGFRFWKQGYWKNFLKGLPYHISALYVVDLKRFRQMAAGDRLRQNYHQLSADPNSLSNLDQDLPNHMQALLPIHSLPQEWLWCETWCSDESLKDAKTIDLCNNPQTKEPKLERARRQVPEWNEYDEEVGGFAKRWREEKRKGVGSEGLEGESMQERLQREDAEREERERERGKGKRDEL

SEQ ID NO: 4230 - protein, 1499 aa, Emmonsia crescens
MTSRYHPFPWRLGGLALLAAASLFTSNASASPSVNVALSASFNAAPYLVELLETAAEENSTSYFPLLDRIAEGAFAEITTERDLYERFTQLLQDDGHLTNPESISSFKFALSIRSTAPRIEAHYQYYNTSVEPSLMVAQDAVCTVWAHYDGDQYCSPRLEYAQQSVSGDQHDRVLPFDRVLGDSSLPPLVLYADVASPLFGGFHQELMQKVRDGQFSYRIRYRPSGPETSRPLFVNGYGVELALKRTDYIVIDDRDAEQRVLKDTDAAKPTLTPVEDLKEEPPADLKPLSASEVSTLGMNAASFVMSSDDPFATLLRLTQDFPRHSSAIASRNATPEFTKEFEENRASLLPVGYNLMWINGLHMDPRAIDAFSLLDHFRRERKLINGLRDFGLSARQAVDLLSDPAIAKIQAADDSQRYDYRDELEGGGVIIWLNDIEKDHRYDGWPSDLRSLLKPTYHGQLPTVRRDIHNVVIPVDLTSPVDVGIVVETLQMLVRRKIPVRFGIVPLVHNPNALEQAKVVHHLFDTYGIGASIAYLQASLSTEKVASPDQVSFTAALENRKVREDRTPLAFENVLKSENYDPILSGTKSYLKRLAVEGETTPFFVNGVSFMRDGGFLQNIVTTVSKDLEDIQRRVYEGTLEEDIWVPSHFLQGALQSRNPLLIPEDPSEIRTVDLNEICAKHNDIFDTVLRIPATAESDHPLLDWSSIILIADLNSDAGAKQLGYLLELHEKHPGIEVLLLHNGEGSSTSKDLSTRLYSARNGRDIDPAVAIAALASGIDEPASDSAGASAYWNTVQSLVKEIGIGTSENGMVVNSRMLGPVPSATVFDAQDLEQLRTYEHSKGIGVFARKAFELGLESKIPDPLSLAKLQALISLSAMSDIPEAIYDSGPRLRTNRFEKWSSTHSAISVSNSDDPSIYIVATIDPTTEIAQRWVPILKVLSELSGVSLKLFLNPREQIKELPIKRFYRHVLEAAPSFNEDGSIAKPQAIFHGIPREALLNLGMDVPHSWLVAPKESIHDLDNLKLSSLKEGTNVDAIYELEHILIEGHSQDVTLNAPPKGVQLLLGTEKNPHFADTIIMANLGYFQFKAQPGCWKITLKPGQSERIFHLDSVGGQGYSPTPGDENNDVALLSFQGKTLFPRLSRRPGHETDDVLDAGHKPASAKDYLSKGLNFASSVLHSLTGPSKETHADINIFSVASGHLYERMLNIMMVSVMKHTKHSVKFWFIEQFLSPSFKSFLPHLAAEYGFSYEMVTYKWPRWLRAQTEKQRTIWGYKILFLDVLFPLSLDKVIFVDADQIVRTDMYELVTLDLEGAPYGFTPMCDSRTSMEGFRFWKQGYWEKFLRGLPYHISALYVVDLNRFRAIAAGDRLRGQYHSLSADPGSLSNLDQDLPNNMQRELPIKSLPQDWLWCETWCSDEALETAKTIDLCNNPLTKEPKLERARRQVPEWTVYDEEIAAVQRRVLEEEGNIKAEDEEGDDDGRGKGKGNKKELRKDEL

SEQ ID NO: 4231 - protein, 1597 aa, Fomitopsis rosea
MPGVLPSRSNYGLHGRHRHHFLSQCEYRTRTLVLAPSKVYVRESIALEEPEAFLPLLDALTNPQTQPDPVPTSSEAAHKYAFDTALASGFLAGPGEYASAEMNLALHAATPKIEAFYQFYTDRLSSRKEALNIPNCESWVDWYGQVVCDAESLARLATVDTIDTLNSTDVDRSYTPPKLMSFDHIYPSPASTLERPPRTAILYASLSSDNFRELHSVLYALSRAPTPRLEYVLRPIPPIGGDVSPRSYLSGYGVALDLKKMDYLALDDRTQGLSKHADDADEAATSVQATDPVMALIHRYPENTTTDASAPLTEDELLEIDFQAAQIIRDADEPLLILKQLAQNFPRYATSLARQVTVSAALAEEVENNQAVARGGTNVAWLNGVQLSEKDMNPFALLRLLKKERGIMRSLTSLGLSTAQALELLTHPKINAAQGASDVLDGIVDASDRQEGGGVIQWWNDLEKDSRYGRWAGTLNVFLRPMYPGQFPNYRGNLFNIVIVADLSQTSSLHFLGTTVSNILGRSFPFRWGIVPIAESEEATKVARLVYFLMERVGNANTMEFIRHISQADRPVEKTTTTVDWALVRTAFSSFRASSQDHAETPMPELDKILNGETEGLDESIQKARAYATRLGATVSSAPHGHAFVNGKHFELDDQFLQFMQVELREEMRYVQEQLMLGALTDATAGDVSTYFYDVPGVSKRRNPYIYPSSKAGGLRISNLFDSVLKLGFPSAQESFVYPSDVQQVPLTTYIVADLDSDSGQSLVRETLAATGAEFPSRISFIHNPAVGSIEPVIRPQVSSLFAQLIVHGLLERASPSPRKKVISPEGALDEILGKTELKDSEYREYVKVSRLVAREFGLAPGEQGLVVNGRIIGPVAVGEFVAQDFPVLSTYELRKRVQPVVDALHDVAVSLQEYDRASYAEVVSLASSLISAIELPDPSEVGLLNVPHKSRQLKYRLLDTEYTAFTLGDNSTASYHFGILLDPLSEAAQKWSSLMHWLLEIPGVTIELHLNPAKYGELPLKRFYRYNLYPRLTFDESGKEVHVQTVFTGLPIDPIYTLAMDVPQSWLVRPRESLHDLDNILLAGLSPQGRLQGVKAVFDLDYLVVEGHARDMFIGGPPRGLQLQLASNSGDPIADTLVVANLGYLQFRTKPGVFRLEIRPGRGRDIFKMESVGNEGWHSPSVDESGDEITLTSFEGLILYPRLVRLPGMERADALAEVSSAGTSPIGLLDTVISRITSLFGGQKTQEVTSIENKQADINIFTVASGLLYERFASIMILSVLRNTNHSVKFWFIENFLSPSFLEFLPHFSEAYGFQYELVTYKWPSWLRAQKEKQRIIWAYKILFLDVLFPMDLKKVIFVDADQIVRTDLKELVDIDLHGAPYGYTPMGDDNVEMEGFRFWKTGYWKEFLKGLSYHISALYVVDLVRFRQLGAGDILRGHYQQLSADPNSLANLDQDLPNNLQRDVPIFSLPEDWLWCETWCSKDRLHRAKTIDLCQNPLTVRYIITSNDAPSDLYIPQKEPKLSRARQIPEWEEYDAEIARFARSLAEEGKMLSGIVAADVNVLAEAGSNKPKPELPAEDMAMESGAGEGAPRDEL

SEQ ID NO: 4232 - protein, 1544 aa, Exaiptasia pallida
  MOD_RES (130)..(130): Any amino acid
  MOD_RES (221)..(221): Any amino acid
  MOD_RES (640)..(640): Any amino acid
  MOD_RES (768)..(768): Any amino acid
  MOD_RES (784)..(784): Any amino acid
  MOD_RES (832)..(832): Any amino acid
  MOD_RES (863)..(863): Any amino acid
  MOD_RES (1010)..(1010): Any amino acid
  MOD_RES (1303)..(1303): Any amino acid
MAARKEAFDFYKVAHVTIVLVCCVMYVNSESKPVTALLDARWSWTPLALEASEFLARESNEKFWKFVELSKNSHTLTSDLDNYQFILKNAGKLLSPLGLKLLKFSLSIRNFSPRIELYNKLSRDVPNTSXCSSFIQVGPKVTCDLQEAKTLIENNNNLSIPQIYDFDHHYPNSQDNPLTVVLYGQIGTPSFHSFHEVLVKLSTSGDVHYVLRHYVKTPSKXKVRLSGYGVELAVKKTEYKAVDDTKVKEDSPGTMGKNKQEEEDEVEGFLFGKLRKLYPHLKEQLNQFKAHLKESSREMAPLKVWQLQDLSFQAAQRVLSSDPKSALRVLRDLSQNVPRLARSLVKTRVKSEVREEILSNQKIFTKIGMEAGDSVLFINGRSVDIEDMNPFEIMDLLRDEISTLDKLSTLGVSGETLAKLSGLSVSDDHDSYILDTRDNSVVFLNDLESDREYSGWPSHIQEILRPTFPGMMRYIARNIFHVVFFVDPMDKMSLELLKTADEFLQASMPARVGIVMVAEGSSDVDARKNNAAVAIARAFHFIKNEKDSRQALQLILQVYNKVKSHTDEDLTKGVYDMLVSWFGTDDANDVLGPGSEHDDGRKEWKRFFDRTGLQKVPRVIVNGVPLKEEEHEMIEDAVVXQILLQTGSIQQAVFMGQLHQYSDIYDHVMSKPNVVKRMNNVIQSPEVKVIDLTGQTDMTDVSDYNNFKKLDSAQMTSVLQADMKYFTKKDEEMNLKSVTNWLVVDLASEQGRNIIRDALKQVQSSLNXRVGIIHNPQTTSEPAXKLYMARAVEAVLQSKDHVTPSILEFLEKLLDNKNDFEKLDGDLDEMMXLVKSVKNLKLKVIETKLQSQSSRERVLSHQXFCKTALNFKPGEIGVVANGRILGPLKESEVFITEDFQLLEDFELSSYGKQIKELVDKTVFTGVSADDDTSDFRSNIIMKISSILTARVKKSRIHIPEIESQHSVAHIKSDSQASLDVTLILDPLSKAAQKAAPFLMVLQNVTNLNIXIYMNCREKLSEFPLNRFYQYVMEPELTFSANGKLEPGPYAHFVDLPQSPILTMAMDTPLGWMVEAVRSPYDLDNICLREVSQGVSADFELEYIFIEGHCVDSTSGQPPRGLQFTLGTKSEPDKFDTIVMANLGYFQLKAFPGSWILRLRDGRSADIYEIDSVTGGVQQDENHTYTIFVDSFLGKLMKVKVKRRPGKEGVDLLGDRDDEDKDSGGLWDSLSNMVRSEKKKETKEEEKIINVFSLASGHLYERFMRIMMLSVLKHTKSKVKFWFLKNYLSPTFKAFLPKMAEEYXFEYELVQYQWPRWLHAQTEKQRIIWGYKILFLDVLFPLHVKRILFVDADLIVRADLQELMDMDLEGAPYAYTPFCDSRTEMEGFRFWKHGYWRSHLGYRSYHISALYAIDLKRFRRLAAGDRLRGQYQGLSQDPNSLSNLDQDLPNNMIHQVPIKSLPQEWLWCETWCDDYSLKNAKTIDLCNNPQTKEPKLNSAVRIVKEWPEYDEEIRRLQNKLAANESQKTTTDVPMTDSSQPGKEEL

SEQ ID NO: 4233 - protein, 1590 aa, Wolfiporia cocos
MWSCLLAYSAATLLNAYVSYGIAPPVGVELRSSWPPPPRLLEYIESISIEDSGSFFPLLDVLTNPGTLPDPIPSTDEALLQHVLETAVTQGYLAESGSYATAEMNMALHSASPKIEAFFQFYSDRHAARRSQELSENCGSWVDWYGQVVCDAESLARFASIETIDLPESRGLNDTFVHPRLMPFDHIHPSPAQRLDYPPRTAVLYASLSSSNFRELHSYLYAASSALNPHLEYVFRPIPDEDRDTSKRMHLTGYGVALDLKKMDYLALDDRQQDAKEEGSLVEDAASPASGIDSIMTLLQQYPEHTTADLSAPLSEDELQVLGLQAAQLIHASENPLTTLKHLSQDFPKYATILARRVTVDPALAEEVENNQARAAPGVGIVWLNGMVLQEKDLNPYTLLGLLRKERRTMLSLTSLGLTPGQALDLLTHPSISMAQSESDVLDGVVDASDRPEGGDVIVWWNDFEKDARYQRWARSLSLFLRPMYPGQFPSVRANVFNIVLVLDLSQSSSVHFLSVTVANILTRSFPFRWGIVPIVETEEGARMARLFYYLMEHFDRTKTMAFLKNISQADRPAESLKPTVDWGLVRAAFNYLLANSDPLDESIPTDLDEILAENEHTNVVLDKARTYAERLGASLLAASQGHAFVNGKHFDLDDAFLRAMQMELAEQMGHLQEQIATGQFNDIDIIPTYFYDLPGTAKRRNRHIYPSGKAEGLVIYNLLDLVGQSKFPTWPGSFVYPSEPIEAPLTTYIVTDIDSEAGQLLIREVLSAVNTNYPSRISFIHNPSEAPITRSQTRPQVSSLVAQLISKGLLHRASPSRLLRLLGFGDVAAPKQSPQTVISAEDSLDDILSGTVLTDAEYDEFVTASRLIAREVGLAPGDQAVVVNGRVVGPILPGEFLADDFTVLYLYELRKRIQPVADALNSIMDSFNDYDRESRSDTVSIASSIVSAIQIPDPSEVGFFNTPQKPRQRKYQLLESEYTGYTFGDNNTAVIQFGILVDPLSESAQKWSALTEWLLNIPGVSVELHLNPPKYIEIPLKRFYRYNLQPRPTFLENGQPFEIKTEFASLPIEPIYTLAMDVPQSWLVRPREALHDLDNILLNALSARDRTQGIRATFDLDYLVVEGHARDTLTNAPPRGVQLQLSDNSGTPIADTQVVANLGYLQFRTKPGVFKLEIRPGRGREIFKMESVGNEGWNSPAVDDVGDEITLTSFEGLTLYPRLSRRPGMERGDVLAEVAAVKPTSGGFFDEIVSRITSLLSSEPSTDLAVASNNQADINIFTVASGLLYERFASIMILSVLRNTKSTVKFWFIENFLSPSFLEFIPHFAEAYGFQYELVTYKWPSWLRAQKEKQRIIWAYKILFLDVLFPMDLKKVIFVDADQIVRTDLKELVDLDLHGAPYGYTPMGDDNTEMEGFRFWKTGYWKEFLRGLPYHISALYVVDLVRFRQMAAGDILRGHYQQLSADPNSLANLDQDLPNNLQRDVPIFSLPEDWLWCETWCSKDRLHRAKTIDLCQNPLTKEPKLVRARQIPEWEEYDAEIARFARKLAEEGKMRSEIVAADVNVLADVGKASSASGAAPEAHGEVEHTRDEL

SEQ ID NO: 4234 - protein, 1532 aa, Elsinoe australis
MKPANIGQIGHVLALAAALLLVPVHSAPTVDVSLQAAFDAPPFLVELLETAAGENATSYHPLLDRVAEGHFDTAKTDKELYELFLSTLQDDGHITDSESLSSFKLALSVHSAAPRVEAHYQYYNTTARYRGSKECDTWVVFDSKKYCTPDLASEATESVSSSSVSHSLPFDRVLGDDKATSSILYADITSSNFRKFHKTISLTAKSGKTSYRVRHKPAVSGARKPLSVSGYGVELALKRTDYIVIDDRQAAEGAKKETAEKGQAVLADDEVADLKPLSSSELVDLGLKAASFVMASEDKFGTLLKLAQDFPKHSKALSTTEISEQIKNELSDNAQSFLPPGYNAMWINGRQTLDRDLDAFSLLEQLRSERKLINSAKSLGLTGDETIKLIGHADVSGSSGADGGMPDVQRYDWRDDIEENNVIIWMNNIEKDKRYLEWPDNVQAFLQRMFPGQLPAVRKDLNNVVLPVDFSNKTDVELILENLQNYVKRKVPIRFGLVPITISTEAEQYAKVILSLTDTYGLAAALHFLELSFPDMGKKAKAPVQSYYEAAIKEKTLRKERQPVSFQDARDSDMTVSRIELTRSYLKRLGAAGSSPPYIANGVPIPRGEAWMALMSNQVSMDTRMVQQAIYMGKLDDSSYLPSMFLENATPRRNPFIIPEDEKDIKLLTLSNIPELKDGLLGSIPSVPASEETVEAELVQLVVVANFDTEEGNKLFQEAVKFRGEHDSVELFFAASGPAKKGGFSERLHGSLTSTAPTLQILQGLEWNATPADGQEQSSISVQDFWGSASSFLNALGLPSGTSALVLNGRVVGPVPQGASVDADDMDMLLAYERKKRLLGVGKALKALDLLPKASKPYSFARLSNLVALSQISDVPEGIFEGPPSTRMSIFEQLKGEFTGITLGDSVTSSVQVVLALDPASEVAQHWLPVIRVLSELTGVYVKLFLNPKERLEELPVKRFYRHVLQSAPSFDASGSLADQSAHFTGLPADALLNIGMDLPSAWLVSPKDSVHDLDNLRLSSLKSDQVKAIYQLDHILIEGHSQDATAGSAPRGAQLILGTGKDEHFADTIIMANLGYFQFKANPGFYNLSLQQGRSQEIFHIDSAGLGGYNAQTGDSATEIALTSFRGTTLFPRLSRKAGMEEEDVLEPSKSTLEKTVDSLADAAGNVLNAIGMDKKGAGDWLSKATQKVASLSNGGVGSKAVSTLPHADINIFSVASGHLYERMLNIMMVSVMKHTSHTVKFWFIEQFLSPSFKAFLPILAEEYGFRYEMVTYKWPHWLRSQKEKQREIWGYKILFLDVLFPLDLDKVIFVDADQIVRTDMYELVQYDLKGAPYGFTPMCDSRTEMEGYRFWKQGYWKSFLRGLPYHISALYVVDLVKFRQMAAGDRLRQQYHQLSADPQSLSNLDQDLPNHLQHVLPIHSLPQEWLWCETWCSDESQGVAKTIDLCNNPETKEPKLERAKRQVPEWTVYDGEIASLAKRKQGEEAVVPGLGQGKGEQERLQAEEYQRKKEEEEKKVRLEKEKGNKPRDEL

SEQ ID NO: 4235 - protein, 1733 aa, Spathaspora sp.
MVQKGRGSYENSVKRPPKPSPVSNIAQIASLTRYPDKDYAVSILHEVAKAVAPIIHENNFKVGTLCEMFPKNPNLLGLNVNGGQKILLRLRHSFNDRSFLPTSDIIETFLHELTHNLHSAHDKKFYDFLDGLKRRYEQIKYGGGSNSNYRCEEEKLGSKYSPLPNLVSVREKRIKELSKPKYKAEVRVLGSGSSSSGSTFTSGTSTPSKVRKPELEQKSIRQLILEAAERRQRDSKWCHSETVEKEEVPDDNELDIIEIHDDEDEVSQTKEISEVVDLTGEEHDESTTTAEQEVVVIDGVTVQLEAGWNSTTFLISLIEAISGYDESLYIPTIETIFNLAEDDDEDFELYDATHHQIYFRVISRIGVNEESTSFINFNLVNKIYTPRVASHYDYYSAKVLPLLGSRLQLECARDSFGNEVERDSEGKLPAWLLYNNKFYCSSSDLFALQTDNSKSDEEVLKFDRVIGDNAEAPLLILYGNPDSPITKEFFIPLYNDAKAGKIRFVWRYIPGNTKQPESLSGYGVEVNLRNQDYFKEEKVRGRSKLDITKDFNKINESKELLTVSKDRLDDKLGLKFTSFVLSSTDKYQILKTMLNNFPKFLHHIANIPKLLNYESVKASVYANEDLGISQDSYGFYINGSPIHPLELDVLNLHSKLQTELKIIKNLVKLGFSTIQSKLLITKFALLSAVKQTQFRTGNTLMGNNENRFRVFENKFTKSSKGGVVFFNDIENDVTYDTYSTDRQDTYLGPSSFKLKSNQIPPLKENIHDLIFAMNLANKNQLKVFFTLSKVILDSGIPQQVGIIPIIGDDDAIMDKRLADGFYFLVEHASSKEALAFVYKYFESSEEEFNELLKLIPNHKLSYDYETVLNKFSIEKASVIFNGVINDLTSTNWQINMGKQLSQDINWIKTQLKQGNNIRSLKDLIYSNAKTQRNLRIVPLEPSEILYKPIDQELQAKSILFRSMDKSNEVGYTYWLFSSFNEDIIIEQLISLLEMVKQRKEDIQVRVVNTSTTFKLLEQLSKNFRLNMLTNSQIDQIIEELKKVELSQVNLDSELVKFLEKKSIPVNHSFMLVNSRYFRLDDPFNLSELNQIAEFEHSQRLKLFNDILQTYPDQYNHKSLNEFGSGNLVNDPSDWFDLVCSTVTKSFHVDDKLFIVDVNRFDFASLDMSNAIEPQEKRGTTELDVLVILDPLSETSQKMVSILESIQDFPFVSIKILVQPKVNSEFNIHRFYKGVYPGSTPKFNEQGNWINKYAAEVGALPSDQNVSIDLDMVNRWHVTSKSISNDGIDIHNMKVSSEQGITVKFELSSIIHEGYARDIHTGMSPQGLSFNLVKDDITSDTLVMSTLNYFQIRTNVPGVWKLSLSQEKFNLLSASENKFDANSSPLEYAEIPVFSLKGLTLYPRVVTKADNTTNVSKPTTQKADINVFSIAGGGEYERLLGIMIASVRKQNTNKSVKFWLLDNYMSPQFKRLLPILAKQYNVEYELITYKWPNWLRKQKEKRRTIWGYKILFLDVLFPQDLDKIIFIDADQICRTDLTELINIDLEGAPYGFTPMCDSREEMEGFRFWKQGYWSKVLKEDLKYHISALFVVDLKKFREIHAGDRLRSHYQKLSSDPTSLSNLDQDLPNNLQRSIKIFSLPQEWLWCETWCSNESLSSAKMIDLCNNPLTKENKFDIAKRLMPEWNDYNNEILELYKEASVVQTEPEEDDTSAEKPPLSQEEQENEDDSDYHDEL

SEQ ID NO: 4236 - protein, 1556 aa, Phlebiopsis gigantea
MVLQRLVGPLLLVTSGILASSPPVQVELRTSWAPPPFLVELLETIAIEEPQSFFPLLEAFTDPEFSPLAQSKTDEEIYRNARQYALSAGYLSEPGELASLDMTLALHSSVPRVEAAYEYYLGSHAERDITCESWVDWYGHAVCDLEMLRALVGAETIEPSVEAFANRLPFDHVQPSPELVLDRPSRTAILYASLTSPNFRELHAYLHQASSGPAPHVEYVLRYVPPSGHIDSQERTYLSGYGVGLDLKKMEYLAVDDRRQGSNFDSSSSESFSADVYDSDPISTLLQQYPDDPTVDYTTPLTDDELLNIGLQAAQLAVDAPDALTTIRQLAQNFPRYASAIARRVVVSETVEEEIANNQAKAQGGISVVWLNGAQLSEADMNPFSLLGILRKERRIMRHITSLGLNATKAMELLTHPAVGLAQSDSGVLDGIFDASDRLEGGDVVLWWNDLENDTRYARWSPSLLSLRNLMLYPGQLPSLRLNMYNVVLVLDLSQTSALNFIAGAVAPLISRGFPFRFGLVPAVETADGAKMARLVYWLYAHVGRDRTLQFLTHVSAPESTAVEWSLIAREFLELTQHADAGPIEPKPDFHAIINAQDDATADSAPQKAALYAKRLAADLASAPLGHVFVNGKHFELNDDTVRNMQIVGGQMLQHLQEQMHYGHLSEADAPRMDTYFYDLPEASARRNRYIYPTGKTGDLRIVNWLEVPETAGVLYDNRAFVYPPTEEVTTLTVFVVADLDSEEGLELAKETLKSMTETSVTRVSFIHNPSTSTPPTTTTFSSLLGTLITKGTLSGQSEQVIVSSAATLEELLDGAPLIVPDEFISASRYLLRALRVAPGETVLVVNGRVVGPIEQGGIVAADIPSLATYELRKRVTPVVTALNDVVGPLEGYEPAELSDMIFLASSLLSSIHQPDPSEVGLFNAPIRPRRRNYKMLSGESTTFEYGDESTALFHFGVLLDPLSEAAQKWTALLEWVLNDPAVFVELHVNPARYKELPLKRFYRYNVQPSLRFTELGYEYKSKVVFNDLPEDPIYTLAMDIPPSWLVRPREASYDLDNILLTGLSASERTTGVRAVFDLDYLVIEGHAREDRTMSPPRGLQLQLVSGDGTAIADTLVVANLGYLQFRAKPGVFRLEIRPGRGREIFALESVGSEGWESATVEEAGDEVTLMSFEGLTLYPRMARLPGMDVVDVLADDTPSEDHSLVGKLKTSFSSIFSPKTTKETDVIPTNNQAEINIFTVASGLLYERFASIMILSVLRNTKSTVKFWFIENFLSPSFLEFIPHFAEAYGFQYEFVTYKWPSWLRQQKEKQRIIWAYKILFLDILFPMDLKKVIFVDADQIVRADLRELVALDLHGAPYGYTPMGDDNVEMEGFRFWKTGYWKDFLQGMPYHISALYVVDLVRFRQIAAGDILRGHYQQLSADPGSLANLDQDLPNNLQREVPIFSLPEDWLWCETWCIKDRLDRAKTIDLCQNPLTKEPKLARAKHIPEWEEYDSEIAQFARKLAESGLIHAGMADADATVLADVGAGRRVAADADAQESTEDFVTPGHILDEL

SEQ ID NO: 4237 - protein, 1517 aa, Saprolegnia diclina
MSSGCARRWLAAAMALVLAMTVAGSRKVEVDLTTTYLSSPVYPVLETSAFLAEVDPSLFFRYVDAIDMRAKAIQHIDSINYTTLALDAAHDVLPPDATIAKLLPFVLQTRAQSPKIEMFHQLAIESAYKGCGLAYEAASAWAVVYHETGCAARVICAASNWNDALLTPSTDASCAASGEHDFELPVDHVFDKDVADAPTVLLYGTLGTSSLRAFHAKLAPLAEAKTIRYIVRHAPHNNVLPVHLQGYGVSLHIKNMEYKSFDDSKTPHSKHTPTDDDEDAFIVSVLMKKGAETGPALRAYQLEFEDFSSVNATENNEDAPWQLNHLGYLAASDILASTDPLARLQQLSQNFPKYAAGLALTTELIPSERVAAMATARRTVATQNLLNKLVVNGMPHDLSDVTFNPFDFVKLLAGEVQQGDALRALELDDPTLAAVHSAMTTLSTQAAEVRVRVRGPVDGTAPLYLNAIESDEATAEWPTDLSVLSEPAWNLIFLRRVMYEVIVVLDPTTKQAANVLQQIQFLILRGAPVQFGVLWTSPELLALAPEDRETYVPATDDKAPATAYHVSKLYLAARDHGHAAAKQFLDGIVELAGGVTVKEALLIYVQAVTHRLDRGSALEAARDLLLSASQDDSVWAMTDVVLASQLPLDSYVFNGVLRRDLNLQEGLMAHFGRDQPLYQELARAGKFADDADLLDELFAHEGHYPLYSSWLDASEQVPVLDLHLTSSVWDDVKYLHMPHTATKPKRQSLLLMVDLDTPAGARSAYNALKTTMETPDVRLSLVHLGTSPSSIGSRVSYMLHAISDVDDARYLAILLEIVRFLSKAKSEADIVLHAKLLVQTHLDASPEEARLRDLLRWLDETPAYTHPLPSLLSITTPTLLINGRPLSLDDDQTLLPSLLSVLLQWEGENRSKAVARAFFAPTKHDALSVAAAAHVSQRLQSLLAVVDAYLATPRTGPVFSTLDQHTTFATSAASRSLLDVVAYLDPLSEASQRASVVLRMMRDVLGAKITLVLTPTPSYAEFPLKRFYRYAWGSAPVFRVLPRPPVLTMNVETPELFNVQMVASDTDIDNIQGDATAMYAVQSLLVYGQCIDRTMAYHPSPPNGLQLVLERTAGADVLHRDTVVMKNLGYFQLQATPGVWRLELAKGRASELYEMVDQAATDHARVIVYDFSSAITQLDVKKRRGYEYARLLEEPEDLPAAKKEEDAATQSYWKSLVSWGTKQPVKDVVAARSGETIHVFSVATGHLYERMLKLMMLSVLKRTNNPVTFWLLENFLSPDFKKSVPALQAEFGMDIRLVTYKWPNWLRRQTEKQRIIWGYKILFLDVLFPLGVQKIIYVDADQVVRADLKELWHMDLHGKPYAYTPFCDSRNVGFQFWRQGYWKDHLRGKPYHISALYVVDLVKFRRMAAGDTLRAVYDQLSADPNSLSNLDQDLPNYAQHQIPIHSLPQEWLWCESWCSDESKASAKTIDLCNNPKHKEPKLDMAKRVISGEYFKESWLELDDQVKAAEAAYTARHS

SEQ ID NO: 4238 - protein, 1656 aa, Solanum tuberosum
MNRKHHCIHQDSRMGTRFRFGFWVVIAVAFSICLSGYSVSAVNSKPKNVQVALRAKWSGTPILLEAGELLSKESKDHFWDFIELWLHSADENSDCRTAKDCLKRIIKYGRSLLSESLIAMFEFSLTLRSASPRIVLYRQLAEESLSSFPLTDDDISSSPDEGVFQQSDNAKNKKVNPLLVGENPRSPEGNCCWVDTGGRLFFDVAELLVWLQNPKEVSLDTLHPEIFEFDHVHPDSNVGNPVAILYGALGTHCFEQFHHTLASAAREGKIYYVVRPVLPSGCESKSTPCGALGTRDSLNLGGYGVELALKNMEYKAMDDSTVKKGVTLEDPHTEDLSQEVRGFIFSRILERKQELTSEIMAFRDYLLSSTVSDTLDVWELKDLGHQTAQRIVHAADPLQSMQEINQNFPSVVSSLSRMKLNESIKEEIVTNQRMIPPGKSLMALNGALVNFEDIDLYLLVDMVHRELSLADQYSKMKIPVSTVRKLLSALPPSESSTFRVDFRSDHVHYLNNLEVDEMYKRWRSNLNEILMPVYPGQMRYIRKNIFHAVYVLDPSSICGLETIDAIVSMFENHIPIRFGVILYSAKLIEEIESSGGQLSLSYKEKDSPNQEELSSLIIRLFIYIKENRGIATAFQFLSNVNKLRIESAAEDPPEVHHVEGAFVETLLPQAKTPPQETLLKLEKEHTFKELSEESSLFVFKLGLAKRQCCLLFNGLVHEPTEDALMNAMNDELPKIQEHVYFGHINSHTDILDKFLSENGVQRYNPQIIAEGKVKPRFVSLSALILADNSFFNEISYLHSTETIDDLKPVTHLLAVNMASEKGMRLLREGIHYLMAGTTTGRLGVLFNSIQDPHSPSILFMTVFQITASSYSHKKGTLQFLDQICLLYQHEYMHASSAGTENSEAFMDKVFELANSNGLSSKGLKSALSELSDEKLKMHLKKVGKFLFGEVGLEYGANAVITNGRVISLADSTTFLSHDLQLLESLEFKQRIKHIVEIIEEVEWENIDPDTLTSKFISDIIMSVSSSIAMRDRNSEGARFELLSAKYSAVVLENENSSIHIDAVIDPLSSSGQKLSSLLRLVSKSIRPSMRLVLNPMSSLVDLPLKNYYRYVIPTLDDFSSTDYTIYGPKAFFANMPPSKTLTMNLDVPEPWLVEPVVAVHDLDNMLLENLGETRTLQAVYELEALVLTGHCSEKDHEPPRGLQLILGTKSTPHLVDTLVMANLGYWQMKAFPGVWYLQLAPGRSSELYALKDDGDGGQETTLSKRIIIDDLRGKLVHMEVVKKKGKEHEKLLVSADDDSHSQEKKKGNQNSWNSNILKWASGFIGGSDQSKKSKNTPVEQVTGGRHGKTINIFSVASGHLYERFLKIMILSVLKNTRRPVKFWFIKNYLSPQFKDVIPHMAREYGFEYELITYKWPTWLHKQKEKQRIIWAYKILFLDVIFPLALEKVIFVDADQIVRTDMGELYDMDLKGRPLAYTPFCDNNREMDGYRFWKQGFWKEHLRGRPYHISALYVVDLLKFRETAAGDNLRVFYETLSKDPNSLSNLDQDLPNYAQHTVPIFSLPQEWLWCESWCGNATKPKAKTIDLCNNPMTKEPKLQGAKRIVAEWPELDYEARRVTAKILGEDFDPQDQAAPPAETQKTISDTPLEDEESKSEL

SEQ ID NO: 4239 - protein, 1538 aa, Denticeps clupeoides
MAAASQTGEWTMRNIFWLLLLLLDLQPVSASSKGVTASLKAKWSMTPLLLETSEFIGEDGEEKFWQFVDTVKELTVYKNGESVRSYYNLITKKAGQFLTDLQVRLLKLALSLRVYSPAVHAFQQIASDEPPPEACSAFISVHGQHACSTKDMKKLLKAAVGRPKPYLYKNDHKFPGVNSTDLPVVVLYAEIGTKKFNTFHKLLSERAGEGKLIYVLRHFVVESKPKKMHLSGYGVELAIKSTEYKAVDDTQVKDSKSAMNSEDDYEDEVQGFLFGQLKKSHPELQDQLDDLKKHLTESTNDMAPLKVWEMQDLSFQAADRILSAPKFDSLKLMRELSQNFPSKARSLTRVAVNREMRKEIEENQKRLGETMGLHPGDAGLFINGLHIDLDVHNPFSILDIIRAEAKVLEGLHHLGIKGEHVGKLLRLPVGPVEDNYALDIRHSAIMWINDIESDPTYKTWPSSLQELLRATFPGVIRQIRRNFFNLVLFLDPIQEDSFELVKLAELFYKHKIPLRIGFVFVVNTDDKVDGFLDPGVAFYRVLNYVIEEYDVSQAFMSMILMYNKVDVGETLSVETVTAFLKRKFPKANAGKILGLDSEYDDKRKAGGVFYRKTGLGPLPVALFNGVPLGSEEMDPDELETVLLQRIMDATNFFQRGVFMGHISDGVDVLDFLMEQPNVVPRINPLILSSSRNYLTLTASPVADDWEDSTMFSYMDLKDKTAVVSKRMKYIAKNADEEWVYGVTTWIIADIEKASGRRLLLSCLKHMRSSSGLRLGVVNNPSGKLTMESTLLYRALWASLLTQKSKETFGFIQKLLKEENIRLLHQGTKIKDLLVPGMDQDAFEKKHNTLELDFLRSQQLFCQEVLKLRAGQRAVVSNGRILGPFEEDEELSTEDFHLLEKITLSTSAEKIRGRVKQMGLKGDKASDLVMKVDALLTSAPKQEARKDVKLAKDKHSVLHLTPREDEVFFDVVAIVDPLSRETQKLSHLLIVLAQVVNMRLQVFMNCRAKLSEMPLKSFYRYVLEPDVTFLGNDTLSSGPVARFTDIPESPLLTLNMITPESWMVEAVRSPYDLDNIHLQEVSGVVAAEYELEYLLLEGHCFDLSTGQPPRGLQFTLGMSQDPLMQDTIVMANLGYFQLKANPGAWILRLRKGRSEEIYQIFAHDGTDSPADAADVIVVLNSFHSKIIKVRVQKRTDKLNEDLLSEATESKGLWDTITSVWSSLEKSFTGGSSSEDEDKKKEDVLNIFSVASGHLYERFLRIMMLSILQHTQTPVKFWFLKNYLSPSFKETIPHMAQAYGFQYELVQYKWPRWLHQQTEKQRIIWGYKILFLDVLFPLAVDKIIFVDADQIVRADLKELRDLDLEGAPYGYTPFCDSRKEMEGYRFWKTGYWATHLGHRKYHISALYVVDLKKFRKIAAGDRLRGQYQALSQDPNSLSNLDQDLPNNMIHQVAIKSLPQEWLWCETWCDDGSKKTAKTIDLCNNPKTKEPKLEAAVRIVSEWSRYDSEIKQFLRRVQDQKAKQPESQAAPSSKGNLRDEL

SEQ ID NO: 4240 - protein, 1534 aa, Sphaceloma murrayae
MKPLFGGRVGCIIVTGLGLLYSCARASPIVDVSLQASFAAPPLLVELLETAAGENSTAYFPLLDRVAEGHFDAARTDKSLYDVFLKTLTDDGHITDLESLSSFKLALSIHSAAPLVEAHYQYYNTTARRLGNKNCDAWVLYDGRVYCSPDLAVEAEIVSSSSAARSLPFDRILGDINSPPSILYADISSPEFRKFHRTISLTAKSGKTSYRVRHKPPSSGSRKPLGVSGYGVELALKRTDYIVIDDRQAAKNDKHTPAEKGQTVLADDEVADLKPLSSSELAELGMKAASFVMANDDKFATLLKLALDFPKHSSALSSTEVSDEIRNELSANAQSFLPPGYNAMWINGKQIQSRDLDVFSLLEQLRGERKLINSARDLGLTGAQTIGLITHSAVSDPSAAEGGSPDIQRYDWRDDIEGNGVIIWMNDIEKDKRYLDWPDNVQAFLQRMFPGQLPAVRKDLHNVVMPVDFSNKTDVELILENLQNYVKRKVPIRFGLVPIVLTPEAEQSAKVVLSLIDTYGLAAGLHFLELSFASLGKTPKSLTQSHFDEAIKEKPLRKDRNPIDFQQALNDESRLSQLELARSYLKRLGAAGASPPYIANGVPIVRNEEWMAGMSNRVSVDTRLVQQAIYMGKLDDSSYLPSMFLDGASPRRNALIIPEDEKDVKMLTLSEFPEIQDGFIGSIPGLPASEETIETELIQLIVAANFETEEGGALYRETVKFRSEHDNVEVFFVASVPGKQGSFTERLKDALTSRDLNIQVLEGLDWSMQAQNDSPEATVVVQDFWDSAKPVLTALNLPSDASAIVLNGRIVGPISPTATVDADDLDMLLDYERKKRLLPAGKALKALDLLPKVTRPYQFARLSNLVALSQVSDVPEGIFEGPPATRTSMYELLKGEFTGIEVGQSATASVQVIAAIDPASEVAQRWLPVINVLSELAGIHTKLFLNPRERIEELPIKRFYRHVLQSAPSFDGSGALQDQSAHFKGLPADALLTIGMDLPPAWLVSPRDSVHDLDNLRLSSLESNEVKATYQLDHILIEGHSRDTSAGSAPRGAQLILGTGQNERVADTIIMANLGYFQFKANPGFYNLSLQQGRSQEIFNIESAGLAGYKDASGDSATEIALTSFRGTTMFPRLSRHEGMEDEDVLEPSKSALEKTVDSLAGAASNMLNAIGMDKKSAGDWLAKATQKVASLSNGGTSSKDISTLPHADINIFSVASGHLYERMLNIMMLSVMKHTSHTVKFWFIEQFLSPSFKEFLPILAEEYGFRYEMVTYKWPHWLRSQKEKQREIWGYKILFLDVLFPLDLDKVIFVDADQIVRTDMYELVQYDLKGAPYAFTPMCDSRTEMEGFRFWKQGYWKSFLRGLPYHISALYVVDLAKFRQMAAGDRLRQQYHQLSADPESLSNLDQDLPNHMQHVLPIHSLPQEWLWCETWCSDESLGVAKTIDLCNNPQTKEPKLARAKRQVPEWTVYDEEIAAVAKRKKGEDASVPGLGQGKGEQERLQAEEYQKKIDEETAKAKAQQTEGDATDKPRDEL

SEQ ID NO: 4241 - protein, 1483 aa, Aspergillus nidulans
MLLRSGIVASWRLSCVVIATLLTARATSSPSVNVALQASFDSGPYLIELLETAAEENATSYFPLLDRIAEGAFDDYLTDKELFDRFLQVVVEDGHLSSPESVSSFKLSLSIRSASPRIAAHYQFYNTSVQHSLMAAQDAACPVWVHSDGKQYCSSAMERAQQDVEGDLDGRALPFDRILGPNSLPPVILYADVASPMFKDFHQTLSALAKEGEISYRVRYRPPQHWISRPLFVSGYGVELALKRTDYIVIDDRDAEQRGPNSIESAGTEEAPDDLKPLSSSEVARLGLNTVSYVANSEDPLNTLVKLSQDFPKYSATIAAYNASTQLHKEIKANRLGMLPPGASAIWINGIQIDPRQIDAFFLVDHLRRERKLIDSFRSLGLSAKQAVDLMTHETVTEATAQGTPQRYDYRDESEGGGVIIWLNDLEKDARYESWPNQLTAFLQRTFPGQLPAVRRDLNNIVFPVDLTRMDDVDLIVSTIQMFVKRKIPVRFGIVPLATSEGSIAQLKVAHYLQETFGLASLMTYLEQGLKRNKLAVPDKTCFLKATEDRTPRGEKQPLSLDDILTNEGLDTSVSRTGQYQNRLGIKAGDSLIFVNGIPVMRGENWPQEMSAKIERDLRLVQQGIAEGLFEEDAWLPSFFLSQTFGRRVPWIVPEDPKDIELVDLVKVAAQLGALLDKVPRVAAHVEPLESVHVVVVGDFGTRAGLKMLISTLEMQLKQDKTEILLVHNPEDPLTNAAASSLIYRSLKEGNGVDSTRILADITSSTSSDVDAQEASEFWLKFQPLVEALGLSSGMNGIIVNGRVIKPSQDVTAEDLGQLLLYEDINRIGPVTKAAKDLGLGSRIPDPLSFAKLTSLMAISTVSDVPEGLYETSSDVRVKFFEEWNESSSVITVPGPEDPVITISASLDPTSEMAQRWLPILKVISDLDGVRLRLFMNPRDELRELPIKRFYRYVLDAQPSFSQDGSVSRPTATFSGVPVEALLTLGMDVPPYWLVAPKESIHDLDNIKLSSVKGGSDVDAIYALEHILIEGHSRDITTKSPPRGVQLVLGTEDNPYFADTIVMANLGYFQFKAQPGLWTINLKPGRSEQIFNLESLGRLGYSPQAGDDSNEVALLSFQGKTLFPRLSRKRGYEDEDVLESGLKPGSAMDFMSKGLNFASNVLSSVGVTSKSSDPNADINIFSVASGHLYERMLNIMMVSVMKNTKHTVKFWFIEQFLSPSFKSFLPNLASEYGFSYEMVTYKWPHWLRAQKEKQREIWGYKILFLDVLFPLSLDKVIFVDADQIVRTDMFDLVSYPLDGAPYGFTPMCDSREEMEGFRFWKQGYWKNFLRGAPYHISALYVVDLNRFRALAAGDRLRGQYQMLSADKNSLSNLDQDLPNHMQHHIPIKSLPQEWLWCETWCSDESLSRARTIDLCNNPQTKEPKLDRARRQVPEWTEYDDEIAALARRVAASEVEVEVEQQILADEIEEEKEAAASEWKKDEL

SEQ ID NO: 4242 - protein, 1501 aa, Onthophagus taurus
MKFTTTLIYLLFLNVYNVFGRTKKAKSVTTLLEAKWAVTPLVLEVAEYLADENVDLYWSFIDSICSLDPALEKLGSDKEKYNIIIKHAAKFTTDSQLSVLKLGLSLHIYSPKIEMFSQMAKEVNLPECPIVADVGGTFTCDVKEAKELINKLKESGGKHPEIFNVDTHFPGSQNRSLTVILYGELGTVDFCKFHNLLKNEAQLGKIDYIIRHFVKERPERRLRLSGYGVELQMKSTEYKAQDDTQLHDDSSSEESSQEEEDFEIEGFNFSKLKTLFPDHKKDLDKFKQFLEDSSNEMAPLKVWQFQELSLQAAERIMNAPKEEALKVFTNIAQNFPMQAKGLVKTIVNEKLKDEMRKNSELFSSHLNLQPSDTALFINGLFYDVDLVDVYGILDILRQELRTIDGLHSIGVGSSRLSSLLALDFGDSSSTQEFAIDIRDSAINWINDIENDAKYHRWSSNLMDLLRPTFPGMIRQVRRNLFNLVVIIDPLDPKVRGIVKLLESFVIHIAPIRVGIVFSVNSSPVVTGLEDAGVAMVCAFNYISQNKDSTTALNFLHHIYSIAKSDEKITVEDISNYIRKKYDDDPNDILGDDSDYNFGRQLAEDFIQRTGLKGFPQALINGIPIQSSQINVDDFEEALLQEVMSQTPIFQKAIYRGKLQERDDVFDFIMSQPNVMPRLNERVLNKEGSVYLDLSGTPCSTMKIDDLIKLSPRDMTATALENLKYFTSQRKIEKYHSMTYWIVGDLNDEKSRRLLSEALDHMKSNNDIRVSFLPNVDGDNRDNYLNKLVLAALNELPAKEAYNFVVQLLKDPKIEVPTQLKNKIESQELSLKMLRVYCQRVLSFNDTNRGVIINGRVLGPFETNEDFTGDDFALLDQFTSTTYLKQITETLDQTDDDNVLTTNGLLRIISILNSRPQTKSRFEIKYVGDEHSVLKFPASDPNKAAFDIVAVVDPVSRGAQKIGPILQVLQEVLNCNIRVFLNSVEKNSDMPVKSFYRFVLESEIHFGEDGKQLLGPSAKFGNMPTSPLLTQNMHVPENWLVEVVRSVYDLDNIRLEDVDSNVHSEYELEYLLVEGHCFESTTGSPPRGLQITLGTEHKPVIVDTIVMANLGYFQLKANPGAWLLRLRQGRSADIYDIVSHEGTDTPQNSSDIKVLINSLRSLIVKLKVQKKPDKMYMDLLSEEEPNGGIWNSIASSFGGNEEDADEKLNIFSLASGHLYERFIRIMMLSVLKHTKTPVKFWFLKNYLSPQIKDFLPYMAKEYGFEYELVQYKWPRWLHQQTEKQRIIWGYKILFLDVLFPLDVKKIIFVDADQVVRADLKELQQLDLGGAPYGYTPFCDSRKEMDGFRFWKQGYWRNHLQGRRYHISALYVVDLKRFRRIAAGDRLRGQYQALSQDPNSLSNLDQDLPNNMIHQVAIKSLPQEWLWCETWCDDASKQYAKTIDLCNNPMTKEAKLTAAVRILPEWKGYDEDVRRLQQKIDSGIFDNDEEEDVQGGNDIHTEL

SEQ ID NO: 4243 - protein, 1529 aa, Dendronephthya gigantea
MAAVRINKVVKKKLLILLAVVAVLVKKSFCTSKPVIATLDAKWPSTPISLESSEFLAKEGNDKFWEFVELTKSYHNYETHLDQYNFIIESAGKLLSPTLLNLFKFSLSIRYFSPTIELFNQVSKQLSVPDCAAFIEVDSQVTCDLDEAVRLIDNSQQQSSDIYTFTFDHVYPSSGNNPVTAILYGELGTKIFGQFHEKLQELVQEGKIRYLLRHYVQNASKDKVRLSGYGVELAVKNTEYKAVDDSKIEGDKEDTMNKDKEEEKDIDGFLFGKLRKLHPDLNEQLEQLKSHLLENSKIMAPLKVWQLQDLSFQAAQRVMSTDGDDALNVLQDLSQNLPSKARSLVKTKVSEEMRKEILSNQQEFRKYDIHPGSTELFINGLQISVEDLNTFSLLDLLKEEGKVLDRLSSIGVKGKDLASMLTMSVEGEEESYAVDMRHHSVFFVNDLEHDAQYRDWPSSVTELLRPTFMGMLRYIAKNIFNLVLCIDPLASTTSELINLVDEMIQNQMPIRFGLVLVTEVDDNDVDGRSDAAVGIARSFYFIANDDGPDAAFIFLTKLYANSDGIPTADEVYSQFKKQYSQEEADEILGPNTDHDDLRKSAKLFFDRIGLRRLPQAVMNGVPLDIEDISMFEEMVGREIMIQTGPLQQAVYTNQLRDDMDVYKYIMEKPNVVKRLNTIIQDSTRPRIDLVGRPWTEDLPGTIEEMKALGNDHLVDIVRRNMNYFIGKNEMNLRPITYWIITDLKNTEGRKLFAAALDQMVKSENNRVGVIYNGVDPEYSLPVLMEAILNSDSYVTSGIVSLVKSILNDSHDYDELSSSIDAIIDLATSVKGFKIAKLKENLERNRDSYKRKAAIHQLFCDKVLNLKKGDIGIVVNGRVLAPLQKKDIFISDDFELLETLDMDTYARKIRNQVDGLEFEGLDANDDTSEYRSDVIMKLSSVLGLRSKKNRQDVSFKEEHSMLHFTNAETGINVVALMDPLSNGAQKLIPVLMVLRDVTRVNMKIYMNCREKLSEMPLKRFYRYVLAPNLQFNEDGSLSSGPHAMFRDIPETPLLTMNLDIPQAWMVEAVKSPYDLDNIYLKEVEQSVVGNFELEYILIEGHCSDMNTGQPPRGLQFTLGTKSNLEQFDTIVMANLGYFQLKASPGSWILQLREGRSKEIFDIESISGSSTAKHGSNEIVVVDNFLGEFLKAKVKRKSGKEEADLLADEVGQENGGLWDSISNIVGGGKPSASSNETINIFSVASGHLYERFLRIMMLTVMKNTKSPVKFWFLKNYLSPTFQSFVPYMANEYGFQYEFVQYKWPGWLHHQTEKQRIIWGYKILFLDVLFPLSLKKIIFVDADLIVRADLKELMDLDLERAAYAYTPFCNSRTEMDGFRFWKQGYWRNHLGHRPYHISALYVIDLKRFRKLAAGDRLRGQYQGLSQDPNSLSNLDQDLPNNMIHQVPMKSLPQEWLWCETWCDDASKPAAKTIDLCNNPLTKEPKLVSAVRIVKEWPDYDNEIKRLQERVATNRSQSPRDERNNEAPEKDEL

SEQ ID NO: 4244 - protein, 614 aa, Cordyceps sp.
MSHAAIEIGDAETASIHLAGLLDPVSEKGQRWAPILKVLSELDGVHIKLILNPREKIGELALKRFFRYVMDAEPSFDQSGTVRALKASFRNLPSEALLTVGMDVPSAWLVAPKESVHDLDNIKLGSIKSNVDATYELEHILIEGHSREGLGRPPRGAQLVLATEKEPMVTDTIVMSNLGFFQFKANPGFYNIQLKEGRTAEIYTIESIGSQGWAAVPGDKGTELALMDFQGTTLYPRLKRQPGMEQEDVLDQESAFSTAGLFSKSWKLAEGLLGGGKTKSLSAQEHAEINIFSVASGHLYERMLNIMILSVMRNTKHSVKFWFIEQFLSPSFREFIPYLAEEYGFEYEMVTYKWPHWLRQQKEKQREIWGYKILFLDVLFPLSLDKVIFVDADQIVRTDMMDLVKLDLKGAPYGFTPMCDSRTEMEGFRFWKQGYWANYLRGRPYHISALYVVDLRRFRELAAGDRLRQQYHALSADPGSLSNLDQDLPNHMQFDIPIHSLPQEWLWCETWCSDESQAKARTIDLCNNPQTKEPKLDRARRQVPEWTVYDAEIAELAKRRLHRGPGKKAENDAAPIGDNAATDARGAKQKESGPREINTKGCNWDERAHCIDEL

SEQ ID NO: 4245 - protein, 1378 aa, Trichomonas vaginalis
MILAFFFLFTSSSLLKDRQVNVTLDGSWPDTPILAEAAAFIADANGEAYWTFINGLQKVEKYPETIEEIKNYALNFLTEELRALLELSLLTRAYSPRIEMFREILRNHTKDMNKLAAFYADKLYYTQEDLKNAIEESPKSRPLVYSYEPRNGNLRDTIILYSLINDSALFSWIQFLEDQEESVSFIYRPVGEFTTTPVKFRGYGFEMRPFNYTMTYSKESDENIIHGEETPDTELFINKKIVPGPNVPKAMDLATQLIQFVKTTDDPFKSLLEVCENFPLYADNISRIPAAKSLRDKIFDRLENIISGASAIYVNNRVVLNPDVYHILQASLDELRIAQMLREYFTLTPEAHNKSLSLIQRTRPPKRVIVDYQSDFIFNLNDIETGKIYENWTTDLSSLRTTNPQNIKRNIFNAVFFIDPLNPYDMKTLKFMDNQTRLRAPIRWGYFVQPRSTNKLSKRVMNAWSHIRLRHGFRQAHQFLLDAAKEMVDEEDEPRIAHFNAALAKMGKKKTLTDFDKFDAQSREKKYLKKMKNFQERLGIHEQGCLFNGRFYPGESQEENIVQFMRDSLKRLRKKMAEKILKNSSIETVSGILTGDDVFNRYNPLIQHTDKSPCEFIPLISQSFYFQREFMEWSKKIRYNQEPQKVKFNTIWVFVGEELTGSLESKHIAFQTEEWLKQGIPQNTRLAFFSETTTSNIIRNSMPPPFVQDLLKLQPDEVTVVMNGRVLRMKSRMIFNWHLEDFNVLIKWEYHYSVSMIQSYFSEDVALNYEMLGNQVDDVNTEFHSQLAFYFSLIYGMASHTRISRYPSDNRVFKPSNPAVMNYDNPDSFVHYAIMLNPFELPFQAIAPIVQFLRNSKAFDVKIMINFPTKDIDQFPPNLRAYHRFLLYDDSIQFDRFESQTVYSLMPHPPYNWMVEPVSAPFDLDNFRPREVNPGTTCSSYRLTSILLEGSALDEQYIPVHGLRITLDMDKKGFHDSLSIKTMGYFQLKTQPGIWEISLGEGPSRTVYNISSRNQFSISSFVPPWMTMRVNHNDGMSRYTIYELPKNLKLSMSNDTETVNVFAVVSGYLYEHLVKIMMISAIKNTKNPIHFWFLKNFISSQFMNDLPKFAKKYNFKYSFVEYNWPSFVVHQSERQRIIWGNKILFFDALFPMNISRMIYIDADAVVRGDLSELMKIDLKGCPYGFVPMGMSRKEMKKYHFWTTGYWKNHLRGKKYHISAMFVVDLDRFRRMGGGDKLRKHYSQIVGNTKSLANLDQDLPNDAQDEVPIMSLPKKYLWCCTWCSEKEKDKAIIIDLANNPKTKMSKVDMAKKFIEEWPLLDDEVKHIDDPDYFCSYDLKKIRQEHTEKVQKAIAEVRAKKLAAQQEKKKKAGVEDDDEL

SEQ ID NO: 4246 - protein, 1604 aa, Gloeophyllum trabeum
MKCGVAFYVTWAACMGLVQAASSPSVSVSLRTSWKAPSILLEIIETVSLENPSAFFPLLDILTNSHSSNLPEHATPEAIYQYALETTVSEGLLKEPSAKALVEMNVALHAATPKIEAFYQYYRDRHGGLDEECRSWVDWYSQKVHDVETLAHLAGHETIDPNSSSNETSIPAPFPKPKLLPFDHVYPPLSHLRDRPPHTAILYGSPDTRNFRELHEYLLSLANESTPRVEYVFRHKPPCNKPAEGNEQSYLSGYGVAMDLKKMDYLALDDRRAAGQENALVDAISVDPILSLLQEYPENSTADYTAQLDETELIGKSAPYLIVNSSAPLATLKHLAQNFPKYSKAIARRVVINESLLEEVGSNQLKAQPGASMVWLNGNPVPEQDMNPFGLLKLLRKERTLVGALASLGLTPAQAVDLLTHPAISASQGGSDVLDGIFDASDRPEGGDVIVWWNDLEKDGRYARWSPTIRGILRPIYPGSFHNIKLNLWNVVLVVDLSQSSSLNFLVGTVSNIIQRNFPFRFGVVPVVETEEGLKMARLFYWLVKTYGRAKTMGFMRKISQVQGRPQYLSPTVDWHTVQSELQALIKSEEPPTSDFVPPTLDAILEGDGDERDIQASKEYCTRLGATLGASPTGHAFVNGKHYDLDDDFLRHMQIEVGAQLQHIQEKVYMGEITDETAESISTYFYDLPSASKRRHPLIYPAASAPNKPGSLQIRSLPEVFARIGRPLGVESYLYPPGSSQLALSTYVVADFDTTEGMALLMNVLQSMDEASPSRLTFIHNPAVSGVPSWTERPMSTLLSHLVQNGLLRGATPEKLLKLLGLASPATQDRHPQIVISNEDAFDDLIAGIGASDAEVHTETYRDYVSLSQSLVKELGLPAGEQALIVNGRTIGPLKGAQFLADDFKELYTYELRKRVEPVSQALQEVASSLDFCPHIISMGTFTDVVSLASSIISAMQIPDPSESGLFNAAYRPRTRNYRLMEGNYTRFEVGNAATALHQFGVILDPLSEAAQKWSSLFEWLSNIDEVYVEVYVHPAGYSDIPLKRFYRYNLTPKLSFDPEGREVRIATVFEDLPLEPIYTLGMDVPPAWLVRPREAQHDLDNIQLGAVSVKEWSRGVQAVFDLDHLVIEGHARDTLTNAPPRGLQLQLTTANSTPVADTLVVANLGYLQFRTKPGVFQLEIREGRGREIFNTESVGNEGWDSPSVDEVGNEVTLTSFEGLTLYPRFARKTGMEREDVLEDYDDLLEESDSDSIVQKVWTSISSFFAPKSEAPKTQALEPQQAEINIFTVASGLLYERFLSIMVLSVLRNTKSTVKFWFIENFLSPSFLEFIPHFAEAYGFQYELVTYKWPSWLRAQKEKQRIIWAYKILFLDVLFPMDLKKVIFVDADQIVRTDLKELVDLDLHGAPYGYTPMGDDNVDMEGFRFWKTGYWKDFLQGRPYHISALYVVDLVRFRQMAAGDILRGHYQQLSADPNSLANLDQDLPNNLQREVPIFSLHEDWLWCETWCSKDRLHRAKTIDLCQNPLTKEPKLARARQIPEWEEYDQEISRFARKLAEEGLIHSEITAAGADILASVAAGAATPVADRSEAAQDKTEGKLPVHEEL

SEQ ID NO: 4247 - protein, 1463 aa, Fusarium longipes
MPCLSQCMAVAILAATAASASPSVNVGMHAAFPRGPYLLELLETAAEENSTAYFPLLDKIASGHFAAASSDADLYDQFLTVLQKDDHIATPEALSTFKLSLSLRASAPRIEAHYQYYTTAVDPGSQVDGADDCQSWALIENQKYCSPDLGTVVDSEISTKQVKVLPFDRVLGRGKRAILYADPTSASFGPFHNALSKAARQGMLSYRLRYRRSAGVGNSSLPVSGYGVKLDLKRTDYIVIDDREADQETQKRTVVADVDFDTQEEVADLKPLSSSELASLGLKTACFILNSENPLDALVKSTQDFPKFSASIASHEVTQGFAEEQEKNVAAGVPSGINFLWMNGVQLIERQIEPFTLIEMIRRERKLINGVRELGFDGQQAVSLLGHSEIASSKANDEPPRFDWTDQLEDGKAVMWLNDLEKDARYQKFPSDLTALLQRTYPGQLPQVALNLFHVVAPIDFTDLEDGRAFGQLAQFMQRGITIRFGIVPLATTPASIAQAKVVYHLMETYGFESLITYLQESEEGPEGAANKRSFARAIETREPLPGMAKMTLSEVLEAEPYVQKVKAGQAWASRLNADTTVRPILVNGMAIPREKNWVQTMGQRLTEDQQTIQKAVYFGHISEGVPVSDIFLNAALSKRNTYIFPDDDKALRILDVNKLYTDHADLFSKIAVLPADTESAKEDWAMLTVITDLNTEDGQDLLLAALDFKRNHQGVRLDLIHNPASPTNAHAINGAFKLGEAKLAEMRSKDDLKTVLEASWTAEDDGLGTALANFLSASHIQSGTKSLLLNGRVVGPLPVHVLFKNDDLKQLLEFEQRNRILPVYAAIKELGFTDKLSDPIAAAKLTSITALSTISDLPQGIFESAPSIRSTLYNTWNSTHSAIEVGKPDTASIHIVGLLNPTSEQGQRWAPILKVLSELDGVYLKLFMNPKEVIGELPIKRFFRYVLDSTPSFDNSGHIQSPQATFKGLPSEALLTAGMDVPPAWLVAAKDSVQDLDNIKLSSVKTDIDVIYELENILIEGHSRDGKRGAPRGAQLALATEKDPLVTDTIVMANLGYFQFKANPGFYNIRLMEGRSSKIFNIESVGAQGYGAVPGDEGTEVALMDFKGTTLYPRLSRKPGMEEVDVLESLDSDDDGIIAKGLKFAESLLAGIKSPKEISAQEHAEINIFSVASGHLYERMLNIMMVSVMRNTKHTVKFWFIEQFLSPSFKEFIPHMAAEYGFKYEMVTYKWPHWLRQQKEKQREIWGYKILFLDVLFPLSLDKVIFVDADQIVRTDMIDLVNHDLEGAPYGFTPMCDSRTEMEGFRFWKQGYWANYLRGLPYHISALYVVDLNRFRQLAAGDRLRQQYHTLSADPNSLSNLDQDLPNNMQFAIPIHSLPQEWLWCETWCSDESLTKARTIDLCNNPQTKEPKLDRARRQVPEWTVYDNEIAALDQRRKGIADKNTNVDSRKSEDGTHTKDEL

SEQ ID NO: 4248 - protein, 1241 aa, Trichomonas vaginalis
MFFFFSLSFCKFNLDHQIVIDTKVPWYESTTFDQYFVGLAENSNKKAAEFFKNVANKHCHTDKTCMIQILNSILDKKSANTIISREELNDLLPIIEFNREQARSYRGSNFEDLFIVGSQPDFEYNCIYFNNENITVLPTEFQLGNNNTIVYANLSNPDTFNFVNNLIVNKKSFVLRPTSQGKFGLDVRGYGIELRPFKYSMEYGVKDDQRSSENSETNPEIYDETLSNFDNIQDMKPLQSDIHISKPAFTQYFDENEQPFLKKLTYIAENPSISLPILDSMYNEQENQNVSIDTTIPIKSINGRSISNSEIDTFTILNIINQERNAYEVLKNESHESLDMFKIELPDKTAHRFDYRNKFIAWKNNLEKDQISKDYKVTREELSNKNHIPRVKRNLFNLLVTADPTTQNGVYKYLVMEKIMDKGYPCRFGGLPVFNLNDPLSRKAAFAYAYIKQFSDSLAFDFLIFSAKFTGFDARTYQPLFPSEESIAKAYTYVTKTIKDATSWHDLYKYFSPLSKIHSYVKEMTQKVTDKKLNEYMTIFNGYVFYSLYTDSLDGLLYKEQDYLSSLIEENVIPENFDIFDVFNKFTYVSPDIESKYSLTPILSLHLLNQPKKIMKKFMNFLKNSFDDEFNDFVIVFTESNQEKIENQLKQLNVSYLINPKLPEKLHKALGIEKEMLIVNGRVFYNFDDIQKHLKWTQNFISRLYRKVDCKNYVKFFFYCLTSNFYENDIHRNKDSLIINENDRLSFESNSMSDFTFEFTCNPFDESDQKLIPIVNYLNEKDVIDVKIQLNIPTSVSGQSNNVYRMALDKSEVIFGAVDDLTTYSIIPHFPQTFVCEQMRSEFDADNILTSLLTPGIHKCSYILTNVVANGLTNSSGFAIYLGDKNLSKISGTFLSKSGYWQIQANPGLFDVVLSKEYISSYKTEKSTVFVNSFAQKDNFVTFSQFSSFEQVRTDPKTIETVDVFIVASGQLYERLAKIMMISVRRHTNSSVRFWILKNYLSPSFKASLPKMSQEYNFSYNLISYNWPANLFKQKEKNRIIWANKILFLDNIFPPDLKRVIYIDADQIVRSDLSELMKLDLSGAPYAFTPMCDSRTEIEPYRFWKRGYWQKQLRGKKYHISALFVVDLERFRQMDAGEILRDVYQDLAPDPNSLANLDQDLPNYVQDALPIYSLPQEWLWCETWCSDETMNKAKTIDLCNNPLTHKPKLEIALERVEEWPGLDEEARRITAKPDEYMKNFF

SEQ ID NO: 4249 - protein, 1075 aa, Eutypa lata
MALMQMTYPGQIPPIAKDIFNVIIPVDFSNPDDLSLVIEQIQAFIKRQLPIRFGLVPITTTKAAEDQAKIVYHLLENYGLGSLISYLESYQTERTISEPQQANFDSVTKDRAPRSEATPLPFKEVFEAEHHVKQVELAKHWTERLGADTAVPPIFLDGLSIPRTDGWIKAMSMKIGTDLQTVQQGIFAGTVDDDMWIPSVFLEGAASRRNIYIFPDADNPLSVLDVNKLSVEHTDLLSLVPLIEESKDTSKETWATLTLVADLGTTEGLNLLLSALAFRRNNPGVRLDIVNNPLEITRAHEINSILRKDVEKLLEVENLETLEVLVSSDAVGEDEGYGAALSQFLTANAFKSGDQLIILNGRVVGPIAPAALFKEDDFQLLFEFEQSNRILPVYKAAEALGISEKISDPIAAAKLTSITALSTISDLPEGIFESAPTMRTDMYDEWNSTYTSFDVGDVSTANIHFVAVVNPTSEIGQRWAPILKALSELEGVYMRIFLNPRERMEELPIKRFYRYVLDSAPSFDENGKVRSLGAIFKGLPSEALLNLGLDVPPAWLVAAKESVHDLDNLKLSSIKSDVDALYELEHILIEGHSREGKSPPRGVQLLLGTERDPHFADTIIMANIGYFQFKANPGYYNIQLKEGRSSEIFDIISVGAKGYNAVPGDEGTEVALMSFQGTTLYPRVKRKPGKEEEDVLEQSESQSGGDIISRGLKFAEGLLGGSKQKALSPSAEEHAEINIFSVASGHLYERMLNIMMVSVMKHTNHTVKFWFIEQFLSPSFKEFIPHLADEYGFKYEMVTYKWPHWLRHQTEKQREIWGYKILFLDVLFPLSLDKVIFVDADQIVRTDMMDLVNHDLEGKPYGFTPMCDSRTEMEGFRFWKQGYWSNYLRGLPYHISALYVVDLRRFRELAAGDRLRQHYHTLSADPASLSNLDQDLPNHMQFNIPIHSLPQNWLWCETWCSDESFVEARTIDLCNNPQTKEPKLDRARRQVPEWTAYDEEIAGLHRKVKGLPPSPDEGKKGSGSEEVAGHKVFVGDRGQKVLGGEGGGEEEPKNTKSRTLEEQPPKSTQDEKDEL

SEQ ID NO: 4250 - protein, 1324 aa, Lachancea quebecensis
MLFWALLVWSHTIFASCATVRFPNASSGDKLRLWNAVAGLVKDEQLVQDLYFLIAGVSDELDGLDGGDSLLEQAASVLAHHNPEVASLLPLWYALEPGFSKDDSNQNYFLLNKKRFEHADDLFYLKTDDLNAQKSVCINDILDSGDVVIGPNRDAPVILFYGCDRAEDWEEYNRNLYMEALAGKIRFVWRSTCPNDLPFEFEPTAVALTVKDSQWNSPFDHAFDLPEGLSSGRATRSRAQQVKDEQLKDLDMKAGTLVYDFYEKSQNASETIRYFRQIVNNFPIVARPLAEQKGPQIDKRWEGALKKFAKEGIDNTMLGLFVNGQYHKLSNLDQWSVLQSITLELNRIDFLMTLLQKYQNITSEESLILAKQLLNTFSTRSLVTHQLLQPAKYDLHRIPGFSESIIYFNDIELDSDYAEKLKDDIAMFFEESEFGELPAYRENWNEVVFVIDFSDLRSKDTWEALQGMLRALQIVKKGYPQRIGLLPFSTDPQDYGILRKIYELKQSKPLESLESYLEELSPTERPIESVFQELPPVLDIISDRLKIDKTSIVINGEIYPFKSNLWNYLVSKVVKKDVSYIKNELIRINNRNFKAREILHAKSFIERNRKYAPDFFEDATYSNTNVTALLSLAHRITETSTGGNLNTIHTVTVVEDFNTPTGLHRLINLLQIKLHGVRIRAVHSGSLGKSWDKLKPFISSADIPKLQNYKSSLKLSRNCNHAELDIASQWLLDLPRDLLQNTSYLAVNGRFIHMEQGEVPTTYEYEMIVQREATRVLDAVASLQEVFPSALEQPLDPDYVEMVSAVLTKMFYDGESLYNNGIDFTAETSISRINLGDLLPAEGFGAFQTTKEPRKVDITLILDPLEERTQNLLALASDLAVLDFVKLQIVLMPTTDLKIFPNHRIWIESERDLSIIDTRKFFVDVEAPSNLHIGERKGDVFELEYIIVEVNAFDDKEEPSKGLVEGVGDVCLKLLNAKHEVLDTAITTDTFGYAQFKLRQLEQGLTVESCSSDYRVSSFSSNSKADYISSDKFDVTSLVPTRLYVRLEKAQEKQPSSSEDKHTINIFSIIETMDEEAIFEKQVISAMRTRGSFNIKFWIILGEEPSSSFPTLIENISAESEGEVAFDYLTVDWPRWLRPQRFRPRQLAAAKVMMLDTLFPKDVSKVIYMSPGTRVPNVTELWEYNFDSVFCAPRAYQRDGTPYWKQGYWHNFLSKNNLKFHTTEPMFIVNLDKYRQEHAGSKFRIHYQRLSPGINFLVQLDQDLVNDMQTLYPISSLNKRLLKVTPHLQILDDSYYQSLKDKFNNQKSEQGHKESLEEIVHDEL

SEQ ID NO: 4251 - protein, 1605 aa, Coniophora puteana
MVNRALAAASVLLALGSGHGAYGASPPVKVSLRSAFPAADTLFEALEAIALENSTALFPLLSHFPLSGLPSSYTPQDAHTRVFDLAQEYKLLDGGSLSSARTLLGLHAAAPRLAVSAQHYEDRLQQETSGRAGGKGCESWVDWYGEVLCDAEELKTKVSSAPGDPDYMAFKSLPFDYAHALPPSLDEPPFKVVHYADPTANGFAPIHAALLSLEPKVEYVLRWARTARSGESEGSLTDYLSGYGVALDLKKMDYLVIDDRAHRSDDAASSTNDEDLKTEEGEAMRTPEEILTCIFESLPYVDEAAKERAKANEPLTEDEIAALGMKATQFISRFSSRPHDASLYVHPCWDNHHQAPPDQLTLMSVLSRSFPLYATPLARKVELTEGVVDEVYENWEKATPGVGALWINGRALEQKDGQDGNIFSLLRTIRRERALVQSIMDLGLTGEQAVEVLMHPAYTKWADALDGIVDASDRPEGGDVVLWWNDIETEDRYQSFRPALTGLMRMHPAALFSPMLQIRANIINTVLVLDLSSPSSLAFLSNQVEGIVARGYPVRWGLVPAVETDHAMVMARLVYYVHGRYGSKAMVGFIKSVTGNHDHIVSWDAVRSVFASFEPAHTFDEVAEGVVPLSKPAEAGETQEEAINDQLDVIKKARQYSKRLGQPKNDGLGGHGFVNGRYIELNDWITFSQGFQTESMLHLQFLQELVYTGQLKDTDIPLVSTLFYDLPGTPSRRNPYIHQAQAKGDAKIFSLPELFKESGFTRGKDAFVVPEGSEKHPITMYVVGDFDSPAGRAVLKESLEFTKLNSRSRVTFVHNPATDSDQLIRKLGLEAHTFEHSSQKSFSIEEFDDVLQKDVALNRAPTKLILRKLGLAPGDLAILVNGRLVGPIAPESGFVAEDFATLESYELKKRVERVEIALDDVLEQDSEKPRDAATYSHLASMISSIVASIQQPDPSEVGLFDAAQRPRSASYRKLSGQYTLSWIGTKDYSKTQMTLLIDPLSEMAQKWSSILDCWFDLFPDVYLEVYMNPTQHSEIPLKRFYRSNIQSRLQYNGQGQEVPAIVEFAGLPVEPIYTLAMDVPPSWLVRPREAMYDLDNIQLSTLSPEDRTTGLQALFALDYIVIEGHARETIADSPPSGLQLELTPTSSTTSESNTTTVPVDDTLVVANLGYFQFKAKPGVFELGIREGRGREVYMLESVGAQGWDSPSVEKVGRELAVMSLEGATIYPRFGRKPGMDGVSVLEQPEAYDAHSGGILDNIVVSEFLSPKARQTDLAVSGKPQAEINIFTVASGHLYERFASIMILSVLRNTKSTVKFWFIENFLSPSFLEFIPHMAEEYGFQYELVTYKWPSWLRAQKEKQRIIWAYKILFLDVLFPMDLKKVIFVDADQIVRADLQELVDLDLHGAPYGYTPMGNDNTDMEGFRFWKTGYWADFLNGRPYHISALYVVDLVRFRAMAAGDMLRGHYHALSADPNSLANLDQDLPNNLQMSVPIFSLDEDWLWCETWCIKDRLHRAKTIDLCQNPLTKEPKLSRARQIPEWDLYDTEIANFSRRLAEQGKIHSSAATADTTVLANEAAAKAVVADGAERSEDPPGESHSGGRQVDEL

SEQ ID NO: 4252 - protein, 1313 aa, Nilaparvata lugens
MLLLQKTVFRLSPLLVLLSCLCLLVSGGSGGSQTAGKKKSKAVTTVIDAKWHSTPLVLEVAEYLAEEGSHLFWQFVDAVSQMQPPLSHISTEKAAYDAALDLVRQGDILSAGQVSVMKLALSLRAHSPRVQMYSQMAAERGMAGCANGVDLAGDLLCSPDKLDDHIDAVLKKDPKSVTRLETFRLDHYYPGADNRSVVAILYGELGTPGFAEFHEILKKRAAKGEIDYVLRHHVKEASNKRVRLSGYGVELHMKSTEYKAEDDTKVSDKEKGGEGQPEDDEEEIEGFNFSKLKQMYPDKKEELDKLRQELLETSDELAPLKVWQFQELSLQAAQRIVSAPIEEAIKILTHISQNFPMQAKSLVKTRVNPEMKKEIKMNQDIFANTLNLQPADTALFINGMFFEAENIDMMTILDTIRQELNIMEGLYKIGISDKSTLSKLLALDFSTATGREYAIDIRDSAIQWANDIEADKKYKRWPSSLLELLRPTFPGMLRSIRRNIYNLVIIGDPSQRAVWPLIKMAESFHLHSSPLRIGLVFAVNSTKGTGLNHAGVALLNAFNYVAETKDSFDALSFVTDVYASIKEPDRDVLPGDVYKLLRSRFPSSDPDEVLGADTDYDTGRQLAADFVRKSGFRTFPQVLLNGIPLAESTLTADDFEDSVFSEVMIQTPTLQKAVYKGELSDAMNVLDFIMDQPNVMPRLNDRVLNLGKSRYVDLVDTPSELSKSVMLSLKYASASKKEQKSAHLLTHWVVSDLSTQKGRNLLLNALEQMRSSGRIRVGFIANPSSSDTKLDRLVVAAYETLTADQAAVKIKRMLADYDDIAAGKKDHSDYDLTNVDWPSVDRKVEEHRSFAKQVAWLEGGQLGIITNGRLLGPLADDEEFTVDDYGLLERFSLSAHVEKIHKTLNEGVEPGEDMVSSDVLMKTVSLLVARPQTKSRFQVKAAGEKHSVIHLPAAVAEQPAFDITVIVDPVSRGAQKMAPILTVLRHVVNCHIRIFLNCLEKNSDMPLKSFYRYVLEPEVQFTADGHLASGPYAKFTNMPGAPLLTQNMHVPENWLVESIVSPYDLDNIRLEEVESAVHSQFELEHLLLEGHCFEATMGNPPRGLQMTLGTETQPVVVDTIVMANLGYFQLKANPGAWLLRLRQGRSAEIFDITSHEGSDTPVNSTDIKVLISSFRSHVLKLRVTKKPDKIGMDLLGEDDDSQPGLWNSITSTFGSTKEEQVEAETINIFSVASGHLYERFLRIMMLSVLKNTKSPVKFWFLKNYLSPTFKDFLPRMSKEYGFQYELVQYKWPRWLHQQTEKQRIIWGYKILFL

SEQ ID NO: 4253 - protein, 1513 aa, Trichechus manatus
MGLLVSLTCLWLLSAVKADSKAITTSLTTKWVSTPLLLEASEFLAENNQEKFWNFVEASQNIGSSEDHGTDYSYYHAVLEAAFQFLSPLQQNLLKFCLSLRSYSATIQAFQQIAADEPPPEGCSSFFSVHGKKTCDFDTLETLLLTASERPKPLLFKGDHRYPSSNQESPVVIFYSEIGHKEFSTFHQQLVSKSNAGKINYVFRHYISNPGKEPVYLSGYGVELAIKSTEYKAKDDTQVKGTDVNATVIGENDPIDEVQGFLFGKLRDLYPDLEGQLKELRKHLVESTNEMAPLKVWQLQDLSFQTAARILAAPVELALVVMKDLSQNFPTKARAIMKTAVSSELRTEVEENQKYFKGTLGLQPGDSALFINRLHIDLDTQDIFSLSDILRNEARVMEGLHRLGIDGLSLHNVLKLNIQPSEADYAVDIRSPAISWINNLEVDSRYNSWPSSLQELLRPTFPGVIRQIRKNLHNMVFIVDPAHETTAELINTAEMFLSNHIPLRIGLIFVVNDSEDVDGMRDAGVAVLRAYNYVAQDLDNYHAFQTLINIYNKVRTAEKVKIEHVVSVLEKKYPYVDLNSILGIDSAYDQNRKEARAYYEQTGVGPLPVVLFNGMPFEKEQLDPDELETITMHKILETTTFFQRAVYLGELSHNQDVVEYIMNQPNVVPRINSRILTAEREYLDLTATSKEHFRNIFGLLKRMSSKEIYDDSFIRPVTFWIVGDFDRPSGRQLLYDAIKHQKSSNNVRIGIINNPSEEISYENTQISRAIWAALQTQTASSAKNFITKMAKEETAEALAAGADIRAFSVGGMDFSLFKEAAESSKMDFILSHAMYCRDLLKLKKGQRAVISNGRIIGPLEDNELFNQDDFHLLENIILKTSGQKIKSHIQQLRVEEDVASDLVMKVDALLSTQPKGDARIEHQFFEDKHSAIKLRPKEGETYFDVVAIIDPVTREAQKLAPLLLVLTTLINMNLRVFMNCQSKLSDMPLKSFYRYVLEPEISFTSDNSFAKGPIAKFLDMPQSPLFTLNLNTPESWMVESVRTPYDLDNIYLEEVDSIVAAEYELEYLLLEGHCYDITTGQPPRGLQFTLGTSANPVIVDTIVMANLGYFQLKANPGAWILRLRKGRSEDIYRIYSHDGTDSPPDADEVVVVLNNFKSKIIKVKVQKKADMVNEDLLSDGTNENESGFWDSFKWSFSGGQKTEEVKQDKDDIINIFSVASGHLYERFLRIMMLSVLKNTKTPVKFWFLKNYLSPTFKEFIPYMANEYNFQYELVQYKWPRWLHQQTEKQRIIWGYKILFLDVLFPLVVDKFLFVDADQIVRTDLKELRDFSLDGAPYGYTPFCDSRREMDGYRFWKSGYWASHLAGRKYHISALYVVDLKKFRKIAAGDRLRGQYQGLSQDPNSLSNLDQDLPNNMIHQVPIKSLPQEWLWCETWCDDASKKRAKTIDLCNNPMTKEPKLEAAMRIVPEWQDYDQEIKQLQTRFQKEKEAGPQSKENKTEEPSREGPRKREEL

SEQ ID NO: 4254 - protein, 1495 aa, Marssonina brunnea
MGFFTMPWGLTGALLATTYLHSLCGVSAGPSINVGMKASFSAAPYLLELLETAGNENATSYFPLLDRIADGYFTKTSTDKELFEKFVQVLKDDGHMLQPESLSSWQFALSMRASAPRIEAHYQYYHTAAEPSLKGEQDTSCSVWVLFNGKQYCSPALDAAHGDIGGDSQVQELQFDRVLGNSSAPASILYADITSPTFGRFHKTLVKTAREGKTSYRIRHRKSLTAENKPLIIPGYGVELALKRTDYIVIDDRDENESKTASAAPEKEVRFEDEELADLKPLSASELYSLGLKASSFILQSGNPLDSLVKLSQDFPKYSSAISSHDVSKEFAAEHHYNRGQLVPAGNNMVWMNGVRLIDRQIEALDLLDIFRKERKLINGLRELGLTGTQAIQLLSHSEIATVKAENSPPRFDWRDDIEGGNAIIWMNDLEKDKRYAGWSPSLKTFLHRVYPGQLPQCRRDCFNAIFPVNFTNPQDVLLVADNLLNYVKRKVSVRFGIVPLTSTPDSLAHAKVMYHLLDTYGLSAAMAYLEAAYTSQKILAPSAAHFQTAIGERTARNDKKALTLEEVLHPESYQTQIEAARQWVRRLAADSKIPTMFIDGVAIPRDENWLQAMSQKVTTDLQLIQQAIFTEILDEESWLPGHFLLQASTRRNSLVVPEDEKTLKIFDVNKLVGENQEILNNLPRIEADVTAAKADWAHMILVVDLESEAGEKLLATAAVFREANPSVELVIVHNPASDIIDSGLSSDFYQFMLNNDNKAFSSINDLTAVLSAELAAPGQEIQQHALEYWRGGDAIVKFLGLLPGQNAVLLNGRLVGPIPADSDLDEGDLDQLLSYERSKRITPANAALEALGLLDNIANPLAAAKISSIVAISTISDTPDGIFEETSTLRMSQFHVWNSTYTAIETGDALTASIHLTVLLDPASQLGQKWVPLLKVLSELDGVYMKLFLNPKERLEELPVKRFYRYVLESKPTFDEVGALKPLSATFTGVPQEALLNLGMDIPPAWLVAPKVSVYDPDNIKLSSIKTDVEALYELENILIEGHSREIPGGAAPRGVQLTLGTERNPHTADTIIMSNLGYFQFKTNPGYYRIDLLEGRSAEIFNIDSVGSKGWSPTAGDENTEVVLMSFKGATLYPRISRKPGMDSEDVLETKADSKMDLVSRGLNFAQSILGKGKGAVEKQAQADINIFSVASGHLYERMLNIMMVSVMKHTKHTVKFWFIEQFLSPSFKDFIPYLAAEYGFQYEMVTYKWPHWLRGQTEKQREIWGYKILFLDVLFPLSLDKVIFVDADQIVRTDMMELVNHDLKGAPYGFTPMCDSRVEMEGFRFWKQGYWEKFLRGLPYHISALYVVDLHRFRQIAAGDRLRQQYHQLSADPNSLSNLDQDLPNHMQSILPIHSLPQEWLWCETWCSDESLKDAKTIDLCNNPQTKEPKLDRARRQVPEWTVYDDEIAAVDRKRKGLPPISSEAPKVAGERNTKSKTLEVASPTASKKDEL

SEQ ID NO: 4255 - protein, 1484 aa, Penicillium vulpinum
MRAFTGSHISWRWYAAVGALLPGWIVNASPAVNVALQASFDSAPYLVELLESAAEENSTSYFPLLDRIADGAFEDLTTEKELYDRFLTVIKDDGHIQTPESLSSFKLSLSVRSSAPRIEAHFQFYNTSVQQSLMVAQDAVCPVWVHSEGKQYCTSAMERAQQDVVGEFDPRELPFDRVMGDISLPPAVLYADVASPMFKSFHETLSEMAKQGQISYRVRYRPPQHSIPRPLFVSGYGVELALKRTDYIVIDDRDAEQLAEKATESLPTDLDETKEDAPDDLRPLSSSEVTRLGLNSVSYVMDSPDPLGTLIKISQNFPKYSSIVAAHNSTGEMAQEVRHNRIKMLPGGYNAIWINGVQMSTQQIDAFSLLEHLRRERKLIEKFRGLGLSADDVVKLLSHPLLTEDQGDAEEQRYDFRDDLEGNQVIIWMNNLEKDSRYESWPSDLEAYIAGSYPGQLPPVSRDLHNAIVFIDLSDPDHMKLIAGHLQAFINRGIPVRFGLVPSTSSPESIAQLKVAHYLFDAYGMESLVQYFEEYASKSKSGLPDKSCFQTATKQRNLLDEHEALSLDQVLKSEKYNTLVSQTAAYQRRLSFTGDVPQFLVNGIHQGGNWMQGMSMQVSRDLKLVQQAIAEGMFEEDAWLPEFFLAGAFETRNTFLMPEDPRSVQIVDIANIIPLDQDVLSKIPRVLSDMGALESTHIIVVGDFESEAGIKLLTNALDLRKDNDDVEIMMLHNAAVDAEDDVPKNLVSLHLSLVKGETIDQILAKIASGDLDTEALETEDQDISTIQALHQTLAKELGFNPGTEGLVVNGRVVAPIQKEHPLSMEEMRQLIAYERVKRLDSVAAAVDQLGFADKVSTPLDFAKLASLVALSTISDVPDGIFENTPDFRMDVSSQWRTQHSVITVSNTDDPTINVAVSLDPASEVAQRWLPILKVLSELSGVQLKIFLNAKEELTELPVKRFYRYVLESEPSFTDEGALARPQASFTGVPVEALLTLGMDVPSSWLVAPSESVYDLDNIKLSSVKPGTDVDAIYALEHILIEGHSRDLTMKTAPRGVQLILGTENNPYFADTIIMANVGYFQFKAQPGLWQINLKPGRSEKIFKIDSVGGLGYRPQAGDENNEVALLSFQGRTLFPRLSRKPGYEAEDVLETGVQPGSKMDYFAKGLNFASGVLSSVGVGSKSGGEQHADINIFSVASGHLYERMLNIMMVSVMRHTKHTVKFWFIEQFLSPSFRAFLPSLAREYGFSYEMVTYKWPHWLRAQKEKQREIWGYKMLFLDVLFPLSLDKVIFVDADQIVRTDMYELVTHDLQEAPYGFTPMGDSRTEMEGFRFWKQGYWSTFLRGKPYHISALYVVDLKRFRALAAGDRLRGQYQMLSADPNSLSNLDQDLPNHMQHHIPIHSLPQEWLWCETWCSDEDLGVAKTIDLCNNPLTKEPKLERARRQVPEWTVYDDEIAALASRVAGEQAAAVGVESEQTGEDRKDEL

SEQ ID NO: 4256 - protein, 1719 aa, Bondarzewia mesenterica
MDREPRRWVNNAGCMNLKRFVDPSSCVPVEAELPVQTHRHEVGELRAWVERRRIFRYWKLRLWTPEKFEFEATFATFTAATRDMLSQPSGCNLMQRGALGSDIIPWTLEARKAVNSKPAIMRARHALSSLCVAAALIFCSDAASPLVKVSLRTSWPSPPFLLEVVETISLEDPDAFFPILDVITDPETSPSREPLLPEALQQLALQTAISLDFFIKTWRYNPAHIAESRDREACGSWVEWYGEVVCDIERLVHLAGSETIDNANASSPFSHSFSRPRTLPFDHIYPIPSRTLNRPPRTAILYASIESSNFLELHSYLMRMSSSPAPKIEYIFRPIPPTSRGNARTSLSGYGVTLDLKKMDYLALDDRHTSAGGSSAEDDELSENLESAAEPDPVISLLNQHPLKTAHEASEPLTEDELAQIGVQAIQIVYESSDPFATLKQLVQDFPRYASSLARRVVVNPELANEVHRNSFKAQAGASVVWLNGATVPDASMNPFSLLKKIRKERDIMLSLTSLGIEPHQALALITHPSIQAAHGTSGSALDGIFDASDRPEDGGLIIWWNDVEKDSRYARWPAGLHALMRPTYPGQIPVIRANLFNVVLVMDLSQTSSLYYLASTISNIINRGFPVRFGFVPAVESDEDVRMAKIIDYLVNNYGRARTMNFIKKVLQLPMAVQQMPEHVNWELVRSEFQDLIKVEDPKEGGVTMDFDTVTGNTIEELQSKVSSARAYAKRLGATMSSSPQGHVFFNGKHYDLDDVSTISSSFICGFTNMITDFHSNLANGNTEVSPISTRTPAVALKLYQGTLTEENAGDVSTYFYDLPTSQKSRNRHIFPSSNADGLVAYNMPEVIEKTDFVVRPAGFVYPPNINLVPFTIYVVADLDTEGGLSIMESALTYVGASRARLSFIHNPTSPLDGVEERNRVSWLISHLISQDALSGVHPARLLRALGYDTSIVTNDHEQIVLSPDAIFEELTGGVSLDDLDGVVYDDFVRSCRTMARALRLRPGDIALVVNGRLVGPVEPGDFTAEDFKTLENYEYLRRVEPVIRALGEVLPETAEYDQLPRATFADMVSMTSSIVSHIHIVDPSEGGLVNQPQMTRSQNYKLMESEYSGFEMGDNSTALYRFVVVLDPLSEQAQRYTSLFEWLSNFPLTHFAFYINAAPYRELPLKRFYRYNLMPRLVFDESGHEIPSTASFTDLPVEPIYTLDLDEPSSWLVRPKEALFDLDNIQLNVLSSDERQQGVEVMYELDYLIIGGHARDTLTSGPPRGVQLQLTSSAEPIDDTLVVANLGYLQFKAKPGVYRLEIREGRGREIFTMESVGNEGWESPTVEEVGNEITLTSFEGLTLYPRLARLPGMEQEDVLHIVEEPEPTNIISDIFSRVSSLFHPKVTVEVKSASPHADINIFTVASGLLYERFASIMILSVLRNTNHSVKFWFIENFLSPSFLEFIPHFAGEYGFKYELVTYKWPTWLRQQREKQRIIWAYKILFLDVLFPMDLDKVIFVDADQIVRADLKELIDLDLHGAPYGYTPMGDDNYEMEGFRFWKTGYWESFLRGRPYHISALYVVDLVRFRLMAAGDILRSHYQQLSADPNSLANLDQDLPNNLQLQVPIYSLHEDWLWCETWCSKDRLHRAKTIDLCQNPLTKEPKLSRARQIPEWEEYDAEIARFTRQLAVNGRIHSTAATADVNELANAGSSPVRVENSENEIGSEGVQAPTRDEL

SEQ ID NO: 4257 - protein, 1122 aa, Oncorhynchus mykiss
MEGLRSLLIETPFIHDILKLNVQPSDSDYAVDIRNPAVNWINNLETDSRYGSWPYSVQELLRPTFPGVVRQIRKNFHNLVVILDPTHESSAELLNVAEMFYSNNIPLRIGLVFVVSDVDEIDGMEDAGVALLRAFNYITEELDAPAAFDTIISMFNRVPSGGKLSVGDVVKVLEKKFPYVEVGSILGPDSTYDDNRKEGRGYYLQTGVGPLPVVMYNGMPYQREQLDPEELETVTMNKILETTSFYQRAVYMGELATDQDVVDFIMTQPNVVPRINPRILSTARTYLDLSNTNNHFIDEYARFLFLDSREKSTAVANSMNYMTKKDDGYIRPVTFWVVGDFDQPSGRQLLYDAIRHMKTSNNVRLGLINNPSDSPSEENSRVARAIWAAMQTQTANNAKNYITKLAKEETAKALETGADVTQFTVGGMDVALFKSAFEGPKFDFLLSHTVYCRDVLKLGKGQRAVISNGRIIGPLEDGEVFNQDDFLLLESIILKTSGERIKSKVQQLGVEEDRASDLVMKIDSLLSSQPKGEARIEHAFADDRYSAVKIRPTEGDVYFDMVAVIDPVTRDAQKLAPLLLVLKKLVNVNLRVFMNCQSKLSDLPLKSFYRYVLEPEVLFQTDGSFSPGPLAKFLDMPQTPLFTLNLNTPESWMVESVRTRYDLDNIYLEEVDSIVAAEYELEHLLLEGHCFDVSTGQPPRGLQFTLGTPSDPVIVDTIVMANLGYFQLKANPGAWILKLRKGRSDEIYKIYSHDGTDSPADADDLIVVLNNFKSRIIKVKVQKRPEKFSEELLSDGTQENDSGFWESLTRGFTGGVKTEESKQEKDDVINIFSVASGHLYERFLRIMMLSVLKNTKTPVKFWFLKNYLSPAFKEFIPYMAEQYGFQYELVQYKWPRWLHQQTEKQRIIWGYKILFLDVLFPLSVDKFLFVDADQIVRTDLKELRDLDLEGAPYGYTPFCESRREMDGFRFWKSGYWASHLAGRKYHISALYVVDLKKFRKIAAGDRLRGQYQGLSQDPNSLSNLDQDLPNNMIHQVPIKSLPQEWLWCETWCDDNSKKKAKTIDLCNNPQTKEPKLQAAVRIVAEWSDYDQEIKRLQNRVQERGAENHTTQKDKPDDTHIEL

SEQ ID NO: 4258 - protein, 1488 aa, Colletotrichum tanaceti
MMRLSRLPMGFALTMWAAVNVLAVPSVTVDMKAAFPSGPYLLELLETAAGENATAYFPLLDRIAGGYFNEAKTDKEVYDRFLHILNDDGHITAPEALSTFKLALSLRTAAPRIEAHYQYYRTAVEPKLGSDAPDGCEVWAERGGKQYCTPALDTPKESILHAKALPFDRVLGSGSETILYADPTSSAFGPFHSILARKARSGEIEYRLRYTKPAGSHEEALPVSGYGVELALKRTDYIVIDDREAHHDESQKVVNAEEVLDAAVEVADLKPLAKSELQELGLKAASFVMQSQNPFEALLRLTQDFPKFSTSIAAHNVSSDFLAEHQLNRQQLVPSGMNVLWMNGVQLIDRQIEAFTLIDLLRRERTLIDGVRDLGFTGGQAVSLLGHPKVAESKADEEPPRFDWTDDSEEEKVIMFLNDLEKDERYKNFPSQLMSLLQRVYPGQLPPIKRDIFNLIVPVDFSKIEDLNVVAQLNSFIQRKLPIRFGLVPLTPTEDAFGISKVLYYLLDNYGLGAFIDYLDAAMQDSKTEKPDQSVFEKATKDREALPDSKLLPFDDVLQSEELDHVVKLAQKWAKRLNANTPIPPVFINGIPVPRENNWLQAMSMKATDDLQTIQRAVYLGMIDEQGWVPDFFLENAIKRRNTYIYPEDDKSLKILDVNKIYTEHDSLFGKVPVIEAFAESTKENWAVLTVVGDFASDEGANFLVSALAFRRNNPGVRLDVVYNPLTPASASAVNAALKNGGDKFTEAESLSEIRSILDNAAGEPDGIFTAALNEFLSFSAIKPGSNVLILNGRVVGPFTEAEPFEADDFQYLLEFEQKTRILPVYAAVDELGLTDKISGPLAAAKVTSVTAISTISDLPAGIFESAPSLRVSAHDAWNSSYTAIEIGNPETSSIHVVGVLDPASEQAQRWAPILKVVSELDGVYLKLFLNPKDKIDELPVKRFFRYVLESEPSFDEAGKVRALEASFKGLPSEALLNAGMDVPPAWLVAPKFSLHDPDNIKLSSIKSNVYASYELESILIEGHSREGGQSQPPRGAQLVLGTEKEPHFADTIIMANLGYFQFKANPGFYNIQLKQGRSSDIYTIDSIGARGWTPVPGDEGSEVVLIDFQGTTLYPRLSRKPGQEEADVLAEPEDKSIVGRGLKFAEGILGKKKSASDDEHAEINIFSVASGHLYERMLNIMMVSVMKNTKHTVKFWFIEQFLSPSFKDFIPHMAKEYGFKYEMVTFKWPHWLRQQKEKQREIWGYKILFLDVLFPLSLDKVIFVDADQIVRTDMINLVNHDLEGKPYGFTPMCDSRTEMEGFRFWKQGYWDNYLRGNPYHISALYVVDLRRFREIAAGDRLRQTYHSLSADPNSLANLDQDLPNHMQFQIPIHSLPQEWLWCETWCSDESQKDAKTIDLCNNPQTKEPKLDRARRQVPEWNVYDNEIAALDRKRKGLPVEAPKKGENKVGGGDDGEQQKPDVAEEKNTKSRNWEEPPAEKTHVIDEL

SEQ ID NO: 4259 - protein, 1633 aa, Cucurbita maxima
METSCFGSGRRALVVLSLLVIYGGSGAFSEIRRPKNVQVAVQAKWSGTSVLLEAGELLAKERKDLYWDFIEIWLREEGNDADADASSAKDCLKKILKHGRLLLSEPLASLFEFSLILRSASPRLVLFQQLANDSLSSFPLPEENNSNIVGEGNESIERKKSDISVVGLNQKTPGGKCCWVDTGGSLFFDVPELLTWLQNPADCVGDCLQPPDLYDFDHVHFGSSSGSRVAILYGALGTDCFKQFHVTLVKAAKEGKVKYVIRPVIPSGCEVKINSCGAVGTRGSLNLGGYGVELALKNMEYKAMDDSAIKKGVTLEDPRTEDLSQEVRGFIFSKILERKPEITSEIMAFRDYLLSSTVSDTLDVWELKDLGHQTAQRIVQASDPLQSMQEINQNFPSIVSSLSRMKLNDSVKDEITANQRMIPPGKSLMALNGALINIEDVDLYLLIDMIHQDLLLADQFTKLRIPNHTIRKLLSSLPPADSDLLRVDFRSSHVHFLNNLEEDAMYKRWRSNINEILMPVFPGQLRYIRKNLFHAVYVLDPATVCGLQTIDTILSLYENSFPIRFGVLLYSSKFIKETESGDDGLNKSEADTSSLIIQLFLYFKENHGIQTAFQFLSNVNKLRLEADGLADDAPEMHHVEGAFVETLLPKTKSPPQDVLLKLEKEQTFKDLAEESSMFIFSRGLSKMDCSLLMNGLVLESSEESLINAMNEETPRIQEQVYYGHISSRTDVLEKFLSESGISRYNPQIVAEGNSRIVSMFASTHGGEFLLNGFNYLHSPGTTDDLKPVTHLLVIDAASKKGIKLLKEGLHYLMRGSKSARVGFLFTASNHAQESSLLLVKFFEISASLHSHKKKVLDFLDQLCSIYIQKFIPESSEVVYSPQEFIEKACELAEANDLPPKAYRIPFSDSFVDELRNYLGQVERLLSGQLGLESIVNAVITNGRVTLLTDGSSFLSHDLHLLEAVEYKRRIKHIVEIVEEVKWDDFDPDTLTSNFLSDVIMFVSSSMAQRDRSSESARFEVLNAEYSAIVLGNENSSVHIDAVIDPLSPSGQKLSSILRVLSKYIQPSMRIILNPLSSLVDLPLKNYYRYVLPSMDDFSGTDVTVNGPKAFFANMPLSKTLTMNLDVPEPWLVEPVIAVHDLDNILLENIGETRTLQAVFELEALVLTGHCSEKHQEPPRGLQLILGTNSTPHLVDTLVMANLGYWQMKVSPGVWYLQLAPGRSSELYLLKHGGDGSRDKTLSKRIIINDLRGNVVRMEVEKKKGKEHEKLLVPDGGDDLLENKKEGPTNWNSNILKWATGLIGSSDQSKKTKDTSVQGKGGRHGKTINIFSIASGHLYERFLKIMILSVLKNTHRPVKFWFIKNYLSPQFKDVLPRMAEEYGFDYELITYKWPTWLHKQKEKQRIIWAYKILFLDVIFPLSLEKVIFVDADQIVRTDMGELYDMDIKGKPLAYTPFCDNNKDMDGYRFWRQGFWKEHLRGRPYHISALYVVDLKKFRETAAGDNLRVFYESLSKDPNSLSNLDQDLPNYAQHTVPIFSLPQEWLWCESWCGNATKSKAKTIDLCNNPMTKEPKLEGARRIVPEWPDLDLEARTFTAKISGDANPQTPDLPTDQTETSVSKKSIDEDVESKAEL

SEQ ID NO: 4260 - protein, 1599 aa, Fomitopsis pinicola
MRQATCSLCSALILFAYRSYATSPPVQVELRSSWPAPPPLLESIETIALENPDSFFPLLDSLTNPETAPDTVPTSAEAAHKYAFDRALSAGFLAEPGAYGSAESNLALHAATPRIEALYQYYADRHAAQRDAIENTRCDSWVDWYGEVVCDAKTLARLAGVDTIDPPDSTKVEESYSAPKLMSFDHVYPSPASTLERPPRTAILYASLSSDNFWELHSLLYAASRAPKPHLEYVLRSIPPTARDASKRSYLSGYGVALDLKKMDYLALDDRTQGSSENADEADETTASSSASDPVVALIHQYPENTTLDASTPLTEEELLEIGLQAAQIISDAEEPLSILKQLSQNFPRYATSLARQVTVDAELAEEVENNQAIARGGTSVAWLNGVQLTEKDMNPFALLRLLRKERDIMQSLTSLGLSTTQALELLTHPNITEAQSSSDVLDGVVDASDRQEGGEVVQWLNDFEQDQRYLRWAKTLNILLRPMFPGQFPNYRGNLFNVVIVADLSQTSSLHFLATTASAIIARGFPFRWGIVPLAETEDGTKMARLLYFLIGRVGRQNTLEFIRHIAQVNRPMQQTTPTIDWALVRTAFNSFRASGQDHGEEPIPELDAILKGDVAPMNENIERARKYAARLGATAAASPQGHAFVNGKHFNLDDSFLQLMQMELREQLGYIQEQLVLGTLSDADADDIATYFYDLPVASKRRNRHIYPSTKAGDLRIHSLFDTVVKYGFPNAQGSFVYPPEPKAIPLTTYVVADLNSEAGQALVKEALAAMASEFPSRVSFVHNPAVGPADSTIHPQVSSLFAQLIMKGLLERVSPGRLLEILGAGDVASPDHTRQVVIAAESGLDEILERTELKDEEYQEYAKASRLVARALGFVPGEQGLLVNGRVIGPVAAGDFEAQDFPVLSAYELRKRVQPVVDALQDVTGMLEEYDRASYAEAVSLASSLISAIELPDPSEAGLMNAPHRPRQLKYQLLDGQHTGFTLGDNTTAFYNFGIIVDPLSEAAQKWSSLMQWLLEIPGVTIELHTNPAKNSELPLKRFYRYNLHPRLTYGESGEEVHVQTEFTGLPVEPIYTLAMDVPQSWFARPRESLHDLDNILLASLSPQDRSQGVKAVFDLDYLVIEGHARDMFINGPPRGLQLQLASDSGEPIADTLVVANLGYLQFRTKPGVFRLEIRPGRGRDVFKMESVGNEGWHSLSVDEAGDEITLTNFEGLTLYPRLVRLPGMERVDVLAEVAPAGPPSAGLLDSVVSRITSLFGGQHVQEVTAIENKQADINIFTVASGLLYERFASIMILSVLRNTNSTVKFWFIENFLSPSFLEFLPHFSEAYGFQYELVTYKWPSWLRAQKEKQRIIWAYKILFLDVLFPMDLKKVLFVDADQIVRADLKELVDLDLHGAPYAYTPMGDDNVEMEGFRFWKTGYWKEFLQGLPYHISALYVVDLVRFRQMGAGDILRGHYQQLSADPNSLANLDQDLPNNLQRDVPIFSLPEDWLWCETWCSKERLHRAKTIDLCQNPLTKEPKLSRARQIPEWEEYDGEIARFARTLAEEGKMLSGIVAADVNVLADVGRSSSSGPAPDAPKEDAEKAPEENNVPRDEL

SEQ ID NO: 4261 - protein, 1517 aa, Oryctolagus cuniculus
MAPAKAEAVMRLLLGAAALWLSLLDAGTASASKAVTAHLAAKWPETPLLLEASEFMAEESNEKFWQFLETVKELAIYKKTESDYSYYNLILKKAGQFLDNLHINLLKFALSIRAYSPTIQMFQQIAAEEPPPDGCNAFVVIHQKHTCKINEIKKLLKKATSRPRPYLFKGDHKFPTNKENLPVIILYAEMGTRAFGQFHKVLSEKAQNEEILYVLRHYIQKPNSRKMYLSGYGVELAIKSTEYKALDDTQVKDTAVTNTTVEDETGANEVQGFLFGKLKEIHSDLKDNLTAFQKYLIESNKEMMPLKVWELQDLSFQAASQIMSTPVYDAIKLMKDISQNFPIKARSLTRIPVSHQMREEIQQNQKDLRDRFEIQPGDARLFINGLRVDMDVYDPFSILDMLKLDGKMMNGLRNLGIHGENMSKFLKLNSHVWEYSYILDIRHSSIVWINDLENDGLYVTWPTSCEEFLKPGFPGSVPFIRRNFHNLVLFIDPAQEYTLDFIKLAEFFYVHKAPLRIGFVFILNTDDIVDGTNDAGVALWRAFNYIAEELGISEAFISIVHMYQNVKNKNVLTVDNVKNVLQNKFPHANILDILGIYSQYDKERKAGASFYKITGLGPLPQAVYNGEPLNKEEMNRKELEMAISDKMMDTSVYLQRDFFMGTLNDRMNAIDFLMDKNNVVPRINSLILSTKPQYLNLIPSSVTADIEDFSTFSFLDSHDKSAVIAKNMYYLTQEDDVISSVTLWIIADFDMPSGRKLLFNALKHMKTSVHSRLGIIYNPTSKINEENTAICRGILAAFLTQKDNFLRSFLEKLAKEETATAIYSGDKIKTFLTEGMDKSAFEKKYNTVGVNIFRTHRLFCQDVLKLRPGEIGVVSNGKFLGPLDEDLYVEDFYLLEKITFSNVAEKIKGVVEAMESNSKNISELIMKVDSLVSSLPNRGSRYDVTFLKENHSIIKMSPQENDMFFDVVAIVDPLTREAQKMAQILIVLGKIINMKMKLFMNCRGKLSEAPLDSFYRFVLEPEVMSGSDNVPSLGPMAKFVDIPESPLLTLNMITPEGWLVETVHSNCDLDNIHLKDIERTVTAEYELEYLLLEGHCFNSMTEQPPRGLQFTLGTKTQPVMVDTVVMANLGYFQLKANPGAWILKLREGKSEDIYQIVGHEGADSQPDLEDVIVVLNSFKSKILKVQVQKKQDKIKEDILTDKDETSKGMWDSIKSFTRRLHKEDDKDKKDVLNIFSVASGHLYERFLRIMMLSVLRNTKTPVKFWFLKNYLSPTFKEVIPHMAKEYGFQYELVQYRWPRWLHQQTEKQRIIWGYKILFLDVLFPLAVDKIIFVDADQIVRHDLKELRDFDLDGAPYGYTPFCDSRTDMDGYRFWKTGYWASHLLRRKYHISALYVVDLKKFRRIAAGDRLRGQYQALSQDPNSLSNLDQDLPNNMIYQVAIKSLPQDWLWCETWCDDESKQRAKTIDLCNNPKTKEPKLKAAARIIPEWVEYDTEIRQLLDQLESKKKNAILAHDEL

SEQ ID NO: 4262 - protein, 1504 aa, Venturia nashicola
MRVPSWVLPAEILLLVGSLGLFPLTGAAPSINVGLQASFNSAPYLVELLETAAEEEPDVYYKILDRISDGYFSDASTDKELYEKFVRLLKNDHLITDSESLSSFELALSIHNAAPRIEAHYQYYRTTIQPMLEKSKAEDCETWLAFTGKQFCSPQFEKEDATIKGMTIEGGEPVLPFDRLYGPPTTIPAVIYADISSPVFKKFHSLISEAAKNGRVSYRVRHKPSKSDRKPLGMSGFGTELALKRTDYIVIDDRKAEEGKEADKEPAKPADIDLVDEEVADLKPLTSSEVMELGLKASTYVLGSEDPLETLVKLTQDFPKYSSVIAGVNSSEAFLTEHQENRALLLSSGYNVMWINGVQFDSRKVDAFSLLDHMRRERALLGSFQEMELTSEEAIKLLTHPSIAEAQADVEIQRYDWRDETEGGNVIVWMNDIEKDKRYGQWSNAIYGLLQRGYPGQLPSVRKDIHNAIIPIDFSDPISIHRATETVQDIVKRKIPIRFGLVPVTSTEGAAKQAQVVYHILDNYGLGALMQYLESSLAAKKTAAPHEATFKTVIEKRKLKAGREAASFQAVLQSEDSRTQVDGAKKYLIRLGATGSTPPVFMNGVPIRNDDDWLQNMVQRVSQDLQWIQRGVFEETLTQDMWLPSYWLNDSSIRRNPLVIPENDKDIKLLNLVNVLKREEEQILKTMPTIPADEDSDKAIWVQLILVGDFDTQVGLQMILDAIKFRRENPNVELVFVAQSGSPMIKSPRIVQFWPKEGKWTMETIQAVYRDVKALLAAPYDNAAHDNSQFWPVDTERLAQTFGFDQGQNGLIINGRKIGPISADSAFTKDDFLALYAFELKKRIAPASEAVTELEYQDKIKTVLDAAKLCSLLAVSTVSDMPEGIFELPPPLRTRMYYGWSDSETAITVGDNTTALINIVAVLDPASELAQRWSPVLRVLSKLEGVSLKLFLNPREMLQELPVKRFYRYALSDKPSFDDDGAVTAPGVKFEGIPKDMLLTVAMDVPPSWLVAQKESLYDLDNVKLSSLPLGDNVDATYELENILIEGHTRDSKGDQPPRGAQLVLSTAKDPLFADTIIMANLGYFQFKANPGYYNITLKPGLSSKIFKLDSAGALGYEPTPGDETSEVCLLSFQGLTLYPRFSRNPGMEDEDVLGSTKSNTAADLASKGAELVDGLLNKAGIKKGKGVQTVQADINIFSVASGHLYERMLNIMMVSVMRHTKHTVKFWFIEQFLSSSFKSFLPTLAKEYGFKYEMVTYKWPHWLRAQKEKQREIWGYKILFLDVLFPLDLDKVIFVDADQIVRTDMYELVTHDLKGAPYGFTPMCDSRVEMEGFRFWKQGYWKNFLRDLPYHISALYVVDLKRFRQIAAGDRLRQQYHQLSSDPASLSNLDQDLPNNMQMMLPIHSLPQEWLWCETWCSDESLKDAKTIDLCNNPQTKEPKLDRARRQIPEWTEYDDEIAALAKRTKQSEKVPTGDEQAGTEGRPKESIVESNSAESTHVKDEL

SEQ ID NO: 4263 - protein, 1331 aa, Conidiobolus coronatus
MKLNKIINLILSTSPLLAATAEGDNSSQISLKIKTKWKQNSPSLELLELLASENPSHYYPTLELIFKNIVAETQGKTSVQKTFQDTLIKLKSKLGSKVNFDLLNLGLSLKLSSSKLETKFNYYDSYVKDKFAKECGDWIQVGENEQFCDVDKFENWWQANKQNISEITPFDIIFPSVGRNQPKIIYYTNFNSKSLKFYENLVRLTRPNRGFNFALRYQPNMGGKDSKNVELSGYGVYLDLKNTEYKVQDDRYQNKNEKDSKSTSEDPDASSKIPVEYTSIWNEELSHFQQNIQQIQKYEDSDLEGFNQKFTQLIKSSKSPLQTWIYLLQNLPHHAQTVLNETLAEGHCEGITLGRNFFFQQPIQDQILINGIEIDLGQLDIFNLVKFLNLEFNTFKLFNYLDITNEEARNLLIGKSNEGGDEELESTKEKKSLWENVYNTRDNTEGEDNKVVIWLNNIEEDEIYEDWSSELSSLQTYMYGYLPQTRRNFANSVFPLNLNNLDDLHFFAKNLIKFSSSPVPIRFGLVTLVDEKNGDDSKKINNLVHYLFDHLTKSELKEYLEEVAKSSTESNEPIVNAFKSHYPSLKKNNPSLKLELTEIFNLSDSEYIAPSINYSNRLQLKLDEEVLFINGKRVEFEGNFQKPLIQNLFQQIPVIMEMASEGEFDNGGIYDIWLNNPQVLNNFNPFLNFIRSSTNSDENENGPLTTVWIAGNFESVESNTIIEDAIKYLKSGAKGVRLSFVPTNLEGKNNELLFNLINSQDQLADLPDTFEELKNYKFSYKPSYKELFAYFSRTNSYFYQDCCVSLIENNEDGDGIQLVLDTKKLQVSSKEFKFIQLGSIVDYYNIKFKAPLVSRLSNNLNNYSKLDEVGKSNTLIQVSAILNQNLKVHQSLVRFGSYEGERGTLPEINRPQCELKLTHEDEKKDTWANIEFILDPLGDNAAKWSSILNKLRDLDGVKLKGYFSPNSPPGEFKKTHLNRFYRYLLPNSLEFDETSEELKAPKIEFSDLPESSLLTLGLDTMTSWVVMAKDSPHDLDNLKLSSLPSTGTHPEFELKHLLIEGHCTDFDLASGHLYERFLSVMVASVMKNTDRKVKFCHLPMASLVKYSIRKTRIIWGYKILFLDVLFPLDLDKVIFVDADQSVRADLGELVDLDLEGKPYGYTPFCTSRESMKGYRFWEQGYWKSHLDGKPYHISALYVVDLKRFRSQAAGDILRQHYQMLSQDPNSLANLDQDLPNHLQHELPIFSLPQEWLWCETWCDDASLKSAKTIDLCNNPETKEPKLDRARRILPEWQKFDDEVRSIDTEDEDTTGKDKKDDVKGDGDESAEDEEL

SEQ ID NO: 4264 - protein, 1469 aa, Ophiocordyceps sp.
MARHTCLPWPLYVTVMTAMTVVAVPSVNVGMKAAFSAGPYLLELIETAASENSTAYFPLLDRIADGYFAGASSDAVLYNSFLELLVKDSYIASSEALSTFNLALTLRSAAPRIEAHYQYYSTAVEPAVDPSCLNWVLLEGKQYCTPELDKPIKEGLFSSSEVTSLPFDRTLGSGKDVVLYADPISESFGKYHEAVVKASRALGLRYRVRYRRSEASPRRNLPVSGYGVELALKRTDYIVIDDRDAAVDRSQKPLTSGGFDEEDEVADLRPLSTSELALLGLKTASFIQTSSDPFAMLVKLTQDFPRYSASIAAHNVSDAFHAADEKVVPGGINFLWMNGVQLIERQIEPFALVEMLRRERRLVDGFRRLGFTGKQAISLLGHPAVSASKGDDEVLRYDWTDKPEDGGAIFWLNDLETDSRYENYPKSLVALLQRTFPGQIPQIGRNVFNIIAPVDLSNTDDIAFVSQVVSIVRRGIPLRFGLIPLTSTATAVSQAKVAFYLMENYGIEAFFAYIDGLSENRQSTIDEKLFADIIGRVDTVTDAEKLSLSEVVQAENWATRIKSILHWVKRLKADTIIRPLFINGAVILRDASWMQTMSTKITGDLQSIQKEIFQGSVTEDSNSSGIFLKGAFLRRNPYISVESDKALQMLDVSRIYNEHGKLLGIMPVLEPYSESTKENWAVVTVLADLTTVSGRELLLAALEFKRSSPGVRLELVHNPEDPLKASRVSSAIKTQQDLIKDMETMEQLTTVLDSADGVPDDDDYAPILSAFLDMAKMEPGRNAVILNGRVVGPIPSDEAFTADDFQLLLEYEQGQRILPVYTAIDDLGLGDKLSNALSAAKATSIVALSTISDLPEGIFESAPTIRSTMYDSWDVSHATIEVGDPETASIHIAGLLDPASEKGQRWTPILRVLSELDGVYLKIILNPREKITELPLKRFFRYVMDAKPSFEENGSVKALKASFESLPSEVLLTAGMDVPPAWLVAPKESVHDLDNVKLSSVKSNIDATYELEHILIEGHSREGRGAPPRGAQLTLATEKNPMITDTIIMSNLGFFQFKANPGFYKIRLKEGRTGEIYTIESIGAKGWEATAGDEGTELALMDFQGTTLYPRLKRRPGMEQEDVLETSDGNSSGGILSKGLKLAEELLGGAKTKSPSAQKHADINIFSVASGHLYERMLNIMMVSVMRNTKHSVKFWFIEQFLSPSFKEFIPHMAEEYGFEYEMVTYKWPHWLRQQKEKQREIWGYKILFLDVLFPLSLDKVIFVDADQIVRTDMMDLVDLDLKGAPYGFAPMCDSRTEMEGFRFWKQGYWANYLRGRPYHISALYVVDLRRFRELAAGDRLRQQYHALSADPASLSNLDQDLPNHMQFEIPIHSLPQEWLWCETWCSDESLATARTIDLCNNPQTKEPKLDRARRQVPEWTVYDDEIAALNRKRTASLDGADQTREPINTKSRRLDGDNEQKVHTMDEL

SEQ ID NO: 4265 - protein, 950 aa, Zea mays
MYKQEAEESSHFVHKLGLYRLQCCLLMNGLVHEASEEATMNAMNDELPRIQEQVYYGHIQSHTDILEKFLSENSYKRYNPSITGKNAEKKFVSLFASYHQDSFIFNDMKYLQSPGTTDDAKPVTHLLAIDLSSKVGTKLLYEAILYLMDGSDRARVGLLLYVHTGGSSPILLLKDIFDRTISSFSYKEKVLVFLHGLLKFYDAQPLPASSVADDWTRTMMEKVYTLAAETALPVDDYKAWFKSFSADTVLKGMDKLSDFLFGQLGLVFGSNAVITNGRVFIMNEGKSFLANDLGLLESMEYDLRTKYIFEIIEEVEFASVDPDDLTNQFYSDIAMLISSSMSVRERTSERAHFEILHAEHSAIKLNNANSSIHIDAVIDPLSPTGQKLAPLLRILWKQIQPSMRIVLNPISSLADLPLKNFYRFVLPSMDDFSSTDHSVHGPKAFFANMPLSKTLTMNIDVPEPWLVESVIAIHDLDNILLENLGDVRTLQAVFELEALLLTGHCMEKDRDPPRGLQFILGTKQRPHLVDTLVMANLGYWQMKVSPGVWYLQLAPGRSADLYELPPKLIAIDSLRGKLMHIEVQKKKGKEHEDLLNAADDYHFQEKTDNKGWNKNLLKWASSLITGDASSKSKADKTTDRKDARQGETINIFSVASGHLYERFLKIMILSVLKKTQRPVKFWFIKNYLSPQFKDVIPHMAREYEFEYELVTYKWPTWLHKQKEKQRIIWAYKILFLDVIFPLSLRKVIFVDADQIVRADMGELYDMNLKGRPLAYTPFCDNNKDMDGFRFWKQGFWKDHLRGRPYHISALYVVDLAKFRQTASGDTLRVFYEQLSKDPNSLSNLDQDLPNYAQHTVPIFSLPQEWLWCESWCGNATKARAKTIDLCNNPMTKEPKLQGARRIVPEWTGLDSEARQFTARILGDDVEPADATPPPSEAPKPEDDQDVKDEL

SEQ ID NO: 4266 - protein, 1636 aa, Paxillus rubicundulus
MTFAPPCVLFALTGVVLSALSVQGASPPVAVSLRSSFSGSDPLLEAFETVAMEEPSVLFPLLSAFSLPEGPLTPQDVHEAVFDIASSHMDGSALASAHALLALHAASPRLAASAEYYDSHIANLTDSHKLFSPDCASWVDWYGHIVCDADTLLQLADSENNTPATRPKRLPLDHVHRVTATLEEPRYTALHFADPTAPSFTSLHGTLLSLEPKVEYILRWAKGTIEKRGSELSSYLSGYGVALDLKKMDYLVLDDRNQHQGGSAAHDTSSGDNVEDEDNRPSDEEIISCIFDSLPYIDEEAEATARAGEPLSSEEITNLGVNAIQFVMSFSSRPQAGPLYIHQCWDNHHQVPFPAVALFSTLSTSFPLYATSLARKIKVLDDLRDEVHENWAKASPGVNMVWVNGRVINENEGSAGSIFGLLRTLQRERGLVKFLVDLGLTSSQAIEFLVHPAHSATQQPTPSIHLDTSRKGTTQGSAEKKTFAISPKFAEFFDGLVDASDRQEGGGVVLYWNDLEADQQYAGFSPSLHGLLRVHTMSLFSPMLKIRLNLVNVILVLDLSETRSLSLLGSLSETFVARGFPVRWGLVPDCQGDSLKMARLLYYLKQKYGRDRMTAFIRGVSYSHTERRLPSLSWQIVHETFNALSAGHDFAAVARGDEPVIDEATGEDVLVRAQKYARRLGLGLQGVAGKGHAFVNGRYFPVNDNIFRQLSGEVMTQLQILQEMVYTGEIMDTDASLMSTFFYDLPTTFSRRNPYIFVNNAPGGGHLLDATGLQMFNLPELFIKAGSEQKDGSFILPSDSDDLPITMYIIADFDSPEGLELAKEALTFVTNSDRTRVSFIHGPGKMTTGVVSTFISTLVHSGGLSDVPPSRMLEALANRSDEQLAAFRDELMAGKRLTDAELLRILQTNRLVARELGLKPGQRCILANGRLVGPFESGSDFDAEDFEMLEAFEIKQRVGRVMEAIDAVLDDGDALDVTRRAHLVSMASSIIYADQQPDPSEAGLFDSAPKPRTQNYRSLSGKYTKLDFGDPSGAQSHITLLLDPLSETAQRWSAILARSFDFFPQVYIELYFNPTQHSEIPLKRFYRPNVVPYLKYDANGQEIPAQVTFTGLPMEPIYTLSMDVPPSWLVRPREALYDLDNIHLGKLPAEERTSGIQAVFALDYLVVEGHARELKTSNPPRGVQLQLISSKDGSVVDDTQIVANLGYFQFKARPGTFRLEIREGRGREMYELASVGSEGWNSLPVAEAGNELTVMSFGGLTLYPQLARKPGMERMDVLNGLHAPIEESPTVMESFMSKMSSFFKSRDEGKDVEVIKKQTHGQADINIFTVASGLLYERFASIMILSVLRNTKSSVKFWFIENFLSPSFLEFIPHMAEEYGFQYELVTYKWPSWLRAQKEKQRIIWAYKILFLDVLFPMDLKKVIFVDADQIVRADLKELVDLDLHGAPYGYTPMGDDNHEMEGFRFWKTGYWHDFLAGKPYHISALYVVDLVRFRQMAAGDILRGSYQMLSADPNSLANLDQDLPNNLQRDVPIHSLHEDWLWCETWCSKDRLHRAKTIDLCQNPLTKEPKLSRARQIPEWGEYDNEIAQFARKLAAEGKIHASVATADSNILAGSNAQPSTSGEAKDSSRSHDEL

SEQ ID NO: 4267 - protein, 1597 aa, Dactylellina haptotyla
MWFSTLWSQRPSRGALLTSVLALSSIQLASARSQPQDIVEDGTVKRWEGLNLSLKTSWNAGPFILEILECAALENQEFYFTLLKLLGAETLKIVHPDKKMYDSLVEYVEKNELLNHQFLPTWKFCMALRETSPRIEAQYQYYLNNVDFAKGNDCPVWFDDGERQSCKAEDLAKVQPKSSSASRIKEVAFDRSSTDDVRKGLVIFYIDVLHKDFPKAYAEMVEAAEKAGIAYKIRYRPSPSLQNPKPVALSGYGVSLVLKKTDYMVIDDRDAKEGEDPASSSSTTSSVKPSPSPKYKFKTVEGLESKEPRFPLWDLEDIDDPVKDLRDLIPLSQKYLGDLGFKTANFVSKSGIYPPDILMKILSDFPKYAHTIGHMGGVLPEFMEEHHANREQWLPEGFNAMFLNGMMLDPSEVTATTLLELMRRERKYTLQIRELGLNQKETLDLITHENITQSKLVEEKPRFDWREQEREQGAIIWLNDLETEESYKDWPESINEILMPTYGGQLANIRKNIHNLVIPLDFSNRDDLVLLAERLFMFVKRGLALRIGVVPIVRNNLGSTNARIYAALADSYDLITANSYLKDGLDADKYNVRYPAPEYIHHAIKGRTLKDGKEKISLSGVMESSYWQARHQSAGVWEERLGVSTRPYPFFINGIGQPFGDDWINVLTNSLPNDIRRIQQAIRAEELTDENDIVSFVLDRPIRRRSTLIFKDEAPNVVNLCDLREADPETFDKLPYFPGMLTEEAETASADVWVIGDFDTPTGYSLLEEVAAVQDRKPGISVTAISNSEYKTQVQTLSALLYSLGGNTLVSTTPGILQKLIAEVKPEKDYVDMKIEGADQKILGADAKTAGWAIPDQVAAEKFWRETAAFLERKLGIKPGQRAVLVNGRLLGPFDNSINFFQEDFETLIEVELKARITPVLTAAKTLGVLDRLRAANYKGRLTSAMTVLQTPHNTGLVDRSSNVRTNLYNMWKRSKTVLKSGDPIWSTFRFMVSLDPLSEVAQKWAPILRVLMSMDGVGIFTWLNPKERLTEVPIKRYYRHVLYSQPKFDVNGDILEPKAQFIDLPDKTLYSLSMDIPPSWLVAPSETIHDLDNIKLQTFKERFGTSDLNATYVLRNILIEGHSRDTSLNEPSAGAQMELGSSKNPVMEDTIVMQNLGYFQFKSNPGHWQIRLKPGRSADIFHIQSLGAGGFDLADNSEDDVKDVTLMSFRGVTLYPRLKRNKGYQGVDVFAAHPEDNSGSGDKAGGFADGLLSKLGIMKGKEKKDVGKATAEINIFSVASGHLYERFLNLMMLSVMKHTNHTVKFWFIENFLSPAFKDFIPTMAKEYNFEYELVTYKWPHWLRQQKEKQREIWGYKILFLDVLFPLNLDKIIFVDADQIVRTDMKELVDLDLEGAPYGFTPMCDSRTEIEGFRFWKQGYWKTFLGDLKYHISALFVVDLKLFRQLAGGDRLRQQYHQLSADPNSLANLDQDLPNNMQRFLPIFSLPQDWLWCETWCSDESFKTAKTIDLCNNPMTKEPKLDRARRQVPEWTAYDDEIAALAKRVKAKGVENMREALVQKEVLGEQEKAVKEEAKKEVKEEKTETEAEKAVPPKDEL

SEQ ID NO: 4268 - protein, 1494 aa, Chaetomium thermophilum
ETGQVAASPSINVALKAAFPSPPYLVELLETAASDNTTIYYSLLDRIAKGHFAEATTDKALYEKFLEVLRDDGHMDPEALSAFKLALSLRTATPRVEAHYQYYTATVEPSLSGTQEGCDQWFLIDGEQYCSPTLDTSHGKVKGEDQLRTLPFDRKFGVGCRDVILYADITSKSFAPFHEVAMDLAKKGKASYRVRYRRSPSHSRESLSVNGYGVELVLKRTDYIVIDDRDTGAAAKPAEENDQKPLVGHETVLDDGEEIADIKPLEKSELAALGMKAASFVMQSEKPFEALLKLTQDFPKYSNSLGSQNVSAEFEAEHRGNREVFLPEGSNVLWLNGLHLIDRQIQPFGLVDLLTRERKLIKSVLDLGLTGQQAVDLLGHAEVAHAKSGDDEPRRFDWRDDIEEGQVIIWLNNLEKDKRYKSFSPSIWVLIHHFGHGLPQIRRDVFNLVVPVDLTKADDVKIVVEGLLSFVKRLIPVRFGFVPLTPTGQAIDQAKVVYYLLENYGLAAATAYLEKSYEEQSTGQPNERIFNEVIKDKSLRPDGVELSFKDIFISEKHEKQIHLSKHWVERLRAGGDVPTVFFDGFPIPREDNWLRVMNHRLMQDLQALQQAGYFGMLNESMWLPGFFLEKALSRRNTLIFPEDKNELTVLNVNKIYIENHDLMSKVPVIEASKESTRDDWAALTVVADLDDIEGQELVYYALRFRKSNDGVRLDIVHNPKDCSRSPSVLAQRLKSREDKLLDFTRFLDLETALETGEFEPDVAYDASLANFLASSNMKAGDNFVILNGRVLGPITSADDFKKEDFEVFLQAERRTRILPVYKALEDLGLDDKVSGPLSAAKLTSVTALSTISDLPQGIFDNAPTVRTTLFKQWNSTYTSFEVGDASTATIFFVAVINPASEIGQRWVAVLKVLSELEGVHLRVFLNPTVMIEELPVKRFYRYVLSSSPSFDESGKVKALSARFTGVPRETLLVVGMDVPPAWLVTSKVAVDDLDNLRIKDIKAKRGTEHVEAIYELEHILIEGHSREIPGAHAPRGVQLVLETENNPHFADTIIMANLGYFQFKANPGVYNIRLKEGRSSEIFTLESVGAKGWGPIPGDDNTEVVLMDFQGTTLYPRLRRKPGMEEEDVLEPSTKSGEESGSGARNLVSRGIKFAEGLLGRGNKAAEATKSVSKTEHAEINIFSVASGHLYERMLNIMMASVMHHTNHTVKFWFIEQFLSPSFKDFIPHMAAEYGFKYEMVTYKWPHWLRQQKEKQREIWGYKILFLDVLFPLSLDKVIFVDADQIVRTDMYDLVEHPLDGAPYGFAPMCDSRVEMEGYRFWKTGYWANYLKGKPYHISALYVVDLQRFRELAAGDRLRQQYHALSADPNSLANLDQDLPNHMQFTIPIATLPQEWLWCETWCSDETLKDARTIDLCNNPMTKEPKLDRARRQVPEWTKYDEEIAELARRVREEKPKKKEEEKVQKNPKSRRLDGDEEEVKTVREGTKHHHHHH

SEQ ID NO: 4269 - protein, 1612 aa, Spatholobus suberectus
MGCLCRSECWVLIVLGLLAIGSAFADTPQRPKNVQTALRAKWSGTPLLLEAGELLSIEQKDLFWDFIEIWLDTDKDAVDSQTAKDCLKKILECGRPLLREPLRSLFELSLMLRSASPRLVLYRQLAEESLTSFPLGDENYSDDETEEKLQTEKKIERRKLDPLHAGVNLKSHGGKCCWVDTGEHLFLDVYELLTWFQGFAAAELVGDSFQRPEIFDFDHVYYESNIGSPVAILYGALGTNCFKEFHVALVKAAKEGNVKYVVRPVLPAGCESNITHCGSVGAGESVNLGGYGVELALKNMEYKAMDDSTVKKGVTLEDPRIEDLSQEVRGFIFSKILERKPELTSEVMAFRDYLLSSTVSDTLDVWELKDLGHQTVQRIVRASDPLQSMQEINQNFPSIVSSLSRMKLDDSVRDEIMANQQMIPPGKSLMALNGALVNVEDVDLYLLIDLIHQDLLLADQFSKLKIPQGTLRKLLSTLPPSESSIFRVDFRSTHVHYLNNLEEDAKYKGWRNNINEILMPVFPGQLRYIRKNLFHAVFVIDPATRCGLESIDMIMSLYENNFPVRFGIVLYSSKFVMQLENHATKEHSNKSDEDISTTVNKLHVKLDGNAGDALELHHVEGVFVDTILSKVKSPPQEILLKLYKDQKLKELSQESSKFVFNLGLSKLQCSLLVNGLVIEPTEEALINALNDETPRIQEQVYFGQIMSDTDVLAKFLSEAGIQRYNPKIISDSKLRFISLSLFTVGEESVLNDIIYLHSPGTMDDLKAVTHLLAVDVTSRNGMKLLQQGIHYLTEGSKNARVGLLFNANQSPNLFSLLFVKVFEITASLYSHKMNVLDFLDQLCSLYEQNYILTSPMEAASTQAFIDMVCELGEANGLPSKDYKSALPEFLADDVRKHLTKMQNSLYRVLGLDSSVNAVFTNGRVTYPIDESSFLSADLHLLESIEFEQRTKHIVEIIEEVEWHDVDPDMLTSKFISDIVMALSSSMAKRERNSESARFEILSDQHSAIILNNENSNIHIDAVLDPLSSTSQKLSGILRVLWKYIQPSMRIVLNPMSSLADLPLKSYYRYIVPTMDDFSNTDSVINGPKAFFANMPLSKTLTMNLDVPEFWLVEPVIAFHDLDNILLENLGDTRTLQAVFELEALVLTGHCSEKDHDPPRGLQLILGTKTTPHLVDTLVMANLGYWQMKVSPGVWYLQLTPGRSSELYILKEDGEGSHDKQSSKLITINDLWGKVVHMEVVKKKGKEHEKLLLPDNADNAQEKKKGSSLNSNFFKWASGFIGGNKLSKMAEKSSPEKGKGGRHGKTINIFSIASGHLYERFMKIMILSVLKNTHRPVKFWFIKNYLSPPFKDLIPHMALEYGFEYELVTYKWPTWLHKQKEKQRIIWAYKILFLDVIFPLSLEKVIFVDADQVVRADMGELYDMDLRGKPLAYTPFCDNNKEMDGYRFWRQGFWKDHLQGKPYHISALYVVDLKKFRGTAAGDNLRVFYETLSKDPNSLANLDQDLPNYAQHTVPIFSLPQEWLWCESWCGNATKYKAKTIDLCNNPMTKEPKLQGARRIVSEWPDLDFEATRFTARILGDDQESEPIQSPNQSKDLTNEDSSNEDKESRAEL

SEQ ID NO: 4270 - protein, 1534 aa, Acanthaster planci
MAWPRFCSVLLLVLLQALRSSSIKSKPITTSLQAKWPATPLVAEASEFLADKGVESFWSFVDSLSELRDGDVGETDESKYAFVMKFAGRLLSDTERDLLKLTLSIHSYSPKIEMFNQIAQDLPPPSGCDAFVHVHGQVTCSLTDMAELIASAPERAKPNVYAVDHRYPRSQNNSITVILYGHIGNLRSQVKHFHQRLKGLANKGTVQYVLRHFVKDQSAQRIRLSGYGVELAIKSTEYKAVDDTEVKEGDGHSQDEEDNAPDEVQGFIFSKLKELHPDLVDNLNSFRASLLESNRKMVPLKVWQLQTIAFQAAQRVLSSPTKDALRVLREISQNFPLLASSLVKTQVKDEVRKEITENQKIFEATYGVGEGDTIMMLNGLVIDTDVAEPFLLLELLRSESQILDGLYSLGVSGEASGQLMRVQVASHDGTYAVDIRDNSVLYLNDLEKDERYAHWPSGVQEFLRPMFPGMLRQIKKNVFHLIFMLDPTQPESLQFLQQAEMFVLNEIPVTVGVVFVVSKEDEVNWREDAGVAMMRAFNFAMIDGGSPQALDLLIKILTAAEDEVVTPENVVQTFKKMFPGEDLDEILGPGTEYDDRRQDGKAYFERTGLGSLPQVMMNGVPFTSKQLQPDEFEESVVTAILMATPDLQRAVYRGKINDRTNLMDYLMAQPNVMPRLNPRILADDTRLLDLTAQPGDLPNLSLSVFQGLSTSGQTAAVTNSMKYLTKKDDLSLRPVSMWIVCDLETTEGRMLVSNANKYMKTSNTLRIGVISNTADSSDNRQWLARAIHSVQKTQTRNHAKNFINKLLKEENYQSIEGGKTKVEDYEVHGMNMGAFKQAFKESEFLKIQRVFSDKVLHLLPGQRAVIASGRVFGPLSQDEQFTEDDFSLAEKLILQTSAASVKKKMEKLASNFASTGDSLSDLTLKVDALLASNSRQEGRKEVSFWRDKHSVIDIPPRDQSKPCFDIVAILDPLSSQAQKWSHILGVLKEVINVKIRIFMNPKDKLSEMPLKRFYRYVLEPELSFRVDSSLTAGPMAKFSDMPPDTLLTLNLLTPESWLVEPVRTAHDLDNIKLSESEMGIHGQYELEYLLVEGHCFDQASGQPPRGLQFTLGNQQEPVIQDTIVMANLGYFQLKANPGAWLLRLRHGRSADIYQVSGHEGTDSLPGVNDTIITMDSFKSKIIKIKVNKKPGKEDESLLSDSQTDKRVAGGIWDSLSSFVSSLTGSGGKEGDSDQDKTLNIFSIASGHLYERFLRIMMLSVLKNTKSPVKFWFLKNYLSPTFKEFIPHMAAEYGFEYELVQYKWPRWLHQQTEKQRLIWGYKILFLDVLFPLDVKKIIFVDADQIVRADLQELANLNLQGAPYGYTPFCASRREMDGFRFWNSGYWKSHLAGRKYHISALYVVDLVKFRKIAAGDRLRGQYQALSQDPNSLSNLDQDLPNNMIHQVAIHSLPQEWLWCETWCSDAEKPAAKTIDLCNNPLTKEPKLESAVRIVPEWTGYDNEIKALQERVAQGLTTQSVGGDKTQANPADDHTEL

SEQ ID NO: 4271 - protein, 1536 aa, Parus major
MGCAQGPARLAVTQHLMAGCAGLLSPVLLLALLCPRPWPCGISPASSQPVTARLAAKWPATPLLLETSEFIAEDGNEKFWQFLETVRELTVYKQGDSEYSYVNLILKKAGQFLSNLQINLLKFALSIRAYSPTVQMFQQIAADEPPPEGCSAFVAIHGKHTCKTKRIKKLLEKATKRPRPYLFKGDHKFPALKEDGPVVILYAEIGTKGFVKFHKILSEMAKKEEIVYVLRHYVQKPNSRKMYLSGYGVELAIKSTEYKAVDDTQVKGAKETKEEEDEEESDVQGFLFGKLKRMHPDLKSNLLEFKNHLIETANNMEPLKVWEMQDLSFQAATRIMSTPVYDALKVMKDIAQNFPIRARSLTRVPVDKKMQNEIEENQKHFHETLGIQPGEAHLFLNGLHIDLDVHDPFSILEILKLEGKAMHGLHELGIKGEILNAFMRLHIHPADNYALDIRHSSIIWINNIEQDHSYSTWPESYQALLKPTFPGFLPEIKRNLYNLVLFIDPVQEDTGDYIKLAELFHHHYVPLRIGIVFILSTKEEIDGNEDAGVALWRTFNYIAEESDTSQAFMSIINMYHEVKDGNVLTVDDVKYVLRSEYPHADVQSILDVHSEYDEGRKAGATFYKKSGLGPLPQVLFNGVPFPREEMDAVQLEKLILQRIFNATGFFLESVHMGLLDDHVNAVDFLMDQNNVVSHINPNILGAERRYIHFRPTSVPFHVEDFSTFSFLDSQDKSAVISDNMKYLTKEDEDALYAVTIWIIADFDQPAGRQLLSNALKSLKTSSHTRVGILNNPSSKIKEDNTAVARGILAAFLTQNNSNLKSFLSKLIKEETAKSLAAGTKIVKFLIPGMDGDAFEKKYNTLELDLIKTHQMFCQEVLKLLPGQMAVISNGRVLGPLDENEFYAEDFNLLEKITYSTSAEKIKAIVKEMGNSSKSGSDLIMKIDALLSSLPKMEMRQDVELLKDQHSVVKVKPQENDPFYDVIAIVDPLTREAQKMTHLLIVLRDIINMKLRLFLNCRSKLSEVPLKSFYRFVLEPELTYGINKVPSEPVAKFLELPESPLLTLNMITPESWLVEAVNSSCDLDNIHLQEIQGAVVAEYELEHILLEGHCFDVKTGQPPRGLQFTLGTKKNPVMVDTIVMANLGYFQLKANPGAWTLRLRKGRSEEIYQIFSHEGTDSGADLTDIIVVLNNFRSKIIEVQVQKKPDKVNEELLTDGTTGRKGKVESIARFSEETPTDEKEKKSDILNIFSVASGHLYERFLRIMMLSVLRHTKTPVKFWFLKNYLSPTFKDVIPHMAKKYGFKYELVQYKWPRWLYQQTEKQRIIWGYKILFLDVLFPLAVDKIIFVDADQIVRSDLKELRDLDLNGAPYGYTPFCDSRREMDGYRFWKSGYWASHLGKRKYHISALYVVDLKKFRKIAAGDRLRGQYQALSQDPNSLSNLDQDLPNNMIHQVAIKSLPQEWLWCETWCDDKSKKKAKTIDLCNNPQTKEPKLKAAARIVPEWVDYDSEIQNLIQQIERERKNLTSLFQKALKHDEL

SEQ ID NO: 4272 - protein, 1536 aa, Choiromyces venosus
MRLPNFGGRLSLGLLLLSPCLQLVSCGPAVNVALKASWNGAPFLLELLETAAEEVGASYFPLLDRIAAGDFAGIESDKALYDIFLRVAREEGYLVDQEELASFNFALSIHAAAPRIEAHYHYYENSLEPRMGRLYEATCEVWLQWSHKQICDTGGDFRDMLKSWERYRNDRRKLQFDRVLETQEDKPAAILYADIEAPIFKQFHEILRDYAKQGILTYRVRYKPQTNRKERPVILSGYGVELALKKTDYIVMDDRDVSGEGDVKKSKNTQVPIGELDDQEIQDIKPLHPKDMSFLGMKAASFVMNSEDPLATLLKLLQDFPKHTSSVAAIDINTDVTDELRENWDSFLGPGQNSLWINGVQLENSDINAFALLEHLRRERRFVNSFKMLGVNSSEAVQLLSHQILADSKQEEVPQRFDYRDNIEGGKTIVWLNDLEKDLRYREWPAAVDTLLRRVYPGQLHPLRRNVHHLVVPVDLASKDDLALITEQLRLFVDRKIALRFGVVPLTNTPEATAQAKVFYYLNDAYGLPVALGYLELVLGSGQFSKPNAKVFDQVIKEAELIEGQTALSLEEALSSETVEERIKASKSWAGRMGANSLVPPVFINGLSLAKDEQWMQMMSARLQVDVQLTQRAVYENVANDETDFVALLLGNAATRRNSHIFPEDEESIKTIDVGNLLQEYAHIFEKLPTIVSDKPDKLVETTIWVIGDFDEKDGYELLQGASELQKFAPGVTLIIIDNPQIVSENPALSTLLHQLYQVGFFKGPEQLQQLLEEVSPLKEHVNIPKVETLMQMWVPDVKSQSWQFPDHIESGNFWKESQKMLKAAGFKPGQRGAIINGRVVGPVPIGEEFGVEDFRQLLEYEHSRRILPVLKAANEIGVLEKLKGPQASACLTNLVALSNIPEVPTSMFQGPSLARTDAFNKLWKQEHVAIKSGDKDKAIFQVVASIDPASELAQKWVPILKVLSEMKGVYMTIYLNPQRMIAELPVKRFYRHVLNSAPTFDEYGNLTDSQARFENIPELPLLSLSMDVPPSWLVTPKESPYDLDNLKIQSLKDRLKGSDIEALYELRSILIEGHSTDIINGGPPKGAQLVLGTEKEPHFADTIIMANLGYFQFKANPGYYKMELKEGRSKEIFHIDSTGTKGFQQGKQEVTDEDSEIALLSFQGATLFPRLSRNPGMEVEDVLEQSSGMPKNVGDFTSKFLKKVEDVLVNIGLLAPAAGFKAQADINIFSVASGHLYERFLNIMMLSVMKHTDKSVKFWFIENFLSPSFKDFIPIMAKEYGFEYELVTYKWPHWLRGQKEKQREIWGYKILFLDVLFPLDLDKVIFVDADQIVRTDMKELVDLDLQGAPYGFTPMCDSREEIEGFRFWKQGYWKNFLKGLPYHISALYVVDLKRFRQIAAGDRLRQQYHQLSADPHSLSNLDQDLPNHMQSMLPIHSLPQEWLWCETWCSDESLKTAKTIDLCNNPMTKEPKLDRARRQVPEWTAYDEEIAALARRSLKKEAEEESEAVKQVDVEKEGTAKTPEESEKPTIKGEL

SEQ ID NO: 4273 - protein, 447 aa, Hordeum vulgare
MNLDSSDSLMIMAKTAKYDLDNIMLKNVAENNLYALYELRHVIVEGNCYEQASGAAPNGLQLVLKSTFDELEEKHDTVVMQNLGYFQLKSNPGIWNLDLAEGKSSEIYEFVDKSFHTVVIDSFNGKLVKLNVNKKEGKGGEKLYEDVKKSGGLWDSISHMWGNKKKSDNETIHIFSVASGHLYERFMSIMMMSVVKHTKSKVKFWIIENFVSPEFKLFVPQLAKSHNFEVQFVAYNWPRWLNAQKEKQRKIWAYKILFLDVLFPLDINRIIFVDADQTVRGDIKELWDLDIGGAPYAYVPFCPADSRPETKGFRFWDSGFWHDHLGGKPYHISALYRVDLDTFRRSRSGDILRSTYNNLSRDKNSLANLDQDLPNYLQHMVPIFSLPQEWLWCETWCSDELKKTAKTIDLCNNPLTKAPKLDNALRIVSEWKDYDQYVADFREKSKI

SEQ ID NO: 4274 - protein, 1298 aa, Trichomonas vaginalis
MFSYLFTLSFSQFLNHAQIKGDIVAPWNKTSIIAETLSFLQDIDHSLYWDYLEQIQQLKKQPKTIDDVLSTMKDFLDYEQFQLLNISLQIHYYSPRVQNNRALGEDSRGSNVRCNNAIIQNIDELPECNSEFFEYEPVYGSGKSKYILYADVDSNDWINLYTNLLSKDSQLKFVLRAYGHSTEQMVLSGYGAQLKPFKYSMEFKVGDQRKKIKATTKAKPAKTFEDIGLKVNLNDVKRSKKTRISTQIIKFIKESKDPLKAISELTQNYPVLLPQLKNITATEDDAKQIQRMVQFIGPGATALFVNGRKLTGYDLNAFTVYQTLLDEYNFHTTLKRVFDVNEESLNNYERAGHTPKPAQQAIIDLRHPDFLYWVNDLEKDEKYVEKYSKSLITFVSDSENWPQVARNVANVIFLLDPAETEDMDVIAFIDDLVEVQYPVRFGYIIVPKHNSAMSKKIYYAYAHLAQKYGIHVAHKFLLRVNDQRSYLDEKTRKRGPIKSSFWKTAFSAVATQRSSPSFDKMTDFYKPSSAESIFLSRLKKHISRVGVSAPAIILNGMIVEAPHPETYLNSFLKEELKQVRELMGNQKIYEDTVDIHNAILKARNAMLRFNPLVQKTRNEFTETLDIGRQNANNQRIFAKWMTEIKYQHGSSFNVKNQTSWLFLNTDDEQCLNELEMYTAEIMNKESSRISVFKKDELPNEIIQNIIGIPPNKITVVFNGRIVRFDPDQFTRYDLQLLEMCEQSYSTSFAMKYLKLSQNSRSLGQSRTHRELSDSLLYMLLHVSHLAHNNMLHTGSPISAFEPGPLNVFRSKLKQNTELSIYASIDPFSFDGQRLASLSSLLGNLSFSFIVNPPPSIEKEHLESLSCFYRFSTDSKGFSFEYMNSSTTYSLVDDVPSSWQTIRTVSNFDIDNIVADDFEKGTHKVRFDLKSLVVEGCESDKNGRIVPAVEYSLYNSKNEFVDETRVIQSNGYWQLMAVPGMYRVRTNADDEFKVVVDSFIHKFEFRESKPDPYVATNRSKIDDGKIHIFYVASGHLYERLMRISILSVVKHTKSPVKLWLLENFASPNFRNSLKEFSEKYKFEYEFCSYKWPRWLPREEARQRTFWGYKILFLDVMFPNDLRRVIYIDSDQIIRTDMRELMTMDFEGKPYAFTPFCNDRPEMQEYRFWEIGYWQNLLNGKPYHISALFAVDLPEYRSLDVGGMMRKGYMDLHNDKESLSNLDQDLPNMMQNRGAPIFSLPQEWLWCGSWCSDETMKKAKTIDLCNNPRTKVGKLEYAKETIPEWIPYDEEANGVFSKEL

SEQ ID NO: 4275 - protein, 1369 aa, Phaeomoniella chlamydospora
MTAAQDAACPVWVHFEGQQYCSPALERAQQPVEYAGTDQVLPFDHILGGTTEAPPSIIYADITSPLFAEFHQIVSKTAKAGQTSYRVRYRPTLDASPHDPLFLNGYGFELVLKRTDYIVIDDREASTSAPEDQVPLEKLAEHTPADIKPLSKSDVSKLGLKAASFVMSSSEPFDTLLKLTQDFPKHSAAIAAHNATDAFLTEFNTNREEFLPAGYNIMWINGLQIDARQVNAFSLLDHLRKERALINSFREEGLSAAEAVNLLSHGVIAQAQVDNVPQRYDFRDEAEGGNVIIWLNDIEKDSRYENWPSRLSSYLQRVYPGQLPTVRRNLHNLIIPVDLADTKELELVVATLYNYVKRTVPVRFGLVPSLHTPGSEAQAKIAYHLVESYGISALLKYFELCLESGKVGTSGKSSFNNAIKEKSVRTGQQALSFDAIQTSDTTDQRIKALNSYVERLALTGPTPPILINGVALPRDDSWLESMSSRVGADLRQIQRGIVEEVFQEDSWLPDFFLFQAARRRNALVVPEDSSSIQNVAISQLLQEHKAFMSSLPSVSPSPGIKGSELIYLLLVANLDTEEGRSLLVDALEFTKLHPEVELAVLQNPQSYNSCSELSLLAQTLLSEDAIAVDDIILQVRTASLDLQEGCSLSENEAAIRGVVSFLGLQPSENGLLLNQRLVSPVKKGQFIAEDFEHLLHHEKTKHFLPLTTALQDLGLDSRIHNALSMAKLNSMVALAFISDLPEGLIEGPPLIRIDKFKGWMCQDSCIHTSTSTDPSLRIIVAIDPTVELAQQWVPILKVLSELHGVDLKIYFNPRERIQELSIKRFYRQVLDSQPRFDSNGKLQRPQAVFTGIPEAVLLNLGMDVPPTWLVAPKTSTYDLDNIKLNSVAAGQNIDAVYELKNVLIEGHSRDTTTGQPPRGVQLLLGTESNPHYTDTIIMANLGYFQFKANPGIWQISLQPGPSSRIFTIDSVGSKGYRAQPGDEGTTVALLSFQGVTLYPRLSRKSGMDTEDVLESGPKPGSPMDFLSRSASFASSALSSITKSSSGSTNADINIFSVASGHLYERMLNIMILSVLKNTKSTVKFWFIEQFLSPSFKELLPHLSVHYNFSYEMVTYKWPHWLRGQKEKQREIWGYKILFLDVLFPLSLDKVIFVDADQIVRTDMLSLTQVDLHSAPYGFTPMCDSRTEMEGFRFWKQGYWKQYLQGKPYHISALYVVDLKRFRQLAAGDRLRQQYHTLSADPNSLSNLDQDLPNHMQFFLPIHSLDQDWLWCETWCSDESFSSAKTVDLCNNPMTKEPKLDRARRQVPEWTLYDDEIAEVARNIAKDLQQDSDEEGNQTPSHLKGGVQAELEGSVKEGGKKDSERKRDEL

SEQ ID NO: 4276 - protein, 1516 aa, Ceratosolen solmsi
MLFFILFSPLLLNISPILAEKRINKYVTTLINAKWKDTPLILEAAEYLNDENPNYFWRFVDEVSNRSLEFEKHVTEKDHYDFVMSISEKFLTSAEIAVMKLGLSLRIYSPRIEMFYQMAENKKTSNINCNNFIDVGGKFVCSIDELQKFIDNNDVILIDTYSVDHFYLEKRYTNKTLVLYGQMGTHGFSVLHEKLKYLVTSNKINYILRHYSKNRLNKNLRLSGYGVELQMKSTEYKATDDSDIKHNQEKNEDLGEGVDEIDGINFSLLKTLYPKEKKKLNDLYTYLIENNHEIGALKVWQFQELSHQAAERIMSSPAGEAINVLTDISQNFPMQAKSLIKEKINNNMKKEMKLNQEIFSVNLNIQPTETALFINGLFFDLEAIDILTLLECLRYELRVMESLHKIGLDSENINKLLTLDISNTGDSKDFLIDIRDSAILWINDIENDFRYKSWSSSLSDLLRPTFPGMLRNIRRNFYNLVIIIDPLKKESAPLISSAESLYAYSAPLRIGFVFFTNFNVNETGNTDPSVAINNAYHYLIESKNSKDAMSFLSSLYNNIGPNGLQINDVKKAIKIIDPMADINYILGEESEYDVGRYLANDFIKRTGLKKLPQVLLNGIPLSTNQLNADSFEETVLSTIIMQTPMIQKAVYRGEIIESDDVVDFLMNQPHVMPRLNERVLKTEKNIWLNLIGSIPKNNDYTKWSSQDISSWLMKHLCYLYIPRKSVSSHVYTLWIVADLELELGRKLLKEALIYLESNAEARLSLIIYSQNNNLSEFNINKITLAAINTLSLEKSYTYIRNLMKEETYNSIKNGEFSIEEKAIKEYLKNEFFLLNIQQHYAKHILNLSNNERAVIMNGRIIGPFDEEEEFTSDDFALLERFSQSTYGDKLFKYLRKCQVNNDEYENGDISDIIMKITSLLVSKPQTRSRFNVPFHSDKFSVIKIPASNRNLVTFNLIAIVDPVSRGAQKLGPILNVLHQSLNCDIKVFLNCVDKNSDMPLKSFYRFVLEPELQFTSNGEIVGAIAKFTKLPSSSLLTQNIHAPENWLVEVIKSVYDLDNIKLDNVAIGVHSEFELEYLLLEGHCFETSIGNPPRGLQITLGTEKEPLMVDTIVMANLGYFQLKANPGEWLLKLRLGRSADIYDIVNVDGLEVIHNESKVKVLISSLKSNVLKLKVTKKSEKVDIDLLAEDDKESGIWNSISRTFTNAEKSNEQNEKLNIFSLASGHLYERFIKIMMLSVLKHTKTVIKFWFLKNYLSPTLKDFLPHMAKEYGFEYELIQYKWPRWLHQQTEKQRTIWGYKILFLDVLFPLDVKKIIFVDADQVVRADLKELIAMDLGGAPYAYTPFCDSRKEMDGFRFWKQGYWRNHLQGRSYHISALYVVDLKRFRRIAAGDRLRGQYQALSQDPNSLSNLDQDLPNNMIHQVAIKTLPQDWLWCETWCDDNSKQYAKTIDLCNNPMTKEAKLQAAMRILPEWITYDEEIKSLQLKIMRIIDNENKQTEKEEGFINEESAKHEEL

SEQ ID NO: 4277 - protein, 1437 aa, Cyprinus carpio
MRLIFLVLVLLRVQHVHSASKGVVASLQAKWSMTPLLLETSEFIREDDEEKFWKFVDTVKELTVYKNGESVRSYYNLIIKKAGQFLTDLQVNLLKLSLSLRAYSPAVHAFQQVSTFLPRPYLYKSDHQYPGVNGTDLPVAVLYAEIGTKEFNTFHKVLSERAQDGKLIYVLRHFVSEQKNEKMLLSGYGVELAIKSTEYKAVDDTQVKESKSVTTDNVDENDEVQGFLFGKLKKSHPELQEELGELRKHLLESTNDMTPLKVWELQDLSFQAASLIMTVSKFDSLKLMQDLSQNFPSRARSLTRVAVNQDMKKEIEENQKRLSESMGIHPGDAGLFINGIHVDLDLHNPFSILDILRTEAKILQGLHNLGIRGSSISKFLHLPSSTTLEDGYALDIRHTSIMWVNDIEKDSMYRHWPSSLQELLRATFPGVIRQIRRNFYNLVLFLDPVQEESIELVKLAELFYKHNIPLRIGFVLVVSADDKVDGYLDAGVALFRLLNYISEEYDEAQAFTSMVSIFNRVEVGETLSVDTVTAYLKKKFPKANAARILGVDSSYDDNRKAGGGFYRKSGLGALPVGLFNGVPLSSEEMDPEELETVLLQKIMETTNFFQRAAFMGQITESVDVVDFLMEQANVVPRINPLILSSERRYLDFTSSPVADDWDDTTVFSYLDSRDKTAVVSKRMKYFIRDEEEVLYGGTVWIVADIEQPPGRQLLRNALKHMKSSSSSCRVGVINNPSGKPTEDNSSLYRAIWASLLTQSSKNTLDFTLKLLKEENVELLKQGTKIKHLLKQILSLLDEEEEFSVEDFHLLEKITLRTSAEKIKSKIKQMNLNAEKANDLIMKVDALLTSSPKGEARKDVKLLKDKHSVLQLAQREDEVFYDVVAIVDPLTRDAQKLAPLLVVLGQVVNMKVQVFMNCRAKLSEMPLKSFYQYVLEPDVSFFGNNSLSPGPVARFTEIPESPLLTLNMITPESWMVEAVSSPYDLDNIHLQEISGVVNAEYELEYLLLEGHCFDLSTGQPPRGLQFTLGMRQEPLMHDTIVMANLSEVCHNTKPAEREHDGTDSPLDAGDVIVVLNSFHSKIIKVRVQKKPDKLNEDLLSEGTESKGLWDSITRSVWSSLEKSFAGGPSVDEDDKKKDVLNIFSVASGHLYERFLRIMMLSVLQHTKTPVKFWFLKNYLSPSFKDTISHMAKAYGFQYELVQYKWPRWLHQQTEKQRIIWGYKILFLDVLFPLAVDKIIFVDADQIVRADIKELGDLDLEGAPYGYTPFCDSRKEMEGYRFWKTGYWASHLGQRKYHISALYVVDLKKFRKIAAGDRLRGQYQALSQDPNSLSNLDQDLPNNMIHQVAIKSLPQEWLWCETWCDDRSKAAAKTIDLCNNPKTKEPKLSAAVRIVPEWSKYDNEIKQFLKQVKEKITEGRLSSSPSSPQHTAGTGRDEL

SEQ ID NO: 4278 - protein, 1549 aa, Dothistroma septosporum
MAMAMKAALVASLLAGAWAAPSINVDLRTSFGAPPYLIELLETAAEENATSYFPLLDHIADGYFDLAKTDQELYERFRLLLKEQGHLKDEDLSSFDYALSIHSAAPRIEAHYQYYNTSIHPLVTGHEAINCDSWVHVPFSAQSYCSPELDQATARPFGKAGDELHELPFDRVLGDPLSQRPSIVYAELGSGSFREFHKTLSKTAKEGKTSYRLRYKVSKDAERKPLTVSGYGVELALKRTDYIVIDDRQAEDEAKEGTGSSPDASLNEEEVSDLRPLSQSELKRLGVKAASFIMGSETPLDTLLRLSQDFPKHSSSIAATNVSDDFLQEHIGNRDVILPPGYNVMWINGVQMMPRDIDAYSLLEHLRRERKMINGVREIGLSGSEAVNLLSHEAITESQVEQETQRYDWRDEPEGGNVIIWMNDIEKDKRYEDWPEVVSALLQRTFPGQLPSVRKDLHNLVIPVDFAEYADATLVAEQLRSFVSRKVPIRFGLVPYIRSLASTEQTKVVYYLVDRYGLSAALEYLEKSLESAGKKYTRPDEKQFQAVVDSRTLRPNKKALSLGGIDENADLQHRIAGSQAYISRIGSIDPTPPVLVNGVPVARTEDWFQTMSQRVSLDVRMVQQAVYEMRVTDDDYLPNLFLEKASVKRNPLVIPEDDSSVRQLNLGELPQFAELPGLPAKKDTIERELVHLTVAADLDSKEGFEQLMEALLLHREHDNLELAVLHIAKGHSEGQTLATGFDKHAGEAILQTLLEQFDSLSTEDQFEPKDGGANFLTRQKIYPELYRKFAADNTPDAEKHARSVWAKFRDIVAALGVAPGQKALVVNGRIVGPMSDGLSLDVSDLEALYSYERKKRLLPAAQAIEDLGLAGKASTPLAFARISNLIALSLVSDVPEGIFEAAPTVRTDVFKKWNSTHTAIHIGDEDTATIQIYTAVDPASEAAQRWIPIIKVLSELEGVHTRIFLNPKDRLEEIPIKRFYRQVLSSKPAFETDGSLRGNGARFSGLPAEALLNLGMDLPPAWLVAPKETVYDPDNIKLSLVKSGNIDATYELRNILIEGHSRDPSAGGMPPRGAQLVLGSEHDSHFADTIIMANLGYFQFKANPGLYNLALQKGRSEEIFHIDSAGTRGHAVAPGDNTTEIALMSFRGATVYPRISRKPGTEDEDVLEPAKSALDSVAEGADKLLAQVGLKSPQTSKYLSKAAKLGSDLLSRTSKTDISVDHHADINIFSVASGHLYERMLNIMMVSVMKHTEHTVKFWFIEQFLSPSFKDFLPTMAEEYGFKYEMVTYKWPHWLRAQKEKQREIWGYKILFLDVLFPLDLDKVIFVDADQIVRTDMYELVQHDLKGAPYGFTPMCDSRTEMEGFRFWKQGYWKNFLKGLPYHISALYVVDLKRFRQLAAGDRLRQNYHQLSADPNSLSNLDQDLPNHMQSMLPIHSLPQEWLWCETWCSDESLKGAKTIDLCNNPQTKEPKLDRARRQVPEWTEYDNEIAAVAKRHKEQRSATDKVAEAGLPDVHDGSLEEESIQERLQREDAERERKREKQKGHDEL

SEQ ID NO: 4279 - protein, 1490 aa, Erysiphe pulchra
MGGSNIALRIILILLINVFQNSVYGFARPSIDVELRTAFPAPPFLLELLETAGDENSSSYFPLLDRISDGIFSTTSTDEELYKKFLKVLIDDGHLADPESVSSYQLALSLRLSAPRIESHYQYYDTTAETSFISDPNESCLNWFLFQGLKYCSPSFDKAPGSVSLGLKEEKLPFDRILGNSSAPVTILYADIKSPSFALFHKVLAKNARDGKSSYRIRHRKSTNSQVKPLNIPGWGIELALKKTDYIVIDDRNDDDSKTVLPVTEKEAKLENDELDELKPLSTSEVSLLAIKASSYIMQSESPLDTLVKLSQDFPKYSSSISSHNVSMEFLTEHHYNRAQLFQDGRNTIWLNGLQLTERQMEITNLIDIMRKERRLISGMSDLGFVPSEAIKLLLHTEIASAQSPDGIDRFDWTDKIEGGNVIIWLNNIEKDKRYADWPVSLNAMLQRGYPGQLPFVRRDAFNLIIPIDLTDHLDLELILETALNFVNRRLPIRIGLVPIINNSNTMNQAKVFYHLVDTYGLQTAIAYLRSLNESKPSINLKNSEDIFDQITQKAKVKMDKTRLSFEEVLGLEDLNSRILASKKWAERLCADDVVPPVLINGVIIPKDESWLQKMSQQIYTDLQLIQQAILLGTESVKSKDFWVPSIFLDEAIHRRNKLIIPEDQKDFKFFDLNVLEKNYPEAFKDMPRFLSSSSSPNLDSVLMVLIVDLDSESGENLLINAAALHKLLPSIELLILHNPKSESESKLSHDLFFFLQNNKFRGLEGIEDIAATIDRHEKNHDSSKLEESRIYWQRFAPISSSLGILPGQNAILVNGRLTGPILNAKNFEVEDLELLISFEQKRRIAPIIKAVKDLGLENRIQSLLDAAKLSSIIALSTVPEITNSIFEEATSIRVNKFSIWKSQYTAIEVGDAMTASIQFTVLLDPASHLGQRWASILKVLSNLKGVYLKIFLNPKNGLTELPVKRFYRYVLDSKPLFDETGAIQSPNGSFSGIPQEALLTVGLDINPAWLVAPKISVHDLDNIKLSSVKSSVSAIYELKNILIEGHSREVTGEQPPRGAQLILGTKKAPYMGDTIIMSNLGYFQFKANPGYYTISLKKGRSSEIYHIDSIGARGWGSVPGDDETEVVLMSFKGATIFPRLSRKPGMEREDVLEIKSSPETSFVSQGLKYAQSILSRGNNSHENQASINIFSVASGHLYERMLNIMIVSVMKNTKHDVKFWFIEQFLSPSFKDFIPHLAEEYGFSYEMVTYKWPHWLRAQSEKQREIWGYKILFLDVLFPLSLNKVIFVDADQIVRTDLIELVNLDLNGAPYGFTPMCDSRTEMEGYRFWKKGYWAKFLRGLPYHISALYVVDLRRFRQMAAGDRLRQQYHALSSDPGSLSNLDQDLPNHMQNVLPIYSLPQEWLWCETWCSDEALKDAKTIDLCNNPLTKEPKLDRARRQVPEWTKYDDDIAALDKRRKGGNDFTEKLSESRPFETVSEIKTTSKKDEL

SEQ ID NO: 4280 - protein, 957 aa, Paroedura picta
MPSGKHSGHLHETLGLQPGEGRLFLNGLPIDLDFHDLFSILETLKSEGKAMHGLHTLGIKGDVLSKFMRLSVHDADDAYALDFRHSSVIWINNIEKDQTYDKWPTSFQELLKPAYRGMMRQIRRNLYNLVLFIDPLQEEALAFMKLVEVIYHQKVPIRIGFVFILNTNEEVDGNKDAGVALWRALNYVADEVDVAKAFTTITNMYHEVKDGDVLSVEVVKRVLRREFPYADMQDILGVHSDYDENRMAGAAFYQKTGLGPLPQALFNGVPFNRKEMNVAELETSLQKIMDATESFQQAVFMGQLNDHKDAVDFIIEQQNIVPHINEKILHTEKSYLNFIASPVPVDMEDYSTFSFLDSQDKTVVLSENMNYVTRKDEDVIYAVTIWIVADFDRPDGRQLLSNALKHLKTSSHIQLGIVNNPTAKITEDNTLVARAIVAAFLTQKNTSLRSFLDKIVKEETAKSLARGTKIKKFFVPGMADDAFEKKYNTLGVDSIRAHRIFCHEVLKLLPGQMAVISNGRVIGPLHENEFHTKDFDLLEKVTLSSAAMKIKILVKGMGLGRKRGSQLVMKVDSLLSSLPKTEVRQDVEFLKEQLSVLKIDPQQNEPFLDVVGIVDPVSREAQKLSHLLIVLGQVLNLRVKLFMNCRTKLSEAPLNSFYRFVLEPELTSGADNVFPRAPGANFLEMPESPLLTLNMITPESWIVEAVNSSYDLDNINLKEAEGVVVAEYELEHLLLEGHCFDVTTRQPPRGLQFTLGTKNNPVKVDTIVMANLGYFQLKANPGAWTLRLREGRSEEIYQIFKHEGAESSEVLDEVIVVLNSFRSKIIKVQVQKKADEIDEDLLSDGVTEEDGSFASSTGHAQLEEKEKKMDILNIFSSLPQEWLWCETWCDDESKRKAKTIDLCNNPKTKEPKLEAALRIVPEWAEYDSEIQQLISRNKKRKEKVTRPSQKESKHDEL

SEQ ID NO: 4281 - protein, 1699 aa, Echinococcus multilocularis
MFIGICCLCICFLPGQSILALSYQVSVQLGSSWKETPIIAEAAEFLAQLSPNHFWDFVDSLEYLSKTNGSSDFFSSSEKISLDAMRELEETILNVQGVPVDMDGNRDLQRRLFSLTLASRALSPAVQTANHMARVAHFQWLFDKSEVCKDSKTWGRIGSTFICNLEILEDSVRKASLACSNGCPESLADSALLSDNVYPTTNESNAVPRLVIHGDLRRKEFYAWHKKAKQLAKENRIVYIFRHFFKTASSSKTWLNGYGVALSLKSTEYKAMDDKNSEGSQDMSDDTPDLNETGSTLQGFNFAQLRANYPHLTTELNAFQSHLITGITEVKPLRAWQMQDLGLQAVQTIMDVANESRNDIAGLLMLQDISQNFPSRAYQLSQHKVSTKLRDEIKYNHEALEHLYGIRPGSSLLLLNGLALSPDIDIYALLDLLRSESRLLNQLHGLGLSTGQATQLLQASPRGEDSYRLSTFMESYKHTVTGEHLLDMRNAPILFLNDLERNFGYNSWTASIHALFTMGPPGALRHIRKNLFNVVFVVDPSQPTSIEMLKLAEIIIMKKVPIRIGLLWSVNPEVASVSRSMVRTFNYLASNVKTYPNRRGVTPGLGNPGAITALNFLTDLYANSNNGDKDLLTNDFVKTEFESSFPEAYHEDVFVEQGFQCPYDAEIKNHYDYLDISGIRQSVGSSSLISNGMVFSMDGISKMGGLQETVMTAALEQTTYFQQAALEGRLHDSLSVVDLFTADDLFVSRVNRRLLPISPPLVNKFSLGDGSDGTSVTPFLHFGRFNVPNGGLDMKNASAGEITNYLADEMRYLQKGELESETRANTVWVVLGDVEPSAGVISSHSLQLLAQAAKFMRRHAAVGTRLGLVLNPSRPPTGQAIGIWGGWGWLTRALLIIGHPAERMLHPSTVKQSQKYMNIMAAKNFVIKITEEALKVVRGEMKGVRPFSELAVTGLEVDKFLQAFTELDLDQKLSLHMTFCQKALRIQPGDSAVIINGRVYGPLGDNEIFTSEDFRLAEQLSIRSAGMDEMAKRLTKMVPDTTSSNYVSELVWRAASVLESAKWRLNAFAKSLSSEGIFTSSGISRMTFRGTKSTYSAFTLPAKNAGLNYDIVALVDPISRDAQRLSQILLVLQRSLPCSITVILNPVNGLSDLPLKNYYRFVWHPSLYAPGGGLADPPSAFFDQLPGQSLLTLGVDAPHNWMVAPIRAEEDLDNLRLADIAAHTGNHRVEAEFELEYLLLEGHCLDESTRQPPRGLQFTLGTAEKLDRYDTIVMANLGYFQLKANPGAWHLNLREGPSRDIYNIVGHEYADSPPDAPSLIAVIDSFRPKIIRTDVQKKLGHLRDSVLDVNEGEAKVSSDDSNRGKPLEKLWSVVDSTLNFIKKSSYASEDPARNPNNETINIFSLASGHLYERFLRIMMLSVIRNTKSPVKFWFLKNYLSPSFKEFIPHMAVKYGFEYQLVQYQWPRWLHAQAEKQRVIWGYKILFLDVLFPLSVKKIIFVDADQIVRADLQELVNLDLEGAPYGYTPFCDSRKEMEGFRFWKSGYWQSHLGGRPYHISALYVVDLVRFRKMAAGDRLRGQYHALSKDPNSLANLDQDLPNNMIHQVPIKSLSQDWLWCETWCSDEGKAQAKTIDLCNNPMTKEPKLSAAMRIIPEWKVYDNEITALQHHLADVKKNTSKEHTTSDSLLTQGITGKDEL

SEQ ID NO: 4282 - protein, 1383 aa, Callipepla squamata
MAGDPTAAGGELFSTLFLLGLCFCHYFKATEDFYCGISLKKVNLWTIHFYFLNSEFIAEDGNEKFWQFLETVRELTIYKQGDTEYSYYNLILKKAGQFLSNFQINLLKFALSIRAYSPTVQMFQQIAADEPPPEGCSAFVVIHEKHTCKTNEIKRLLKKANKRPRPYLFKGDHKYPTLKEDGPVVVLYAEMGTRDFVKFHKILSEKAQKEEIVYVLRHYVQKPSSRKMYLSGYGVELAIKSTEYKAVDDTQVKVTNETKKEEEEEEESDVQGFLFGKLKELHPDLKNNLKEFKKHLIETTNSMEPLKVWELQDLSFQAAARIMSAPAYDALKVMKDIAQNFPLRARSLTRVPVENQMRNEIEENQKWINNIEKDRSYITWPASYQELLKPTFPGVIPQIRRNLYNLVLFVDPVQEDTDDYMKLVELFYHHNVPLRIGFVFILNTEEEIDGNEDAGVALWRTFNYVAEESDVFQATTCIIKMYHEVKDGDVLTVNHVKNILRREYSRADVQSILGVDSEYDEGRKAGTTFYKKTGLGPLPQALFNGVPFNREEMNAAELETVTLQRIIDASGFFQRAVFMGLLNDHVNAVDFLMDQYNVVSHINPNILGAERRYLHFRSTSVPFDVQDFSTFSFLDSQDKSAVISDSMKYLTKKDEDALYAVTVWIVADFDKPSGRQLLSNALKHLGMNDDTFEKKYNTLGLDIIKTHQMFCQEVLKLLPGQMAVVSNGRILGPLGENEFQTEDFNLLERITYSTSAEKIKAVVKEMGVNTKSGSDLIMKIDALLSSLPKTEMRQDAKLLREQHSVVKIEPQENEPFCDVIAIVDPLTREAQKMAHLLIVLKDVVNVKLRLFLNCRSKLSEVPLKSFYRFVLEPEIMYGINKHLPSEPVAKFLELPESPLLTLNMITPESWLVEAVNSSCDLDNIHLQDIKETVVTEYELEYILLEGHCFDVSTGQPPRGLQFTLGTKNNPVMVDTIVMANLGYFQLKANPGAWTLRLRKGRSEDIYRVSSHEGTDSVGDLEDVIVVLNNFRSKIIKVQVQKKPDKMNEDLLTDGTTEKGNLESVTRFSEISPEEKENNSDILNIFSVASGHLYERFLRIMMLSVLRHTKTPVKFWFLKNYLSPTFKDVIPHMAKKYAFKYELVQYKWPRWLYQQTEKQRIIWGYKILFLDVLFPLAVDKIIFVDADQIVRSDLKELRDLDLKGAPYGYTPFCDSRKEMDGYRFWKSGYWASHLGKKKYHISALYVVDLKKFRKIAAGDRLRGQYQALSQDPNSLSNLDQDLPNNMIHQVAIKSLPQEWLWCETWCDDESKKKAKTIDLCNNPQTKEPKLEAAARIVPEWVDYDTEIRKLIQQIEKEKKSKTFSEKGNGVIRRIRCIFIAFHPL

SEQ ID NO: 4283 - protein, 1597 aa, Auricularia subglabra
MRSSTIAGLALTALQWRAHAVSPPVKVALRTSWPAPSLLLEIIESAALENPASYFGVLDLLTSDEALPSTTLTSQAIYESSIELLATHGFLSEPGSRESLELALALHAATPKIEAFYQYHSDLNIKAPACGSYVEWYGERVCDAATLRRLVEVDTIDATYPRPTLLTIDHIYPDPSTALQTPNRTAILYASLDSPNFRELHEALLALSKPIGEHQIQYVARYVPPGDRSAAPKSYLSGYGVALDLKKMDYLAMDDRHDGTADEATAEETLLDESAEILHTLVNALDDEQKASALSKEEIAELGLRASQIILDASNPLAMLKEVSQNFPKYALAIGRKASYAEELREELAENQHRVGGGVNVLWLNGMMVQEGDLNPFNLLSILRKERTIMRSLMSAGLSAPQALDLITHPLVADSQSSGEVTDGIFDASDRKEGGGVCVWYNDLTKDSRYAKWSADLKNLRRPMFPGQFPHIKQNLWNVILALDLSQSASLNFIAGSVSNIIQRNFPFRWGIVPLIESDNAAKAARLFYYLIDNYGRAKTTQFLMDLAGEGATSTLDWTVARAGFAALVAEQAPRREDATTDFDAILSGEDGRIEQAKAYAKRLALRAPADGPGYGFVNGKFYDIDDDFFRHLQTEQSAQMEFLIAKVRTFLRKDELAEDVDIENFFYDLPTSSASRNEHIFPSSKSGNALRVANLPDLFGRFSLGTTFEGVAPESAGPFQYLQLLSNANLGYAAVDALLVTLWIVADFDTPEGLAFAKEALKAAELEAATPFRVGFIQNSDPAMSVTLEDSPLRSSHVLYLLAKSNAAAAVSPGQVLLLLDLLEKHDYDEAPVAELFKAASFDKAERTAFGRYHVATRLISRELGIEAGQHGILVNGRVVGPVQPGDFSSADFVTLVKYEISKRIKPVVDALLAVVPELADGEKHAWADSVAFASSIISAIQIPDPTSVGLFQQQPMPRQRVYRTHLQGNHSTFEVGDSSKSIFNFGLLLDPLSEAAQRRVDLLEWLARSPSAHIEVYLNPHGLPLKRFYRYSLRPRLQFGEDGLEVAAFVKFEDLPVDPIYTLGMDVHQSWLVRPHESQHDLDNIHLASLSGRDAVRGVEALFRLDYLVVEGHAREAGTNAPPRGLQLQLNTIGDNSVAIADTQVVANLGYLQFKAKPGIFRLEIREGRGRDIYNLDSVGNEGWESPLVTQVGANIALAGFDGITLYPRFSRKPGMEKTDVLEVPEDAPEEPGFVGKMVNHGQKEPSTDVAIVEDPQADINIFTVASGHLYERFASIMILSVLRHTNSTVKFWFIENFLSPSFLEFIPHLAEAYNFQYELVTYKWPSWLRAQKEKQRIIWGYKILFLDVLFPMDLKKVIFVDADQIVRTDLKELVDLDLQGAPYGYTPMGDDNEAMEGFRFWKTGYWKDFLRGKPYHISALYVIDLVRFRQDRLRGSYQGLSADPHSLANLDQDLPNNLQHEVPIYSLDKDWLWCETWCSMDRLDRAKTIDLCQNPLTKEPKLARARQIPEWSEYDAEIARFARTLAEKGLIHSDAAAVDVDALASVGGGKPAAEKAETEVAPTTVAEATQSDAAEEPESTRTEPAPSEHTRDEL

SEQ ID NO: 4284 - protein, 1555 aa, Candida boidinii
MKHFGIFQFYFLFQAISFAVCSIAVNATDHSIDLSLVGTWKKISFYLNVIETFSNESPDLYGPLIAKLLGLSVSIESEEDEYVEDTETIESNKIVYYSVQAEEDFQLNEKSFYEYAVQLFESESEHNKFKRSLLDIKLANKFYTPRIESHYQYYQNEVIPEFESKLKTEDLKSSWLYDATKYFYTNPEDTFALKTVSRTLEDKILLPFDRVIGKSGNIFILYGHFEDPVFKQFFTNLYQLALNGDLRIVWRYTPDISHESDDSEFETLGGYGIDLTLKRTDYIVVDDRGFTKEQQEKLVFDSPAEEIENSRNINSVGDITLELLNEYSKNIHLVEKEKLSELGVKLVKIILDLKDKGRSPNELLSLLKSLILEFPKHSHKISNLYNDEELELDPESESHPESELSKLKDKLSDSKLHQLPTGFYFNGAPISENNLNLYEILKVLERELNYINSLKENLGLESTEKLKQLMLNFSQYINQVESKNLTKKRYNVDSFENAIIYFNDIESDRMYAGLRTPKIAYKAKPTFGQVPQARSNIHDLVFAIHFSSQAQLYYLLQTFTVIMNYKIPQRVGVIPLIDNELDEKITKEFISTVNSKGPIEGMKLLIAIYEEIFASQLDQAEIFKYLETLEIPDAQFDLDKFYKPTKDLIENLSITQPSIISNGVFIKFTDNWQNSLAEQLDFDCNLLFEASNGDKIRKGESYRNHLMKGSLKRKVPILIPDDFSKSYEMYKQINDIPKLLNLFKNYSIIFDKPFNSDKSNDIEFNNKASTLTVIGSFYDKNFISHIITALNYLKSENSNDISRLRILNTSNNSEIFKQLEDIKDIELAVEFFENISSKFTVSKNLVNQSLASELSELFDIDLSSITPSSTFMFISGRFIDTTGIKLKEEDLESLMEFEIVTRLGIINTELIGLIKSGELVLLNTNDDLIQVSEIVSMILTSSYFYDDGRLLIDESIKRLNFSVLKPDEISHLILPASSDEKDNLIDIDLVIDPTTEYAQKLISMISLFDNMSFIKLRIHFVPDFSEKAPLSTIKRLYKGVYPSKVEFDENNHNSDNGLKALFTNVPETALFTLDVDVPQSWIVTIKEAETDLDNVKLDISGSISGIYELKNILIEGHAREGSSNVTPRGLSIEISNKKGYSDTNVMANLGYFQLKANPGLWDLQIREGTKSSEIYSLVEIYDKFISLSSKNNFAKEKKSVKLSVLDLSGREVYPIFLKKKGQENEVLVDLDPTQGQIKKSSNLWKSWSGKLNSLIKPKNVKPHADINIFTVASGRLYERFLGIMMASVMKHTEHTVKFWLIENYMSPLLKKDLPKLSEYYGFEYELITYKWPSWLRGQREKQRTIWGYKILFLDVLFPQDLDKVIFVDSDQIVRTDMKELVDLDLHGAPYGYTPMGDSRKEMEGFRFWKQGYWAKLLGDDMKYHISALYVIDLQKFRSIGAGDRLRQHYHALSADPNSLSNLDQDLPNDLQDRIKIYSLPQEWLWCETWCDDESLKKAKTIDLCNNPLTKEPKLDRARRQIPEWVEYDTEIANLLSDKPVDESTDDSNSDDHDEL

SEQ ID NO: 4285 - protein, 1676 aa, Ustilago hordei
MRALTLLSVGWAWLALALTLTSAAHLARADSPPAKVQLRASWLKIRLPSNGSPFLLELLEAARSQRPSSFFPLIDLLTSTHTATQLRSASDKWLAQTIENLIRSHQLFGTSQTHVDEALDTWRMSLALKNSTPRIQAFVHLYKALQLEDTWRSRSNKDPCVSWVHHEGKVLCSAEELHQALQDNAASSSAVSSTKQVAFGHPRSASEASYKFDTASSQIFELYADPYSDNFRELFSTLEKHATDAEGGVKYTLRWRPSLDNQPTATSGSQQTTFLSGYGAILDLKKVDYLVIDDRKLKDDSDIGDLGIATNTHDEEAAASQRASADLRWLQDQIGADSFLASTSLSSLTDSEIADLGIKAARLIMSSPDPLRALQELSQNFPSHAAALASSTKFDDGDASAALFEAVLGLSSMRIEPGASDLWLNGKRTPAKEFMPLTLLETLKQERNWSHALQHRLAGGGLNVTEAGDLIASSLVGRAFLAQAEGEGAAAIFDASDRIELKNAPEGTVQGAITWLNDLETDEATKAWSSDLMDLLRPMWPGKFPRLSLNLFNVVLVLDLRQRESCRFLSDTVIQSLGRVGLHWGLVPGGLEDDANSDSIRMARLFWFLLEEASPQVLSDVLRKTAASRAGTADTLDVSLAIKEAKFALKAVDSDETLSSKLDSILAGQDPAYTVREELSKAYINRLRATRQESPTGHVFVNGQHQPFHPQIVHILHQSIQEQIQLLAPQIYYGQLSSLSPGLSTFFYDSVGALSFRSALVPGAGSAADGEEEGVRHEAVDLFSVLVDDDVPSATSEGLFNFFYPSSGSSSSEGEEKPAALLNSTVWVLADLDSQGGLDLLTRTFEALAKEDAKFRLGVVHAPSPASQRSNREVAISTAFHRFLTDSQSSRPSPALIHDALRQPEQLRSALGLSQSSIDSDQAAFRFWNSIALPITAKLDLATPALIVDGHLVSNFDSSTVEARDITALVEYEADQKLPYITQALTLLREDVDSVDPVQRQNLVFASLSVMNGVYDSRRQNAFSSKLASRSGLPEQLGTADHIFEVGDKANADIRITLLLNPLSESAQRWSSILLMLRELEGVYLRVILNPEIKLRELPLKRFYRFSAPHRLQFDLAGKVLSEELQFFNMPEEAVLTMGLDAPAPWLTMPVEAVYDLDNIRLSDVPSSSRGKGVKAVYELKHILIEGHAREKSANSLQVGVPRGLQLLLETPDGSTSLDTIVMANLAYFQFKAQPGLWKLRIRAGRSDELYEMQSVGSAGWDSPSVGVKGDLVTLDTFSGLTIYPRVSKRKGKETEQLLEELDAQGRPVKKTRTASQSTVDGVAVSASNFLSSAKDKITSLANQITSSNPGASNAVATRKHADINIFTVASGHLYERMTYIMILSVLKHTNSSVKFWFIENFLSPSFKEFIPHFAKEYGFEYELVTYAWPHWLRAQREKQRTIWGYKILFLDTLFPLDLSKVIFVDADQVVRTDLKELVDLDLQGKVYGYPPMGDDSEDMDGFRFWKQGYWKDYLRGRPYHISALYVVDLNRFRLFAAGDRLRGQYQALSADPNSLSNLDQDLPNNMQASLPIFTLDKEWLWCETWCSNDWLDKAKTIDLCSNPKTKEPKLNRAKRQIPEWTVYDQEVARLAQRLVEEKVVGKSVVAPESQMEKKQPQEASGLMANDDGTPVHDEL

SEQ ID NO: 4286 - protein, 1562 aa, Condylura cristata
MRAAQPPAQSNGLELPPPEVGGGAPGGAGYCGVAAGGGAGRSRFHLHAMAKAADVLRLLLGITAPWLWLWLLGARTALASKAVTAHLAAKWPDTPLLLEASEFVAEESNEKFWQFLETVKELAIYKQTESDYSYYNLILKKAGQFLDNLHINLLKFALSLRAYSPTIEMFQQIAADESPPDGCSAFVVIHEKHTCKINEIKKLLKKASSRPRPYLFKGDHKFPTKKENSPVVILYAEIGTRAFGKLHSVLSEKAQNGEILYVLRHYIQKPSSQKMFLSGYGVELAIKSTEYKALDDTQIKTATNTTVEDEIETSEVQGFLFGKLKEIYPGLSDNLTAFQKYLTESSKEMIPLKVWELQDLSFQAASQIMSVPVYDAIKLMKDISQNFPIKARSLTRIAVNKQMKEEIQENQKDLHNRFAIHPGDACLFINGLRLEMDSYDPFSILDVLKLEGKMMNGLRNLGINREDMSRFLKLNSPIWDHSYILDIRHPSIRWINDLESDHMYGTWPASCQELLKPVFPGSIPSIRRNFHNLVLFIDPVQEYALDYIKLAKLFYFHKIPLRIGLVFIVNTDDEVDGANNAGVALWRAFNYITEKQDVSQAFISIVQMYEDVKKQNMLTVENVKSVLQNKFPHANIWDILGIHSKYDNERQAGANFYKMTGLGPLPQALYNGELFNHEELNTEELEMAVLHRMIDTTVYLQRDVIMGTLNDKTRAIDFLMEKNNVVPRLNPLILHTKLQYLNLISTSVTADVEDFSTFFFLDSQDKSAVIAKNMHYLTQEDDSIIFPVTFWIIADFDKPSGRKLLFNALKHMKTSVHSRLGIIYNPTSKINEDNTAISRGILAAFLTQKNSFLKNFLRKLTEEETATAIYSGEKIKTFLPEGVNTKAFEKKYNTVGVSVFRTHQLFCQDVLKLSPGEIGVVSNGKFIGPLDKNFYAEDFYLLEKITFTKSVEKIKGIVENMEMNSKNMSDLVMKIDALFSSLPKHMSRSDVTFLKENYSVIKINPQEDDMFFDVIAVVDPLTREAQKMAQLLIVLGKIINMKMRVFLNCKGMLSEAPLKSFYRFVLEPELISGSNDILRPVAKFLEIPESPLLTLNMMTPDGWLVETVHSNCDLDNIHLKDMEGTVVAEYELEYLLLEGNCFDVTAEQPPRGLQFTLGTKKKPVMVDTIVMANLGYFQLKANPGAWILKLRQGKSEDIYQIVGHQGTDSEPDLRDVIVVLDSFKSKILEVQVQKKPGKMKEDVLTDKEEEKKGMWDSIKSFTRRLHKKNDKEETDVLNIFSVASGHLYERFLRIMMLSVLRNTKTPVKFWFLKNYLSPTFKEVIPHMAKEYGFQYELVQYRWPRWLHQQTEKQRIIWGYKILFLDVLFPLAVDKIIFVDADQIVRHDLKELRDFDLDGAPYGYTPFCDSRTEMDGYRFWKTGYWASHLLRRKYHISALYVVDLKKFRRIAAGDRLRGQYQALSQDPNSLSNLDQDLPNNMIYQVAIKSLPQDWLWCETWCDDESKQRAKTIDLCNNPKTKEPKLKAAARIVPEWVEYDTEIRQLLEHLGKVKKNEILTHDEL

SEQ ID NO: 4287 - protein, 1528 aa, Denticeps clupeoides
MYLPNMAAAAGSLEAGFGTMWKVLSALLALLHLALAGTDSKAVTVTLSTKWQSTPLLLEASEFLAEESQDKFWDFVEANQNILNEHDETDLAYYELILKRAGALLSPVQLSLLKFALSLRAYSSTVHSFQQIAHNEPPPSGCAAFFNVHGQKSCDLAKLDGMVDTASERQKPHVFKSDHKFPSTNPEAPVVILYAEIGKREFSVFHQRMLFNANKGQINYILRHFVVSPSYKKVFLSGYGVELAIKNQEYKAKDDTQVEGAGVNATVIGENDPVDEVQGFLFGKLKTLYPDLKEQLKELRKHLVESTNEMAPLKVWQMQDLSFQTAARILAAPSVDALTVMRDLSQNFPTKARSITKTVVNSEIRKEIEENQKFFKGTLGLQPGDSALFINGLHIDLDVQDIFSLFDVLRNEARVMEGLSSLLIETPFIHDILKLNVQPTDSDYAVDIRSPAIYWINDLEMDSRYNSWPSNVQELLRPTFPGVIRQIRKNFHNLVIIVDPTHEDTAELLSVAEMFYSNNIPLRIGLVFVVNDEDFVDGMQDAGVALLRAFNYIVDEVDNQHAFDAVISIFNRIPSGGTLKLEHVLRFLEKRYPYVEVSSILGPDSAYDKNRKEGKGYHKQTGVGPLPVVLYNGMPYQKEQLDADELETVTMHKILDTTPFFQKAVYLGELASDHSIVDFIMNQPNVVPRINPRVLTTNRQYLDLSNTNKSTAVANSMNYMTKKDDGFIRPVTFWVVGDFDQPSGRQLLYDAIRQMKTSNNVRLGMINNPSESPSKENSRVARAIWAAMQTQTANNAKNFITKMAKEDTAKAINDGADITDFAVGGMDLTLFRSAYDSPKLDFLLSHTTYCREVLKLQSGQRAVISNGRIIGPLEDGELFNQDDFLLLESIILKTSGERIKNKIEQLGVEEDRASDLVMKVDALLSSQPKGEARIEHGFSDDRYSAVKIRPEEGEVYFDVVAVLDPVTRDAQKLSSLLMVLKQLVNVNLRVFMNCQSKLSDMPLKSFYRYVLDSEISFMADGSFSPGPMAKFLDMPHSPLFTLNLNTPESWMVESVHTRYDLDNIYLEEVDGVVAAEYELEYLLLEGHCFDVSTGQPPRGLQFTLGTPSDPVRVDTIVMANLGYFQLKANPGAWVLKLRKGRSDDIYKIYSHDGTDSPTDADDLIVVLNNFKSKIIKVKVQKKPDRMNEELLSEGSSENDSGFWESLTRGFTGGTKVEEIKQEKDNVINIFSVASGHLYERFLRIMMLSVLKHTKTPVKFWFLKNYLSPAFKEFIPYMAAEYGFQYELVQYKWPRWLHQQTEKQRIIWGYKILFLDVLFPLAVDKILFVDADQIVRTDLKELRDFDLEGAPYGYTPFCDSRREMDGYRFWRSGYWASHLAGRKYHISALYIVDLKKFRKIAAGDRLRGQYQGLSQDPNSLSNLDQDLPNNMIHQVPIKSLPQEWLWCETWCDNASKQKAKTIDLCNNPQTKEPKLQAAVRIVAEWSNYDQEVKKLYSRFQKEKERPGAVDSWQTKAQDAKQGADSHSEL

SEQ ID NO: 4288 - protein, 1563 aa, Trametes cinnabarina
MLRLGVLLPLLTWPLLHTSAAKPSVNIDLRTSWPAANLLMESIEAVVIEEPEAFFPLLDAITDPDVFPLPTERSSAKHVLEHVFNAALALGYLAEPGAYASAEMHIALHSPSPKLEAFYQYYNDHSASRADIRAAKSCGSWVDWYGTVVCDVETLARVVEVELIDSSDAVLDHTAVRAPKALPFDYILPDPSQRVDTPPRVAILYASLESPNFRDLHSYLYSAACAETPTLSYIFRPVPPVKRNTNIRTYLSGYGVALDLKKMDYLAVDDRLQSGSGSGTHADEDVASGSQEDETDVIVTRLQQYPIDDTVDVTEPLTDAELLEIGLQATQLIYDAEEPHDRLATMKHLAQNFPRYAGALARRVTVSQSLFNEVAENRARAPGGASAIWINGVNVEEKDLNPFALLRAIRRERGIMLSLLSLGLSPEQAIELLTHRTIAEAQSSGGILDGIFDASDRPEGGDVIGWLNDLENDPRYGRWGGTLRVLLRQMYPGQSPNVRLNMFNVVLAVDLSQASSLEFIGVTVNSLINRGLPFRWGVVPLVETEDGARMARLFYYLLENFGPDETLGFLLSLSQRNVPLDLLKPNVDWSAVRLNFNRLIGAQEELDEDLEQDLDVILEGTEGDLEGPRAYAMRLGATLSSAPQGHVFVNGKHFDLDDEFLRLLQTEYTEQLQHFQMKVYKGELTDEDAPKISTYFYDLPTTAKRRNTYIHPTQKAGSLRIFSLPELIKKNGLNSTAGAFIYPADTEQILLTTYIVADLDSEESRVIIKEVLKSIKPGSLSRLSFIHAPSTTSSVRDLPETTPSHIVGRLIAGNALSNVSPEQLLNVLGLSDPLEDNAQAPLSEKTAEELLSDVAGSGAAYEQYLTACRLIVRKLELKPGEAAVIVNGRLVGPMPPSAFLADDFEDLFAFEHLRRAQPVYQALSDVHEAIHEASREDLAEISSIASSIISSIQQPDPSEVGLFNAPQRPRLRNYRRLSGTYTAFTIGDNTTALYHVGALIDPLSEAAQKWTSLLEWLAEIPGVFIEVHVNPGRSTELTLKRFYRYNLLPRLSFDEHGNEVHASTRFTDLPIEPIYTLAMDAPQSWLIRPKEAVYDLDNIQLGLLSPQDRAHGLKAVFNLDYLVIEGHAREGETNTPPRGLQMQLVTSNSTPIADTLVMANLGYLQFRTKPGVYKLEIRPGRGREIFKMESVGNEGWNSPPVDEAGDEITLTSFEGVTLYPRLSRNPGMERADVLMTDVQSAEDHTSVLDNFVHKVSSLFGSKKEEKAVVPVDDGQAEINIFTVASGHLYERFASIMILSVLRHTKSSVKFWFIDNFLSPSFLEFLPEFAAEYGFQYELVTYKWPSWLRAQTEKQRIIWAYKILFLDVLFPMDLKKVIFVDADQIVRADLKELVDLDLHGAPYGYVPMGDDNPDTEGFRFWKTGYWKDFLRGMPYHISALYVVDLVRFRQTCPTTCNAKFRSTPFLRIGSGARLGVCIALYPEFHDMLLMDSAHTCITGSKDRLDRAKTIDLCQNPLTKEPKLDRARKIPEWEVYDAEISAFAKRLHERKAEPMDKPKSVHDEL

SEQ ID NO: 4289 - protein, 1714 aa, Rhodotorula sp.
MRIRRVVATLSLASAGLVVHAYTSPPVFTSIEASWPAPDLVTQYLETLALEAPNEFFPSLDFLVSHPHSHLFWPTSEPPLRPAALATAQSYADRGINPIFASQSPDAPDRLWANETIALLEASLAQIPNLANERGLLESLRVAVANREASVRIEGIRRMWEDRVAEMEVGASSTVEADDEAADSTTSAQPWRSCESWIDVGGKAACSVDEFWSFVGEEQRDETLPILLPSDLPLPNRTVYYAVDHVSPAGANDHLDRVVLYGSPVSPAFPELFHFLYHLSITKIAPHVNPKTGQTRSGPPRPPRIQFALRWKPSSRAQMTREKLVLGGYGAMLDVKKSDYLAIDDRVTGSTAAAEAGVGKAEPSEPILEIEGDAPPKMEPVKKADIAELSVRTAQFIHSAQDPFSAFVDLTSAFPRLASHLPVLVPDPSPHLISEVSTNQMTSPLARRPAFFLNGKHLTEDEVEPFALLRIMRKERKIINDLLGLEAQMTGADARHILIAGGPKEPTPSQDRIDPELLGELYDATDQQEGEGVILWWNDLEKDRRYKSWTKSVRELLRPSYPGSMAQVARNLNNLVFILDLSRSDSLQHITRNIKQYVSRGLPIRFGVVPHVGPSGDSSSVSTLMAQMTWHLTDAAGRTATMAFLDRIAQALPSGGRISEDLVKRAYSQLRTSSTDLDGEPLAPLEQVRQYGIGAKGRGSHSRLSKTRSYLERLALPQEAKGSVFLNGAHFPLDEDFTQNLQRTLGLHTQFLSQEVYMRSLTDDTDASTYFADLPQTHKRRNPFIFPSDESNPLKIVNLVEALKGVTPSWLEHGFISAPSHSADEAGHDVEPPPPIASLIVVTDLDSRDGIDLARHALLLADTDARVRVSFLHNPATAPATTHAWSLSRVFWKLVETGATEELLPRELGEWIDLGLTQAGPREQDGQAWPEENPLRQYLANGLPGRDGAEAELYWALLAFIRVRFGFAAGESGLVLNGRVIGPFRPTQFPTPDLQTLLTLELEKRILPVVAAVNATSLDSTAHDAHDLSQFYMLATSVVGAAHIADPAAGLFATSSTERRRDYLRLHASHTAVYSPQNPAALYEIAVVIDPATELAQRWAPIIRTLNELNSTIVSLYLNPSLHLTEVPIKRFYEFCFASKLTFSPSGAELQPQVRFDAIPPDVLVTYATDLQRAWLAFPRTGIHDLDNIKLGDLPLDSRERGVEAVLELETLIVEGHARDMPSSRPPRGLQLELSRPGSLNAAADRTASIVMANLGYVQLKANPGLWRLDIRSGRSADVFELESIGADGWKSAEVAKTGNEFFVSTLEGKTIYPRFRRRPGHETTELLDESAAEAVKDKTATLGIWNRVKSMLPFVAPSSTDLVDTGKRADINVFTVASGHLYERMAFLMIVSVLRHTKSSVKFWFIQNFLSPSFKAFIPHMAKEYGFDYELVTYKWPHWLRGQKEKQREIWGYKILFLDVLFPLELDRVIFVDSDQIVRADLKELVDLDLKGAPYAYAPMGGYDGEKPEMEGFRFWKTGYWARHLQGRPYHISALYVVDLDRFRQIAAGDLLRQQYQALSADPGSLSNLDQDLPNNMTPNLPIVGAGGFKRPFARTDQESLQQYTLPKEWLWCETWCSDEDLATAKTIDLCNNPLTHEPKLQRAKRLIPEWTEYDDEVASLAKRVATAQGESVAFEARADEMEQALQQQQERDDFVGSSQVEPPPAEHVKDEL

SEQ ID NO: 4290 - protein, 1494 aa, Rhinocladiella mackenziei
MRTSTLPWRSIGLALLSLTLPSTLAQSSPSINVALETSFSAGPYLVELLETAALENSSSYFPLLDRIADGVFSDLHTEQELYNKFIDVLKQDGHLSDPESLSSFKFALALHAAAPRIEAHFQYYNTSVQPYLMAAQDAACPVWVYLDGKQYCSPALDRAQQAVALPDVTDNLPFDRVLGDVLEAPPSILYADITHPLFGQFHHDVCQTAREGRSTYRVRYRPSMGSGETKPLYVSGYGVELVLKRTDYIVIDDRDAHKTGSGNVDPVSLEQVQEDELTDLKPLTTSEVVNLGLNAASFITASSHPLESLLQISSDFPRYSTLLASTNASREFLSEHTANREQFLPSGYNVFWINGVQIEPRLVNAYSLLDHLRRERRIIGELKEIGLTSAEAINLLSSEVIAEAQANEMPQRFDWRDDVEADKVLMWLNDLEQDKRYAAWPSTLPSLFQRVYPGQLPQLARDIHNLIVPVDMTDIKDIELVATSLQSLVRRLVPIRIAIIPTGTGETANLYSKLAYHILDTYGLSSLMAFFSDIVSSKKLSSNPEKSFASAIKGRPLREGREQSSYQDLLTAESLNLRLQARDNYLNRLALGGSRPPFLINGVVLPRTDNWFELMSARLYSDLQLIQQAVLQDAILEDTWVPQFFLFQAAARRNEIVFPHDPKDVKIVDVNYLTANFGEDISSLPRVAGTEAMLLSDRAHLLIIADLDSEAGRVFLSEAAAFQQKHPETDMLILHNPSSDSPPDQPSRWLYAFVQKSGRDLTIEQLQRSLENESDPLLGESDLAEASARFWSSKEGLIGSLGLSAGQTGLWLNGRLLEPSDQPLTAIDLESLLDFERRERIAPVTTAITGLGLEDRFSDALDLAKVTSLVARSLKSDLPEGLRESAPLIRMDRFKIWQDTHTSISVSNSNDPIIQIVAVIDPASEVVQPWVPILKTLSQLDGVSVKIFLNPKDRLTELPVKRFFRQVISAEPRFNADGSLENPNASFTRVPKDTLFNLGMLVPPSWLVAPKSSIYDLDNIKLSSLGDGENIDALYELEHILIEGHSRDVTNGPPPRGVQLLLGTAQEPHFTDTIVMANLGYFQFKANPGYWQISLKPGRSSKIFHIDSVGPHGYSAQAGDETTAVALLSFQGLTLFPRLSRKAGMEEEDVLGSSVLGGALDYLNKGASIASSALSSLGFKSASSSSSSSSVNADINIFSVASGHLYERMLNIMMVSVMKHTKHSVKFWFIEQFLSPSFKSTLPHLAKHYGFDYEMVTYKWPHWLRGQKEKQREIWGYKILFLDVLFPLDLDKVIFVDADQIVRADMMELNKVDLKGAPYGFTPMCDSRTEMEGFRFWKQGYWENYLRGKPYHISALYVVDLKRFRQLAAGDRLRQQYQALSSDPNSLSNLDQDLPNHMQHNLPIHSLSQEWLWCETWCSDESFSSAKTIDLCNNPLTKEPKLDRARRQVPEWTAYDEEITAVIKAATEEKEEEPVVPEEAHEEVFHDEIKRDEL

SEQ ID NO: 4291 - protein, 1500 aa, Dipodomys ordii
  MOD_RES (348)..(349): Any amino acid
  MOD_RES (354)..(354): Any amino acid
MGDASAARVAAARRVTGLCYKMGILIALTGLWLLSSVKADSKAITTSLTTKWFSSPLLLEASEFLAEDSQEKFWNFVEASQNIGSSDHHGTDYSYYHAILEAAFQFLSPLQQKLLKFCLSLRSYSATIQAFQQIAADEPPPEGCNSFFSVHGKKTCDFDNLETLLLTASERPKPLLFKGDHRYPSSNLESPIVIFYSEIGHGEFSNYHQQLISKSNEGKINYVFRHYISNPKKEPVYLSGYGVELAIKSTEYKAKDDTQVKGEKFSTNLLGLNLLFVKFRDLHPSLNEQLKELRKHLVESTNEMAPLKVWQLQDLSFQTAARILAAPVELALVVMKDLSQNFPTKARXXTLRLXNYFKGTLGLQPGDSALFINGLHIDLDTQDIFSLFDVLRNEARVMEGLHRLGIEGLSLHNILKLNIQPSEADYAVDIRSPAVLWVNNLETDSRYNAWPSSLQELLRPTFPGVIRQIRKNLHNMVFIVDPAHESTSELMNTAEMFLSNHIPLRIGFIFVVDDSEDVDGMQDAGVAVLRAYNYIVQEKDCYHAFQTLAHIYNKVRTGEKVKVEHVVSVLEKKYPYVEVNSILGIDSAYDQNRKEAKGYYEQTGVGPLPVVLFNGMPFEKEQLDPDELETITMHKILETTTFFQRAVYLGELSHDQDVVEYIMNQPNVVPRINSRILTAEREYLDLTASRMSSKEIYDDSFVRPVTFWIVGDFDSPSGRQLLYDAIKHQKSSNNVRISVINNPSQEIRNENTRIFRAIWAALQTQTSNSAKNFITKMAKEETAEALAAGADIEEFSVGGMDFSVFKEVFESSSMDFILSHAVYCRDVLKLTKGQRAVISNGRIIGPLEESELFNQDDFHLLESIILKTSGQKIKSHIQQLRVEEDVASDLVMKVDALLSAQPKGDARIEYQFFEDSYSAIKLRPKEGETYFDVVAVIDPVTREAQRLAPLLLVLTQLINMNLRVFMNCQSKLSDMPLKSFYRYVLEPEISFTSDNKIAKGPIAKFLDMPQSPLFTLNLNTPESWMVESVRTPYDLDNIYLEEVDNIVAAEYELEYLLLEGHCYDITTGQPPRGLQFTLGTSANPVIVDTIVMANLGYFQLKANPGAWILRLRKGRSEDIYRIYSHDGTDSPPDADEVVVILNNFKSKIIKVKVQKKADMANEDLLSDGTNENESGFWDSFKWGFSGGQKTEEAKQDKDDIINIFSVASGHLYERFLRIMMLSVLKNTKTPVKFWFLKNYLSPTFKEFIPYMASEYNFQYELVQYKWPRWLHQQTEKQRIIWGYKILFLDVLFPLIVDKFLFVDADQIVRTDLKELRDFSLDGAPYGYTPFCDSRKEMDGYRFWKSGYWASHLAGRKYHISALYVVDLKKFRKIAAGDRLRGQYQGLSQDPNSLSNLDQDLPNNMIHQVPIKSLPQEWLWCETWCDDASKKRAKTIDLCNNPMTKEPKLEAAVRIVPEWQDYDQEIKQLQIRFQKEKETGTLYKEKTKEPSQKGSQKREEL

SEQ ID NO: 4292 - protein, 1597 aa, Galerina marginata
MKRIFTLLGATLPVLQVAGSASSPSVKATLRSSWPAPPFLAEILETVSLENPNGFFTYLESLTDPEALASPRTSTPEAIHQAALQVAMDSGVLNEPGSLAIVEMNLAMHAATPKLEVFYNYYADNHNNSRGTKCGSWVDWYGEVVCDVETLAQLAGVEAIDAANAPPPRPKPKILTFDHIFPLPNDILERPPRTAILYASLTSPNFRELHTYLLKLTNRLDPHVEYVFRHIPPSSLAEERNYLSGYGVALDLKKMDYLALDDRHTNSEGAHNGASKLDDEGQEQRVDPLLPLILAHPENTTAPGADVPLTEEELGSLAGKAAQIIAESPVPLTALTHLSQNFPKYATSLARRVVINESIADELQNNSIKVQRGLNAFWLNGLQLEAKDINPFGLLRALKKERGVVRTLVAQGLQRSQAFDLLTHPAIAATQKNSGLVEALFDASDRPEGGDVIVWWNDMEKDSRYARWNPSLFALLRTMYTGAMPSIKANLFNIVLIMDLSQTTSLNFIAGPMTNIISRDFPLRFGLVPTAETEDGKKMARLFYHLIKNFGRKKSLDFMKSISQVQLPPDLQTPRVDWHTVKQAYEQLVEAEREEKPDAEYPHLDSILVGEAGDVAPLDKIAVYTERLGSTLAHSKQGHAFFNGKHFDINEDFLRHLQGEMGQQMAFLQEKVYEGSLTDADLAETMGNYFYDLPTTSKRRNSYIYPSTGSKNVHILNLPDVFAKTRFRVSASTYLYPSESESIPESLYIVADLDSENGLGLVKEAISSLTPDSKTRISFIHNPAIPHTADSAARSPTSWLFAHLHTRELLATVAPSTLLSALGSPAAPVDGSQTPIGKSSAFEEATGGVVLGDIMPEEYADYLKTSRLVAREVRLLPGQAAFIVNGRVVGPIKGNDFSVADFKALEDYEFRKRTDSIVQALQEVAPLLLEDKHTYANIVSMASSVVASTQQPDSSETGLFDTPPRPRQRSYQLLDSEYTSFEYGDNSTALCHVAVLVDPLSETAQKWSSLLKWLSNIPDTFIEIHLNPGRYSDIPLKRFYRYNLVPTLSFDEEGREIPAKAVFEDIPVDPIYTLAMDVPTAWLVRPREALYDLDNIQLGKLAPGDTAVDAVFDLDYIVIEGHAREASNIVPRGVQLQLVAGDNVPIDDTQVVANLGYFQFKAKPGVFQLEIREGRGRKIFKLESAGNEGWDSPTVEEAGAVITVTSFEGLTLYPRLSNLPGMETADVLQEEEEQSSKGVFEDLSSRVMSMFKAAKKEVSTEVVTVKPQADINIFTVASGLLYERFVGIMILSVLRNTNSTVKFWFIENFLSPSFLEFIPHMAEKYNFQYELVTYRWPSWLRAQTEKQRIIWAYKILFLDVLFPMDLRKVIFVDADQIVRADLKELVDLDLHGAPYGYTPMGDDNTDMEGFRFWKTGYWKEFLQGRPYHISALYVIDLVRFRQLAAGDILRGQYQQLSADPGSLANLDQDLPNNLQAQVPIYSLHEDWLWCETWCSKDRLHRAKTIDLCQNPLTKEPKLARARQIPEWEEYDTEIARFTRDLAAQGKIHSRIATADVNALAGGSTSVDSKKEDEDVETDTKPVHQEKTDNTEPTRDEL

SEQ ID NO: 4293 - protein, 1475 aa, Dipodomys ordii
MVPAKAADAVRLLLGATALWFTLLGATTASASKAVMTQLAAKWPEPPLLLEASEFMAEESNEKFWQFLETVRELAIYKQQESDYSYYNLILKKAGQFLDNLHINLLKFAFSIKVYSPAIQMFQQIAASEPPPDGCNAFVVIHNKQACKINHIKKLLKKATSRPRPYLFKGDHIFPTNKENLPVIILYAEIGTRAFSEFHRVLSQEAQNGKILYVLRHYIQCGEHLTNTVLYHPSGELYSDLRDNLTIFQKYLIEINKEMIPLKVWELQDLSFQAASQIMSTPVYDAIKLMKDISQNFPTKARSLTRIAVNQQMRQEILENQKYLGERFGIQPGDARLFINGLRIDMDVHDPFSILNMLKLEGKIMNGLQNLGIDGEDMKKLFKLNLHAQEYTYVLDIRHSSIVWINDLETDGLYVTWPTSYQELLKSVFPQTIPSIRRNFHNLVLFIDPSEEYTLEFIRLAELFYYHKIPLRIGFVFILNTDNEVERTDAAGVSLWRAFNYIAEEYDVTEAFNSLVQMYQKVKDLLTVDNVKSVLQNKFPHANIGDILGTYSKYDKERMAGSSFYKMTGLGPLPQALYNGEPFNLEEMTIKDLEVAILHKMMDTSVYLQRDVFMGILNDQMNAIDFLMNRNNVVPRINSLILDSTYQYINLISTSVTADIEDFSTFFFLDSQDKTTVIAKNMYYLNHEDDNEDEEVVSAVTLWLIADFDTPSGRKLLSNAIKHLETSVYSRLGLIFNPTSKINEENTAISRGMLAAFLTQKNSPLKSFLKKLTEEETATAIYSGDKIKNFLTEEMDKNAFEKKYNTIGVNIFRTHQLFCQSVLQLDPGEISVVSNGKFFGPLEEEFHTEDFLLLEKITFSNLMDIIKDIVESIKINSDDLSDLVMKLDALISSLPVHASRYDVTFLKENHSIVKINPQENDMVFDVIVIVDPLTREAQKMAHLLVVLGKILNMKITLFMNCRSKLSEAPLKSFYRFVLEPELVSGTDNNPSPGPVAKFLDIPESPLLTLNVITPENWLIEIVHSNCDLDNIHLKDIESTVMAEYELEYLLLEGHCFDTAEQPPQGLQFTLGTRRKPVMVDTIVMANLGYFQLKANPGAWILKLRQGKSEDIYQIVRHEGTDSQPDLGDVIVVLNSFRNKILKIQVQKKPDKMKEDILIEDKHEKKGMWDSIKSFTRRLHKEDNKDENDVLNIFSVASGHLYERFLRIMMLSVLRNTKTPVKFWFLKNYLSPTFKEVIPHMAKEYGFQYELVQYKWPRWLHQQTEKQRIIWGYKILFLDVLFPLAVDKIIFVDADQIVRHDLKELRDFDLDGAPYGYTPFCDSRTDMDGYRFWKTGYWASHLSRRKYHISALYVVDLKKFRRIAAGDRLRGQYQALSQDPNSLSNLDQDLPNNMIYQVAIKSLPQDWLWCETWCDDESKQRAKTIDLCNNPKTKEPKLKAAVRIVPEWVEYDTEIRQLLDHLENKKKNTILAHDEL

SEQ ID NO: 4294 - protein, 1523 aa, Fundulus heteroclitus
MTMEKVLLLSLLLLMLHRVPAAPKGVTASLKAKWSMTPYLLETSEFIGEDGNEKFWHFVDTVKELTVYKQGETVRSYYNLIIKKAAQFLTHLQVNLLKFALAMRSYSPAVHASQQIASDEPPPEGCPAFVSVHGQRSCSTKDIKKLMKAAAGRLTPYLYKNDHTYPGLNKTDVPVVILYAEIGTKKFNSFHKVLSEKAEEGTLVYVLRHFVAKPKPQKVLLSGYGVELAIKSTEYKAVDDTKVKDSKAVINTEDDRNEEVQGFFFGTLKKSHPELEEQLGELRKHLLESTNDMAPLKVWEMQDLSFQAAARIMSVPKFDALKVMRDLSQNFPSRARSLTRVAVKQEMRKEIEKNQKHLGETMGIQPGDGELFINGLHIDLDVHNPFSILDILRGEAKVLEGLHNLGIKGEQKAKLLRLPVNTVDDSYALDIRHPAIMWMNDIENDQMYRSWPASVQELLRATFPGVIRQIRRNFFNLVLFLDPLQEETVELVKLAELFYKHKIPLRIGFVFVVNTKEEIDGFSDAGVGFYRLLNYIADEYDLSQSVMSIVSLYNKVDVWEGLSADTISAYLKRQYPKADQERILGADSEYDYKRKDGALFYRKSGLGALPVALFNGVPLNPDEMDPEELETIILQRIMDTTAGFQRAVFMGQLTEGSNVVDYIMEQANVVPRMNPLILSTDRKYLDLTGTPVVNEWEDTTMFSYLESKDKTAVVAKRIKYFTNSDEDGLTAVTMWVVADFEKVSGRKLLLNALKHLKSSPGLRVGVIDNPSGKLSEDNTVLYRAVWASLLTQKNKAAAEFAQKLLKEESNQLLQQGTKIKDLGMQGMDLDAFEKKFNTLEVDFIRSQQMFCQDVLKLRPGQRAVISNGRILGPLEEQEEFTVEDFHLLEKITLSGSAEKVKAKVKQMGMKPKQASDLVMKVDALLSAAPKGEVRRDVSLKDTQSVLQLSPRENEVFYDVVAIVDPLTREAQKISSLLIVLSQVVNVKLQVFMNCRAKLSELPLKSFYRFVLEPDVAFLANDTASPGPVARFTELPESLLLTLNMITPESWMVQADHSLHDLDNIHLQEVNGVVAAEFELEHLLLEGHCFDLSTGQPPRGLQFTLGMSQEPLMYDTIVMANLGYFQLKANPGAWILRLRKGRSEDIYQIVTHDGTDSPPDAEDVIVVLNSFHSKIIKVRVQKKAEKINEDLLSETSESKGIWDSIVSVWSTFEKSITGGGSKKDEGEKKKEDILNIFSVASGHLYERFLRIMMLSVLRHTHTPVKFWFLKNYLSPSFKETIAHMAKSYGFQYELVQYKWPRWLHQQTEKQRIIWGYKILFLDVLFPLAVDKIIFVDADQIVRADLKELRDLDLEGAPYGYTPFCDSRREMEGYRFWKSGYWASHLGQRKYHISALYVVDLKKFRKIAAGDRLRGQYQALSQDPNSLSNLDQDLPNNMIHQVAIKSLPQEWLWCETWCDDASKVTAKTIDLCNNPKTKEPKLMAAARIVPEWVEYDEEIKKLLRQVQEQTPTPSLHKKENRRDEL

SEQ ID NO: 4295 - protein, 1530 aa, Apis florea
MSFMENLKMRLIICLYFLILCTIYIEAEKRVNKYVTTLIDAKWKETPLALEAAEYLNDENPSYFWKFIDNFANYDLRNVTEKDNYDAVIAFAEKYLSHSELALMKLGLSLRIYSARIEMFTQMVENKNLSFLDCYNIVDIGGVFTCSLEELEKLAIQDTWMRPDIYSVDHRYHTSQQSDKIIILYGQIGTPKFLDFHNKLKDLAETNGINYILRHYLKDRTDKNVRLSGYGVELQMKSTEYKATDDSDIKDNTGKDSETTTDNMEEIDGINFVTLKNLYPNKQLELDKLQTHLLETSHEIGALKVWQFQELSYQAAERIMNSPTNEAINVLTDISQNFPIQAKSLIRTKVNNEMKKEMKLNQAIFSTSLNIQPTDTALFINGLFFDLEAVDVLSLLESLRSELRIMESLRKIGFSNKEISTLLALDLSTNMDKQEFAMDIRDSAIIWVNDIEQDSAYARWSSSLTELLRPTFPGMLRNIRRNLYNLVLIIDPLSGESSPLITLAQSLYLHSAPLRVGFVFVTNYDSSITGLTDASVAINNAYHYFAETKGSEHALQFLIDLGNYIGPEGVDIEDIKKTIKIQDSSANINYILGEESEYDVGRHLASDFVKRSGFRKFPQALLNGVPLSSDQLNANSFEEAVLSTIISQTPALQKAVYRGEITEGDDVVDYIMNQPNVMPCLNERILKPEKHTWLNLIGTIPNDEDYNKWSPQDLSTWLINKMRYIYVPRRTTVHHLYTFWIVTNLNELKGRQLLREALEYIESNADVRISIIVNPLADTNNNTIDINQIVLAALHTLPVEKIMRFIRNIIKEDMATVILNEKKVDIEEEIIKERLKNQIDELYIHRRYIKTVLNLEKGARAIVCNGRLIGPLDDDEEFTNEDFSLLERFTQSTYDDKLLKKLIKGQLLENDEYEKNEITDDMIMKITSLLASHPQTRSRFHIPFHGDDYSAIKIPAMNPDEVSFNLIAIVDPVSRGAQKLGPILKTLQQSLNCNIKVFLNCLDKNSDMPLKSFYRFVFEPQLQFFLDGRINGAMAKFTKLPTSSLLTQYIHAPENWLVEVIRSVYDLDNIKLDNVAIGVHSEFELEYLLLEGHCFEAVIGNPPRGLQITLGTEKQPLMVDTIVMANLGYFQLKANPGEWVLRLRQGRSAEIYDFTTVGGQDVLQNDNDVKVVISSLRSHVLKVKVSKKPDKVGMDLLSEDDKSSGLWNSISSFSKFWTFTTTDDSDDQDEKLNIFSLASGHLYERFLKIMMLSVIKHTKSPVKFWFLKNYLSPTLKDFLPHMAKEYGFEYELVQYKWPRWLHQQTEKQRTIWGYKILFLDVLFPLNVKKIIFVDADQVVRADLKELATMDLGGAPYAYTPFCDSRKEMDGFRFWKQGYWRNHLQGRAYHISALYVVDLKRFRRIAAGDRLRGQYQALSQDPNSLANLDQDLPNNMIHQVAIKTLPQEWLWCETWCDDASKKYAKTIDLCNNPMTKEAKLQAAVRILPEWIGYDEEIKALQLKLENDNRQTEKEENEIFEDTENFTKHEEL

SEQ ID NO: 4296 - protein, 1512 aa, Erpetoichthys calabaricus
MSLLLCLGFLLPTVLHCDAASKGVTVSLKTKWPMTPLLLETSEFIAQEGNEMFWQFVDTVREITIYKKDDSEQAYYNLILKKAGQFITDLQINLLKFALSLRVFSPTVQKFQQMAADEPPPESCSAFISVHGKLTCSPNEIKKLLKKAASRPRPYLFQSDHRFPAFNQDNLPVVILYAEVGTSSFNAFHKILSEKSGKGEILYVLRHYTANPRLEKINLSGYGVELAIKDTEYRAVDDSEVTGSQIPNATIPENEDEIDDVQGFLFGQLKNSYPYLKEQLGELRKHLIESANEMAPLKVWELQDLSFQAAALITSARKYDALKIMRDLSQNFPIKARSLTRVAVNTELRKEIEENQKHLTDTLGIQPGEAGFFINGYQIELDTTNPFSILDRISSEAKVMEGLYGHGFKEDNLNKMLKQSVHSVKDSFALDIRHPAVLWINDIEKDSMYSSWPSSCQELLRPTFPGVMRQIRRNFFNLVLFINPAQEHTNELLGLAQRFLKHSVPLRIGLVFIINSSDNVDGHKDVGVALFRIISYLTEEYDTSLALSFMFSVYSGLKSGEVLTIDKLIKFLNKKYPRANVDTIIGSDSPYDNNRKDGGAFYKKSGLGPLPQILFNGLPFIQEALNLDDLEIVTMQHIMDSTNFIQKAVLMGEMTDEMDALQFLMEQSNVVSRMNPLILSSKKEYLDLTSKPALEDWQDFVTFSFLDSRDKSAVVMENMKYLTNHDKDIIYAVTIWIIADFDKPSGRRLLSNALKHMKKSTNIRIGLLNNPESKGLSDDNTVVARATWSAILTQKQQVVVNFIQKLIKEETQQRLHQGTKMKYLVVQGMDSNSFEKMFNTLGVDFIKSQQLFCRDVLHLLPGQMAIVTNGRILGPLDESKDFDPEDFHLLEKLSFDGSAENIRLRVKQMGIKGKQASDLVMKVDALLTSLPREHTRRDIQFIKNKLCVIHQAPREDEVYFDVIVIVDPLTRQAQKVAHLLIVLGQVINMKLQVFMNCKSKLSEMPLKSFYRLVLEPDIIFLANKRISAGPVAHFIGLPEAPLLTLNMITPENWLVEAVRSSYDLDNIHLKEIDGLVRAEYELGHLLLEGHCFDATTGQPPRGLQFTLGVKNNLLIQDTIVMANLGYFQLKANPGAWMLKLRKGRSEDLYQIVLCDGADLPPNADNVIVVLENFLSKIIKVQVHKKPHKIGEEILGDESEEQITMSFEEESNNLEKKNADVLNVFSVASGHLYERFLRIMMLSVLRHTKTPVKFWFLKNYLSPTFKETIPHMAQAYGFQYELVQYMWPHWLHQQTEKQRIIWGYKILFLDVLFPLAVDKIIFVDADQIVKADLKELRDFNLSGAPYGYTPFCDSRKEMDGYRFWKSGYWASHLGKRKYHISALYVVDLKKFRKIAAGDRLRGQYQALSQDPNSLSNLDQDLPNNMIHQVAIKSLPQEWLWCETWCDDQSKTKAKTIDLCNNPKTKEPKLKAAMRIVPEWTEYDEEIKQLLKQAEGQKKRAKSKSKKNVAHDEL

SEQ ID NO: 4297 - protein, 1486 aa, Hirsutella minnesotensis
MMHSPSMSLALGAIILTALPVHALPSVTMGMNAAFSAGPYLLELLETAAAENETAYFPLLDRLASGYFDPASSDADLYGKFVEVLEKDGHVSSPEALSTFNLALSLRSAAPRIEAHYQYYDTAVKPLIAASECQTWVLLEGKQYCNPKLDGSRKEGLPLIDKSVLPFDRTWGSGKEVVLYADPTAKDFGDFHNVLYKAALDRRMKYRLRYRRSQTTTKQHLPVSGYGVELALKRTDYIVIDDREGSKESSQKPLSSAEVLDGEEEVADLRPLSTSELASLGMKTASFIQKSDKPFETLVKLMQDFPRYSASIASHNVSDDFQSSHEKNQLRTVPGGVNFLLMNGVQLIERQIEPFALVEMLRRERKLLNGVRDLGLDGKQAVSLLGHKAISTAKDDDEPLRYDWTDKAEDGKAILWLNDLEKDARYEGYPKSLTSLLQRVYPGQLPPIALNVFNFIIPIDFSDKSDLEFLIQIAPLVSRGIPIRFGLVPLASTDEATARAKVAHHLMETYGFEALVSYLDSLDQDSQVVIDDKLLNRITADLELLSDTKKLSINEISTAEVLEQRIKSAQHWVSRLKADTRPKPFFVNGIATLRDKSWMQTMGMRVSEDLQTVQQAIFDGSLNEDTWIPGIFLKQAASRRNVYIALDNDKALRMLDVSRCYTDHAKLFRSVPVLEPFSESTKENWAVATIIADLATDDGLQLALAALEFKRNNPGIRLELIHNPEEISTATDFVAAIKASEDKLGDIETAEQFNLLLDNAAKAGIDEDYAAVLTAFLKMGKISAGTKTIVLNGRIVGPLPGNESFTTDDFQQLLDFEQTRRILPVYAALDDMGLSDKLSDAVAAAKATSITALSTISDLPEGIFESAPALRSTMYEKWNMSHSTIELGDPQKANIHIAGLLDPVSEKGQRWVPILKVLSELEGVYLKLVLNPREKIDELPIKRFFRYVMKSKPSFDESGKVEALRASFKNLPSEALLTAGMDVPPAWLVAPKESMHDLDNVKLSTVTSDVEATYELEHILIEGHSREDRGKAPRGAQLALATEKDPMVTDTTIMSNLGFFQFKANPGFYNIKLKEGRTAEMYTIESIGAQGFEAVPGDEGTELALMNFQGATLYPRLKRRPGMEDQDVLKKTDDASGDSLVSKGLKFAGGFLGGSKDKPSSALEHAEINIFSVASGHLYERMLNIMMVSVMKNTKHTVKFWFIEQFLSPSFKEFIPHMAKEYGFNYEMVTYKWPHWLRQQKEKQREIWGYKILFLDVLFPLSLDKVIFVDADQIVRTDMMDLVNLDLKGAPYGFTPMCDSRVEMEGFRFWKQGYWATYLRGKPYHISALYVVDLRRFRELAAGDRLRQQYHALSADPNSLSNLDQDLPNHMQFEIPIHSLPQEWLWCETWCSDESQAAARTIDLCNNPQTKEPKLDRARRQVPEWTLYDDEIAALDRRVRGAKPRSGTGGEPDHAQSVASEEKDHQAQRATSKKASETESHSKDEL

SEQ ID NO: 4298 - protein, 1483 aa, Plasmodiophora brassicae
MPLSLCWASAALVGVIVAVAAASDVDVELRSEFPPGSLTHQALEFYGELSLFWEAVAIAADAHQANGTEQDEFARIMSSCLEHHTASVCSVLQMTLALNAYSPRLETNRQLLKETLRRKGPVTACSKAAIVSYGDEAVSCGFDESLAVSVSNASIFSFDHLHPLSSSPGRPVIVYADLGRQGFAEIHKRITESRSLAYVVRLVSLDDIEDARVPSFNLNGYGIELAFKNMEYNVLDDRNADSEQKQEAAVNGVFFETLSKRYPKSASALQKMKGEGDDIKVWDMGKFGLQALQRIASSKDSLGTLASLAGDFPNYAASLRKVRVPKEVSESVDALHASGIPAGFSALTLNGISLDSSDLDIFDIHAIAVKEAAYIALLDKMGLDHSQVRNLLQPPNNGRPPSPATLFARVADNNGVRLDTRDDVIVWMNDLEKGSKQYRDWPRSFFSLLQIGYPGQIRALARNVYTCVAIVDPTTTDGLVLVDWLKEFVKMNAPLRVGIVFNIDHGGENRGASEVAAREVLGPDLRESLGVNGTTNQPERSGNSQTSGAVIAAVFKALFKLSKKKAFTFLSKLATHVQSPAPPTLSTIRFCMPSSDRALLDTAVDEFNDYIVSCKQYVKGRRLNSGSLFFVNGVAHVFDSLVGRQAFQQRLIRIIYLWQHAVSLAVRDGLLNDDTDLERFMFDADDVVQVQSDVVAVPKSSHKYVGDYHVVAAPSGLRYVSEGFTTVWVNADLDTDLGARIAFNAVQFAIRNGDVRLAFVFPTSVTANGQASDRLTSVNWVVASLQNVQDIARVLAVKCSQSLWSPTVTVEHALSLVLGSGAALRDDLPSLGASFPDPAVVVDGRVFGPLSRPLDISEFGVVLQGRQVIPDDIVQDNAWLVRSILGCRARDSSVQALPALPHGQATSLRFPSPSSSLSVTAVIDPLSETAQKLAPVLLALRKDLHWDITLVINPTTQATSVPIQRFYRYVFRPTLEFLANGARDHRAATASFSSLPTAPVLTLSIETSEPWMVESVDAAEDLDNLQLVQNGRVQATFALKHLLVYGSCTDAATGSPPAGLKLLLGTPSDLHVQDTIVMENLGYFQLKASPNIWELTLAPGRASEIYEFPQDAGHVTGFATGSDGRLRVIVRSFVGSHLRLNVARRPGMEQADLSLEVTAPASKGFWGSINSMFGSDNNRGNAADKTIHIFSLASGHLYERFLRIMMLSVIKRMAGTGYSVKFWFIRQFLSPQFKSTIGAFAEQHGCSVELVTYKWPYWLRRQREKQRVIWGYKILFLDVVFPIQLDRIIFIDADQVVRGDLSELWNLDLRGRPYAYTPFCDSNKETEGFRFWKGGFWRDHLRGKPYHISALYVVDLKQFRRMRAGDTLRALYDNLSADPNSLANLDQDLPNYAQDHVGIYSLPQEWLWCETWCSMGSLKKAKTIDLCNNPMTKEPKLSRARRLLPEWNELDAEANPRDESRGIPSVPASPGRPAPNDDERNEL

SEQ ID NO: 4299 - protein, 1369 aa, Kazachstania africana
MKMLLLLVYLLCQFLSRTLAIKLSVPNDAFGVPESLRIWSIVNKLALDNNIDASILNELYPVITKLEELDEAQSVTDLVYDHLNDAVSNDMAQFFKLFDSLYPMGLQFEDDLNTPLNNDNFFMLNDQKYSKPDDVFYLKSKELKNQAKLGDSDVIASRNDVVIGKNADAPILLFYGCPVNDEFDDFNRNLYNEAITTDKIRFIWRSTCSMNFPSKINSEFPLTFTVNEESDLKSLLDTKLPFNIPHEFTDLDKLSFAKPTQEELSDMDMKVTSFLVNHYQETKNLTESLEYTRAVLNNYPFLMQHFIEMQPNKKLNSLISRSNEELERMGIDYKMLGLYINGQNHKYSTLDQYTLLNAIYKEYREIQNLQDILEKYLPTNVLTPTLAKDLLNSYSSFSLPHLKELQPIKLDLHRIRGFSESVIYFNDIEEDEQYEELEKDATKFFEKSKFGEIPEYRRNWAELIFVINFDILNKDPDTQHALMGLNRAVQITGEGYPQRIGLLPLGSRENPIVKKIYELKDTDSSELKLFLEELGSKEDVIFSDFSNIPNVGKLLKQLQIAETSIIVNGEIYPFKMNTWNYLIAKVIKKDVAFIKQELNEFAARNNVQGDKNVDVRALLHLKSADSRHPKYTPDYFADSVYTKSNDNTLNTIPQNIIEFSFSEKYNILHTITLYDNFDSQIALKRLKALSKIKFHGIRIRMVHSGDVTSSNWISLKNNLSSRKQLIAKVDNLITKSYRNIPDTTSIPLQVLHSWLPDIPLEHLKSHSFFLFNGRFIHLDSDEVLSVKRLQAIVKREAQRTLDTVYALNEIDPAFGEKMADPGFIETVSSILTMLYYKGTTIYEDGIEYTTETTLSRMDFSQILAVNNITYFEQHNHVEKPVDLLLIIDPLEERTQHILSLLSKVENLEFINIKVLLISTLSLNIVPIERVYTLNQKIQMKELRENDLLNNWEVDIETPTHFSINSFTRLESTVIEVHAFNEDSPISGSNVDGIGGVRLQLLDSSGSIIDTLSTMTTFGYGQFHLNQLGKNFTIKSADDGYEVESFSLHGYADYVPSSSFDMLDFNPKKIYIKVKILDRVSKAVEQDGGFNIFSVLKTHEDEESYKRMILSILLWKLVEDDTEQLTFWILDQPFISEEFKQYCEIINEQNELRGKIRFIDYDWPAWLRPQRFRSRKVDISKLLFLDVLFPENITSIVYMAPVATPIDPSSLFELDAKAKSFRLFRVKGKGYWDEGYWEKVLKENNLSFYSIGPAFLMNLDVIRANGDADKLRIHYQRLSADPKSLINIDQDLLNDLQTAIPMGSLRRALLDKPKLDTTLIERWESVIQDSIAAANSAAMDKEHDEIDYKNVSNDETTTLEEDEDYFHDEL

SEQ ID NO: 4300 - protein, 1678 aa, Ustilago maydis
MKALPLLGIGWAWMALILAFSIPTSTVKAEAPPVKVQLRASWSRIELTSGGSPFLLEVLEAAQAQRPSSFFPLIELLTSKHPPSELLQASDEHVAIIVEELIRSHELFSASSEHAEEALDAWRMSLALSNSSPRIQALVQLYQTLNLDKVWQQGSRNTSCVSWVHHQDQVLCSGNDVRKAIQKSKSASTTQTQIQGVSLGHSRKNTRSKTAAHSFVLYADPYSDNFRELFSTLEEHTSQHDTEFTYTLRWRPSDNHDDRPTSESKSHVQRLSGYGAILDLKKVDYLVIDDRKLKDDSNVGDVGIPGESESEQANAAQRASQDAQWLREQIDADVEASAVTLSSLSNDQIADLGIKAARLILDSSDPLRALQELSQNFPSHATALASSTKWDDASTSAALIDAVLNLASMRIEPGQSDLWLNGQTTNARDFMPLSLLETLRKERGWNHALQHRLAGGGLNVTEAGDLISSSLLGRAWLAQADGNAAAATFDASDRIEIKNAPEGTSTGAITWLNDLEKDQATSEWSNDLMDLLRPLWPGKFPRLSLNLFNVVLVMDLSQKETCRFLSDTVLQSLGRVGLHWGLVPGGLEDEANADSIRMARLFWFLLDHAGAEVTSDVLRKAAASKTGSAGALDVSIAIKEAKFALKSLDAESSLTDQLEKALAGDNDIYIQKESLGRAYIQRLRADRHESLTGHVFVNGQHHAFHPQIVHILHQTIQEQIQALAPQIYYGQISNDTPGLDTYFYDSVGALSFRSALVAGASGAQEGGLVHSAVDLFSALVNDEEVVASNEEVFDFFYPAASQDLMNSTVWVLADVDTQDGLALLTRSFEALARDDAKFRLAVVHRPSAWNDRKTTMSTLLFHLLKQGDLGQLLPSEMLQALRQALDEPSITWQQMSDQLRVHTDGPISESEVRRFWNSVGLAVTSKLAIPEGPAILVDGHLVSNLTVASIEARDITALVEYEAGQKLPYLTQALKLIRRDLDDMDPKQRQSLIFAALSVMNGVYDQTGQGVFTAKTSTRSGLAEQLGTSAHMFEIGHRETADVRITLLLNPISEAAQRWSSTLLMLRELKGVYLRVILNPEIKLSQLPLKRFYRFSSPQRLEFDSDGRVIAPELRFFGMPEEAVLTLGLDAPASWLTMPMEAIYDLDNIRLADVPSTSRAKGVKAVYELKHLLIEGHARELVAGSAVSVPRGLQLLLETPDESKSLDTIVMANLAYFQFKAQPGLWKLRIRPGRSDELYEMQSVGNQGWNSPPVEQTGADVTLDTLSGLTIYPRVAKRSGKEKEELLEQLDAQGRPVKKQNSVDSGLAVSASAAGQLMLSAKDKLFSLARQVGGTTPTHSATAVATARKHADINIFTVASGHLYERMTYIMILSVLKHTSSSVKFWFIENFLSPSFKEFIPHLAAEYGFEYELVTYAWPHWLRAQKEKQRTIWGYKILFLDTLFPLDLGKVIFVDADQVVRTDMQELVDLDLEGKVYGYPPMGDDSEDMDGFRFWKQGYWKDYLRGRPYHISALYVVDLQKFRLFAAGDRLRGQYQALSADPNSLSNLDQDLPNNMQTSIPIHTLEKEWLWCETWCSHDWLKDAKTIDLCSNPKTKEPKLDRAKRQIPEWTLYDAEVARLAQRLVEEKRVGSSVVAPDSQVETRAREHNQQHQANKASQDVPAHEVEAHADAPVHDEL

SEQ ID NO: 4301 - protein, 360 aa, Plutella xylostella
MKVIVSKDDFIDLTPDARLKVISVVAGRGAHSRTPLPAGLRTEHSLVDLPPLYPDEAAIEMVAVLDPASAAAQRLAPLLLVLRKVINCRVKLFLNPQDKNSDMPLKSFYRYVLEPELQFTPSGSQTGGALARFARLPHAPLLSMELRTPPNWLVECVKSVYDLDNIRLADVDTVVHSEFELEYLLLEGHAWDTTLGTPPRGLQLVLGTRETPDLMDTIVMANLGYFQLKANPGAWILRLRPGRSEEIYEIVGADLALDFDWNESLPYMAKEYGFSYELVQYQWPRWLQRQKDRQRTIWGYKILFLDVLFPLHVKKIIFVDADQIVRADLKELVDLDLGGAPYGYTPFCDSRKEMEGFRSP

SEQ ID NO: 4302 - protein, 513 aa, Aphanomyces astaci
LPDQHVIYVNGRPLELVAPVTPSLFDGLVTYESATRSKAVSKAYVSQFKHNVLTAEDAADKTLQLNVVLSMVDSYLKTPRVAAVLPDDVQRPTYSYVTPSGSSSLDVVAYLDPLSDTAQRASGILRMLHSVLHAKITLVLVPPPSYDEFPLKRFYRFLWGGTSSSLVEFDRLPRHPVLTLNIETPELWNVQMVQSDVDIDNIQQNASATFTIKDVLVYGQCVDKTNAQYPTLPNGLQLVLERSVAKLHSHKDTVVMKNLGYFQLQAAPVPVIVYDFLSKTLQLEVKKQPGQEGVRLLDDGPEATKAPAQPEETSVWTSLTDKQRIIWGYKILFLDVLFPLGVDKIIYVDADQVVRADLKELWTMDLQGKAYGYTPFCDSRNVGFQFWRKGALYVVDLVKFKRMAAGDSLRAIYDQLSADPNSLSNLDQDLPNYAQHQIPIFSLPQEWLWCESWCSDESKAEAKTIDLCNNPKHKEPKLDMAKRVISGDLFPESWLQLDAEVKAAEAAYELASN

SEQ ID NO: 4303 - protein, 1756 aa, Leishmania infantum
MLLILGVTAQRTLGKGIHAAVEASWNETSLYQEGCEWAARSFGDEAFYSCLDALWPPSPSQDRGRSSADSEGAREATSARFLTQQLQYMRLLEVLFRLPETRGTNRAVFEAEMAARVYSPAVEAHYTLADKALRETTPPSLSERDDSDQGERGSGNRLACGEPFAVVYTRTAPGAPLQALRVKTPSALKNAAGGAGPQHRDALVSIDEVAFASFDHRHPASSLAAVREVPAVVVLYGLPGSPAAHALHRVAVELSTPSDAASATVSGVPAYFWRHLPVSVSRLCAAAGAPERSLAAAMTSLWDSPLVVQGYGVTVDIKNMEYKVLDEKAAAQQRAKEQSSTAVDAGSSHDGTDAPAAAKRVPKTQVDRIVGGFHVGRLKERYPGLAASLDEFAILLDEEMGSDDVKVNFDVRELQKIGLAATQYISEVENHIRRLHVLTDLVMRFPTYATALSRIAALPGRLVEVQKTLLILHQRMRPGQSAFFVDGWRVEEKELTLFGVLHALHEEERLVRRIKTVLTTYAVAADDAASAAEDAVREARTVPLAPAVLEKVADYVKRTTRRTIASFEGSVDTEAAYAIPSVHIIWINNVETNPRLKRLPPVLSILLARGYAKTPLPRRNLLNFVFLWNPVSRSSLQMISLLFRLHQEGLIARYGLALADQTWSPVFEAGVQGGAGGFKGESAGSQAALQVFALVYHLAARGKENNVLIFLMELLEEAKQARADTIPDVVITRVCTRTAQAQLNSDVGKLTSNADFLSHYHETQAALRRFRVPEYPVTFLNGVLLENSMAVMSTALQREIALLRGWAASGALRDEMKDMYSAILKQRGAADHLQPALVRAPVTMRWSDTPATVAYIESLPYVYSASYAEEVPALTQLVMLPCEFTTAMLQQLQTVMEALEECGVAVKAQGAIHEVCGMLRLSLVSSPAATSLFHRHIGALQQQLARSRTPKAARYTTLRRYVSHIAKAVTSANVGVNPVLGTETVAAALAAAPLPADLQELVGVSRITGTSASSQWARAKVQFWSAFAEAYHGSAGSVALVINGRIVAMDASFSAADVLSAARLVAPITKAAQKALMNVRFAEMSTADGGYAADELDNNFFASKAACLSSVFGDEISQHMGKQSSSVSALMREERILGSENDWKPLQAVLFTVSNVARNAGEEAGTASGAVPQPLHHVTVVVDPSSRDAQVIVSLAHYLVQSPLHIRLTVLLNPSLDVKFPIRNFYQYVASPALAFEATSGRVVAPHATFSQMPSSTLLTLGIDEPPSWTVFSQDAEVDLDNIMLSRLPRSNLFVTAVYRIHSVLITGGTTDVQTGVAPDGLPLSLLHSSRARGASEVDSAAGTTDTQVMASNGGYYQLQANPGLWHLSIKEGPVAAAYCIKAIDGHAVRGCTEGANGPLLTNRTHGQRIPLVIDSFRGRYLSLQVGHTPTSEVAADLHTILQQMASDVRPEWPPSYSARDAKPALPAKPTLNIFSVASGHLYERFLRMMMYSVHKTSSDQHGSNTTRIKFWVIENFLSPQFKRYIPLLAERLGFEVGFVTYRWPWWLPRQTEKQRKIWAYKILFLDVLFPLDVDRIIFVDADQTAQADLHELYNMDIGGKPIAMTPFCLKFKNKATMSFRFWERGFWKDHLRGKPYHISAIFLVDLRRFRAMFAGDQYRDTYASLEGDPNSLQNLDQDLPNYLQHSIPIFSLPEEWLWCETWCSDKSKSRAKTIDLCNNPRTKMPKLENAKMIIPGWEELDNKLQNLSDSVLASL

SEQ ID NO: 4304 - protein, 1519 aa, Danionella translucida
MRLLLLVLVLLKVQHVCSASKGVIASLQAKWTMTPLLLETSEFIREDGDDKFWQFVDTVKELTVYKNGESVRSYYDLIVKKAGQFLTDLQVNLLKLSLSLRTYSPAVHAFQQIASDEPPPDGCAAFVTVHGQCACSTKEMKKLLKNAASRPRPYLYKSDHQYPGPNVTEMPVAILYAEIGTKDFNSFHKVLAERAQEGKLVYVLRHFVSEAKAEKMLLSGYGVELAIKSTEYKAVDDTKVKDSKSVASEDDDEADEVQGFLFGKLKKSHPELQEELGELRKHLLESTNDMTPLKVWELQDLSFQAASRIMSVPKFDSLKLMQELSQNFPSRARSLTRVAVNQDMKKEIEDNQKRLGDSLGIHPGDASLFINGIPIDLDTHNAFSILDILRSEAKTLEGLYNLGIRGSSMNKFIHLPASAAVEDSYALDIRHSSIMWINDIEKDSMYRHWPSNLQELLRATFPGVIRQIRRNFFNLVLFLDPAQEDSVELVKLAELFYKHNIPLRIGFVLVVNADEEVDGYSDAGVALFRLLNYISEEYDEAQAFASLVSIYNRLEAGETLSVETITAYLKKKFPKENAARIFGVDSNYDDNRKAGGLLFKKSGFDALPVGLFNGVPLSSEEMDPEELETVLLQKIMETTNFFQRAVFMGQVTESIDMVDFLMEQANVVPRINTLVLSSERQYLDFTASPVTDDWDDANMFSYLDDRDKTAVVSKRLKYFTKADEGVVYAVTMWIVADTEQPSGRRLLQNALKHMKSSGSNCRVGVINNPSGKPTGDNSALYRAVWASLLTQSSKNTLDFTLKLLKEENVELLQQGTKIKHLLKQGMDHDAFEKKFNTLEVDFLQSQQKYCKDILKLIPGQRAVVSNGRIIRLLDGQEEFGAEDFHLLEMVTLRTSAEKIKPKIKQMNFPPQRASDLIMKVDALLSSSPKGESRKEVKFFKDKHSVLQLAQREEEVFYDVVAIVDPLTREAQKLAPLLVVLGQVVNMKVQVFLNCRAKLSEMPLKSFYRYVWEPDVSFFGNNSISPGPMARFSEIPESPLLTLNMITPENWMVEAVRSPHDLDNIHLQEVSGVVNAVYELEYLLLEGHCFDVSTGQPPRGLQFTLGMRQEPLMHDTIVMANLGYFQLKANPGAWILRLREGRSEDIYQIQAHDGTDSPADSDDIIVVLNSFHSNIIKVKVQKKPDKLNQDLLSEETEPKGLWDSITSFAGGPSVNEDLKEKDVLNIFSVASGHLYERFLRIMMLSVLRHTTTPVKFWFLKNYLSPSFKETIPHMAKAYGFQYELVQYKWPRWLHQQTEKQRIIWGYKILFLDVLFPLAVDKIIFVDADQIVRADLKELRDLDLEGAPYGYTPFCDSRREMEGYRFWKTGYWASHLGHRRYHISALYVVDLKKFRKIAAGDRLRGQYQALSQDPNSLSNLDQDLPNNMIHQVAIKSLPQEWLWCETWCDNNSKVNAKTIDLCNNPKTKEPKLGAAVRIVPEWSDYDHEIKMFLKGLKNQQEESKPGSPSPIKKNGSQRDEL

SEQ ID NO: 4305 - protein, 1516 aa, Tremella mesenterica
MWWSTVLLVGSALAQSSQPLSIQLTASWPAAPLVLEILETIYDESPSSYFPLLRHLTSLPPDLSDRDLLSAAKEMILFHDLLPETSWGTFDLALTLHTASPKIEAFYTWYEANVVGETPEILLPFDHISAPTGLSQAIFYFDPSSPSSSPLLGYLDHHASQYPSFRYVVRYAPPKNRHEGPKTQLSGYGVEMVLKKTDYLVVDDRTSRGKTQAHSKSTQGTSSANHSRMFEILGDDPWDQWAEPLTKSEVQNLGLQASALIMSSEDKLDALLHLSQDFPKYSAAIARNIDIPQNLAARREHLLTRGPASPTLVINGRNFKSSDMNAFSLLNTIRAERHHILSLSSLGLTPKQAFELLADPLIGQSQTSDDPTEGMVDASDRDEGGKAITWWNNIERDKRYSSWPKQMQGYLRPLYPGQFHSIRRNTFNLVFVLDLASVPSLDIIAASISGMIQRGVPVRFGIVPMVSPEQEDISMQMARVFLYAVKTFGRGVTRDMLNEILKASPSSPANPATVRLEVVERVYNWAAMQSDKESLPFSQVLESHEFDPQFKALQTYTERVAALKEDAPSGHLFLNGKHIPLNGHWATAVQSEIQTQLAFLQESIINKVPMEDVANFFYDLPMTAKRRNKLIVPTQIDNKLRAHNLLDVFKHDSMNVLTTNFVYADDYNQAPITIWIIADLDSSAGRRTVMDALESLQLPSNLARIGFVHVPSDVSATNGARLSTLIYKLMSSSILNEVQPSQLLDVIQSLEKGDSVEWKEGTPLHAFSSSGWSAADDIAAARFWEVGSTIGAELKIRSSHPHLLINGRLVGPITPRSFGVADFQPLATFEYRKRVQPVVALVATMYENINSFDRTTLAGMIATMTSIVSAAYIPPGSDGIFTPAPAPRSKWYEQLDDGDMSFSVGRKDTALVHVAAVVDPISEAAQRFAPILKMLSQMDHVAVSVYLEPDLTSTDLKLKRFYRSSLSPYPLFDVDGKSIAPGLTFTDLPTSPIYTLGLDLPPSFIVSPKTSPVDLDNILLSTLHDPTTVQFELKQLVIEGHARETTNTPPRGLQLQLIANEKEVSDTLVMINVGYLQFKVTPGVYDLDIRPGRGQEVYELESVGNEGWDSKSVNETGRRVTVTSFEGMTILPRFVRKKGMEQADVLQESEIVQPDSMGKAVFSRMKELVGIKPEETKPTTRHADINIFTVASGLLYERFASIMILSVMRHTQSSVKFWFIENFLSPTFLEFLPHLAEEYKFQYELVTYKWPSWLREQTEKQRIIWAYKILFLDVLFPMDLDKVIFVDADQIVRVDMKELVDVDLHGRVYGYAPMGDDREEMEGFRFWKKGYWRDALRGRPYHISALYVIDLKRFRQLATGDRLRSQYHTLSADPNSLANLDQDLPNSMQDQIPIYTLDQDWLWCQTWCSDESLARAKTIDLCQNPLTKEPKLVRARQIPEWDEYDREIAALAARIQGGSGLAGSVDDLAGEKGRESESEPVTGALSVEEHEEGDKEEEEREAKEVGEKVRRIDDEL

SEQ ID NO: 4306 - protein, 1495 aa, Phialosimplex sp.
MALVTGPLALWRAYALILAVLACHVCASPSVNVALQASFDSAPYLLELLETAAEENATSYFPLLDRVADGTFDSALTDKDLYDRFLDVVYEDGHLKSPEGRSSFKLSLAIRSAAPRIEAHYQFYNTSVRHSLAAAQDAVCPVWVHSDGKQYCSSDMDRAQQDVIGDEDPRELPFDRVLGDPSSPPAVLYADVASPMFKEFHPMLSALAKEGQVSYRVRYRPPHHWSPRPLFVSGYGVELALKRTDYIVVDDRDAERRNQKGSDGDTPADAQWKDDSPDDLRPLSASEVARLGYNTVGYVADSDDPLETLVKLSEDFPKYSPRVAAHNASASLLKEIQSNRGRTLPPGANVMWINGVQVDSRQMDAFSLLDQLRRERRLIEKFRGIGLSAQETVDLLSHRFIGQAVANDEPARFNYRDEPEGGRVIIWLNNLEKDARYKSWPSELMAYLQPTYPGQLSPVRRDLHNIVFPVDLANAEDVELVVETIQVFVQRRIPVRIGLVPTASSPGSVSQLKVAHYLQDAYGLASLLHFLGESSSRKKVTSPDKSCFQSATKDRKLRADKQPLSLEDVLKSEELDTIVSRTTNYQNRLSLERGTPIFFVNGVPIVRNDRWVQEMSLRINRDLQSIQQGIMEGDLEEDTWLAGTFLSKSFDRRNSLVIPEDPKDIQLVDIARTCEANKEILDDIPRVESNQDVLESVQMIVVGDFDNEHGIKLLNSALGFRREHSEAEVLFLHNPETHGHSLSGSAMLNRRLKRGSTEDAAQVVVDMHSADITDSAVPDSEAKEASEFWESKQPLAAEFGFVPGTSGLVVNGRVVGPLPVDSTLTADDLAQLVAYERAKRIGPVSKAIMDLGLDSKLSTPLGLAQLTSLVALSSVSDVPEGIFETTSDIRMNLFDKWSSTSRSVITVANSEDPTINIVASIDPTSETAQTWLPILRVLSKLAGVRLKILLNPRDDMEELPIKRFYRYVLDSEPAFSSDGSLSRPKASFSGVPVEALLTLGMDVPSPWLVAPKDSEHDLDNIKLSSLKPGSNVDAIYALEHILIEGHSRDMTTKSAPRGVQLVLGTDGNAHLTDTIIMANLGYFQFKTQPGLWRINLKPGRSQRIFNIDSVGSLGYSPQPSDENNDVALLSFQGKTLFPRLSRKKGHETDDVLETGPSPGSAMDYVSKGLNFASGILSSVNPKHRRAEQQADINIFSVASGHLYERMLNIMMASVTRNTKHTVKFWFIEQFLSPSFKSFLPHLAQEYNFTYEMVTYKWPHWLRPQREKQREIWGYKILFLDVLFPLSLDKVIFVDADQIVRTDMHDLATLDLGGAPYGFTPMCDSRTEMEGFRFWKQGYWKNFLRGQPYHISALYVVDLTRFRALAAGDRLRGQYQMLSSDPGSLSNLDQDLPNHMQHSIPIRSLPQDWLWCETWCDDASLQSARTIDLCNNPLTKEPKLERARRQVPEWTAYDEEIAALVDRVAREQAGLAYGAGGVQEEEEEEGEGGEWKKDEL

SEQ ID NO: 4307 - protein, 1479 aa, Penicillium roqueforti
MRVPTGSHIPWQWYAVVGALLPGWVANASPAVNVALQASFDSAPYLVELLESAAEENSTAYFPLLDRIADGTFEDLTTEKELYDRFLTVVKDDGHIRTPEGLSSFKLSLSVRSSAPRIEAHFQFYNTSVQQSLMVAQDAVCPVWVHSEGKQYCSSTMERAQQDVVGELDPRELPFDRVLGDASLPSAVLYADITSPMFRDFHETLSDMAKQGQVSYRVRYRPPQHWISRPLFVSGYGVELALKRTDYIVIDDRDAEQLEEKGAQSLPTDPDETKEDAPGDLRPLSSSDVTRLGLNSAGYVMDSADPLGTLIKMSQNFPKYSSIVAAHNFTGEMAQEIRHNRLKMLPGGYNAMWINGVQMDKQQIDAFSLIEHLRRERKLIEKFRGLGLSADDVVKLLSHRLLTEAQASGEEQRYDYRDNLEGNQVIIWMNNLEKDSRYESWRGDIEGYIAGSYPGQLPPVSRDLHNVVVSMDSSNPEHMMLVAGNLHAFINRGIPVRFGLVPTISSPESIAQLKVAHYLSDAYGIESLVQYFQEYAAKGKMGFPDKSCFQSATRERDLVDEHEALSLDQVLKSEKYDAVVSQTGAYQRRLSLTGDAPQFLVNGIPVSREGNWMQGMSVQISKDLKLIQQGIVQGIFEEDTWLPEFFLADAFAKRNTFLMPEDPKSVQIVDIANILASDEDALSKTRVLSDKGALESTHMIVVGDFESEAGVKLLTDALNLRKENSDVEILMLHNAASDAEDDAPKNLATLYLSLAKEETIDQVLAKIASGNLETEVQDISTIQTLHQILAKELGFNPGTEGLVVNGRAVGPIEKEHPLSVGEMSQLIAYERVKRLDSVAAAVEELGFADKISNPLDFAKLTSLVALSTISDVPEGIFENTPDFRMDVSGKWRTEHSVITISNSDDPTIHVGVSLDPASEVAQRWSPILKVLSELSGVQLKIFLNPKEELTELPVKRFYRYVLESEPSFTDKGALARPQASFTGVPVEALLTLSMDVPSSWLVAPSESVYDLDNIKLSSVKSGTDVDAVYALEHILIEGHSRDLTTKTPPRGVQLILGTENNPYFADTIIMANLGYFQFKAQPGLWQINLKPGRSEKIFKIDSVGGLGYNPQSGDENNEVALLSFHGRTLFPRLSRKPGHEEDDVLETGVQLGSKMDYFAKGLNFASDVLSSVGVGSKSGGEQHADINIFSVASGHLYERMLNIMMVSVMRHTKHTVKFWFIEQFLSPSFRAFLPSLAREYGFSYEMVTYKWPHWLRAQKEKQREIWGYKILFLDVLFPLSLDKVIFVDADQIVRTDMYELVTHDLQEAPYGFTPMGDSRTEMEGFRFWKQGYWSTFLRGKPYHISALYVVDLNRFRALAAGDRLRGQYQMLSSDPNSLSNLDQDLPNHMQHHIPIHSLPQEWLWCETWCSDEDLGVAKTIDLCNNPLTKEPKLERARRQVPEWTVYDDEIAALASRVAGEQAAAGVEFVQTGEDRKDEL

SEQ ID NO: 4308 - protein, 1579 aa, Serendipita indica
MTSLRRALPVLLFTVSHLTRANAALPVTVGLRTSWPAHNLLLEILETAALDQPQSFFPLVDLLTPPDTFPEPLGKLSPEAIHQAALALFQHHGFFTHDTLKQFELALSLHVSAPKLEAFYQFYNDRNLENIRLPNGYISDGDGCGSWIDWYGSRLCSSEDLHAVLSREALDAASGQSATPPKKAKLLPFDHIYPDPATTVFAPPRTAILYADLTSPNFLDLHKTLMESAAAFPPKIQYVFRHVPAPKVVPPKGESPAPVKQQYLTGYGVGLDLKKMDYLALDDRRSRNSANNDIKDVAIEENAPLVDIVREILNSLPSSSSEPLNLTAPLTKEEFQYLGVQATSLILQSQNPLDTFIQLAENFPLYATELARKVDINGELQFEMAFNSRRVPKGMSLLWLNGKPIEDMSSFNPFNVLNMLRSERTIMEGLTSLGLTSTQALEALAGQPVAESFSQGNLFDGIFDASDRPEGGDVILWLNDLQKDDAYKAWPKGIESLLTPIYPGSFHTLGINLWNVVLAVDLSNRDSLIWIFKHVSNIINKKFPFTWGIVPLVDTPEGAKAARIFNYVHKHYGPKETMDFIRSLIAAQSEGETIDFLIANAFFNNLGINVKPLLQIELDESVSHDYDTVLAGQEPHSVERLAKAERWAKRMDVQSRKWELGHVFLNGKHFPLDTNFLVSLQREVGLQTQYLQTEVQVGRLSSNQPVDMSTYFYDLPSTPKRRNRFLFPDPETSPLRVERLDTLFRTSGFEWPNEDLLYPEGTESLLATVWVIGDLDDSIARGMATEAMKALDVEKNFRLGFIHAPRTLPFSDTTSTPRLSTVLQQLSGRLSTLSLPAFAEKWESDAPNPVNSAEYLKYCMSGQLLARDIGLKPGQTGLLVNGRVIGPLEAGDFGAIDFSPMLAYEKQRRATPILEALKEIGTTFADMISTAASIVASVQIPDPSAEGLFNMPQRPRQRQYRHLDSKHSKLTIGDESKALFHFAVLLDPVSETAQKWGALIKWLTTLDSVYLELYLVTDQTREELPLKRFYRSVLREALVFDDVGEEIPAMATFKNLPEEPIYTLSMDVPSSWLVRPRESIHDLDNIHLSALSSHEKVAGVKALFDLDFLVIEGHARDTTSGAPPRGLQLQLTKYDSTPIADTLVMENLGYLQFKAKPGVFQLELKRGRGEDIFTIESVGNAGWDSPPVESEAGAEVTLTSFEGLTLYPRFRRQQGQADADVLQPPRREGFFSSAVQKVVQAVAEWIQPPQESPEADINIFTVASGHLYERFASIMIASVMKNTNSTVKFWFIENFLSPSFLEFIPHLAEEYDFQYELVTYKWPSWLRSQREKQRVIWGYKILFLDVLFPMDLKKVIFVDADQIVRADLQELVDLDLQGAPYGYTPMGDDNPDMEGFRFWKTGYWKDYLRGKPYHISALYVIDLVRFRQLAAGDRLRGHYQQLSADPNSLANLDQDLPNNMQFEVPIFSLDKNWLWCETWCSKDRLDQAKTIDLCQNPLTKEPKLSRARQIPEWSQYDAEIAAFARRLVHEGKIGETALGAEVDALAGEKKSDVPPASSEESTSASPGVAGQEPLVHPEL

SEQ ID NO: 4309 - protein, 1391 aa, Rutstroemia sp.
MADAEALSSYQFALSMRVAAPRIEAQFQYYHTAAEPSIKSEADSSCPSWVLFDGKQYCSPTLDESHGEIMGDPQIKELPFDHILGSPTGPHSILYADITSPSFSNFHKTLVKTAREGKTSYRLRHRKPISSSPSNPLIIPGYGVELALKRTDYIVIDDRKEEADDVPKIPAKTEVKFEDEEVADLKPLSTSELSSLAVKASSFIMQSEDPLDSLIKLTQDFPKYSSAIASHNISADFLAEHTSNRAQFLPPGYNILWMNGVQLTERQMDAINILEILRKERRMIGSVRELGLTGPQAVQLLSHPNISAASTDSGVQRFDWRDEIEGGSVIMWLNDIEKDKRYADFPSSLGALLQRTYPGQLPSVRKEIFILVMPVDFSTPEDITLVAETLSSFVKRKLVVRIGLVPVTTSPEATIQAKVIYHLLDTYGLAGAIGYLESSIMGNVAHPTKEAFDAAIEGRKLRVDKTARSLEEVLHTDDYNDRIDAARRWTKRLSADGEFPPIFVDGVALPRDESWLQAMVGRFSTDLQVIQQGVFNDIFQQDSYIPDFFLSEAAPRRNAIIIPENEKTLKIFDVNNLVKQHGTMLAKLPVIKADISSPQDKWAHMIVIADLSTEEGRSLLQSAAEYRKTASSLELVILHNPITEDLDSSSDLSSNLLAHIRKESNKLESVEELETILQAKESVQDQSSQGFWHEAQPFVRSVSLVPGQNALLVSGRLVGPIPVGTEINLEDFEQLFAYESAKRLVPAYAAMKDLDLAEKLTDPLVAAKLSSMVALSTISDTPDGIFEQAPTARISAFDGWDSSHTAIKVGDPLIATIHLTVAIDPASEQGQKWVPILKAISELEGIYLKMFLNPKDRLQELPIKRFYRYVLDSKPQFDDEGALVRPGASFTGIPQDALLTVKLDIPPAWLVAPKISIHDLDNIKLSSIKTDVEALYELENILIEGHSRELPSGSPPRGAQLILGTERDPHFADTIIMSNIGYFQFKANPGFYKIDLKNGRSSEIYKIDSMGSKGWAPVPGDESTELVLMSFQGVTLYPRLSRKPGMEDEDVLEAKTDSPMDYVSRGLNFAQSILGGKSKTVAAKEEHAEINIFSVASGHLYERMLNIMMVSVMKNTKHTVKFWFIEQFLSPSFKDFIPHLAAEYGFKYEMVTYKWPHWLRAQKEKQREIWGYKILFLDVLFPLSLDKVIFVDADQIVRTDMIELVNHDLQGAPYGFTPMCDSRTEMEGFRFWKQGYWEKFLRGLPYHISALYVVDLHRFRQIAAGDRLRQQYQSLSADPNSLSNLDQDLPNHMQSVLPIHSLPQEWLWCETWCSDESLKDAKTIDLCNNPLTKEPKLDRARRQVPEWNVYDEEIAKVDRKRKGLNENGDVKNTKSRTLEEVVEIKTKKDEL

SEQ ID NO: 4310 - protein, 1462 aa, Penicillium griseofulvum
MRVPAGSQISWRWYAAVGALLPGWIASASPAVNVALQASFDSAPYLVELLESAAEENSTSYFPLLDRIADGTFEDLTTEKELYDRFLTVVKDDGHIRSPESLSSFKLSLSLRSSAPRIEAHFQFYNTSVQQSLMVAQDADVVGELDPRELPFDRILGDVSLPPAVLYADVASPMFRDFHETLSDMAKQGQISYRVRYRPPQHWISRPLFVSGYGVELALKRTDYIVIDDRDAEQLEEKGAKSLPTDPDESKEDAPDDLRPLSSSEVTRLGLNSVSYVMGSADPLGTLIKISQNFPKYSSIVAAHNSTGEMAQEIRHNRSKMFPGGYNAMWINGVQMDTQQIDAFSLLEHLRRERKLIEKFRGLGLSADDVVKLLSHRLLTEAQASAEEQRYDYRDDLEGNQVIIWLNNLEKDSRYESWPGDLEAYIAGSYPGQLPPVRRDLHNVVVSMDLSNPEHMMLVAGNLQSFVMRGIPVRFGFVPTTSSPESIAQLKVAHYLFDAYGTGSLMQYLEESASKGKMGFPDKSCFQSAIKGYDLVDEHEALSLDQVLKSEKYNTVVSQTAAYQRRLSLTGDELQFLANGIPVPREGNWMQGMSMQVGRDLKLVQQGIVEGIFEEDAWLPEFFLTSALERRNTFLMPEDPKSVQIVDIATILASGEEVLSNIPRILSDKGALESAHMIVVGDFESEAGIKLLTDALNLRKENDDVEMLMLHNAASYAEDDVPRNLVTLYHSLARGESIDQVLTRIASGDLDAEVLETEAQKISTIRALHQTLAKELGFNPGTEGLVVNGRAVGPIGEEHSLSVKEMSQLIAYERMKRLDSIAAAVGQLGFADKISNPLDFAKLTALVALSTISDVPEGIFENTPDFRVDLSSTWRTEHSVITVSNSDDPTIHVAASLDPASEVAQRWLPTLKVLSKLAGVQLKIFLNPKEDLKELPVKRFYRYVLESEPSFTDDGALARPQASFTGVPVEALLTLGMDVPSSWLVAPSESVHDLDNIKLSSVKPGTNVEAIYALEHILIEGHSRDLTAKSAPRGVQLILGTENNPYFADTIIMANLGYFQFKAQPGLWQINLKPGRSEKIFKIDSVGGLGYRPQTGDENNEVALLSFHGRTLFPRLSRKPGQEEEDVLETGVQLGSKMDYFAKGLNFASGVLSSVGVGSKSGGEKHADINIFSVASGHLYERMLNIMMVSVMRHTKHTVKFWFIEQFLSPSFRAFLPSLAREYGFSYEMVTYKWPHWLRAQKEKQREIWGYKMLFLDVLFPLSLDKVIFVDADQIVRTDMYELVTHDLQEAPYGFTPMGDSRTEMEGFRFWKQGYWSTFLRGKPYHISALYVVDLNRFRALAAGDRLRGQYQMLSSDPNSLSNLDQDLPNHMQHHIPIHSLPQEWLWCETWCSDEDLETAKTIDLCNNPLTKEPKLDRARRQVPEWTVYDDEIAALASRVAGEQAAAAVDFVQTDEDRKDEL

SEQ ID NO: 4311 - protein, 1403 aa, Asparagus officinalis
MASLVRSRVLLSSLWILLLLTGIVAAEHRRPKSVQVSLRAKWPGTSLLMEAGELLSKQSNGLFWEFTDLWLQLDRGSDCQSARCCIKKIVDDGRSMLSNHLGSIFEFSLTLRSASPRLVLYRQLAEDSLSSFSIDEEVGSLNFTGDESGRVADSSVVSNNQSIPPSSCCWVDTGSMLLFNVSQLLSWLDTSFKQPLGASENPELFEFDHIYDGLSIAGPIAIFYGALGTECFNEFHVALVDASKKGKVRYVVRPVLPIGCPVAASSCSVVGTSGAVNLGGYGVELALKNMEYKAMDDSAIKKGVTLEDPRTDDLTQEVRGFIFSKIMERKPELTAEVMAFRDYLLSSTISDTLEVWELKDLGHQTAQRIVQASDPLQSMQEINQNFPSIVSSLSRMKLNESVKDEIIANQRMVPPGKSLMALNGALINIEDIDLYMLMDLVHEELLLADQLSRIKLPQSAIRKILSAAPPSESNSFRVDFRSSHVHYLNNLEEDAMYRRWRNNINEILMPVFPGQLRYIRKNLFHAVYVLDPATSCGAESIDMILSMYQSNVPMRFGVILYSSKLIKTIEEKGHNYAVNNEAKNGEDISSLIIRLFIYIKENYTTQLAFQFLSNVNKIWSVADDLHEEAPEAHHVEAAFVETVLPKADSPPQDTLLKLQREGKYVEEAKGSSLFVFKLGLSKRHCCLLMNGLVQESSEDAAMNAMNEELPRIQEQVYYGYITSKTDVLEKFLSESGHQRYNPQILGEGKEKKKFISLFTLFFGGETTLQEVKYLHSSETADDLKPVTHLLAVNASSREGMKLLHEGINYLIEGSTRARLGVLFYGNSEANSPALLLAKVFERTVSSFSHKENVLEFLDQLCTFYESQYISVLSLASDSLSLFVEKISELAEMHGLPSDDYKSILSSVSSDMIKKQMDKVFNLLSRQIGPEFGNAAVITNGKVLIPIGVTSFLSDDFSLLESVEYDQRIKYISEIIEEVDWKDIDPDDLTSKFYSDLIMLASSSMAIRERSSERAHFEILNAEHSAVIMNNANSALHIDAVIDPLSPAGQKLSPLLRVLWKCIQPSMRIILNPISSLADLPLKNFYRYVVPSVDDFSAVDYSVNGPKAFFSNMPLSKTLTMNLDVPEPWLVEPTVAIHDLDNILLENLGDVSTLQAVFELEALLLTGHCSEKNHDPPRGLQLFLGTKQMPHVVDTLVMANLGYWQMKVSPGVWYLQLAPGRSADLYVLKESEDESLSSKRITINDLRGKVLHIEVAKKRGKEHEELLIASDDNKVNERKTDDRHSWNANLLKWASGFIGGNGKKSLGHKKTERHGETINVFSVASGHLYERFLKIMILSVLKNTQRPVKFWFIKNYLSPQFKDFIPHMADEYGFEYELITYKWPTWLHKQKEKQRIIWAYKIFF

SEQ ID NO: 4312 - protein, 1468 aa, Verticillium dahliae
MTLLCRSPLGLVAIFWAAVNVSAGPSVNVHMQAAFPAGPYLLELLETAAGENATSYFPILDRIASGHFKDSSTHKALYDDFLQLLQDDNHINSPDALSTFKLALSMRLSAPRIEAHYQYYDTAVATHVTGGKQQDCEIWLQFAGSQYCSPTLENPEARVSSIVKLLPFDRVIGTGTDVALYADPASSAFGAFHQALAQKARNGEISYRLRYRRAVGALQEPLPVNGYGVELALKRTDYIVIDDREAQTDGPQKSIATEVVLDKEEEVADLKPLSTSDLAPLGLKAASFITQSQDPWDALLKLTQDFPKFSSSLATHEVSEDFLAEHDKNRAAMAPSGLNALWMNGVQLTERQIEAFTLIDMLRRERRLIDNIRNLGLTGQQAALLLGHPKVASAKNDDEPPRFDWRDEIEEGKVIIWLNDLEKDARYKDLPSELTSLLQRTYPGQLPSIRRNIFTLVVPVDLTSPEDVTVISNLFTFVERRLPVRFGLVPLTPSDDKVAQAKAVYHLMQNYGPEAMVAYLQQSVEDAKISRPDQIVFDRVVAESVALPEASTASFDDVMQSEEQAERIKLAQHWVKRLNAGTTIPPFFLDGLLLPRDKGWLRTMSMKIGGDLQTIQRGIYMGLIEEDEWVPGRFLKGALSRRNSYIFPEDEKSIQILDVNKIYAEHDNLFSAVPVIQGYAEATKETWAALTIVGDLTTQAGRDLLFAALRFQRANPGIRLDIVHNSASTTTGPLINAALRKEESALTEVETPEQLKAILDAAETGSDGDYTIALASFLSAATIAPGANALILNGRVIGPITEDLPFDEDDFQLFLESEQTARILPVYAALEDLSLADRLSGPLAAAKLTSITALSTISDVPEGIFESASTVRVNSFEAWDSKHTAIEVGNAETASIHLTGLLNPVSEQGQRWAPILKVLSELDGVHVKLFLNPKEEISELPVKRFFRYVLDSAPSFDESGKVRALGATFKGLPSEALLTTGMDIPPSWLVAPKVCVHDPDNIKLSSIKGDVNVIYQLENILIEGHSREGKAGQPPRGAQVVLGTEKEPLLADTIIMANLGYFQFKANPGFYNINLKDGKTTEIYTIESIGAQGWAPVPGDEGTEVALMDFQGTTLYPRLKRKPGQEKADVLQEDEAEEDGGIISQGLKFAESLLGGSTKSLSAQEHADINIFSVASGHLYERMLNIMMVSVMKNTKHTVKFWFIEQFLSPSFKDFIPHLAEEYGFKYEMVTFKWPHWLRQQKEKQREIWGYKILFLDVLFPLSLDKVIFVDADQIVRTDMMDLVNHPLEGDPYGFTPMCDSRTEMEGFRFWKQGYWANYLRGQPYHISALYVVDLRRFRDLAAGDRLRQQYHALSADPNSLANLDQDLPNHMQFTIPIHSLPQEWLWCETWCSDESQAEARTIDLCNNPQTKEPKLDRARRQVPEWTVYDDEIAALDRRRRGVPEEVIEKNPKSRTLEEPKSTGKDEL

SEQ ID NO: 4313 - protein, 1532 aa, Verruconis gallopava
MRVPSWLLPAELLLLVGSLHLLPIAVDAASQSVNIGLKASFSSAPYLVELLETAAEENEGVYFKILDRIANGYFQSAASDKEYYERFIQLLEEDELITDPAALSSFELALAVHSAAPRIEAQYQYYKTSIEPLLQRSGAKDCKTWLEFAGKQFCEPQLEKEDATIQDLNIRGSGALPFDRWERQNKTLLPATLYADILSPDFGKFHTLMRDAAKEGKVQYRVRHKPSQTETHALAMSGFGAELALKKTDYIVIDDRDKDVKTEEKATEQDLEAADEEIADLTPLSSSELTDLAMKTASYIMTSEFPLKRLLKVTQDFPKYSSFLASQEVSALFRKEHVGNRELLLPSGFNVIWLNGLQFDPRKVDAFSLIDHMRRERKLIASFKDLGFTNAEAIQLLTHPALAESQQDAANSDITRYDWRDDIEGGDVIIWLNDIEADKRYEDWPSNLMSFLQRTYPGQLPMVRRDLHNMILPVDFSGARSVGPIVQTVQDFVKRGIPVRFGLVPLSHSESAAKQAKVVYHIYEYYGLSALMQYLESALTANQFGDPNEGIFQAVIEDRKIKAGFEPRSLQHVLEPDDTDERVRKAQKYLARLGANSESPPLFINGVPIKNNDDWLQSFSQRISIDMRMVQRKVWEGAIDEEMWLPGMFLEDASLKRNALVIPEDEKQIRLVSLLKAYEGKNADLVKSLPTISASDDTPAEDKSQLVVIGDFTSEHGLRLLMEAIAFRQQHADVEVVLLDNNANTKSRLGHVIQELRVDESGLQDFSEKLAGLLSSAERIDADYPVPWGDVTPLIEIFGFTTGEAGLVLNGRKVGPIPSDEVFAKDDFEALYAFELKKRIMPARTAIKHLNFGEKVGNALNNAKLFSTLALSTVSDIPEGIFELPPPIRTRLFYDWNATNTAITVGDNSTATIQIVAAIDPAAEIAQQWVPILNVLSQLDGVYLRIFLNPIEKLKELPIKRFYRYALNTKPTFDERGEATALGVKFEGIPKNALLTAGLNVPPSWLVAPTDAVHDLDNIKLSSLSAGTNIEATYTLENILIEGHSRDVTTGLAPRGAQLALSTAKDQHFADTLIMANLGYFQFKANPGYYNISLLPGLSKKIFNIDSVGAFGYDAQPGDESTEVTLMSFSGVTLYPRLSRKPGMEEEDVLGTPKTSAADVVADAAADLVSDVAGMVDTLLSKVGVKLPHAGKYFTKAVAGAREYLFKTMANLSPVAEVVTTSPHADINIFSVASGHLYERMLNIMMVSVMKHTNHTVKFWFIEQFLSSSFKTFLPTLAEEYGFKYEMVTYKWPHWLRAQKEKQREIWGYKILFLDVLFPLDLDKVIFVDADQIVRTDMIELVNIDLKGAPYGFPPMGDSRTEMEGFRFWKQGYWKNFLKGLPYHISALYVVDLKRFRQIAAGDRLRQQYHQLSADPGSLSNLDQDLPNSMQMVIPIYTLPKEWLWCETWCSDEDLATAKTIDLCNNPMTKEPKLDRARRQIPEWTVYDEEIAALARRTKGEVPKGDEQERLQKDEEAKEGKRAGSAPEHNEL

SEQ ID NO: 4314 - protein, 1047 aa, Bodo saltans
MDDERHYYATAFGVDGTAVESSAPPLKASVSALIQAVAFTLEDSTLLTEFLIDLLRNTVKPEVTEEQVRESAARFLGEVTLDSIISSPNFYTHYRDLSRYVKSTGLRTFPVMLFNGVVVTENIEQAFFPTFQQEFHLVRDMITRNELTDDIADIFDFMMQVTGALRRYQPAIFDKPTYVALKDTAQASFLELRPFVRGSGYDGQASLISHILVLPAVLNTLSLKMLDRALDHLEQCTTCPGVQLTIAACSSADGSATLSPSSSVVHRVLEGTLQGVSKKTEDGAAVKALRAVTKEILSFIDGQYPTQQALKLELVADIDAAIAQHLRESSASLPDEAKQALYNEKIVSPASELGTRNFCSATAESEPKMVGLVPFLLTNGRRIVFDESFTTDDYLLLEVDEAALTNTVFGCIETVDIPSLLAKTLTEADVTKHVISTKLGLINSILRHDHVSRGARMEKLYLPYPTTPYSFAVNATVSPNSARHTFNVVLNPVARESQQLAALVRFVSSLDELGVSSIVYVNPPAEIQKVPITNFYQFVGQKKPSFDEEGNVVSPAAYLKNMPQSQTLTLGLVEPEAWMVFASAAAQDLDNIRLNTLHGSKLRAEYTLQSILLTGSCQDVTTDNRPRGLPLVLTRAGAEGRMVTTDTQVMSNYGYFQLQASPGVWQMSVQDGLASSIYEVVDIEEKDPSALWSAYYARKISSAKQQEFSSRPVPIISFTGKHVNLLVKKREGKESVDFLEALKAQEDAAQVWPPTSGPQPTRPVKPTLNVFSVASGHLYERFMRMMMHTVMKSSSDVHGANTTRIKFWMIENFLSPKFKALVPRLAEKFGFDYGFVTYRWPHWLRRQTEKQRTIWGYKILFLDVLFPLDVDKVIFVDADQIVQADLHELYNLDLEGKAVGYTPFCQVNKNEETVGFRFWNQGFWHDHLAGKPYHISAIYVVDLKRLRRMAAGDQYRMIYENLSADPNSLANLDQDLPNFAQNQVPIHSLPEEWLWCETWCNQESKARAKTIDLCNNPLTKTPKLENVKRIIPNWEETDAMLEAMMSE

SEQ ID NO: 4315 - protein, 1569 aa, Trichoplusia ni
MKATGFRFSLFLVAYVFVGLVSSDETSKPYEKKSKSVTSFVSAKWEATPIVLELAEYLAGESTDLFWSFFDGINSLKSSLDTLETDKEVYDACIGVASTLLAPAQLRMAKLALSMHLNSPTVRMFDQIASQSGAKEVQCDAFVSIASRKICDNDALRDTLKAYKQYDVEEHKQETYLLDHSYPSSDNKSLTAILYGELGMKDFTAKHKILSTYADNGAINYVVRWNVKPRGKAKLRLSGYGVELQLKSTEYKSQDDSTPKESEDGESSSAPSEEEDENDPQNQIDGFNFGRLKNLFPGLRSPLERFRRHLSESNEEIAALKVWQMQALSMQAAVAVVDANDAGGDEALKVLMSIAQNFPMQTKSLIHVNVPQSFRDEVLYNQDIWASSLGLRPAEPLLLVSGAQYDAEEVDVMALLTALKEDIGPMNTLHALGLSKKLINTLLSLELGESYSWEEYGLDIRDTAITWLNDLESDERYRRWPSSYMELLRPTYPGMLRNLRRNIYNYIIVVDPTSTASGPPLKLGETLLKHATPVRVGLVLAPNTENPALEAAVRSAFNYVAQEKNSNKEAYYFLTQLLHPTKDEKLDLEFVKKQLNKYTSSNADIDEIISEDSEYNFGRQLSEEFVTKIGSSKYPQVLINGVPLVEEGQSPVTSSVELLEEALVTALSRHTGRLQRAVFRGELADTDDALNYLMKQSHIMPRLNQRILASEPSQYLDLSGVPSSHELFAEDKIHRLLHLTGRDALATALPLLKYFAKSGKTEKITQTIWVAGDLNNAESRELLKNALTFMKESRGVRVAFIPNIDGAAKSDQSLNKVALAALITLSPSEATAYMTKLLEDEGCHEKENCDILPALVPALNKYEWVLKASRVLCARSFKLRGGARALVHNARLIGPLHSHERFTLDDLALLERYSNQMYADKLSEVLDSKKKSKDSNSIFEDDDDEYESKQLSTEERLKVVTVVAARSPRVRTQLPPGLRTQHSLVDLPPLRDNEAAIEIIAVLDPASTAAQRLAPLLLVLRHVVNCRIKLFVNPQDKNSDMPLKSFYRYVLEPELQFTSAGALTGGALARFARLPHAPLLSLELRTPPNWLVECVKSVYDLDNIRLADVDTLVHSEFELEYLLLEGHAWDPTLGTPPRGLQLVLGTRDKPERMDTIVMANLGYFQLKANPGAWLLRLRPGRSEDIYEIVGHENTDTPAGSQDIQVLMSSFRSHVIKLRVSKKPDKQHLDLLVENDDKNSGGIWNSIASSFGGGDEQEAQDETINVFSVASGHLYERFLRIMMLSVLKNTKSPVKFWFLKNYLSPSLKDILPYMAQEYGFEYELVQYQWPRWLQKQRDRQRTIWGYKILFLDVLFPLHVKKIIFVDADQIVRADLKELVDLDLGGAPYGYTPFCDSRKEMEGFRFWKQGYWRNHLQGRSYHISALYVVDLKRFRRIAAGDRLRGQYQALSQDPNSLSNLDQDLPNNMIHQVAIKSLPQEWLWCETWCDNNSKAYAKTIDLCNNPMTKEAKLSAAMRIVPEWSQYDDEVKALQARVRRGLYQAADHEQEIESTDHEETPVSQQKHDEHSEL

SEQ ID NO: 4316 - protein, 1666 aa, Peronospora effusa
MRVTTLLNAGLAALVATVQLSVTSARGVHVNLTASWPSSPFFPLLETSEFLAEENPLYFWKFVDELSTRTSYVNDIRNDVDALGALAVFIAESIAPGSKNILELMLATRAYSVKVEMFRQLALDSKARLCGADVDTWAVFYQEPQCVESVACSVNELEAILHGNKQQETHEVCVAAGSNDVELQVDHKYPHIASSTVKTPMSVILYGLVGTEKFYAFHTNLAKKAKKDEIQYMVRHYPRDSPLDTLLQGYGVALDIKNMEYKTFDDSKKTGEENAVGDDKGDEEENEEEEDIEDEEVGGFLFKPLMARHKAIADDLKQFYDVLVKKADGDQEQELKAWHLKDVGVSAARAIMDAKNPLKMLETLSQDFPVQVKKLVFSRKIISPELRKEISVTRMQAANRLLTNKFIMNGIAVDPMERSFNVFDFMKTLKEEWSVAKQLGRLALNQTELEDMLTHVRETNQEQPVVRIHMRGSMNGTTPLYLNNIETDSNYADWPPDVNLLRRPAWNLIFVRKNMYECILVLDPLTGAGRAALTHIAFMRMRGAPVQWALLISSKELMASKTSDDRRALLEKYKSLKDYEKATPWHFAKLLMLAQSKDTASAENKTPESGNEKTGEAEVEADHTVSTRKIASAFLERVGGIEQAEVLVENLLEAYTGAAADIGTFEENEEEALAYLRSDQFDNELLAMTEFIHMKHVPLGSFVFNGVIQKDLDIQRSMMNSFGRDQPLYVDMAHRGMLDNEMDLIEELLIAQNAHPAFLSIFESPESRHPGDIEVESHLFADDVDGRLEAAAWPAITYLHAPGSRIVPKMQTVIFPADLSDLRDANYAYRVVKAVLEDSEQTLRVGVVPQLKGESKTNDMSNDVGELVAAILVAVGNSDNEAHIAFILEALNCVIMQKTADAMKEKLIGIWKTTKNEDSSKDLVYDKVLALLENKTGGWLTTTQRDILTQFNTLLRSRFPPAFEEESEVGSSKIALPHLFINGRQVSLPSQSFSDGDMATIAKFDLQYRTQPVAKALLKRSVIQTTEDADKLSFDIMKTTGIVDKYVKTERESRLGVEENSLNSVRLPGDPSLQVAAYVDPLSEAAQVISSMLRTFHSQLNATIELVLVPADEYTEFPLHRFYRYLFEKRPSLAATSVEFRKLPVQPILTMKIDTPEAWNVQSLHAGDDLDNLRVDPESLTEVKSTTRAVFRLESLLVYGQCRDATLQMYSPPNGLQLALERQVGAQLLHRDTLVMKNLGYFQLQATPGVWSLHLARGRAADLFDIIDPETDLPLKTHPIIVYDFGSHIFQLLVRKKDGMEHEELLQSVEDAATSSKSKSDADAKSTGKDDGALRSYWSSMLQMMGKHDNEIESTPQAVADKTDETDLTNKGNTMQQKQRTGETIHVFSVASGYLYERFVKIMMLSVLKRTNNPVTFWVLENFLSPDFKASIPALREQLGMDIRLITYKWPNWLRQQTEKQRIIWGYKILFLDVLFPLGVQKIIYVDADQVVRADLKELLELDMEGKPYGYTPFCDSRNVGFQFWRQGYWKDHLRGKPYHISALYVVDLAVFRQMAAGDMLRATYSQLSADPNSLANLDQDLPNFVQHQLPIFSLPQEWLWCESWCSDETKATAKTIDLCNNPKHKEPKLDMAKRVIAGELFKESWIELDQEIKDAETKYTAQAAA

SEQ ID NO: 4317 - protein, 1509 aa, Achlya hypogyna
MSSGSCRGLAMALLLVAAVMGIASARRVEVNLTTTYLASPVAPVLETSAFLAEVEPSLFFRYIDAVATRSNAIKRKDSMNYTSLALEAASDVLPSDATIAKLVPFVLATRAQSPKIEMFHQLAIESAYKGCGLAYEDATSWAVLYHETGCAAHVICDINAFEKAMLAPRESSSCAASGEHDFELPVDNILNKELAAPTVIVYGTLGTEPFQRFHRTFLVLAEAQAVRYIVRHAPQGNVEPVLLQGYGVSLHIKNMEYKSFDDSKSPHSKHTPSDDDEDEFIVSVMMKKGDETKAALKEYQLEFEDFSSVNSTDDEEPWQLTQLGYLAAREVLTASDPLARLQHLSQNFPKYASALSLATEPVAFDSMSAMGAARRVVQSHQLLNKVVVNGMAHDLSDATFNPFDFLKLLAAEVQQGDALAALELDAATLAGVHSAMTSLSTRATDVRVRVRGAVDGLAPLYLNAIERDASTADWPSDLSVLTEPAWNLIFLRKVMYEVVVVVDPTSKEGAAVLQQIQFLILRGAPVQFGMLWTSPDLLAVPDEDRAAYEPAVDNALPATAYHITKLYLAARDHGADEAKQFLAGIIELGGGVTVKEALLVYVQAVTHALASDEALEAARTLLRTAAQDDAVWAMTDLVRETQLPLDSFVFNGVVRRELNLQESLMSHFGRDQPLYQELARAGKLADDMDLLDELLAQETAYQVYSPWLDPEFDIPTLNLHLSRTDVWDGVRYLHMAGTATKPKQQSLVLIVDLDTPEGARSAHNALKTVLETPETRLSLVHRGAADSLGARLGHIAHAIGDSDEPRHHAVLLELLRLVGRGKTEADVVTHGELFVQLHADAVPEDALLPQVRAWLTAARDIAHPLVALLSPATDVLLVNGRPVERAPTQELTPALIRVLLQFEADTRSKAVAKALFAPTKHEALSVVTAARHSHALYHVLAVVDAYLATPRTGALFPEVDPRTTVVAAGGSLVDVVAYLDPLSEASQRASVFLRMLRDVLGASISLVLVPTPTYTEFPLKRFYRYAWGHAPVFAGLPRPPVLTMNVETPELFNVQMVHSDGDVDNIRGDAAATYAVQSVLVYGQCIDRTMAYHPSPPNGLQLTLERTAGTTQLHRDTVVMKNLGYFQLQATPGVWRLELANGRASELYQMVDQQAADHARVIVHDFLSAITQLEVKKRPGFEYARLLDDAAAPAPVEDAATQSYWRSLVAWGTGGAKDVRADGRTGETIHVFSVATGHLYERMLKLMMLSVLKRTSNPVTFWLLENFLSPDFKKSVAALQAEFGMDIRLVTYKWPNWLRRQTEKQRIIWGYKILFLDVLFPLGVQKIIYVDADQVVRADLKELWTMDLHGKAYGYTPFCDSRNVGFQFWRQGYWKDHLRGKPYHISALYVVDLVKFRRMAAGDTLRAIYDQLSADPNSLSNLDQDLPNYAQHQIPIHSLPQEWLWCESWCSDDSKAVAKTIDLCNNPKHKEPKLDMAKRVISGEYFQESWLELDEEVKAAEKAYFAALN

SEQ ID NO: 4318 - protein, 1429 aa, Spathaspora passalidarum
MVHPINLVSVRLEASWNSTNFLINLIESVSGYDESLYFPTIETIFGLTEEENDFELYDVTEQEVYTRVIEKVGLSAESASFVNFNLVNKIYTPRIASHYEYYTNKVLTQFEKRLNVECARDSFGNEVERDSHGKLQTWLLYNNKFYCSASDLFALQTDSTEVDDVLQFDRVIGDNTKAPLLILYGNPASPTTKEFFVPLYHDAKAGKIRFLWRYTPPSGNQLGESLSGYGVELSLKNKDYHKDGKKVSALDLTKDFKKVNESKELLPVPENKLDQIGLKFTSFVLSNTKDKYELLRTMLNNFPKFLSHVANIPKLMNYEQVKANVFANEDLGISQESYGFYINGSPIHPLELDILSLSAKLQTELKIVKDLIKLGFSTIQSKLLITKFALLSAVKQTQFRTGNTLMGNNENRFRVFENAFSKRTKGGVVFFNDIEKDVTYDNYSTDRQDTYLGPSSFRLKPNQIPPLKENIHDLIFALNFANKNQLKVFFTLSKVILDTGIPQQVGLIPLIGDDPMDKTIADAFYFLVQQASSKEALAFLYKYLESKNEDDVNEILKLIPKSQKLEFDYSTVLNKFSIDTPSVIFNGVINELSSSNWQITMGKQLSQDINLIKSRLREGVSMSLKELIYSNAKTERNLRIVPLEPSEILYKPIDREIQDKSVVFRSMDKSDDVGYTFWLFSSFNEQRMVDQLVSLLEIVKKRSEDLQVRVVNTGTTFTLLEKLSKKYKLNMLTNSQINEVIEELKQVEIPREVSLNTAFVKFLEKKQIPVNHSFMLLNSRYFRLDNPFTAAELEQIVIFEHSQRLKLFNDILETYPDKYDKKRLVDFNIGLDPSDWFDLVCSIVTKSFHVDEKLFVVDVNRFDFGTLDMSNSIDIGEKESPVDVLLIVDPVSEYSQKMVSILESIRDFPFVSIRILLQPKVNSEFHIGRFYQGVYPASTPQFDGHGNWISRYGAENESLPSDETLSIGLDVPNRWHTTTKSVSNNIDISNVKVTEDFGVKFELTSIVHEGYARDIHTAMAPSGLAFNLDKDNVHSDTLVMSTLNYFQIRTTPGIWKLSLFDKEKFDLLSCSENKFDANQEALQFAEIFVFSLRGLTLYPRVTTKDKSVSKEKSKKQADINIFSIAGGGEYEQLLGIMMASVRKHNTKSVKFWLLDNYMSPQFKALLPILADKYNLEYELVTYKWPNWLRKQKEKHRSIWGYKILFLDVLFPQDLDNVIFIDADQICRTDLTELVNLDLEGAPYGFTPMCDSRKEMDGFRFWKQGYWSEVLKDDLKYHISALFVVDLKKFREINAGDRLRSHYQKLSSDPNSLSNLDQDLPNNMQRSIKIFSLPQEWLWCDTWCSNDSLTSAKMIDLCNNPLTKENKFDIAKRLIPEWKDYNIEIQKLYEEVANTSEIVYESGDDGISTGQYVQEDDNDDDDDSDYHDEL

SEQ ID NO: 4319 - protein, 1488 aa, Capronia coronata
MRPSVAPWGIAAFTLWALGLFTSPALCGPTVNVALEASFAAGPYLVELLETAALENSSAYYPLLDRIADGAFSDFQTEQELYNTFIDVLQQDGHISRPESLSSFKFALALHAAAPRVEAHFQYYNTSVQPRLMAAQDAVCPVWVYLDGQQYCSPELDRAQQAVSLPDGTEQLPFDRVLGSNPGGPASILYADITHPLFGQFHHVVSQTAREGRSTYRLRYRPSAVADSKPLFVSGYGVELVLKRTDYIVIDDRDSSTPESPNADDISLQKAKDDDISDLKPLTTSEVVNLGLNAASFIASSSDPLQSLIQITSDFPRYSSLLASTNASKEFLLEHKSNRERFLPSGYSVFWINGVQIEPRQINAYSLLDHLRRERRIIGDLKDIGLTSSEAINLLSSEVIAEAQANDMPQRFDWRDAIEEDNVLMWLNDLEHDRRYAAWPTDLRHLFQRVYPGQLPQLRRDIHNLVVPIDMSNIKDIELTATSLQGLVRRLVPLRVALVPAGTGATADIYARVSYHLLDTYGLAPLMAFYSDLAAAKKLPSSPEKSFQKAVKGRPVREGKQPLSYHDILSSEDLTQRIQARNDYLSRLALNKSDPPFIINGVVLPRTDNWFEPMSSRLFADLQLLQQAVYQGIVPEDGWIPQFFLLEASPRRNEIVFPHDPKDVRIEDISRLAADFSTELDTLPRIRGSEATLLSDRAHLLIVTDLESEDGRKLLGDVLAFRQQRPETDVLILHNPASASQPSKLACAVYMLTQDNGRDFAPEELQLILESDSSLADGTPGDDACAAFWSSKVALTRSLGFLPGQSGLWLNGRVVGPLKQEFTLDDMASLLESERRERIAPVTTAITSLGLEDRFSDALDLAKVTSLVARALKSDLPEGLRESVPLIRMDRFKIWNGTHTSIKVSNTDDPSIQVVAVVDPASEIVQQWVPILETLSQLHGVSVQIFLNPKDRLSELPVKRFYRQVINSEPSFQEDGSLAIPTASFSGVPKDTLFNLGMIVPPSWLVAPKESIHDLDNIKLSNLADGENIDALYELEYILIEGHARDVTVGPPPRGVQLLLGTEQEPHFTDTIVMANLGYFQFKAKPGHWQISLKPGRSSKIFQLDSVGPNGYAPQPGDETTSVALLSFQGLTLFPRLSRRPGMEEEDVLESSGHGGALDYISKGASFASSALSSLGLKKTSGSNAEINIFSVASGHLYERMLNIMMVSVMKHTQHSVKFWFIEQFLSPSFKATVPILAEHYGFEYEMVTYKWPHWLRGQKEKQREIWGYKILFLDVLFPLDLDKVIFVDADQIVRTDMMELVKVDLKGAPYGFTPMCDSRTEMEGFRFWKQGYWESYLKGKPYHISALYVVDLKRFRQLAAGDRLRQQYQSLSSDPNSLSNLDQDLPNHMQHTLPIYSLSQEWLWCETWCSDESLSSAKTIDLCNNPLTKEPKLDRARRQVPEWTEYDEEVAAVIEAARGEEREHSTTESQQGPDQHVVEEERRRDEL

SEQ ID NO: 4320 - protein, 1498 aa, Trichophyton mentagrophytes
MSTMIPWPIRPLSLLLAGLALLPNVSQASPSVNVALSASFNSAPYLVELLETAAEENSTSYFPLLDRIADGRFVDATTEKDLYEQFIQVLSEDGHITDPVALSSFKFALSIRSTAPRIQAHYQYYNSSVENSLMAAQDAVCQVWAHYDGSQYCSPTLEHAQQPLIAGRDESLEKLLPFDRVLAVPNGEDEENQQSLVLYADITSPLFSEFHKAVSKRARDGEISYRVRYRPSTAGLAKPLFVSGYGVELSLKRTDYIMIDDRASGKDDSKEAPLDSKPTLAVDGLSDSPTADLEPLSSSEVSTLGLNAASFVMNSDDPFDTLIKLSDDFPRHSKTIAGVNATSEFLAEYEENRKNGLQPGINTMWINGVQMSPQNIDAFSLLAHLRQERKLMNSLNELGLPVQDAVKLLSNPAITMAQKVHGSQRYDYRDDIEGGGVIIWLNDLEKDSRYEDWSDDIATLLQPTYPGQFHELRRDVHNVIVPLDLANKEDITLFVEEIQAFVLNNVPIRFGLVPTQLSELSKGQAKIAYYLNKTYGLESVFSYFTEIYSAQKFNLPSKVDFETAIKDREPKDDQSAILFEDVLKSTELDAFIQKSKGYLKRLAVDGENPPVYANAIPIERDERWLHFLIDRLFKDVQGMQRRIYEGDYKGDVWLPSFYLEEASPKCNALVIPDDPSDITVKSINDAYSKHKEAFETIPRIPGKSDSGIEKWAQLALVIDLDDEYGAKQLANAAAFHKTNPELEVLILHKPSMPENGPGLSTELHKLLDDGRDLEIDAIDALLSKETRSKKGSADAQRFYSTIQPVITELGADGNGMHVILNGRLIGPLNQTTILDTQDLELALQYERSKRLTPVVSALESLKETEKIRDHLAFARLTSMVALSTISDIPEGTFQRPPMIRTKIFNSWVTKYSAITVSSSEAPLIKIVATLDPATEVAQRWIPILKVLSQLHGVSLRIFLTPLETIKELPVKRFYRHVLEPAPSFHDDGSLNRPGASFHGVPQEALLNLGMDVPPSWLVAPKDSVHDLDNIKLSSLKEGTNVDAIYELEHILIEGHSRDMSKNKPPRGVQLLLGTERDPHFTDTIIMANLGYFQFKAQPGHWQITLKPGRSDNTFNLDSVGGMGYSPKPGDDNNEVSLLSFQGKTLFPRLSRKPGHESDDVLEDGSKKQGSAKNLLSQGLDFASGVFSGVSKTRKEKHADINIFSVASGHLYERMLNIMMLSVTKHTKHSVKFWFIEQFLSPSFKTFVPHLAEKYGFSYEMVTYKWPHWLRPQREKQREIWGYKILFLDVLFPLSLDKVIFVDADQIVRTDMYDLVSLDLEGAPYGFTPMCDSRTEIEGFRFWNQGYWKRFLRGRPYHISALYVVDLNRFRAIAAGDRLRGQYQSLSADPESLSNLDQDLPNHMQHSIPIKSLPQDWLWCETWCSDESLKTAKTIDLCNNPMTKEPKLDRARRQVPEWTVYDEEIAQLARTVGAKDTESGHTQQEAEEIETEDTNKDEL

SEQ ID NO: 4321 - protein, 569 aa, Euroglyphus maynei
MERYAQNFWSEKIMNTLTDDERSAGTRKCSDLVLRICSVLLSKPSLSSGSSSYKQRYEINNVRDEHSVLMLEPRNPNEPFIELTAILDPLTRGAQKISPILATFYEVFNARVKIHFNAVEKHSDMPLKLFYRFVLDQEPRFDTATGSIINPVAMFKSMPKSPLFTLGMSVPENWMVEAVDAIYDLDNIHLAQVDSNIVGAVFELEHLLVEGHCFEQSSGSPPRGLQFTLGTKTKPTIYDTIVMANLGYFQLKASPGIWLLRLRQGRSTDIYTIVSHDNTDQVANTTEVIPIVSSFRSLVVKIRVNKKPGKQNEELLYDSDDSSSDDQSGGWFSGWNSEKSTRQNSADKGKDSSGEDEDSKRINIFSLASGHLYERLLRIMMISVLKHTETPVKFWFLKNYLSPQFKQILPHMARRYGFEYELVQYKWPRWLHQQTEKQRIIWGYKILFLDVLFPLDVKKIIFVDADQVVRADLRELRDLDLEGAPYGYTPFCDSRKEMDGFRFWKSGYWATHLHGRKYHISALYVVDLQKFRRIAAGDRLRGQYQGLSQDPNSLSNLDQDLPNNMIHQV

SEQ ID NO: 4322 - protein, 1147 aa, Cricetulus griseus
SDYSYYNLILKKAGQFLDNIHINLLKFAFSIRAHSPTIQMFQQVAAAEPPPDRCNAFVVIHRERTCKTNEIKKLLNKAASRPRPYLFEKDHKFPTVNENLPVVILYAEIGTREFAEFHRVLSKKSKNGKIAYVLRHYIKPTNVYFSFNVATTDATTEKETEADEVQGFLFGKLKIGFVFILSVDNEVDGAADAGAALWRAFNYIEESYDVSEAFISMIHMYQKVKGGVLTVDNVKSVLQNKAPHTDILDILGTGSKYDKRRAAGTSFYKMTGLDSLPQALYNGEPIDLTEMSTEELKGAVLEKMLDAFTYLQRDVFMGTLNDEINAIDFLMDKNNVVPRLNSLILHTEPQYLNLISSSVTAEIEDFSTFSFLDSQDKSSVIAQSMHYLTAEDDVVSAVTVWIVADFDMPSGRKLLSNALKHMETSVHTRLGIIYNPTLKIYEENTVISRGILAAFLTHKNSLLRRFLRELAKEETAEAIYSGEKIKTFLNMEMDKNAFEKKYNTVGVNIFRTHQLFCQDVLKLQPGKVGIVSNGKFLGPLHEEFYVEDFHLIEKTTFSNSVEKIKDIVENMEINSKHLSDLVMKIDALVSSLPVRSSQPITLLREDHSVIKINPPENDLFFDVIAIVDPLTREAQKMAQLLVVLGKIVNTRIKLFMNCRSKLSEAPLGSFYRFVLEPELMSGANSSPSDGPVAKFLDIPESHLLTLNMITPEGWLVETVRSNCDLDNINLKDTGGIATAEYELEHLLLEGHCFDLTTEQPPQGLQFTLGTENNPAVVDTIVMANLGYFQLKANPGAWILKLREGKSEDIYDIVGHEGTDSETDMGDVIVVLDTFKSKILKIEVKKKSGKIMEDILADKHEDKGMWESIKRIMMLSVLQHTKTPVKFWFLKNYLSPTFKVSMLLFYSAAKFDTNFCVVIEVIPHMAKEYGFQYELVQYKWPRWLHQQTEKQRIIWGYKILFLDVLFPLAVDKIIFVDADQIVRHDLKELRDFDLGGAPYGYTPFCDSRTDMDGYRFWKTGYWASHLMKRKYHISALYVVDLKKFRRISAGDRLRGRYQALSQDPNSLSNLDQDLPNNMIYQVAIKSLPQDWLWCETWCDDESKQRAKTIDLSTVEEENKCAARLDPEVVLLVEGGDGSSSTWEGSFQF

SEQ ID NO: 4323 - protein, 1525 aa, Amphiprion ocellaris
MRSLVVLSLLLLNIHHVISAPKGVTASLKAKWSMTPFLLETSEFIGEDGNEKFWQFVDTVKELTVYKQGESVRSYYNLIIKKAGQFLTILQVNLLRFALALRSYSPAVHASQQIASDEPPPEACPAFVSIHGQRGCSTKDIKKLLKAAAGRPKPYLYKNDHTYPGANKTDVPVVILYAEIGTKKFNSFHTVLSEKAKEGTLAYVLRHYVADPKPQKMLLSGYGVELAIKSTEYKAVDDTKVKDPKTAVNAEDDDNDEVQGFFFGTLKKSHPELQGQLVELRKHLLESTNDMAPLKVWEMQDLSFQAAARIMSVPKFDALKLMRDLSQNFPSKARSLTRVAVKQEMRKEIEENQKHLSETIGVHPGDGELFINGLHIDLDLHNPFSILDILRGEARVLEGLHNLGIKGEHQGKLLRLPVNSVDDSYALDIRHPAVMWLNDIENDFMYHNWPAGVQELLRATFPGVIRQIRRNFFNLVLFLDPLQEESVELVKLAELFYKHKIPLRIGFVFVVNTKDEIDGFSDAGVGFYRLLNYIADEYDLSQALMSMVSLYNTVDVGETLSVDTVSSYLKRKFPKANSERILGVDSEYDDKRKDGALFYRQSGLGAMPLALFNGVPLSPDEMDPEELETVILQRIMDTTTAFQRAVFMGQLTEGSDVVDYLMEQANVVPRMNPLILSTDRKYLDFTSTPGFAVVNDWEDTTMFSFLDSRDKTAVMAKRMKYFTSSDEDGMTAVTMWITGDFEKVSGRKLLLNALKHVKASSGVRVGVIDNPSEKPSEDNTILYRAIWASLLTQKNKAAAEFVHKLLKEESRQLLQQGTKMKDLLMQGMDVDAFEKKFNTLEVDFIRSQQLFCRDALKLRPGQRAVISNGRILGPFEEQEEFTVEDFHLLEKITLSGSAEKVKTKVKQMGMKPKHASDLVMKVDALLTAAPKGEVRREVHFIKDSHSVLHLSPRENEVFYDVVAIVDPLTREAQKISPLLIVLSQVVNVRLQVFMNCRAKLSELPLKSFYRFVLESDVAFLANDTVSPGPVARFMELPESPLLTLNMITPESWMVQAVRSPHDLDNIHLQEVSGVVAAEFELEHLLLEGHCFDLSTGQPPRGLQFTLGMSRDPLMYDTIVMANLGYFQLKANPGAWILRLRKGRSEEIYQILTHDGTDSPAEAGDVVVVLNSFHSKIIKVRVQKKAEKISEDLLSESNESKGIWDSIASITGGGSKKDEGEKKKEDVLNIFSVASGHLYERFLRIMMLSVLRHTKTHVKFWFLKNYLSPSFKETISHMAESYDFQYELVQYKWPRWLHQQTEKQRIIWGYKILFLDVLFPLAVDKIIFVDADQIVRADLKELRDLNLEGAPYGYTPFCDSRREMEGYRFWKTGYWASHLGHRKYHISALYVVDLKKFRKIAAGDRLRGQYQALSQDPNSLSNLDQDLPNNMIHQVAIKSLPQEWLWCETWCDDASKVTAKTIDLCNNPKTKEPKLMAAARIVPEWVEYDNEIKQLLRQVQEQEDTTMQKQSPSPSQHKKDNRRDEL

SEQ ID NO: 4324 - protein, 1445 aa, Talaromyces marneffei
MMRASLLGLATSLLVLLQPQSVVASPSVNVALRASFDAGPYLVELLETAAQENATSYFPLLDRIASGIFEDATHDKDLYESFLQVLIQDNHLQNKENLDSFKFALAIRSAAPRIQAHYQYYNTSVASTLGTGQDAACPVWVHMDGKQYCSSTLERAQQDVSGDKDPRELPFDRTLGDTSATPAVLYADIASPMFADYHRTLKALADEERETTKANTKAPSAQDLEAEEDEALPDLKPLSSSEVAKLGMSAASFVLDSADPFTTLVKLSQDFPKYSSSVAAYNASEEFSEEYMKNRQAGLPVGRNSMWINGLQIDPRQVDAYSLLDYLRRERKSIAEFQKIGLSASETIEILSYPALAEVQGSGEVQRYDWRDEIEGGGVVVWLNDLEKDKRYATFPKTLQALLQPTYPGQFPSVGRDIQNVVVPIDLANVDDVQFVAKYLYAFIKRLIPVRFGLVLTANTEESKAQAKIAHYLHQAYGLASLLQYLEASLASEKVSHAHKPSFEAAIAERSLRPDQESLSFEEILQSEALDATVANTEKYLKRLALKGPSPPTLVNGIAMSRGENYLQELPMQLSRDLQIIQQGLMQGVFSDYDYIPDYFLSQATQSRNEWIIPERDSGILIADICRAAEAHNDFADILRFPADRKHPAANVQLIITGDFNTEHGFALLISALKFHQTHPEVEIVPLHNPDTDEKVGENSSKLYELLRHPEPVDLDDVLAQIQSDGSHQATQKEEEQAYWTQVQQLVTDLGLSAGNSTLILNGRVVGPLPPSVEFTEADLELLLSYETSQRLGPLSAALKDLDIEAKIASPLNFAKLTSLVMLSTDSDAPEGVFEQRPKFRLNVLKRWNSTHSAIDASTNTKDASINIAAAVDPTSEMSQKWLPILKTLSKLAGVNVRIYLAPNSELSELPIKRFYRHVLESEPTFDESRYLERPEASFTGLPQDALLTLGMDVPSSWLVAPKYSIHDLDNIKLSAIKDGSDVDAIYELEHILIEGHSSDTTLRSPPRGVQLLLETEKGSFFADTIVMANLGYFQFKAQPGFWKIELKEGRSRDIFQLDSIGGGQQSSGTNEVALLSFQGKTLFPHLSRKPGQEQEEVLETGPKPGSAMDYVSKGLNFAQGVLSSVGVKHTGKSESDEKHAEINIFSVASGHLYERMLNIMMVSVMKNTNHSVKFWFIEQFLSPSFKSFLPHLAEEYGFTYEMVTYKWPHWLRGQREKQREIWGYKILFLDVLFPLSLDKVIFVDADQIVRTDMYDLVTLDLEGAPYGFTPMCDSREEMEGFRFWKQGYWKSYLRDLKYHISALYVVDLQRFRELAAGDRLRGQYQALSADPESLANLDQDLPNHMQTLIPIKSLPQDWLWCETWCSDEALKTAKTIDLCNNPLTKEPKLERARRQVPEWTVYDDEIAELAKRVASTSTSTSTSEKDDVDEGGEEEEIYERKDEL

SEQ ID NO: 4325 - protein, 1553 aa, Lucilia cuprina
MKLHNSKTKSLWGKASLLSLLTLFTFCKEALCQETATSKSFPITTLINAKWEQTPLHLEIAEYLADENANLYWDFLKDITDLETTLSSYETPSQSYNAAINVVRKRLTDLQMPLMKLIVSMHSLTPRIQTHFQIASEVLAQGSCSDSATFAQVGSELACSLDELRQKLKLNKQDSLDAHVDTYAFDHIYPGSENNTRTVVLYGDIGSKTFAQYHYLLTEKALSGDIKYITRHYLPLKYQKSQKRVRLSGYGVELHLKSTEYKSQDDAPKPSEDAANDSSVESGVEMEVQGFDFKVLKERFPTLSHSLDKLRQSLQQGNEEIAQLKAWEFQDLGLQAAQAIAEIDGEEALKILQFTAHNFPMQAKALLSHKVSDQLRNEVKHNTESFGRSLNIIPPDGALFVNGLFFDADTMDLNSLVETLRSEVRVLESLHNSQVKGSLASSLLALDFAGSGSKEFAIDIRDSSILWINDIETDPQYRRWPSSVMDLLRPTFPGMLRNIRKNVFNLVLVVDPLKPTSRSLIKLAESFVVHSAPVRLGLVFDASKSSEDTKEDYMALVCAFNYVTQKKDARSALGFLTDVFTAVDSKQEITRKHIKMQLKKTFDKLSSSAVDDILDEDSDFDYGRQLALEFVERLGFSDSPQALLNGVPMQQNILSSDSDFEEAIFSEIIQQTTSLQKAVYKGDLTDSDNLLDYLMNQPHVMPRLNQRILGNNENAKFLDLTGQPHIDLNNVKDLAQLSNRDMTATLLNNIKYFEGKHSYETIGEANLHFLTIWLFANAESKEGKELLNNALKYVKAGSSVRIAFIPNVEGSDLSRKNNLNRLVWAAQQVLKPQQATDVVLKWLKQSSDKWEIPAQVNDFLDFTELHMKILRVYAQRVLNLKANERLVIGNGKIIGPIGTNEQFGIEDFGLIDRFNAIQYGDKLRKVLKQKSLDIEESDFDSDTLLKLYACLIPRQSKTRFKIPDDVKEAHSVVKLKPKHEDLPHFEINAVVDPASRSAQKLAPILILLRNTVNCNMKVYLTPVNQHSDMPVKNFYRYVVESEIQFLPNGELAEGPIAKFTGVPANPLLTQNVQVPENWLVEAVRSVYDLDNIKLSEIGGPVHSEFELEYLLLEGHCFDASTGAPPRGLQVTLGTQDNPTMVDTIVMANLGYFQLKANPGVWTLRLREGKSADIYDITFAEGPNTLHQEGNTQVVISSLRSHVIKLRVTKKPGMQHADLLGDEENQQQSGIWNSIASSFGGGSSHEGEPETINIFSLASGHLYERLLRLMMLSVMKNTKSPVKFWFLKNYLSPQFTDFLPHMAKEYGFQYELVQYKWPRWLHQQTEKQRTIWGYKILFLDVLFPLNVRKIIFVDADAIVRADLKELYDMDLGGAPYAYTPFCDSRKEMEGFRFWKQGYWKSHLMGRRYHISALYVVDLKRFRKIAAGDRLRGQYQALSQDPNSLSNLDQDLPNNMIHQVAIKSLPDEWLWCQTWCSDNAFKTAKVIDLCNNPMTKEAKLTAAQRIVPEWKDYDAEIKALMARIEDHENADHNEQIVGEHNLTPNADDPPKHSEL

SEQ ID NO: 4326 - protein, 614 aa, Blastocystis hominis
MSLIRGYFGDFGDVAPSFPANSPFVVSHTADASFLDITAVMDPLSVDAQRILGVLLEFRKIVPISYQLLLVPSRDYSELPLKRFYRFVGSDGEQATWFNLPSHYLYTMSIETPFKWNTIAYYAECDLDNLRVLDDTTYILAQYFVDALIIEGSCFDRETHEPASRVMLKMSHFGDGAMESDTVVMNDRGYWQLRGNTGLFEIAPSRGSADTVDTIDSVDSKDSMNEQTRNENSEHAGDAAKKLFKNLKSKLFSFASHNEMNELNKVIDSEAEANDDDDDDDDDEEINVFSLASGHLYERFLKIMMLSVSRSSSKKLHFWLIENFLSPQFKAFFLFVFHTQDIVPELCRHFGYKVSYVSYKWPRWVYPQTEKQRIIWAYKILFLDTLFPLRVKKIIYVDADQVSRVDLSELWDMDIHDCVYAYTPLCTSNQETKGFMFWTQGFWKEHLQGKPYHISALYKVDLELLRKRGVGDILRRVYNQLAPDPNSLSNLDQDLPNFIQEQVPIYSLPQEWLWCESWCSMETKEKAKTIDLCNNPMHKEPKLDMAKRVISGPLFNQSWISLDEEIHHFEDGVSGGNQRQPMQFLRVCLNKERELWGNRCGELKSDKTYEKMQK

SEQ ID NO: 4327 - protein, 1669 aa, Acaromyces ingoldii
MFALTSVLLLLLRPLLPLLLLLLASAAGEARAQEASPPVHVSLRSGWPASPFVVELLEAAHQEAPSSFFDIVAIVAGPWFFNDTDDGTHDLASATPQQVFKGAKRAFDRYGVLPGEATRRRWEAALALRAQSSKVAAFTHLYRTSGLEQRWEEAMAARDSSDECRSWVDWDGKVLCSRDELQRHLDETGSTAVTKSPYPGPVAFDHVLAHPLDETDGEQEQEAATAVLYGDPASSNFFGLHAALSEYALGARAEVPFRYILRWRPPPQSSTGGAATKEEEEERDYLAGFGASLDVKKVDYLVIDDRAVAASGSEDGGGDSNDGDGSTATRRGAATEREAARAQLDDRRWLDAQLGGPPSDEAEEEEGGDAGLRAAYIVAKSSEPLRALRQLSHDFPLHAGALARSSAARPSRRFLDEMLGLHQMYLQQATTDVWLNGRSLSATSDEAGAASALTLLPLVRDERRLLDSLIALNLSAEAAVSLLTYAPLQQQQQQPQSQQQVHDAYFDASDRPEGGAVVSWWNDVEADEAYVRFQPELRGLLRPLYPGSFPTVRRNLFNVVLLMDLRRAETCRFLAESVSLATKRLALHWGFVPTGLVEPGDESSQLARLYWLAMERGGSTLAAEYLARLANAMQTHVTVAQARAQLQAVLLAAAHVDGSDEEEEAAAVEQAIEAALAPASEWTEREAKARRYAKRLGAVVADKDHRGDVFVNGRHVPFTAALIQHVHQLIAAQVQALAPLVYYGTLTDEADVSTHFYDLNTTFAARSPLAFPPPQASNISADAVDLTQVAAQLDDSTLLRRFFLPRQATTATTATTTPIDTTLWLVGDLDSDEGTSLLRETIKAQQALPQAFRLGLVHAAPSQSSLGTVSRAIYDQLQRDDGAASEALLEVLNSSVSRGDDNKNEEPARRFWRGQARLARLFGVAKSKSPFAIVINGRIVAGFDAAKVESIDVESLVAVERQRRIAPLVEGLQTPAIAQHDAALAELARDADAITTLTSIIARAGFVDAASEGLFARASTARSTAIDDVPTTNGLTSFELGADRAHARLRLTLMVDPLSKEAQRWADLVEHVLQLDDAIWVRVLLNPAGASRAGAATDEAEAAEAATTLRRFYRASSPARLAFDGDGQLRRPRASFYGMPADAVLTMAIEAPPAWVTMASVAVHDLDNIRLSDVARASAGTRAVVAATFDVKHVLIEGHARDTAARSVPRGLELVLETLDGSLVDDTIVMANLAYLQLRAPSPGLYTLRIRGAGSKSAELYEMESVGSAGWNSPPVGGGGGGGGESSSSDDVVTVDSPAGLTIYPRVRKRKGREHDRLVFDSEGEGEEAHAMGAGRSPAAAQGLVPFAWSLVADAARRIQTSFSAATATATSRRKAETINVFTVASGHLYERMASLMILSVLRHTQTPCKFWFIENFLSPSFKDFVPHLAREYGFEYEMVTYAWPHWLRAQSEKQRQIWGYKVLFLDVLFPLDVSRIIFVDADQIVRADLLELVQLDMGGKPYGFPPMGNDSYDMDNYRFWETGYWKKFLRGLPYPISALYVVDLDRFRLLAAGDRLRGHYQALSADKGSLSNLDQDLVASLIHQVPIYGLAREWLWCETWCSWDWQAQAKSIDLCSNPKTKEPKLDRARRQIPEWTAYDDEVARFAERVRAQQATQKTTQGTVQHDEL

SEQ ID NO: 4328 - protein, 1373 aa, Ixodes scapularis
MDHFYAGSPNPQLPLVILYGDLAAKGFRRFHEALQKRAQDKQISYILRHFAPSARKVRLSGYGVELAIKSTEYKAQDDTKVKGGFEGKSVVDSEETEKAENIAGFDFKKLKELYPEKKDKLNELKAHLMDSGNDLVPLKVWELQELSLQAAQKILLAPLEDALRIMRDTSQNFPSQARSLVNVAVDAGFKKEVERNQQMFLQTLSLEPSDAALFFNGLYYDAEVTDVFTMLQMLKQETRLLEGLHNIGISKDTIPRLMKMDLLNNKQEYGVDIRDTAVQYINDIEHDPSYRGWPTSVQDMLRPTYPGMLRNVRKNMYHLVVVADPSQDNARDILKLAESFYVHRAPLRIGIVFAVNPNMSVTGYQDAGVAMLNAFNFISQDRVPYEGLSFITDVSGVYAAGREGVTAEIVIKQFKTKYPGEDLDLVFGEDSDYDTGRKLAWEFINKTGIGTGPQALLNGVLLKQSHLNADMFEEAVLTEIMKQTPNIQRSIYKGDLNDSQDVLDFLMEQPNIMPRLNQKILSPGANYLDMTGRVVVGLSLEDFAALTMPDMVSTFASHLLYLYPKEKTRYYPLTAWVVGDFDTPSGRLLLSSALEHFMETNEMRVGVIFNPSEAEGRQERSVNRAVWTALESLPSDEAASFIRKLLKEKNYDDFLAGKRAAEELLSPNSKPEAFKKALEDCDGAFLGWHSSFARLALKLGPTERAVVINGRVIGPLEDGEEFNTDDFNLMERYSMSTYGTKIKEVISEEGAEPSELDSELAMKTACVLLSHMQTKSRHSVLSFGEEKSVLKIPASQPEEPAHEVVAVVDPVSRGAQKVSQLLLVLQNVINANVKIFFNCVDKHSDMPLKSYYRFVLESEPSFGLDGQFGQGPYAKFVNMPQSPLLTLGMATPENWLVEAVRSPYDLDNIHMEQVESRVHAEFELEHLLLEGHCFEQSSGNPPRGLQFNLGTQSNTVVADTIVMANLGYFQLKANPGLWTLRLRQGRSSELYDVTSHEYTDSPQDSDEVLVMINSFRSHVLKVKVSKKPGKQNEDLLSDGDEDPNDIWSSFTHSIVGERPKTDDEEQEDRINIFSLASGHLYERLLRIMMLSVLKNTKTPVKFWFLKNYLSPTFKDVLPHMAKEYGFDYELVQYKWPRWLNQQTEKQRIIWGYKILFLDVLFPLDVKKIIFVDADQVVRADMKELRDLDLGGAPYGYTPFCDSRQDMEGYRFWKSGYWASHLGGRRYHISALYVVDLKRFRRIAAGDRLRGQYQGLSQDPNSLSNLDQDLPNNMIHQVAIKSLPQEWLWCETWCDDDSKKQAKTIDLCNNPKTKEPKLVSAARIISEWKDYDEELKQFIERYEKGAAKATLSEGARLAEVKPDDGTPHDIHTEL

SEQ ID NO: 4329 - protein, 1527 aa, Periconia macrospinosa
MRVLNPLFRLQSLALLSAVVGHIGVLARGPSINVALRASFNSAPYLVELLETAAEENATAYFPLLDRIADGYFDKAKTDKDLFDSFVQLLETDGHITDPATLSSFQFALSVRSAAPRVEAHYQFYNTSVEPGLVGEQGEECDTWVAFGGKQYCSPELKDSHGSINGERTKKLPFDRVLGNASHALPSILYADITSSSFAKFHKTLRATAAEGKTSYRVRHKPSASSKKSPLIVNGYGVSLQLKRTDYIVIDDRNAEQSKKAASLDAELHDEEDVSDLKPLSKDDISELSLKAASFVANSENPMDTLLRLIQDFPKYSSAIVAHNASEGFIKEQAFNLAQLPGYFSSPGSQSFWVNGVQIPARDINPFALLEHLRRERSLINGMRSQGLSGADAVSLLSHSAITDTQAEDEPQRYDFRDEIEGGNVIVWLNNIEKDERYENWPSNLQALLQRTYPGSLPSVRRDIHNAILPIDLTSEDDVISVVETALNIINRNIPLRWGIVPSSRTAGASDQAKVVYHLLDTYGLSAVTNYLVAAVREKKLDQPSKAVFDAAIEGVELLPEREALEFADVLKSEEVERQVEGAKKYLDRLSANHDDPPFFINGIPMPKAGNWLGALSQRVSVDLNQIQRAVFERAFEEDAWVPKYFLFQALPRRNSLIIPEDEKNITLVNMAEFEILHGAAFLKMPTIKAAESANPAEWVHVTLVGDFDSQNGMSLLKSVAEYRDENPNVELVLIHNPQPGAQQVSVSEDLLETWVKSGRSVSSEQLLDILGRPLITSPSTANATAFWAAAEPVYEALNLQPGQSGILVNGRFVGPIPDTNPFGKDDVEMLVSYEMTKRITPLSKALEDLKFNEKVSSPFDVAKLQSLVALSSVSDGPEGVYDSASTVRADHFKKWNQTHTVITTGDLGKATFQIVASIDPATELAQRWVPILKTLSDMAGVHLKLFLNPKDTLEELPVKRFYRYILDSKPNFTKDGSVQDLEARFNGIPKEALLNLAMDVPPAWLVAPEESVHDLDNIKLSSLPAGTNIDAIYGLESILIEGHSRDITNGGQPPRGAELVLATEKDPHLADTIIMANLGYFQFKVNPGFYNIHLKSGRSQEVFKLESAGPLGWAPVPGDETSELVLMSFQGTTLFPRLSRNPGQELTDVLAPEESLASEIVEKGSQQVNKLFSKIGLNVNSEKVLKKGASFFSGGKSSTAGKRTQADINIFSVASGHLYERMLNIMMLSVTKHTNHTVKFWFIEQFLSPSFKSFLPHMAAEYGFEYEMVTFKWPHWLRQQSEKQREIWGYKILFLDVLFPLDLDKVIFVDADQIVRTDMYELVQFDLEGAPYGFTPMCDSRTSMEGFRFWKTGYWANFLRGRPYHISALYVVDLQRFRALAAGDRLRQQYHSLSADPNSLSNLDQDLPNNMQFNLEIKSLPQEWLWCETWCSDESLKDAKTIDLCNNPQTKEPKLDRARRQVPEWNVYDEEIAALARRVRGSVEGEIGAVDKVGIQEAEQIRERERKEAERKKEVEEEEERVRDEL

SEQ ID NO: 4330 - protein, 1498 aa, Sodiomyces alkalinus
MIRLSKLPLGFALSLLAAIHVSAVPSVNVAMNAAFPAGPYLIELLETAAGENETSYFPLLDRVASGYFQDATSDKALYEKFLEVLQEDGHITSTEALSTFKLSLSTRSAAPRIEAHYQYYDTAILSHLADSSQDGCDHWAQLDGQQFCSPSLDSPRPSLPGAIKQLAFDRVLGTGKDAILYADPASPSFGAMHEILARKARNGEVSYRLRYRRSSVTNLEPLPVSGYGVELALKKTDYIVIDDRETGQDDAQKTTGTEVVLDEEEEVEDLKPLSTSELGPLGIKAASFILRSQDPWDALLKLTQDFPKFSTSVAAHDASDEFVAAHMQNQLQVAPGGVNVMLMNGVRLSDRQFDAFTLVDKLRQERKLVNSVRELGFSGKQATSLLGHQEIAAAQAADEPLRFDWRDEQEDGRVIIWLNDLENDEAYKDFPAPLQSLLQRTYPGQLPPIRRNVFNLVVPVDFTQSTDLKVVNTLHAFVQRRLPVRFGLVPIAATEDKANQAQIVYHLLETYGIDTFVEYLQKAVGDDSHPTLNQTAFDLVVNDAKVLPDGAPSSFDQVIQSEDLSKQVRLAQHWVKRAIADTPTPTMFVNGLPASRDNSWLQTMSAKITADLKIVQQAVFRGLVGEDDWVPGLFLQDAVSRRNPYIEDTKSVQVLDVNKLSTDHRNLFSQIPIIQGNPEATKENWAVLTVVLDATTDLGKNLLFSALQFRRNNPGIQLEVLHNPEAGLPSSAINHVLKEQQDTLLEVESLAQLQQVLLLDGAEPESDNDYAAALASFLSATGIAPGSNKLILNGRVLGPINAEFAFGEEDFQQFFDFELKARILPVYAALKEMELTDRLSDPVAAAKLTSIIALSTIPDVPEGIFDSGPATRVNAFQSWDSTATSMEVGDAEEASIHLVGLLDPVSEQAQAWVPILKVLSELDGVYVKLFLNPKDNIEELPVKRFFRYVLESEPSFDESGKVRAPRASFKALPSEALMTVGMSTPPAWLVFPKISAHDLDNIRLSSVKGDIEATYQLEHILIEGHSREGKTGNPPRGAQLVLGTEDEPHFADTIIMANLGYFQFKANPGIYNIQLKEGRTSEIYTIESIGAKGWTPVPGDEGTDVALMDFLGTTLYPRLNRKPGQEEADVLEEPETEGDGGIIAQGLKFAEGLFGGGGSKSTKSVSAQEHAEINIFSMASGHLYERMLNIMMASVMKHTKHTVKFWFMEQFLSPSFKDFLPHMAAEYGFRYEMVAYKWPHWLRQQKYKEREIWGYKILFLDVLFPLSLDKVIFVDADQIVRTDMIDLVRHDLEGKPYGFVPMCDSRTEMEGYRFWKQGYWANYLRGLPYHISALYVVDLRRFRDMAAGDRLRQQYHALSADPNSLSNLDQDLPNNMQFSIPIHSLPQDWLWCETWCSDESLATARTIDLCNNPETKEPKLDRARRQVPEWTAYDEEIAALDRRRKGVPPPPVEAATGGEEQKVVVAEEKETESVQKNPKSRNWEEPPSAESTHKRDEL

SEQ ID NO: 4331 - protein, 1520 aa, Hippocampus comes
MWLLWISLLSALATVSGGGADSKAITTTLTAKWADTPLLLEASEFLAEESQEKFWDFVEASQDIEEDDADTDQTYYELIVQKAATLLSSVQVNMLKFALSLRAYSATVHSFQQIASNEPPPAGCSAFFSVHGEKTCDPDALEALLKTALERPKPYLFKGDHKYPGSKPDAPVIILYGELGKAYFRELHLAVVDKVGEGLATYVLRHYVAHPNRKRVSLSGYGVELAIKNQEYKAKDDTQVQGAEVNATMIRENDPVDEVQGFLFGRLKTLYPELKEQLKELRKHLVESTNEMAPLKVWEMQDLSFQTAARILAAPTTEALNVMKDLSQNFPTKARSITKTVVSAEIRKEIAENQKFFKGTLGLHPGDSALFINGLHMDLDSQDIFSVFEVLRSEARVMEGLRSLLIDTPYIHDILKLNVQPSESDYAVDIRNPAISWINNLETDHRYSSWPYNVQELLRPTFPGVIRQIRKNFHNLVIILDPTQENAADLLSVAEMFYSNNIPLRIGLVFVVSPEDNIDGMQDAGVALLRAYNYIRDEVDSHSAFDAVVSIFNRVPSGGRLTVDHVIKVLEKRFPYVEVNSVVGADSSYDNNRKEGRAYYEQTGVGPLPVVMYNGIPYQREHLEPDELETITMQKILETTSFYQRAVYLGELASDHDVVDFIMNQPNVVPRINSRVLSTTRTYLDLSDTNNHFVDDYARFSTLDTREKSTAVANSINYMTKKDDGYVRPVTFWVVGDFDLPSGRRLLYDAIRHMKTSNNVRLGMISNPSAGPAAESSRVTRAIWAAMQTQSANNAKNFITKMAKEETAAALRKGTDIVEFAVGGMDVSLFKSAYESHKFDFLLSHAAYCRDVLKLKKGQRAVISNGRIIGPLEDDEVFNQDDFLLLESIILKTSGERIKSKVQQFGIEEDRASDLVMKVDALLSSQPKGEARIEYGFADDRHSAVKIRPKEGDVYFDVVAVVDPVTRDTQKLTPFLMVLKQLVNVNLRIFMNCQSKLSEMPLKSFYRYVLEAEVAFQADGSFSPGPMAQFLDMPQSPLFTLNLNTPESWMVESVRTRYDLDNIYLEEVENIVAAQYELEHLLLEGHCFDVSSGQPPRGLQFTLGTASEPVIVDTIVMANLGYFQLKANPGAWKLKLRKGRSDEIYKIYSHDGTDSPADSDDIIVVLNNFKSRIIKVKVQKKADKINEELLSDSSAEENDTGFWKSLTRGFTGGSKPEETKPDKDDVINIFSVASGHLYERFLRIMMLSVLKHTKTPVKFWFLKNYLSPTFKEFIPHMAKKYGFQYELVQYKWPRWLHQQTEKQRIIWGYKILFLDVLFPLAVDKILFVDADQIVRTDLKELRDFDLEGAPYGYTPFCESRREMDGYRFWKSGYWASHLAGRKYHISALYVVDLKKFRKIAAGDRLRGQYQGLSQDPNSLSNLDQDLPNNMIHQVPIKSLPQEWLWCETWCDNASKKNAKTIDLCNNPMTKEPKLQAAVRIVSEWSDYDREVKRLQTLVQREVAQESPAAESPSTEIHTEL

SEQ ID NO: 4332 - protein, 1600 aa, Hypsizygus marmoreus
MKRFRSLQLLGLSLVVLGGNAASPPVRITLKSSWPAPSPLIEVLETVALDNPSAFFPLLNRLTNPDLLPLPQKMSPEAVHEASLEIAAVHGFLAEPGSLAAVEMNLALHSATPKIEAFYQHYVNHHNSSRGSECGSWVDWYGEVVCDIETLVQLAGTETIDPAIKSWNDSPFSRPRLLTFDHVYPPPSRTLRHPPRTAIFYASPFSDNFRELHTYLLSLAIQPDPHVEYVFRHIPPKERHAGIRNNLSGYGVALNLKKTDYLAIDDRNTLTNGASKDVALDSDNSELNVDPIITLIHNHPENVTAPDAKTPLSEAELKDIGFQAIQLIADSSTPLDTLTQLSQNFPKYATSLARRVVVNSSLSTEIHANSLKAQGGVRMFWLNGAIVQDKDINPFGLLRLLRKERAAVMSLTQLGLGRGEVLDLLTHPDVTQTATGSATLDGLFDASDRPEDGEVIVWWNDLEKDKRYERWSPSLYALLRAMHHGLPNIRLNLFNVVLVLDLSQVSSLTFITGPMADIIEKNISLRFGVVPITETEEGTRMAKLFFHLVRNYGRKKTLAFLSDLLTAVAQRSEQGVQTIPWDAVRILFPSFVENMASPDDVIASLDDIIAGNVTPEPPLEKAAAYAERLGATLSASSQGHVFLNGKHFKFDDDFFRLMQPELGRQLRYLQEQVYEGKIKEEDNEAMSTYFYNLPTTSLRRNRYIYPESTPGSLRIFNLPQLFSRTGYRVSSTGFIYPSETPVIPLSLYVIADLDSETGLGLVKEALSSITPDSHTRITFIHNPSIDPDEANPLPAASWLLAHLITSHSLAQASPAQLLRALGLDEPVPAKDGPQAVLSSKEDIWHALTGGVKVADFDTNRYANYVRASRLVARDVGIAPGELGLMVNGRVVGPIDAGEFRAADFGALEAYEIRQRAEPVMKGLEAVDPSLTQLDRETYAQLVSMAASVISSIQLPDPSETGLFDAPQRPRSKQYQLLDSEYTVFEAGDNITALYHIAVLMDPLSVTAQKWSSLLQWLSNIPDTFIQVHLNPARHSEIPLKSFYRYNLIPSLSFDENGLEIPSQAIFKDLPIEPIYTLAMDIPSSWLVRPQEALYDLDNIQLGSLSPQDHSVDAIFSLDYLVVEGHAREVPAGNPPRGVQLELTQGEGTPIDDTQVVANLGYLQFKATPGVFGLGIRRGRGREIFKMQSVGNEGWDSPTVEEGGSEITLTSFEGLTLYPRLVRLPGMESADVLEEPKPESGGLGGIFGGFKDKVTSLFKPKETSVARTEEQAEINIFTVASGLLYERFASIMILSVLRNTKSTVKFWFIENFLSPSFLEFIPHLAEKYHFQYELVTYKWPSWLREQTEKQRIIWAYKILFLDVLFPMDLKKVIFVDADQIVRADLKELVDLDLQGAPYGYTPMGDDNTDMEGFRFWKTGYWKEFLQGRPYHISALYVVDLVRFRQLAAGDILRGQYQQLSADPNSLANLDQDLPNNLQREVPIFSLNEDWLWCETWCSKDRLHRAKTIDLCQNPLTKEPKLARARQIPEWEEYDAEIARFARELAEAGLIHSGLAVADANVLANAGATASEGTKDEPAQEPEATADDESTLPKDEQPRDEL

SEQ ID NO: 4333 - protein, 1627 aa, Phalaenopsis equestris
MGISPRSRVSALWLIPMFYLAFGGLSYSVEGHRPKNVQVSLRANWPGTSLLLEAGELLSKEWKDLFWEFTELWLQPDRASNCSTARCCLDIILNDGQSFLSNRLGSIFEFSLTLRSASPRLALYRQLAEDSLSSFPVDEEVNSTTIGLTSDGDHSHSTRLVKSGRSCCWVDTGSVLLFNVPELLSWLDTSLDLEADSLEEPELFDFDHIYFGSLISNKVAILYGAVGMKCFQEFHVVLAEASKKGKIKYVARPVLLSGCQAVANSYCSFVGASDAVNLGGYGVELALKNMEYKAMDDSAIKKGVTLEDPKTEDLSQEIRGFIFSKILERKPDLTGDIMAFRDFLLSSTISDTLEVWELKDLGHQTAQRIVHALDPLQAMQEINQNFPSIVSLLSQMKLNDSIKEEIITNQRMVPAGKSLMALNGALINIEEVDLYQLMDMVHEELSLADQFSILKLPQNAILKLLSAPPPSGSNVFRIDFRSTYVHYLNNLEEDAMYRRWRSNINEILMPVFPGQLRYIRKNLFHAVYVIDPVTTCGAEIINMVLSMYQNSVPMRFGVILYSSKLIKHIEESKSRLPIVAKNDDFNEWDDISSLIIRLFLYIKESFGSQTAFQYLYNVCKIKDATDVLDEEAVQVHQVEEAFIETVLAKTKSPPQDLLLKIEKEPKYKEEAEGTTHFVYKLGLSKLQCCLLLNGLVHEPSEDSSINAMNEELPRIQEQVYYGHITSNTDVLDKFLSESGHRRYNPQVVDGGKEKNNFISIAKSYIAKESILHDISYLHSPGTLDDLKPVTHLFVVNVTSMKGINLLREGLHYLMADSRKARIGVLIYGDVLFSSPGLLFAEIFDKASSIFGDKRNVLNFLDDVCSIYESQFMQICSSDTTNLNNFIEKVCELALANELPSDDLRSILSKFSSSMRINQFEKVSYFMHEQLGLEVCSDAIITNGRVFAFMNGVSFSIDDLELLESVEYQHRIRYIYEIINEADWSNADPDELTSKFYSDLIMLVSSAMSNRERSSDRAHFEVLNAKHSAIILNSGNSSIHIDAVIDPLCASGQKLAPLLLILWKRIQPSMRIVLNPMSSLVDLPLKNYYRFVIPSMDDFSSIDHSVNGPKAFFANMPLTKTLTMNLDVPEPWLVEPIIAIHDLDNILLENLGDTRTLQAVFELEALLLTGHCSEKDRDPPRGLQLILGNQQMPHLLDTLVMANLGYWQMKVRPSVWYLQLAPGRSADLYMMKKDEEGTRFSLSKEIIIDDLRGKLVRLEVEKQKGKEHIELLSGSDDEHIKEKKDDHTGWNANLLKWASGFIAGNGLSRKRNESSSDNKKSERHGETINIFSVASGHLYERFLKIMILSVLKNTRRPVKFWFIKNYLSPQFKDVIPHMAQEYGFEYELITYKWPTWLHKQKEKQRIIWAYKILFLDVIFPISLKKVIFVDADQVVRSDLGVLYDMDLRGKPLAYTPFCDNNKDMDGYRFWRQGFWKDHLRGRPYHISALYVVDLVKFRQMAAGDTLRVYYETLSKDPNSLSNLDQDLPNYAQHTVPIFSLPQEWLWCESWCGNSTKSKAKTIDLCNNPMTKEPKLQGAKRIIPEWADLDAEARRFTSRILGEELEETQQISPATISHKKTDLESKAEL

SEQ ID NO: 4334 - protein, 1544 aa, Pediculus humanus
MIFSSILNLYFAVGIICLSNILCAKQKAKTVTTLIDAKWEVTPIVLEVAEYISEESKDDFWSYINDVSQLKPQLIEVENDKIHYDTALKLAKKYLSNSQIKAIKLALSLHIFSPKIEMFGQMASECGVPESRCPSAVDFNGRLFCHINEFLQYFNDNEKKKSEKPELYDVDHIYPTSENHSHVAILYAELGTSEFAEMHLAMKDLASQNRLSYVFRHYVKERPFKRVRLSGYGVELQMKSTEYKVMDDAQVKANESSSASETEDPDEEVEGLNFYKLKNLYPEQKMELEKFRSHLLETSNEMAPLKVWQVQELSLQAAERILSSSSGEEALKTMTHIAHNFPLQARSLIKTRVRPELKKEILKNQEVFDSVLNLSPNDAAIFINGMYFDVEVLDIISLLEVLRQELRIMEKLHKIGVEEEDIKNLINLDLSVSSTDYAIDIRDSAVIWINDIENDRQYRKWSDSLLDLLRPTFPGMLRSIRRNLYNLVLIVDPSKKESKPLLKLMESFYIHSAPLRLGLAFAITDDKTKTGLNDPGIAMLNAFNYVAEAKNPYSGLSFMTDVYASVPDEKDVTVEDIHKKIKAKYPSIDIDQVFGEDSAYDTGRKLSVEFLQRSGFRKVPQALLNGVPLSDKKLNADDFEEGVLSEIMTQTPQLQKAVFKEEFIDTDSAIDFLMSRPNVMPRLNERILSENAVYLDLTGNAVPTSSPSEYKKLSMQEKIGTLIKNMKYFTGKIGQKKKPDLITHWVVADLDCPKGRQMLKSALEQMKGSSSIRVGIIVNPVSSTVAPITELILTSLGTLNSDVAANYIYKILDNEPVFEALDGFRRPPDFLLPGLNVADIAEALLDGNLAKKIVAMHRIFVKSVLKFKPGERGIVTNGRVYGPFDSEETFVADDFALLDRLSYNHIGQKIFQGLNKDKKSTTEEGNFNYLTSDNLMQTISVLASRSDSRVRFKIPLKSTDQVLSCVDIPPFNSSIPSFDIVAIVDPVSKGAQKIGPILSVLHQTVNSHVRVYLNCVEKNSDLPLKNFYKYVLEPELHFQPDGKLTPGPIAKFSNLPTSVLFTQNMHVPENWIVESIRSPYDLDNIKLDNVLESGVHSEFELEYLLLEGHCFEAMLGNPPRGLQITLGTEINPAKYDTIVMANLGYFQLKANPGAWTLRLREGRSSEIFNIIDTDESGNSVIVKDIKVIISSFRSHVLKLRVQKKPDKMKLDLLSEDDGGTGIWNSITSSFGSKSEDVDDVINIFSLASGHLYERFIKIMMLSVIKHTQTKVKFWFLKNYLSPTLKDFLPHMAKHYGFEFELVEYKWPRWLHQQSEKQRIIWGYKILFLDVLFPLHVRKIIFVDADQVVRADMKELRDMDLGGAPYGYTPFCNSRKEMDGFRFWNQGYWRNHLQGRRYHISALYVVDLKRFRRIAAGDRLRGQYQALSKDPNSLSNLDQDLPNNMIHQVAIKSLPEEWLWCETWCDDKSKEFAKTIDLCNNPLTKEAKLTAAMRIIEEWKDYDHEIKELQRKIDLSSNIEEITDNNNNNNNNNNKPSHTHVHTEL

SEQ ID NO: 4335 - protein, 1213 aa, Gymnopilus dilepis
MEKDSRYARWNPSLLSILRPLYPGAMPTVKANLFNIVLILDLSDVLNLNFVSGAMSNIINHIPLRFGLVPVVETDDGKKMARLFYHLIKSYGRRKTLDVFRSIVLNYQRQGIQRDKIDWADVRQAYEELVEKEREGNPEGDFPDLERIVDGSVGEAAGVSEDSTTATEAEAEAEADGSDVNANGKAKKDLSAPLDKIGKYTDRLAAKLARSPKGHVFFNGKHFNFDDDFFRYMQTEMSMQVQYLSEKIYSGILTDENKPPSMSNYFYDLPNASKRRNVYMFPAGGSKDVQIVSLPEVFRKTRFRVSEGTYLYPTAAESVYESLYVVTDLDTEDGLALVKEAISSLTSDSKTRISFIHNPTTPQTPTPENGKRPLASYLLAHLHIRGLLSQATPSQLLAALGLESGPSASPAAAASPDVVADVEEGVQAALKDKVDADVVFKQLTGGAGLRDILAEEYADYVRTSRKVARELKVLPGQSALVVNGRVVGPLPADDFKLADFKTLEDFEFRKRAEPVLQAVQEVAPALIEDKFAAANMVSMVTSVVAAAQRPDPSESGLFDVPPRPRQKGYLLLESQYTSFTIGDNSTALYRIAVLVDPLSEIGQKWSSLLQWLSNIPDAFIEVHLNPGRYADIPLKKFFRYNLLPSLSFDEEGKEVPAHAVFEDLPIEPIYTLAMDVPTAWLVRPRESLYDLDNIQLGKLFPGDTAVEAIFELDYIVIEGHAREVPHNTVARGVQLQLVTGDGMPIDDTLVVANLGYFQFKAKPGVFKLEIREGRGREIFELESVGNEGWDSPTVKEAGAEITVTSFEGLTLYPRLRRLPDMEQADVLEEESDEEDSKKGVFEDLSQKVMSIFKSPKKEPSTDLIPVKPQADINIFTVASGLLYERFVGIMILSVLRNTNSTVKFWFIENFLSPSFLEFIPHMAEKYNFQYELVTYKWPSWLRAQTEKQRIIWAYKILFLDVLFPLDLKKVIFVDADQIVRADLKELVDLDLHGAPYGYVPMGDDNKEMEGFRFWKTGYWKEFLQGKPYHISALYVIDLVRFRQDILRGQYQQLSADPNSLANLDQDLPNNLQHQVPIYSLPDDWLWCETWCSKDRLDRAKTIDLCQNPLTVRVTPLDVADSDTHFAFAFQKEPKLARARQIPEWEEYDAEIARFTRELAAQGKIHSRLAVADVNALAGGAPSAAMPETEETGSELTGAEHDSSGSKEHQRDEL

SEQ ID NO: 4336 - protein, 1700 aa, Zea mays
MVAARGARSGGSVAAAALVSVLLVGCLVAGGQGAEIRRQKNVQAALRAKWAGTPLLLEASELLSTEWKDLFWDFIDLWKDLEKGSECLTAKCCAQKIVEDAHILLNEPLSSIFEFSLTLRSASPKLVLYRQLAKESLSSFPIDDSPENISGHGTGKTFDGAVDPGSSGGTCCWVDTGNVLLFNSADLHEWLGGLGKLAMDSTEQPELFEFDHIYRRTNITAPVAIFYGAVGTKCFKELHVQLVEASKQILHANFIWLLAIKDFKSISRVESTRYALRPVLPSGCETTSTFCGSVGAVDAVTLSGYGVELALKNMEYKAMDDTAIKKGVPLEDPKTEDLSQEVRGFIFSKILERKPELNAEIMAFRDYLLSSAVSDTLEVWELKDLGHQTAQRIVQASDPLQSMQEINQNFPSIVSSLSRMKLDDSIKDEIIANQRMVPPGKSLMALNGALINIEDLDLYLLMDMVHGELSLADQFVRLKLPQSAVLKILSAPPPAESNSFRVDFRSSHVHYLNNLEEDAMYRRWRSNIQELLMPVFPGQMRYIRKNLFHSVYVLDPASACGSDGTLTNNDGEDTSILITRLFLYIKETYSTQLAFQFLGNIHKSRNGEDDYNEELVEAHHVEGAFVDSLLSTAKSHPQDVLLKLQKENMYKQEAEESSHFVHKLGLYRLQCCLLMNGLVHEASEEATMNAMNDELPRIQEQVYYGHIQSHTDILEKFLSENSYKRYNPSITGKNAEKKFVSLFASYHQDSFIFNDMKYLQSPGTTDDAKPVTHLLAIDLSSKVGTKLLYEAILYLMDGSDRARVGLLLYVHTGGSSPILLLKDIFDRTISSFSYKEKVLVFLHGLLKFYDAQPLPASSVADDWTRTMMEKVYTLAAETALPVDDYKAWFKSFSADTVLKGMDKLSDFLFGQLGLVFGSNAVITNGRVFIMNEGKSFLANDLGLLESMEYDLRTKYIFEIIEEVEFASVDPDDLTNQFYSDIAMLISSSMSVRERTSERAHFEILHAEHSAIKLNNANSSIHIDAVIDPLSPTGQKLAPLLRILWKQIQPSMRIVLNPISSLADLPLKNFYRFVLPSMDDFSSTDHSVHGPKAFFANMPLSKTLTMNIDVPEPWLVESVIAIHDLDNILLENLGDVRTLQAVFELEALLLTGHCMEKDRDPPRGLQFILGTKQRPHLVDTLVMANLGYWQMKVSPGVWYLQLAPGRSADLYELPPKLIAIDSLRGKLMHIEVQKKKGKEHEDLLNAADDYHFQEKTDNKGWNKNLLKWASSLITGDASSKSKADKTTRRPARSEEGRRPTADEQDTRGKAQRQGLALAWADLSRRGLGGATRKEMERWLMGSGHHAVVEEGGPWPRLRASAGRGGCAAREQRRYERFLKIMILSVLKKTQRPVKFWFIKNYLSPQFKDVIPHMAREYEFEYELVTYKWPTWLHKQKEKQRIIWAYKILFLDVIFPLSLRKVIFVDADQIVRADMGELYDMNLKGRPLAYTPFCDNNKDMDGFRFWKQFFVDTFFYPLKGFWKDHLRGRPYHISALYVVDLAKFRQTASGDTLRVFYEQLSKDPNSLSNLDQMSCIETLSVIYRVQKLGDKTPGQIHMDLPNYAQHTVPIFSLPQEWLWCESWCGNATKARAKTIDLCNNPMTKEPKLQGARRIVPEWTGLDSEARQFTARILGDDVEPADATPPPSEAPKPEDDQDVKDEL

SEQ ID NO: 4337 - protein, 1486 aa, Venustampulla echinocandica
MGVLNLPWGLTGALLASTYLHSLCVSASPSINVGLKASFSSAPYLLELLETAADENSTSYFPLLDRIADGYFSKSQTDKALYEQFLQVLKDDGHISDPETLSSYKFALSMRSSAPRIEAHYQYYHTAAEPSLKAEQESSCPVWVHFGGKQYCSPSLETPHGDVSGGMQMQELPFDRILGNLSAPTSILYADITSPAFAQFHRALVETAREGKTSYRVRHRKSLGAEPQPLIVPGYGVELALKRTDYIVIDDREGDETKPAQEGSEKEVVFEDEELADLKPLSSSELVSLGIKASSFIMQSENPFETLVKLSQDFPKYSSAIASHNATKEFVAEFEHNTAQSLPSGYNVWWLNGVQMIERQVEALSLLDMLRGERKLIKSVRDLGLTGLQAIQLLSHDEIGTTKAENEPTRFDWRDDIEGGNVIIWMNDIEKDKRYEDWPSSLAALLQHGYPGQLPTVRRDLFYLVLPIDFTDAQDVLLVVETLRGFVQRKLNLRIGLAPITSTANSLEQARILYYLLDTYGLSTMISYLEGSYTSQKLSAPDRSTLEAVVKEKAVRPEKAARPIDEMLKSDDYQNQIQASKKWMRRLSADTTTRPVFVNGVAVPRDENWLQSMSQRVTGDLQAIQMEIFNEKFAHDAWLPSYFLSKAIKRRNSLIVPENEKALRIFDLNKLLVESPDILNSLPSIKADPLSVKTDWAHMILISDLESESGAKLLATVTAFRDVNPSIEVIIVHNPTSDTVGSGLSYDFVAQMQENREGVESVNGFTALLSNPSVKNDLTEKEAKQYWKGAESLIKALTLRSGQSAILLNGRLVGPIPDPSDLTNDDLDQLLAYERAKRILPAYTAMESLGLSDKIMDPLSGAKISSIVATAMVSDNPEGIFEQASTLRVGKFDLWNSSYTSIEVGDVSTATVQMTMLLDPASEQGQRWIPIIKTISELDGVYVKIFLNPKERLKELPIKRFYRYVLDSKPTFNSDGSLQSLSATFSGVPQEALLTVGMDVPPAWLVAPKASIHDLDNIKLSSIKTNVEALYELEHILIEGHSREMPSGSAPRGAQLVLGTERDPHFADTIIMANLGYFQFKATPGFYKIDLQQGRSSEIFKIDSIGSHGWSPVPGDESTEVVLMSFQGATLYPRLSRKPGMEDEDVLEAKTDTKLDIVSRGLSFAQGILGKGKSVEPKQEQAEINIFSVASGHLYERMLNIMMVSVMKHTNHTVKFWFIEQFLSPSFKDFIPYLAAEYGFKYEMVTYKWPHWLRAQTEKQRQIWGYKILFLDVLFPLSLDKVIFVDADQIVRTDMIELVNVDLKGAPYGFTPMCDSRTEMEGFRFWKQGYWERFLRGLSYHISALYVVDLHRFRQIAAGDRLRQQYHQLSADPGSLANLDQDLPNHMQSILPIHSLPQEWLWCETWCSDESLKDAKTIDLCNNPLTKEPKLDRARRQVPEWTVYDEEIAAVDRKKRGVKNGNGEHKNEKSRTLEEPPKTTSKKDEL

SEQ ID NO: 4338 - protein, 1508 aa, Pyrenophora teres
MRASASLLSAKALLALSAFTHIAAYASPSINVALRAAFSPAPYLVELLETAAEENATAYYPILDRVAEGYFDDKSTDQDLYTAFVHLLQTDGHITAPEALASFQFALSVRSAAPRIEAHHQFYKTSAEPSLVAEQTDACEIWVSFHGKQYCSVHLDEPFGNIQSERTYQLPFDRILGNSSALPAILYADITSPRFKKWHKTLSSTAKEGKTSYRVRHKPSTKASTSPLIVNGYGVELQLKRTDYIVIDDRQAVQGESAAQKPMGTELNDDDEVADLRPLSKEEVSNLGIKAASFVAQSEQPMDTLMKLVQDFPKYSSIIAAQDASEDFVEEHLKNREQLLPAGFSVIWINGVQIPARDVNPYSLLAHLRRERKLITGIQKQGLTGSEVISLLSHPAIAETQTEDEPQRYDFRDASEGGNVIVWLNDIEKDSRYESWPADLRALLQRTFPGQLPSCRRDIHNAIVSVDLTSADDVTNLLDVILSLIKRGIPMRWGIVPQTTETGAPEQAKIIYYLHEAYGIDAVTVYLQKSLDDKKLAHPDKAIFAATVKSAQILDEQEALEFDDVIKSESLDQRVTGAKQYLKRLSAEGPKAPIFVNGVPIPANEEWLSTISQRVGMDLRLVQKGVFEGVFNDDSWVPQLFLFQAANKRNPILIPENEKNITVLNMADFQEIHGGAFSKMPRIRASESASKSDWVHITLVADFDSVSGSALLKSLATFREANPNIEAVLIHNPQTGAEQSNASEDLLEAYTKSGQQLTSEALMEVMAQDANPRAVPAESTAFWKTAEPIYDAFGLKPGQHGLLVNGRYIGPIPDDYAFSNDDMETLVTYETNKRIEPLNKALQGLELLDKIASPFDIAKIQSLVALSTVSDVPEGMFETASTLRISAYSNWTAEHTAILKGDQDKAIFHIVASVDPATELAQKWVPILKTLSDMDGVHLKLFLNPGQMLQELPVKRFYRYVLEARPHFKPDGSVGSLEAHFSGIPKEALLNLGMDVPPSWLVAPQESIHDLDNIKLSTIPAGTNIDAIYGLESILIEGHSRDTTNGGQAPRGAEVVLSTEKDPHFADTIIMANLGYFQFKANPGFYNIQLKSGRSQDIFNLDSAGTIGWAPQPGDETTEIALMSFQGATIFPRLSRKPGQETADVLAPEESLASELVGKSAQKVNSFFGKMGLNINSEKVFQKGADLFAGGKAVKKGTQADINIFSVASGHLYERMLNIMMVSVMKHTNHTVKFWFIEQFLSPSFKSFLPHIAAEYGFEYEMVTYKWPHWLRGQTEKQREIWGYKILFLDVLFPLDLEKVIFVDADQIVRTDMYELVQHDLQGAPYGFTPMGDSRTEMEGFRFWKTGYWANFLRGRPYHISALYVVDLVRFRQLAAGDRLRQQYHSLSADPNSLSNLDQDLPNNMQFNLPIHSLPQEWLWCETWCSDEDLAKAKTIDLCNNPQTKEPKLDRARRQVPEWNVYDEEIAALARRVKGEKQAAEVVDVQEQEQLREKKEKDAENKVEHNEL

SEQ ID NO: 4339 - protein, 1293 aa, Eremothecium gossypii
MLHLRRQLAVTWLCLATVAAYDAARLWQSVVRAGINDVGQWYGALTGAEDEISVQELWAELGEDESTLLELLYETSVGVVEEVEHGAATNWFELNGKRYTGSDESFYLQSGELDAQQAVADATVLRVGEGVVGTAPEAPIVVLYGQAGSEEFEAFNWNLYREAQQGRIRLVWRPTCAGAGCGQPRVGAVYAHEYSVKGDWWSSTVRGEVAVPAEFAAKKYRLGGVKDENLSLLDLKVAALIAEQHGRTEDFAETLEYARQLINNFPLLAEHLVDREVDTNSTEVQLEEVTATGVTYDAIGLYINGQPWKLSSLDMRTFLLAIMNERKKMQHLVTTLQSKYGQLGVEDARSLLSKFCQVSVLNAQDMQPARYDFHRVPGFSESVIYFNDIEKDPQYSNMSTKLESIFEKSDYGVIPSYRKNWNELVFVVDFDSLDNEDTREILSGMVRAFSVADEGYPQRIGLLPLYRGDSNPIVENIYRHKESGIAEVKNYLRLLVLGERPGSEGAADIPPVKKILQDFSIFNNSLLINGQIHPFKKNTWHYLIASTVKHDVEILKSMAGRFPSTNVRELLHSKSLITRDSRYIVDYFDDATYTVEQISALDDLEKRVTVYQKGEAKKLYHTITLVDDFESKPALERLKNLLQIKFNGVRIRLLHIGETFSLYEELQRSLNEEENPLDTIGALLRKARDAPRFYTAIAERLQAWVPDLTREQTVGTAFAVINGRYVQFGPENSVSKSLWESFLQREASRTLDLLGIVDTHVPGMGDAKEDSDFVEQLTSILSQLFYSGSNIFHSGIEHTSESTLPRLNILEILPDELTGALIANGNRAAPVELAVILDPLEERSQTFLHLVDQVKSLSFLDIRLLLLPTKKLTIFPIHRIYSDDALSLSPTEAFTVGRELPHFLFPEPSNPEVASIIIEGYAFDEKLPVSKTTVESRMDVCLELLNAEGEVVDSTSTMSVFGYFQFLSPTLGYGFSIRSCSPEYEVTSFSTNAKADYVPSAEISIVDVTPQRVFVKLRGTDEKATGRDTNEQEGINIYVNIYDRSDETSFKEKLFAILAGTPQHTSVTFWLAYGAPISPDLQAVLRTAESLPGRHVACKPIRYAWPSWLRPQRFVDRRLDAARLLFLDVMLSHTMRGRLIMLSLTEERTPDVLELSELQTSAYLTMRPHRGHGYWEEGYWQNYLGKHNLRFFNPSRTFVVDLGRYRSLSAGDHLRVHYQRLSADATSLLDIDQDLVNSVQLLLKIRPLRINKFLPPATGEWIAAWPSNSVNDWTGNPPDTESASEEALDHDEL

SEQ ID NO: 4340 - protein, 1753 aa, Bathycoccus prasinos
MTKTTTRTLTVFSLVLITFLLLSGGVSSKSSDEHRQQKATAKTREKSIDVSLVSSLFPATSHALETAEAISTCCGEEKFWQFVSVWRNQNALNGKRCQRFIESAMRRAVGGPPEKEEEKENAREETMMTSAVKMSVGLRQFAPRLKMFQTLKDEAVEEVVRDDLKKEEVKTACCFATVGARGRYATDVASLRTEVSEARKEEAEVERSEEENDARRKPRYSYLVPTEFDHAYPTGKESDIMEGNEVEEKAKKERLPMVYLYAATGSQCFLDMHEFLAEKIDEEEVRYVLRPVFEKSCLNDEKAVKQCTAYGAFNYDGDTKNEKEDKDDELLRVPGFGVELAIKNMEYKAVDDQITAKDDEEGGDDGDEEIVLGFNFKTLRERLAEKGGEDAQEKLDGFKKQLEMEEKSIKGDMFEPLPKWKIANLGLLATQKIVSANDPLSMLRDVTQNFPSLMNKMANTMRVQKKTRDEVKENQRAVPPSSVIMSLNGQPMELDTVDAFAITDRVISELRDAERVRTIGLGEKAAAETLHLRPKGVRMKEPPKIDVTFSPVEFSYDFEKDKQYEKWSKSYSKFLKAMMESQGQGGLPPIRRNLINIVAIVNLGTAEGMEIVNVLERYRKMNIPVRYAILAIGNDDKTQLFEDDDYMGDGFGEEIPDDSLPDTQTYSNLVAKCAHYILAKYGAKPMRAFAIDIIEGREQLAAGDYFSPPVMAPPKWEDARSSFIQIARAIEVSNALGKGNEKSVSVTDRKEVMERVVKELNDVLDKMEDDEDEDENKKYSADALKAKRAIESRGLESNSVLINGVYYDSETSRRTLGASLSRAMGHLIGSVVQNLQQAIHTKQLKEDMDAYAFVNKGAAKKLRPEIQDESAFPPTFLPEIPHLFYISKTWIEGGAQNEAKPVSIWVVANPDCALGKAHLSEAMKFLRSSYDEPENGEGQDASDDGRESVAKQTRFFFVNPQMSDSAKPTLVARAVVAATQLTSAREHIPTLVLELLKDGDGDKNFIDRAVRASGVKADEFRKLFRNEETIDYLLKLQRTINAKHLGNTRRAFVVNGRLLDPVVLNTEFDASDLHVVAEADLEKRSNDARKIVERDAQEKTDPKGVTTTNVPFRIISARIAALSHFIAKRYEQAASRGVVESLEFLSTNRTAFTLGKDDAQGNVSMVEIEVILDPLSKEAQRIAPVLKVLKDSLGNHASLKVIMNPVEKLSDVPLSSYFRYCAQDLTDWSKSPKVVFEAGSLPQSKTLTAHLDHPEPWMVTTKKAKYDLDNLILENVKEDTVFAEYSLESLLVTGHAFDGGNPRNPPRGTQVVLQKKWFMEDIHEQKEIKDNAIAGTIIMANLGYFQLPASPGRFALALKEGRSRDVYEMVSTDLINIDDRTNTFSSGRTDPSKFRAEITVASWSGKRVEMKLRKRAGFEMADVLSEDDDENDENKRGLGSKISSLFGGKNKKKKQVQLDENGLETIHIFSVATGHLYERFLKIMMASVRRHTKNPLKFWFIKNWLSPSFKDFLPHFAKKYNVEYELITYKWPTWLHKQTEKQRIIWAYKILFLDVIFPLSLEKVVFVDADQIVRGDMNELWNIDLQGAPYGYTPMCDNNKEMEGFRFWKQGFWKTHLRGKPYHISALYVVDLKRFRELAAGDQLRGMYDQLSKDPGSLANLDQDLPNFAQHQVPIFSLPMPWLWCESWCGNETKAAAKTIDLCNNPLTKEPKLVGAARIVSEWTELDNEVRAYTSEVEKSGLLGNTKPPHDEL

SEQ ID NO: 4341 - protein, 1494 aa, Phytophthora sojae
MLATRTYSVKVEMFRQLALDSGLVACSVDELEAVLKGKKQQANEQSCVAAGVNDVELQVDHKYPNSVSDVEEKPLSAILYGLVGTEKFHAFHSKLVKQAQKNKIQYMVRHYPRDSPLDTLLQGYGVALDIKNMEYKTIDDSKKTGEEEAAADEENGDEEDEEEDEIDDEEVEGFLFNHLMARHGAISGELKQFYDILVKKADGEQEQELKAWHLKDLGASAVRAIVDAKNPLKRLETLSQDFPVQAKKLAFSRKSISAELRDEMSATRMQAANRRLKNKFILNGIAVDPLERSFNVFDFMKTLKEEWSVAKQLGGLPMNQSELEEMLAHVRQTNQEQPAVRIHMRGSMGGSTPLYLNNIETDPNSASWSSDVDTLRRPAWNLIFVRKNMYECVLVLDPLSGTGRVALSHIGFLRMRGAPVQWALLVSSKELMASKTADDRRALLEMYKSFKEADKATPWHFAKLLMLSQSKDAAEAEALQKESKGSRSGDEETSETEEPEDRIIPTRIASEFLQRVGEDGSSDVAVGSLIEAYTDAAGAIGTLEENGEEAWACLKSDRFDDEILAMTEFIHLKHVPLGSFVFNGVLQKNLDIQRSMMSNFGRDQPLYVNMAHRGLLNDDMDLVEELLDSQDAYPAYLSIFEKSEGAHPGDIEVDLPKHLFADDVDGRLEAAVQRAISYLHAPDSRAVPKKETVIFPADLNDPRDAGHAYRIVKAVLEDSEQSLRVGIVPQLNSNSAEKQGSNEHLLKFVLEALNCVVKQKSVDATKDKLIGIWGKLSKEEDSEDSVSKKISALLSSKSGKWLTPKQRNALTQCNALLRSRFPPVLAEESEEESSKMVLPHLFINGRRVTLPPHSLSDEDVDTIVSFDLTYRTQPVAKALIKRSATLSVKKADSLSFDIMKTTGIVDKYVRTDRAPRMEVGENSLNTVRLEGDPSLQVAAYVDPLSEAAQVMSSMLRMLHSQLNATIELVLTPADEYTEFPLQRFYRYLFDKKPSLAATNVEFRKLPVHPILTMKIETPEAWNVQTLHAGDDLDNLRVDPDSPTDVKSTTSAVFRLESLLVYGQCRDTTFNMYSPPNGLQLVLEREVGAQLLHRDTLVMKNLGYFQLQATPGVWSLHLARGRAAEIFDIIDPDTDVPLETHPVVVYDFGSHISQLFVHDGALRSYWNSMLNAMGKREDKPEKKTQDAETEGGHADSTGDDNAVAHQKVRTGETIHVFSVASGYLYERFVKIMMSSVLKRTNNPVTFWLLENFLSPDFKKSIPALREQFGMDIRLVTYKWPNWLRQQTEKQRIIWGYKILFLDVLFPLGVQKIIYVDADQVVRADLKELWELDMEGKPYGYTPFCDSRNVGFQFWRQGYWKDHLRGKPYHISALYVVDLALFRQTAAGDMLRAVYSQLSADPNSLANLDQDLPNYAQHQIPIFSLPQEWLWCESWCSDETKGAAKTIDLCNNPKHKEPKLDMAKRVIAGELFNESWIELDQEIKDAEAQYTVEAAA

SEQ ID NO: 4342 - protein, 1269 aa, Stentor coeruleus
MFNWLFTVSTLKTALDIYLGTSWKGYTEKSLKQEICEYFSDIGELSNFLEYDLTLPFDTFIEILPKTQVEKQVILASLYNREYSARLEFYGTLEQNEKSTCKPFYIINNVHSCSLSSELASSKVSLTSEFDHIIHYGVGSLIAYVDITDSNFHDLNKQILKFCIENDLTYALRHLDLRAKTEDYLGGYGAEANMKNMEYNPTEDVNATYIPLPKWETEELSYKIVECAMSLNTITDIKTFLENLPENIEKISEITLSSSISRELDKSMYSSQSINILLINNHIVKANIFDILPVIRAELKSYQSLLSLKIPQEKALKLKNDANLNLHLYQNRPKPIKTSVSTGRVYLNDLEKDDKYAFWSKSYEEFFFAYGNELLPIGLNFFNLILICDVNFDMCWKTLKNFVELIEVYPIHFGVILVGDLQITSVLMEGLKSLRKADEDFVAEFVERIEYGMNPEELTKILNEVCIDCDIDFEYSTAGKRCEEFCETVGLCGPVQLLLNGKLLSIDPSHLIDESSIEETIFYELSSEKRNILNLAMKGILNPPLDTFFEKLTFMNTTDRVNAEISSIGTKDINLTPFLPRSPLNIIKPKSLGFFHIFLTKNDTKLASIFLDALERYSHIALSYNIYFYDMENIKQYNDIISKVCPKCSENEVYDMALKSQDQMKKLGLTKGTVIVNGRVIDGDHFKNYRDFMIAYECETARIGTQSIADNLDDYDRIEEVSYALLKSSRMIKDFDIYRYHPLPQMMQPKAITKVFKDENPMLEVSALINLASKEGITMLALCEWMKSLGASVTITFQSLFNSAKFPVYRYYKYFIKKSFEDSLVFHVESKWTYSLSLDIHSSWMVRPVKSSLDLDNLNSPDNQIIHYKLKNLLIQGHCAQTYRGFDMEPPNGLQLILKNSSTIVADTIVMKNLGYFQFQAKPGTYLIDLAGGRSEELFQISKGQKINLMDIVGDPALMAVSKYSGMENEELLETGVYSNIGDVINIFSLASGKLYERLIKIMISSVMKFTKEKVKFWLLEDFFSPGFTDDIDKLAKALGFDYELLSYKWPSWLYAQTEKQRIIWGYKILFLDVLFPLKLGRVIYIDADQVVRTDVKELWDMDLEGAPYAYTPFCDSNPLTQKFMFWKTGYWKNHLKDLPYHISALYIIDLNRFRDLGAGDILRYFYESLAQSPDSLSNLDQDLPNFTQTHLKIYSLPQEWLWCPSWCSEESKEQAKSIDLCNNPLTREHKIEAAKKYIPEWNDYDLQVKKILQVEKTAEDRKDFNKEL

SEQ ID NO: 4343 - protein, 1512 aa, Ricinus communis
MGTRFRSGFCVLIIVLCVSFCGLFSVHGENRRPKNVQVAIRAKWEGTPVLLEAGELLSKERRDLYWAFIEVWLQAENDEPDSYTAKNCLRRIIKHGNSLLSDPLASLFEFSLILRSASPRLVLYRQLAEESLSSFPFLDDSISDNARKCCWVDTGGALFFDVAEVLLWLKNPAKLAGDPFQQPELFDFDHVHFDSQTGSPVAILYGALGTDCFREFHTTLAQAAKEGKVKYIVRPVLPSGCEAKVSHCGAIGSEESLNLGGYGVELALKNMEYKAMDDSAIKKGVTLEDPRTEDLTQEVRGFIFSKLLERKPELTSEIMAFRDYLLSSTISDTLDVWELKDLGHQTAQRIVHASDPLQSMQEINQNFPSIVSYLSRMKLNDSIKDEITANQRMIPPGKSLMALNGALINVEDIDLYLLIDMVQQELLLADQFSKMKVPHSTIRKLLSTMSPPESNMFRVDFRSTHVHYLNNLEEDAMYKQWRSNINEILMPVFPGQLRYIRKNLFHAVYVLDPATSCGLEASDFFSPFTNNYPLNPFIKKIEVSGGDLHLSSIEDNSQTEEDLSSLIIRLFIYIKENYGMKTAFQFLSNVNRLRVESAESVDDAPEMHNVEGGFVEAILSKVKSPPQDILLKLEKEKEFKELSQESSVAVFKLGLYKLQCCLLMNGLVSDSREEALMIAMNDELPRIQEQVYYGHINSRTDILDKFLSESSISRYNPQIIAEGKGKPRFISLSSSVLDGESVIHDISYLHSSETVDDLKPVTQLLVVDLTSLRGIKLLHEGILYLIRGSKVARLGVLFSASRDADLPSLLIAKVFEITVSSYSHKKNVLHFLEQLCSFYEQSGVHASSLTDESSQAFIEKVYELADANELSRKAYKSALTEFSIDAMKRHLDKVAKLLYRQLGLEAGVSAIITNGRVTILNDVGTFLSHDLNLLESVEFKQRIKHIVEIIEEVHWQDIDPDMLTSKFVSDIVMTVSSAMALRDRSSESARFEILNADYSAVILENENSSVHIDAVVDPLSPVGQHVASLLKVLRQYIQPSMRIVLNPMSSLVDLPLKNFYRYVVPTMDDFSSTDHTINGPKAFFANMPLSKTLTMNLDVPEPWLVEPVIAVHDLDNILLENLGDTRTLQAIFELEALVLTGHCSEKDQEPPRGLQLILGTKGAPHLVDTIVMANLGYWQMKVSPGVWYLQLAPGRSSELYVLKEDGAESLDKLLSKRITINDFRGKVVHLEVAKKKGMEHEKLLVPSDDDNHMHRNKKGTHNSWNSNLLKWASGFIGGNGLAKKNENVLVEHAKGSRRGKPINIFSIASGHLYERFLKIMILSVLKNTQRPVKFWFIKNYLSPQFKDVIPCMAQEYGFEYELITYKWPSWLHKQKEKQRIIWAYKILFLDVIFPLSLEKVIFVDADQVVRADMGELYDMDIKGRPLAYTPFCDNNKDMDGYRFWRQGFWKEHLRGRPYHISALYVVDLVKFRETAAGDNLRVFYETLSKDPNSLANLDQLSMRMLTGIQGEN

SEQ ID NO: 4344 - protein, 1643 aa, Beta vulgaris
MGTFARSKHWVVLVLVSIAISGGFVSAQSHRPKNVQTALRAKWEGTPLLLEAGELLSSEWKDLFWEFVDSWLQNKHDDVDSSSAKGCMLKIVKHGRSFLSEHLGSMFEFSLTLRSASTRLVLYRQLAQESLSSFPFTDEAVTNGDDGRASDLHGKTNMGNKKPDPLLVGVNPASPGGKCCWVDVGASLFFDIPEMLEWLEIQKDIGGDSFQEPELFELDHVYSVSNSSSPVAILYGALGTNCFGEFHGVLVKAAKMGKVKYAVRPVLPLGCEAKTSPCGALGTKDPVNLGGYGVELALKNMEYKAMDDSMIKKSITLEDAHTEDLTQEVRGFIFSKILERKSGLSSEIMAFRDYLLSSSVSDTLEVWELKDLGHQTAQKIIHASNPLQAMQEINQNFPSVVGSLSRMKLNDSVKDEILANQRMVPPGKSLLALNSALINIEEIDLYLLIDLVHQELSLADQFSKLKIPEPTIRKLLSTLPPSESSMVRIDFRSSHVNYINNLEEDSMYKRWRSNINEILMPTFPGQLRYIRKNLFHAVYVVDPATFCGLEVIDMIANLYENQLPVRFGVILYSTTFIEKVERSGGENFADSIVSSTDEDISSLIIRLFIYIKEHHGMLRAFKFLTNVHTEAGDSGEETPERHQVEGAFIDAVLSQSKSPPQDVLLKLEKEKSFEDVAKESSMLVFNLGLSKRKCCLLMNGLVYNSNEEALLNAMNDELPRIQEQVYYGNIDSDTNVLDKFLSENGIRRYNPLIIADGKVKPKFVSLSNSILDEESALHEMSYLHSPETIDEVKPVTHLLAIDLTSTKGLKFLREGIRYLVDGSTKSRVGVLFVPNLASDSPGLLFVKIFQVTTSSYSHKKGVLKFLDQLCSLYENIFMKNPSKQTEGIKTFIEKVSDLADVNELPSKGYSSLLTEFSVDDLQKQLNKVALFLHKHLGHESSLNVVFTNGRVTVLPEESTFLSHDLHLLESFEFKQRIKHISEIFDDLKWENVDPDSLTSNFISDVIMLVSSSMAIRDRSTESARFEILQATYSAVVLTGESPLHIDAVIDPLSPSGQKLASLLQILMKHFQPSMRIILNPLSSLVDLPLKNYYRYVVPSMDDFSGSDFAVNGPKAFFANMPLSKTLTMNLDVPETWLVEPVIAIHDLDNILLENLGETRTLQAVFELEALVLTGHCFEKDHDPPRGLQMILGTKSAPHLVDTLVMANLGYWQMKVSPGIWYLMLAPGRSSELYLLKEGDGGSQKTTLSKRIIINDLRGKVVHLEVVKSKGKEHEKLLLSADDDDQSSERQKESQSSWNKNLFKWASGLIGGSQHTKKSDSTAAESKNDRHGKTINIFSIASGHLYERFLKIMILSVLKNTQRPVKFWFIKNYLSPKFKDVIPLMAREYGFDYELITYKWPTWLHKQTEKQRIIWAYKILFLDVIFPLSLDKVIFVDADQIVRADMGELYDMDIKGRPLAYTPFCDNNRDMDGYRFWRQGFWKEHLRGKPYHISALYVVDLAKFRQTAAGDTLRVVYETLSKDPNSLSNLDQDLPNYAQHTVPIFSLPQEWLWCESWCGNSTKPKAKTIDLCNNPMTKEPKLQGARRIVPEWIDLDLEAKQFTAKILGEEMDPVESTQPSPPQSEIPKVAEISPEIDMESKAEL

SEQ ID NO: 4345 - protein, 1493 aa, Suhomyces tanzawaensis
MFFSWLLLPWLFANVALGNGQTPNELSVELHSQWGPASFELNLLESITEYDPDLYIPTILELLGLNDEGDEEPLLPESTNSEKYNHIMSSKLLSLGTKTKAFINYNFVNKINYPRVQAHHDFYKSIVQPEFGERIVKECSVDSFGNKVKRGPNQPWVLYNNKLYCSSDDLYALQTDKATKFKPRPFDRVIGDNYKAPLLILYGDINAPSFADMFSNLYESAKTGKIRFIWRYTPSTNSKKSVDTLSGFGVDVSLKRNDYVVIDDRDIKNKKGTQKGKPSKPLNINKDLWKILQTSELKPVSKQNFNELSSKLTSLVLLKQYNNITEYDLLNLILSEFPKLASYIGEATNLRHLKDIEDQFVRNRNAGLSDDSYGLYINGAPLHSLELDSLNLMEKIEDELSIIHDLKSLGLTPRQAKFLIKKFALLSAVKQTQFRNGNTVMGHNENRFRVYENVFTAGGFKRKRGVVFLNDIEKDNTYEEYSKDRKEVYLGPVAQRLKPNQLPPLKENVHDLIFALNFNNKEQLKVLFTLSKMILDSGIPQQVGIIAIDGGNELDRVLAEKFYFIADTSNSQEALAFLYKYLESKDSLELSDLLETIRVPEDYGFDHAIYQNTLEKFSIVNPSIIFNGVIYELTSPNWQIAMGKQLSQDIVLLKQHISSGKADGKSLKSILYQGSKSTRNLRIIPADPADVMYKFVDSQLIDASVALKPHRHDRKGGVSGTFWLIGDFNKQIMIDQLKSILSVMKWSKETLQVRILNTGHTVKEIEKLAKQVNLHELTGNDIDWILTKLNTIQNADAKLELNLTIAKLLETKKLPVHHEFLLFNSRYFRLDRILAETDLELLVEYEYNQRFLIFNDLINAYPEEFNYKVLDELNPLLHDNLDWFDLLASVVTRSFYDDKFYVNDVGRFDFSTINMEYSLNITNQDSKMLEPELEFLLIIDPLDDYSQKVVSIINSVKDFPFVSTRILLQPREDENESVRIKRFYKGVYPRAIPEFDDKGKWISENTAQFFNLPTSEIFTVELDTPQKWITVTKDSPEGVDLDNIKFDNLDESLIHGVYELKNILIEGYARDVKTAAPSTGVALEISQGDAVADTQVMSSMGYFQLPSGPGTWRFRIKNGGVGDQFELLSATESKFVMNNVGLESVNISVFDLKGKTIYPRLQKTEKKVNRESTNNKKHADINIFTIASGHLYERFLSIMTASVRKHTDHLVKFWIIENFISANLKQLLPHLAEKYQFEYELITYKWPSFLRAQREKQRTIWGYKMLFLDVLFPQDLDKVIFVDADQIVRTDMMELVTMDLEGAPYGFTPMCDSRDEMDGFRFWKQGYWSEVLGSDLKYHISALYVVDLRRFREINAGDLLRSHYQKLSLDPNSLANLDQDLPNNLQRKIPIFSLPQDWLWCETWCSDATMATAKTIDLCNNPLTKENKLERARRLIPEWEAYDAEIAQVLAYKAQLDHDQAQLDQDLIDYISEDETEPAHDTWDEDPFEHDEL

SEQ ID NO: 4346 - protein, 1629 aa, Mucuna pruriens
MGFRSACFLFILILIPTPSLSDSRSPKNVQTALRAKWSGTPLLLEAGELLSKEDQRLFWDFIDIWLNADHNNAQSHSARDCAKIILEHSRPLLTEPLASLFEFSLVLRSASPALVLYRQLAHDSLSSFPHDGETDANAEISKLDPLLVSVSLITPGGKCCWVEAGENLTALVASNRCYTVRTMLLLLCSFVLFHFFKYLPFVIRVDDSIQSPELFDFDHVHFDSSPGSPIVILYGALGTGCFKEFHAALVGAAKQGKVNYVLRPVLPAGCETNVGHCGSVGASESVNLGGYGVELAFKNMEYKAMDDRTIKKGVTLEDPHTEDLSQEVRGFIFSKILERKPELTSEIMAFRDYLLSSTVSDTLDVWELKDLGHQTVQRIVRASDPLQSMQDINQNFPNIVSSLSRMKLDDSVRDEIMANQRMIPPGKSLMAINGALVNVEDIDLYLLIDLVHQDLLLADQFSKLKIPPSTVRKLLSTLPPSESSMFRVDFRTTHVHYLNNLEEDAKYKRWRSNLNEILMPVFPGQLRQIRKNLFHAQPFVVLRQVYFLKLNNFTLFFVTSYFHSIDMIISLYENDFPVRFGIVLYSSKYIMQLENYSAKEDGDKFEEDISDMIIRLFSYIKGNHGIQLAFDFLSNVNKLRSESDDNVDEAHLELHHVEGAFVETILPKVKSPPQEILLKLEKEPELKELSQESSMLVFKLGLSKSHCSLLMNGLVIDSTEEALLNALNDETQRIQEQVYFGQIKSHTDVLAKFLSEAGIQRYNPRIISNNKPRFISLSTVIFGEASILNDIDYLHSPGTMDDLKPVTHLLAIDITSGSGLHLLRQGLNYLREGSKDARIGLLFSANQSTDSFSLLFVKVFEITSSSYSHKKNVLDFLDQLCSFYQQKYFLTSALEVNSTQAFIDKVCKLAEANGLPSEGYRSALLEFSADEVRRHLSKVEIFLHRVLGSGSDVNAVFTNGRVTYPIDESTFLSADLLLLESIEFKQRTKHILEIIEEVKWQDVDPDILTSKFLSDIVMAVSSSMAMRERNSESARFEILSDQHSAIILHNENSSIHIDACIDPLSPISQKLSGILRVLWKYIQPSMRIVLNPLSSLADLPLKNYYRYVVPSMDDFSSADSSINGPKAFFANMPLSKTLTMNLDVPEPWLVEPVIAVHDLDNILLENLGDTRTLQAVFELEALVLTGHCSEKDHDPPQGLQLILGTKTTPHLVDTIVMANLGYWQMKVSPGVWFLQLAPGRSSELYILKEGVDGIQNKQSSKLITINNLRGKVVHMDVVKRKGKEHEKLLISDVDEDPQDKKKGSSWNSNLLKWASGFISSNEQSKNAETNALEQGRGGRRGKTINIFSIASGHLYERFLKIMILSVLKNTRRPVKFWFIKNYLSPPFKDLIPRMAQEYGFECELITYKWPTWLHKQKEKQRIIWAYKILFLDVIFPLSLEKVIFVDADQVVRADMGELYDMDIKGKPLAYTPFCDNNKEMDGYRALYVVDLKKFRETAAGDNLRVFYETLSKDPNSLANLDQDLPNYAQHVVPIFSLPQEWLWCESWCGNATKTKAKTIDLCNNPMTKEPKLQGARRIVSEWPDLDLEASGFTTRILGDDIEPMQSPNQSKDLIGEDSLEEDSESKAEL

SEQ ID NO: 4347 - protein, 1514 aa, Loxodonta africana
MAAGRTLCVVQLLLGSMPLWLSLLGATTASASKAVTARLAAKWPETPLLLEASEFMAEESNEKFWQFLETVQELAIYKQTESDYSYYNLILKKAGQFLDNLHINLLKFAFSIRAYSPTVQMFQQIAADEPPPDGCHAFVVVHKEHTCKTNDIKKLLKKATSRPRPYLFKGDHKFPTNKENLPVVILYAEMGTRIFGKFHKVLSEKARRGEILYVLRHYIQKPSSRKMYLSGYGVELAIKSTEYKALDDTQVKTVNNTVEDETEASEVQGFLFGRLKEIHSELRDNLTAFQKYLIESNKEMMPLKVWELQDLSFQAASQIMSTPVYDAIKLMKDISQNYPVKARSLTRIAVNQQMREEIQENQKDLQDRFDIHPGDTRLYVNGLHIDTDVYDPFSILDMLKLEGKMMSGLQNLGINGDDMIRFLKLNTHTWEYNYALDIRHSSIKWINDLEYDDLYVTWPASCQELLEPEFPGSIPSIRRNFHNLVMFIDPAQEYTLDFIKLGRLFYHHKIPLRIGLVFILNTDDEVDGTDDAGVALWRAFNYITEELDVSQAFISIVHMYQKVKNKKILTVDNVKSVLQTKFPHANVWDILGIHSKYDEERKAGASFYKMSGLGPLPQALYNGEPFRREEMNLKDLEMAVLHRMMDTCIYLQREVSMGTLNDQMNVINFLMDKNTVVPRMNSLILHTKPRYLNLIPTSVTADVEDFATFFFLDSQDKSAVIAENMYYLTQEGGDVVSSVTLWIIADFDKPSGRKLLFNALKHMKRSVHSRLGVIYNPTSKITEENTAISRGILAAFLTQKNEHLRSFLRKLTKEDIAAAVYSGGNIKSFLIEGMDKNAFEKKYNTIGGNIFQTHQLFCQDVLKLGPGEIGVVSNGKFLGPLRETFYAEDFYLLEKITVNSLVEKIKGVVKNMEINSKNMSDLVMKVDALVSSLPKRVSRYDVTFLKEKHSIIKINPQEDDMFFDVIAIVDPLTRETQKMAQLLIVLDKIINMKVKLFMNCKGKLSEAPLKSFYRFVLEPELMPGGNDIHSVGPVAKFLDIPESPLLTLNMITPEGWLVETVHSNCDLDNIHLKDVEKTVRAEYELEYLLLEGHCFDTRTEQPPRGLQFTLGTKNKPVVVDTIVMANLGYFQLKANPGAWILKLRQGKSEDIYQIVGHEGTDSQRDFGDVIVVLNSFKSKILQVQVQKKPDKIEEDILTDKDEKKKGMWDSIKSFTIRLHKEDKREADVLNIFSVASGHLYERFLRIMMLSVLRNTKTPVKFWFLKNYLSPTFKEVIPHMAKEYGFQYELVQYRWPRWLHQQTEKQRIIWGYKILFLDVLFPLAVNKIIFVDADQIVRHDLRELRDLDLGGAPYGYTPFCDSRTEMDGYRFWKTGYWASHLLRRKYHISALYVVDLKKFRKIAAGDRLRGQYQALSQDPNSLSNLDQDLPNNMIYQVAIKSLPQDWLWCETWCDDESKQRAKTIDLCNNPKTKEPKLKAAARIVPEWVEYDTEIRQLLENIENKKNNAILTHDEL

SEQ ID NO: 4348 - protein, 1460 aa, Ophiocordyceps unilateralis
MTAVTAVAVPSVNVGMKAAFSAGPYLLELLETAAAENDTAYFPLLDRIASGYFVSASSDAELYSKFLDLLVSDRHVAGPEALSTFNLALTLRSAAPRIEAHYQYYSTAVEPSVDHKCLNWVLLEGKQYCTPELDKAMREGLFTSGVTTLPFDRTLGSGKEAVLYADPVSETFGDYHKALSTAARALDFKYRVRYRRSEANPVRSLPVSGYGVELALKRTDYIVIDDRDAAVDRSQKPLTSGAFDEGDEVANLRPLSTSELASLGLRAASFIQNSDNPFAMLVKLTQDFPRYSASVTAHNVSEPFNAAREMVAPGGINFLWMNGVQLIERQIEPFSLVEMLRRERKLVDGFRRLGFTGKQAISLLGHSAISTAKGDDEVLRYDWTDQPENRRAIIWLNDLENDSRYKDYPKSLMALLQRTFPGQIPQIGRNVFNIIAPVDLSTTEDVAFVSQLVSIVRRGIPLRFGLVPLTSTAAAIAQAKVIFYLMENHTIETLFAYIDGLSESSASNVNDKLFTDVVAGADSLTNVEKLSLSEIIQANFSAERMKSALHWVKRLRADTAVRPLFINGVVISRDANWMQTMSMKISGDLQIIQKQFFQGSLAEDSESSKIFLEGAISRRNPYISVESDKALRMLDVSRIYSEHGKLFGRIPVLEPYSESTKENWAVVTILADLTAVSGRELVLAAMEFKRSNPGVRLELIHSPEDSSKAPRVNSALHAQVELLKDMESIDQLTKVVDSAEGESVDDDYAPALSAFLNMAKVEAGRNTIILNGRVVGPISTDEAFTADDFQLLLEYEQGHRILPVYAAIDDLGLGDKLSCAMAAAKATSITALSTISDLPEGIFESAPTTRSTMYDSWNVSHATIEVGDSETASIHIAGLLDPVSEKGQRWTPILQVLSELDGVYLKIILNPREKITELPLKRFFRYVMDAKPSFEKSGSMKALKASFESLPSEVLLTVGMDVPPAWLVAPKESVHDLDNIKLSSVKSDIDATYELEHILIEGHSREGRGAPPRGAQLTLATEKDPMITDTIIMSNLGFFQFKANPGLYKIKLKEGRTADVYMIESIGAQGWEATSGDEGTELALMDFQGTTLYPRLKRRPGMEEKDVLEASGSAFSGSIVSKGLKFAEELLGTKSKSLSVQKHAEINIFSVASGHLYERMLNIMMVSVMRNTKHSVKFWFIEQFLSPSFKEFIPHMADEYGFRYEMVTYKWPHWLRQQKEKQREIWGYKILFLDVLFPLSLDKVIFVDADQVVRTDMMDLVDLDLKGAPYGFTPMCDSRTEMEGFRFWKQGYWSNYLRGRPYHISALYVVDLRRFREVAAGDRLRQQYHALSADPASLSNLDQDLPNHMQFEIPIHSLPQEWLWCETWCSDESLAKARTIDLCNNPQTKEPKLDRARRQVPEWTVYDEEIAALVRGRRAVPVDEEVVPEHGGESSQADTNTKSRRLDGEDGRNVHTVDEL

SEQ ID NO: 4349 - protein, 1516 aa, Cynoglossus semilaevis
MRSVIVLWLLLLSIHHATSTPKGVTASLKAKWSMTPFLLETSEFVGEDGSDKFWQFVDTVKELSVYKQGESVRSYYNLIIKKAGQFLTDLQVNLLKFALALRSYSPAVHASQQLASDEPPPEACPAFVSIHGQHSCNTKDIKKLLKAAAGRPQPYLFKNDHTYPGVNKTHVPVVILYAEIGTKKFVSFHKVLSEKAQEGKLLYVLRHFVAHPKARKMLLSGYSVELAIKSTEYKAVDDTKVKDPKTNANAEDSDNDVQGFLFGTLKKSHPELKEQLGELHKHLLESTNDMAPLKVWELQDLSFQAAAKVMSVPKFDALKVMRDLSQNFPSKARSLTRVAVKQEMRKEIEENQKHLSETIGVHPGDGELFINGLHIDLDVHNPFSILDILRKEARVLEGLHNLGIKEEHQGKLLRLPVNIVDDNYALDIRHPSIMWLNDIENDPMYRSWPTGVQELLRATFPGVIRQIRRNFFNLVLFLDPIQEETVELLKLAELFYKHKIPLRIGFVFVVNTEEEIDGFSDAGVGFYRLVNYIADEYDLPQALMSMVSIYKEVEVGETLTVGELTSYLKKKFPKANAERILGAESEYDYKRKDGTLFYNKSGLGALPLALFNGVPLSPDEMDPEELETIILQRIMDTTTAFQRAVFMGQLTEGSDVVDYLMEQANVVHRMNPLILNTDRKYLDFTTTPVVDDWEDTTMFSFLDVRDKTSVVAKRMKYLTNNDENGMSTVTMWVVGDFQKPSGRKLMLNALKLMKSSRGVRVGVIDNPKGKPSQDNTVVFRAIWASLFTQKNKATVEFVQKLLKEESSQLLHHGTKMKDLLLQGMDMDAFEKKFNTLEVDFIRSQQLFCREVMNLSPGEQAVVSNGRILGPFEEQEEFTVEDFHLLRKITQSGSAEKVQVKVKQMELKPKQASDLVMKVDALLSAAPKGEVRRDVHFVKDSHSILHLSPREKEVVYEVVAIVDPLTREAQKLSSLLIVLSQVVNVKLQVFMNCRAKLSEMPLKSFYRFVLESDVTFLANDTVSPGPVARFVDLPESPLLTLNMITPESWMVQAVSSPHDLDNIHLQEVNGVVAAEYELEHLLLEGHCFDLSTGQPPRGLQFTLGMSRDPLMYDTIVMANLGYFQLKANPGAWILRLRKGRSEDIYQVLTHDGTDSPADAGDVKVVLNSFHSKIIKVRVQKKADKMNEDLLSETTENKGIWDSIASIAGGVSKKDDGEKKEDVLNIFSVASGHLYERFLRIMMLSVLRHTKTPVKFWFLKNYLSPSFKETIPHMAESYGFQYELVQYKWPRWLHQQTEKQRIIWGYKILFLDVLFPLAVEKIIFVDADQIVRADLKELRDLDLEGAPYGYTPFCDSRKEMEGYRFWKTGYWASHLAHRKYHISALYVVDLKKFRKIAAGDRLRGQYQALSQDPNSLSNLDQDLPNNMIHQVAIRSLPQEWLWCETWCDDVSKATAKTIDLCNNPKTKEPKLSAAARIVPEWVEYDSEIKQLLRRIQEEGEAVGQKQKPPSSKRIPDEL

SEQ ID NO: 4350 - protein, 576 aa, Rhizoclosmatium globosum
MLNSFITIGDVAEASLRFTVVLDPLSEAAQKISSILKVLSKIPGVSIKLLLNPVPMLEDLPIKRFYRYVFQEEVHYDSQGKRVAAQAQFKNIPTEPLLTLGLDVPRAWVVRAVDSVHDLDNLKLDALKPGQNVDAIFQLNNILVEGHARELHSSTPPRGAQFILGTPSKPHIVDTITMTNLGYLQLKANPGVWQLRLREGRSNQVYQIDSVPDKYMGKGGESKGDGYATVVVDSFEGVTIYPVVKKRVGMEAEDVLEPDPVGAVWDQLKSRVWGDSKKGVQTTASNVTINIFSVASGHLYERFMGIMMLSVMRNTKSPVKFWLIENFLSPKFMSFVPHLAKEYGFEYEFITYNWPHWLRATTRKERTIWAYKILFLDVLFPVGLDKVIFVDADQVVRTDMKELVELDLEGAVYGYTPMGDSRPEMEGFRFWKTGYWANHLQGRPYHISALYVIDLKRFRQLLAGDRLRQQYQMLSSDPNSLANLDQDLPNNMIHEIPIFSLPKEWLWCETWCADNELRTAKTIDLCNNPLTKEPKLKRAKRIIKEWTELDNEVQAVADRVEADAAKAIGQKRHDEL

SEQ ID NO: 4351 - protein, 1450 aa, Komagataella phaffii
MINHVLILLTYLCLSVFASEKFVDISLKANWFKTPFPLLLLETVASENESGFYTILDAMFDVSFESLELEDEDLQFEAVPFVKSDEELYEKWSHRAGASIEKSITDIYLANKYYAPRVQSHYQHYNEVRSSILGDKCGTNPKAWLYFNSEVYCNSDDVFALKTGGKTGPPQILPFDRVIGVRNDEVPVAIIYGDYRSPLFSQFISNLAGFVKDGRLRLAWRYISDESVLQKETLAGYGVDLTLKRTDYIVIDDRDIVLDKSLETKPIAAESDNFWDVYSKEIEPVSEKYIRALGYKLSLYIKSLEVSENEKLAILTKLIQDFPKFASFIDRQVTDTEVEEIIEDSLENSINDLPQGVYINGAVVDQSKLNYMEILNILKREYAFIDDITKFGVTGTHAQDIMRRFAAHISDRSVNNTMFKRFDIRGHGEAVFYLNDIETDPQYSGLSSSRKYYTTSVAPGEIPPVRENIHESVFVIDLADHNQVYTLLQFSSVMLSNRIPQRVGFVPLISDKLSEEITLQFLSIFQAKGINQGIKYLHDIAMNVLGQTPRDIISVESITKVPVSDKKNLLSKINEFISSFSIDHPLLITNGKFFDFVQNWQYHSAREIFLDILDLSNAISSGALSEDMRAQDYIYLGSHTSRNVLIINAICEETNLPSLVSYDDLEVFESISQNQNRIATVVIDGQPDSIPITSWLLGNCKDKRFLQQLRHLITAASELDPIKIKVYETSSNSDFSSSLQTAINKSLVDVIAFIDNELEKINVHSPDTVLNDETIDFVHNVFKIKLSKPNDMYLILNGRAIKIRDKDILLKDTDLKLLVEYEIDFKLRIAHELFCEYNISEPKSLDTFELFEYFTMGISNTYFFGDNYHPDQRVFPRYNTGLLNDAVSIEVSNSGPSIMDVTVIIDPLQEESQKLISLLSLFEKLESLKLNIILKPQEARELNIKRFYRGVFPNSVKFSSAGDAIDNEDKGLFTLVPEKTLFTLDLDVPNPWIVVIKEAATDLDNVLLENSGDVTGVYELKSLLVEGYALEKNTKYPPVALPIELVGHSDTSIMANYGYFQLQANPGLWKFVVKPHTRGSDIYRLANVTSKSNGDTLQYTIIDETAIIFVLDMNGNVILPVFDRKPGQENASLIGNTATTEKDTGLSKFLSSWRKQEQPKNADINIFTVASGHLYERFLSIMTNSVMKHTKHTVKFWLIENYMSPTFKKNLPFLAREFGFDYELVNYKWPAWLRGQREKQRTIWGYKILFLDVLFPQSLDKVIFVDADQIVRTDLKELVDLDLEGAPYGYTPMCNDREEMEGFRFWKQGYWQKLLGDTLKYHISALYVIDLKTFRQIAAGDRLRQHYQQLSQDPNSLSNLDQDLPNNLQHQIKIFSLPQEWLWCETWCSDESLKKAKTIDLCNNPLTKEPKLDRARRQIPEWTQYDDQVQQIINEASASARESITEHDEL

SEQ ID NO: 4352 - protein, 1624 aa, Dendrobium catenatum
MDICCRSRVSALCLISLLFLAFGGPSYSMEGRRPKNVQVSLRAKWPGTSLLLEAGELLSKEWKDLFWEFSELWLQPDRASNCSTARCCLEIIMNDGHSLLSDHLGSIFEFSLTLRSASPRLALYRQLAEDSLSSFPVDDEVNSITAGSPSDDLKVDHSYTTNPLKSGESCCWVDTGSVLLFNVPELLSWLDTSTDLDADTLEQPELFDFDHIYLGSRISNKITILYGALGMKCFQEFHVVLAEASKKGKIKYVTRPVLPSWCQATSNSYCTFVGASDAVNLGGYGVELALKNMEYKAMDDSTIKKGVTLEDPKTEDLSQEISGFIFSKILERRPELTGEIMSFREYLLSSTISDTLEVWELKDLGHQTAQRIVHALDPLQSMQEINQNFPSIVSSLSRMKLNDSIKEEIITNQRMVPAGKSLMALNGALINIEEVDLYLLMDMIHEELSLADQFTKLKLPQKPIQKLLSAPPPAGSNVFRIDFRSTYVHYLNNLEEDAMYRRWRSNINEILMPVFPGQLRYIRKNLFHAVYAIDPATTCGAETISMILSMVQNSVPMRFGVILYSSKLIKHIEENKSHLPGAADDNEGDDISSLIIRLFLYTKEIYGSQLAFQFLNNVCKIKDATDILDEEAIQVHQVEEAFVETVLAKAKSPPQDMLLKVEKEPKYKEEAEGTTHFVYKLGLSKLRCCLLLNGLVHEPSEDSSISAMNEELPRIQEQVYYGQITSNTDVLEKFLSENGYHRYNPQVINGGKEINKFISLVKSYIAKDSILHDISYLHSPGTLDDLKPVTHLLAVNVTSRKGIKLLREGLHYLMAESRKARVGVLMNGDGLGLSPALLLAEIFDKASSIFGDKHNVLNFLDQLCSVYESQFMQAQSSDTTSLINFIDKVCELALANELPSGDLRSHLSKFSSATRINHLEKVSYFLHEQLGLEFGSDAIITNGRVFASINGVSFSSDDLELLESVEYQYRIRHIHEIVDEAEWSNVDPDELTSNFYSDLIMLVSSAMSNRERSPDRAHFEVLNAKHSAIILNSGNSSIHIDVVIDPLSASGQKLAPLLLLLWKRIQPSMRIVLNPMSSLVDLPLKNYYRFVIPSMDDFSSIDHSVNGPKAFFANMPLSKTLTMNLDVPEPWLVEPIIAIHDLDNILLENLGDTRTLLAVFELEALLLTGHCSEKDHDPPRGLQLILGTRQMPHLVDTLVMGNLGYWQMKVSPGVWYLQLAPGRSADLYVMKKNEGEKSSLSKDIIINDLRGKLVRLEVEKQRGKEHVELLSGSDDPLKNKKDDHTGWNANLLKWASGFIAGNGLSRKRNENSSDNKKIIRHGETINIFSVASGHLYERFLKIMILSVLKNTRRPVKFWFIKNYLSPQFKDVIPHMAQEYGFEYELITYKWPTWLHKQKEKQRIIWAYKILFLDVIFPISLKKVIFVDADQIVRTDMGILYDMDLKGKPLAYTPFCDNNKDMDGYRFWRQGFWKDHLRGRPYHISALYVVDLVKFRQMAAGDTLRVYYETLSKDPNSLSNLDQDLPNYAQHTVPIFSLPQEWLWCESWCGNSTKFKAKTIDLCNNPMTKEPKLQSAKRIVPEWVDLDAEARLLTSRVLGEELEIQQIPSSTDTDKKDDLESKAEL

SEQ ID NO: 4353 - protein, 1670 aa, Pseudomicrostroma glucosiphilum
MLRLLRRSLAALALPLAFLGTAAFAASPDSSSSSPPVNIRLRAPWQSPPLLLEILEAVHTEDAAAFHPFLVELTTNEAYHAALAGGSAKDVYEAAQTALDSLGLLKDEGARQNWKMSLALHSESAKVAAFFQLAETSGSEDRWASRGGAEGDEIRSKCDSWVDWYGEVVCTAEELKVSLKSSADRIEIQKVATYPFDHVVQSREAAATIPTAVLYGNPISSNFDQLHRILRNAVTEQAPFRYVIRWKPPHPAERAAAPALTSGYLAGYGGALDLKKVDYLVIDDRKLKHASGAPSLEGSARDASSQKQLEDREWLQKQLLVNISRVANTSSLSPEEIDYLGLQAAQVVLASSDPLRALEQLTHDFPLHVQDLARGGVTLPQDLDAEFSYLTSRVFRPGASDFWVNGRPITESEVPPQSLVKLLRSERELVDSLMSGPLRLTPEEAVTILSNQTTGKAQAPGAERKSLFDSSDRIERRELLQQAKARGDADLQTIDDVRDGPITWWNDVEKDSEFRPYSPSLRTLLRQVMPGQFPQIRRNVFNIIWVFDLRSKRANRFLTDHLCPLIGTARIPLHWGFVPGGLEEGPESDATGIARLYWHLFERFGIKGGCRYFEALAGPPKPPKKPQNPYEDEVLEEEEPDVFVTITQARAAFTEVINKINPASRLGPTEISTTPDAREQPARDYIERLRLTMADDRDGHMFFNGQYYPFIGPNVFQLIMQLVSITTQSLQRAIYMGEMPESVDLGNHFYDQPGVFRGRSNLVFPPVDEQGEIIGPKAKAVDLGKVRRSLEDSTRLPLQTFLTPQGDAKINATVWIVADLDTAPTQQVLQGALSMLRTDKSFRLGFVHLPSNDGQDASGPGLRLSSFIGQAIKAQVLDKTSADEFAEVVKELASTHSNLDRAGRVYNDLDGSATPQSGQQQDDRTGAASSFNAFKARAWNLEGSKEADDFWKETGPAIARAFGVAPGEAALVVNGRLLSGVDLGTIKKTDIEALLHSEKFKRIEPVLDSLPASAVEKLSLLSRDEAATAIADIASVLGLYYYLDESKRNMFVPPVIVRVNSFEGIPAKHCLFEVGNRSTARLRFQAIVNPLAERTQRWASIFRLLSSLPDVHLEVIMNPQHTSSEMPLKRFYRFSAPKALAFDDAGQEIAPTLSFNDLPQDAVLTMGLEAPPAWLTMASEAVYDLDNILLRDVPEDGREAGVLAVYDLKQILIEGHAREVLTNNIPAGLQLLLQTPDGSQTLDTIVTANLAYFQFRARPGLYSLSIRPGKGDELYEMKSVGNLGWDSPGVEVTGDSITLDTLQGLTIYPTVKKRPGKEKENLIEPIAGAKDLKKGVKPLTAAKSFFDNLKKAASTAATPELKKSNQAELNIFTVASGHLYERMTYIMILSVLRHTNSTTKFWFIENFLSPSFKEFIPHLAKEYGFQYEMVTYAWPHWLRAQREKQRTIWGYKILFLDVLFPLDLDKVIFVDSDQVVRTDLKELTEIDLQGSPYGFPPMGDDSDDMEGYRFWKTGYWKDFLRGRPYHISALYVVDLKRFRSITAGDVLREQYHALSADPHSLSNLDQDLPQVLMDHIPIHTLDQEWLWCETWCSTDWLHKAKTIDLCSNPKTHEAKLDRARRQIPEWTELDEEVQRLARRVGGEKEGGGVVVVEEKDKEEKPASGHSHDEL

SEQ ID NO: 4354 - protein, 1472 aa, Pseudogymnoascus sp.
MVRPGSIWSLAGSALAFSVKVSASPTINVALATSFTSAPYLLELLETAGDENSTSYFPLLDRIADGYFKDARTDLELYNSFVKVLRDDGHLDSEGLASYSLALSLRTSAPRIEAQYQFYETAIEPSADGSSCPVWVLFGGKKHCSPALDEAHSTYNGRRGTEQLQFDRITGNLSAQASILYADITSPEFNQFHKKLIQRAQKQEISYRIRHKKQNVQESRPLVIGGYGVELALKRTDYIVIDDREAEAQAQEESTKTEVVLEDEELADLKPLSASELVSLGLKASGFIMQSENPFEVLTRLSQDFPRYSSAIAAHNVSSNFAEEHVYNRGQLVPAGANVVWINGLQVPTRQIDAFSMLDILRKERKLLKKFSQLGLTGSQTIGLLSHEDIAFTKAGDEPARFDWRDGGDGDVIIWLNNIEKDKRYDGWPATVRTILLRTGQLPQVRKDLFNLVFPVDFSNLQDVELVVNQLSGFVKRALPLRFGLVPLTNSDAALEQAKITYYLLDSYGLSTMVAYLNEYLTSNGTPSSRSANFEAAIEERKLFGDKVAKSLEEVLDADEVNKSIAHSKQWNSRLGANDKVPLVFVNGVAVPRDENWLQGMSHRVQTDVQLMQRAVFDNIVTDDHWAPMLYLHDAASGRNPFLMPENDKDLQLFDVNSIYSDHAEAFERLPVVKIDPSAMQDDWAHVILIVDVENEQGQRLLKAAAEVRKMSPSIELVIVPSSESPAGILSVYEYMAGRSFGPLKSDDDLDSLVEAVSISTSSEEEQEVTEKWSAIKVFLGSLGLKPGQQGLLVNGRLVGPIPSEIELGVGELQQLLGFELTKRIRPVLAAVKDLGFSEAISDPLASSKLTSLVTLSLLSNVPEGIFEQAPTLRINAFNAWKSEYTAIEIGDESTASIHIQVALDPASQESQRWIPILKVLSELDGVYLKLFLNPKDILKEIPIKRFYRYVLESKPLFNADGSLKDIKAQFASVPQEALLTMGMDVPAPWLVAPKQSVTDLDNIKLSSVNGDVNAVYELEHILIEGHSTEKETGQAPRGAQLLLGTAADAHFADTIIMANLGYFQFKANPGFYKISLQEGPSSKIFSIDTLGASGRDAAQPDATTEISLISFHGLTLFPQLSRNPGQETEDVLEPTPDLKDDIVSKGRKLAESILGFGGKKSSGALLQTTQQAEINIFSVASGHLYERMLNIMMVSVMKHTNHTVKFWFIEQFLSPSFKQSIPSLAAAYNFDYEMVTYKWPHWLRSQPEKQREIWGYKILFLDVLFPLSLDKVIFVDADQIVRTDMRELVDLDLQGAPYGFTPMCDSRVEMEGFRFWKQGYWKSYLRGLPYHISALYVVDLQRFREIAAGDRLRQQYHQLSADPGSLSNLDQDLPNHMQAVLPIFSLPQEWLWCETWCSDESLGVAKTIDLCNNPMTKEPKLDRARRQVPEWSAYDEEIKGVFRAAREGGRNEKSRTLEAETEATGRVKDEL

SEQ ID NO: 4355 - protein, 1499 aa, Hyaloscypha bicolor
MGVLRLPWGLTGALLASTYLHSLCASASPSINVGLKASFSSAPYLLELLETAADENATSYFPLLDRIADGYFSKASTDQELYDKFIQVLKDDGHMADPETLSTYKFALSMHSLAPRIEAHYQYYHTAVEPSLKGEQDTSCPVWVLFNGKQYCSPTLDEAHGEISGDSQVQELQFDRVLGNHSAPASILYADITSTAFGKFHKTLVKTAREGKSSYRVRHRKFMTAESRPLIVPGYGVELALKRTDYIVIDDREEDESKTVTATPEKEVKFEDEELADLKPLSSSELFGLGLKASSFIMQSENPFDTLVKLSQDFPKYSSAVASHNASEDFVAEHDYNRGQLVPGGFNIWWMNGVQLIERQIEALEMLNMLRKERKLINGVRDLGLSGQEAIQLLSHNEVATAKADSDAPRFDWRDEIEGGNVIIWMNDIEKDKRYADWPRVLQAMLQRTYPGQLPQIRRDCFQLVIPVDFTDAEDVLLVADTLLNFVKRKIAIRIGLVPITKTKESLEQARVVYHLANTYGLQAALVYLETSYTSKMVTGPSKSAFDTAVKSRHVRQEKVAVPMDEMLKSEDYQDQIEASKKWMRRLAADSKIPPVFVDGVAVPRDENWLQLMSNRVSTDLQSIQQGIFTDAFEADAWLPSYFLLQASQKRNPIISPEDEKTLKIFNVNKLAGENQALLDTLPRIRVDASANKTLWAHMILVANLESEVGSKLLATAAVFWEANPSVELIIVHNPVSNTIDTGLSNDLFSHMQSNSNKAFANMNDLTAILAGEKTAESALTQQGASQYWHGADSLIRSLALRPGENAVLLNGRLAGPIPADTEFDLSDFDSLLSYERSKRITPAYNAMDSLGLSDKIADPLAAAKISSIVAKSTISDTPDGIFEQASTLRMSQFNVWNSFHTVIETGDISTATIQFTILLDPASEQGQRWVPIVKVLSELDGVYMKLFLNPKERLQELPVKRFYRYVLDSKPTFDEAGALLPLGATFTGVPQEALLTVGMDVPPAWLVAPKVSVHDLDNIKLSSIKTNVEALYELEHILIEGHSREIPGGSAPRGAQLVLGTERDPHTADTIIMANLGYFQFKANPGFYKIDLQEGRSAKIFTIESIGSQGWSPVPGDESTEVVLMSFQGTTLYPRLSRKLGMELEDVLEAKTDSPMDFVSQGLKFAQGILGKGKADVAAKQEQAEINIFSVASGHLYERMLNIMMVSVMKHTKHTVKFWFIEQFLSPSFKDFIPYMAAEYGFQYEMVTYKWPHWLRHQTEKQREIWGYKILFLDVLFPLSLDKVIFVDADQIVRTDMIELVNHDLKGAPYGFTPMCDSRTEMEGFRFWKQGYWEKFLRGLPYHISALYVVDLHRFRQIAAGDRLRQQYHQLSADPQSLSNLDQDLPNHMQSVLPIHSLPQEWLWCETWCSDEALADAKTIDLCNNPQTKEPKLDRARRQVPEWTVYDDEIAAVDRRRKGLPANGNGEKNMKSRTLEDIVSTAATSEVPGETKSKKDEL

SEQ ID NO: 4356 - protein, 1483 aa, Trichoderma harzianum
MARHRCWPWNLTVGLMLALQAHGTPSVNVGMNAAFPAGPYLLELLETAAAENSSAYFPLLDRIAAGSFATASTDAALYSEVLNDLQQEGSISSSEALSTFKLALSLRSAAPRIEAHYQHYTTAVAPAVDDSECVNWVLLEGNQYCTPELDKVNRDGLLSLQAKHLPFDRTLGTGKEAILYADPTSSTFGEFHKALSKAAREGSLSYRIRYRRTEATHAAALPMSGYGVELALKRTDYIVIDDRVHDDAAHHESPSSSTSLDDSEDVADIKPLAASDLSSLGMKAASFVLQSDEPLGTLIKLTQDLPKFLTSVVAQNVSTQFEEEFRNNGIKGVPDGVNALFVNGVQVSERQIDPFALIDRLRQERKLIDGFRTLGLSGKQAVSILGHQAVSMAKGSNEPLRYDWTDRLEDGRVLIWLNDLENDEAYEDYPKTLAALLRGAYPGQLPPIAKNVFTLVAPVDFSNPEDVSFIAQLLSFISRGLTIRFGLVPLVSTPEATAKAKTVYHIFENYGIQGLTSYLERLQDAATASTNEEIFAEVTRDQKLLEDSEKMELVEVLEKEGYEQQLKLAQKWTDRLKAETPIRPVFFNGLLIPRDDNWLQGLGMLIGEDLQTVQKGVFHGILTDDDWAPGIFLSNAITRRNSYISPDDEKKSLVVLNINKIYNEHADLFEIIPVLDALAESQKEDWAVVTVIADLTTTSGKELVLAALEFKRRNPGVRVEFVHNPVAAVGAAAVNAALRANQGLLGNVQDADKLAKLLETQSEDLNANYFEALEQFLGASKILSGTQMIMLNGRVIGPISEESQFDVDDFQQFLDVERTKRILPVYAAIEELGLGDTLSTPIDAAKLTSITALSTISDLPEGIFESTTSARTTLYNTWESTHTTIEAGDEEAASIYIVGLVNPVSEQGQRWAPILKVLSELEGVHLKLFINPSAKIEELPVKRFFRYVLESEPSFNENGSVKRLEATFNSLPSEALLTTAVDVPPAWLVAPLISIHDLDNIKLSAVKTDVHATYELKHILIEGHSREGKGGAPRGTQLVLATEKNTPVTDTIIMSNLGFFQFKANPGVYTIQLKEGRSAEIYEIESIGAQGWNPVPGDNGTELALIDFQGVTLYPRLQRRSGMELEDVLQEKDPQENILVAKGRKLAEGLFGGKSKKKSLSEQEHAEINIFSVASGHLYERMLNIMMVSVMRHTKHTVKFWFIEQFLSPSFKEFIPHMAKEYGFKYEMVSYKWPHWLRQQKEKQREIWGYKILFLDVLFPLSLDKVIFVDADQIVRTDMMSLMSLDLEGAPYGFTPMCDSRTEMEGFRFWKTGYWANYLRGRPYHISALYVVDLRRFRELAAGDRLRQQYHTLSADPNSLANLDQDLPNHMQFQIPIHSLPQEWLWCETWCSDESLSEARTIDLCNNPLTKEPKLDRARRQVPEWVTYDEEIAALSKLSKGEAGSTDKEKLSDDRDSRAAESHGKNTKSRNLESEKTHTMDEL

SEQ ID NO: 4357 - protein, 1763 aa, Testicularia cyperi
MRFGTGGRGAWLPRALATLAIVPYAVAGVESPPVTVQLRAPWQKPALYNGGSPLILELLEAANAQEPSSFFALLDQLSEHHTAAALSSISDQELLETVQRLIDSNGLFSSVTAGSDSASATDLWKLSLALHDTSPRVQAFAQLYDTLNLDQRWKQRTSTAECTSWIDWNDQVLCTANEVEQALHTVSQTETRESTVRLLPFDHVRGSNVGQAPKETTFFLYADPYSENFAELHRSLSRQSNSGSDALRRASSAKTGITYVLRWRPTSHPQSASQPLLPSDSKPQSETVYLSGYGAILDLKKVDYLVIDDRKLRDDTEVGEQIGIDRPDISPQTHNKAADGASSDSHWLRAQIGASSHESDSSVAAGSLSDEEIAGLGLKAAELIIGSPDPLRALRELSQNFPSYAASLARSDKFAGHNAKELVEAVLDLGSRRIEPGGSEVWINGASTLRADFHPLKLLDVIRQERKIRRPLMHPLAGGGLNATEAIDLISSSLVGRAFSQSDLASTSATFDASDRIEKSTVEVDSKEPAPKGRNAGAIAWFNDLENDAETSSWSKSLMDLLRPMWPGQFPRLSVNLFNVVLVLDLSKRDTCRFLSETVAPSLGRVGLRWGLIPAGLEKGTDSDSAKMARLFWLVFDKAGPRVAADVLRRAAASPGGTRDRIDVTVAKKEARFALRDFDVGDNLDAELDVAISGQSNDQTYRERLVNAYVQRLRATEEESPAGHVFVNGRYHRFHPQITGILHQTVQEQIQTLAPQIYYGHVSAETANLDTYFYDAVGTLSFRSALVPDASSSTPGVAAGSGQTTTSAVRHASVDLFSALLDPSVANSDAEKVMHFIYPISVSDQSDDLVKPVNSTAWLLVDFDSPQGASLLQKGLQALSQPDAAFRLGLLHLPAKRASSDAGEPGLDIPLSALLYRLLQDGSIQKLSPLSLLEIVEYYINYTSESNLDSNGRIEERGSLQDLVQKVFALDDQDSSQSNPIKVASAKGWAIPAIVESSRFWTSIAEAVIPTLRPAERSASILVDGHLISDIDVAQIESRDITAVVQHEAAQKLPVVVEALQLLREDLFQWSPSRRQNLIFAATSVLNSVYNDDADQGMFVNKVTQRTGLPEQLGTSAHTFEIGDRDTAAIRIAMLLNPLSESAQKWSSILGMLSELSGVYVRVILNPPVKLREIPLKRFYRFSAPAQLQFDDVGKELTQELRFDGLPEDAVLTLGLDVPAPWLTMAEEAVYDLDNIRLSDVPSASRSRGVRAVYELKHILVEGHARQIDGASNSIPRGVQLLLETPDGDKRLDTIVMANLAYFQFKAQPGLWRLRIRPGRSDELYEMVSVGNEGWDSPPVEVTGNDITLDSLAGLTIYPRLRKRHGKEREELLEELDAQGRPVKRPRSAGGAASGSGVSGFASGLLSSARDTVSSLASRASSGFGTKSLSKSPHAEINIFTVASGHLYERMTYIMVLSVLKHTNSTVKFWFIENFLSPSFKEFIPHLAKEYRFEYELVTYAWPHWLRAQTEKQRTIWGYKILFLDTLFPLDLSKVIFVDADQVVRTDMKELVDLDLEGKVYGYPPMGDDSEDMDGFRFWKQGYWKDYLRGRPYHISALYVVDLQRFRRFAAGDRLRGQYQALSADPGSLSNLDQDLPNNMQASLPIHTLDKEWLWCETWCSKDWLDKAKTIDLCSNPKTKEPKLDRARRQIPEWTEYDEEVAKLAQRLVEEKRVGKNVVDPGQVVSKTPASHAFTSDAQPSTLSTPAADTGRHQDVVSSHDEL

SEQ ID NO: 4358 - protein, 329 aa, Orbicella faveolata
  MOD_RES (135)..(135): Any amino acid
MFDTIVMANLGYFQLKAYPGAWSLRVREGRSSEIYEIESVSGSVKEGDTHFTVVVDSFIGKLMKVKVKRKPGMEGKDLLSDSDSKSSGGIWDSLSSFLHTYLPSIVGSETKEDIPKDETINVFSVASGHLYERFXRIMMLTVMKNTKNPVKFWFLKNYLSPTIKLSSHLSFPCRFWNVGYWRSHLGGRPYHISAIYVVDLDRFRRLAAGDRLRGQYQGLSQDPNSLSNLDQDLPNNMIHQVPIRSLPQEWLWCETWCDDESKSGAKAIDLCNNPLTKEPKLQSAVRIVKEWTDLDNEVRSLQERVSTHAASSKSEPAKPDSPVKPKEEL

SEQ ID NO: 4359 - protein, 1540 aa, Cylindrobasidium torrendii
MAQASPPVRISLRTSWNSPPPLVEMIETVALENADAFFPLVDQLTDPDTHALHPHRSAEALHQLTLEAALENKLLNAPGAVQFVEMGFAMHTATPKIEAFYQHYAGLTGHKQCGGTWVDWYGTVVCDVETLVQLAGQDTLDARAGEPTPFVPPKLLPFDHVYAEQRETRPPRTAILYASLESDNFRDLHVFLLRHAAAGALEYVFRHIPPETHKEKSYLSGFGVGLDLKKTDYLAVDDRNLHGSTTGASASEDASSNVDSIAALIDAYPAFSAGAEALTTEEIQRLGVKAVQLISDAEDPLDTLQQLSHNFPKYAVELGRRVQVNESLAEELHENQLKVQAGNNIFWLNGQSIPANDVTPLHLLRALKKERTVMLALNKLGFERGEAIDLLTRRIGATASTTSGMEGLVDASDRSEGGDLITWWNDFDTDSRYSRWTPSIFQLLRPTYPGQMPTVKLNLFNVVLALDLSQPNALAFLSNAVPNLINRNLPFRFGLVPLIETENGAMMARLFYFLVENFGRKKTAAYFRAVHLDSDPSTRAEAIDWNVARKAFEDLLVKSESEHDASIFAGIIQGKLLPEAKFDGITSYVKRMGASLTANPEGHVFLNGRHFDMDEMVMRGLQTEVNKQLQFLQEQIYAGSITDDDVPRMATYFYDLPATSRTRNRYITSNSKDGLKVSMNAYFNTGFEPKNGAYAQSASNDLLVTMVVAADFTTEAGVELVKAALRSLDEDSHSRITFVHNPSSVSRHSVDHLLSALGMASTDTQTPITDEGTFQALAKESAYEPERSALYTASGIRFLKEFGVQPGAQSIVINGRAIGPFEGDFGQEDFKALEEYEIKRIAELSAALPEIAPWSNTLDRASRSQLLLMSSIVLSATQQPDPSEVGLFDAPLRPRFRGYSVLDKKFTGFEYGDNSTALYQISAIIDPLSETAQRWASILRWISALPDVYVEVRLNPLSTEEIPLKRFYRSNLLAAPQFDDNGDEVRAETIFNDLPLEPIYTLAMEVPSAWLVRPRESTYDLDNIQLGRIAPGDSSVDATFELDYIVIEGHARDMARNGSPRGLQLQLLDGENKTIDDTLVMANYGYFQFKTTPGVFELDIREGRGRQIYTLESVGAHGWDSPSVEEVGRGIAVTSFEGMTIYPKFRRVPGMENVDVLDPNLGDDDDDDDEGGFVDDLISGLKSFFGTAEKAKVEETGLVPVKQQADINIFTVASGLLYERFVGIMIQSVMRHTNSTVKFWFIENFLSPSFLEFIPHYAEAYGFDYELVTYKWPSFLRAQKEKQRIIWAYKILFLDVLFPLDLKKVIFVDADQIVRTDLQELVDLDLHGAVYGYTPMGDDNTDMEGFRFWKTGYWKESLRGRPYHISALYVIDLVKFRQGAAGDILRGHYQALSADPNSLANLDQDLPNNLQREVPIFSLPEDWLWCETWCSKDRLHRAKTIDLCQNPLTKEPKLARARQIPEWEEYDREIAMFTKKLADEGKIRKGAAVVDINVLAGEPVTTVGSEPEPDAGRIDNTIVRDEDSEQLGGATVDDRVKDEL

SEQ ID NO: 4360 - protein, 1563 aa, Coprinellus micaceus
MRYIPHLLAAAVAASAASPPVQVSLKSSWKAPPSLVELLETFSLEDSSLFFPLLDLLTNREVLPSTKLNPEGLHEATFEVARNGGLLEQHGSREMIEMNLAMHAATPKIEAFYNWYDTRYNASEGRKCGSWVDWYGDVVCDVESLARLAGVETIDSNIKSGIYIRPKLLTFDHIHPSSELLLERPHRTAILYASLDSRNFRELHGYLYKLSSKPNAHVEYVLRHIPPTHSAEHSSTLSGYGVGLDLKKMDYLALDDRLAKTTAARKQNSEEVQEEEVQEDSIAKLIEAYPENKTASEAQLTKEEFVAIGPQAVQLIADSNDPLETWTTLSQNFPKYAKSIPRRVVANASIVEELASNGQQVQPGMNVMWINGAMLDGKDTEPLGLLRQLRKERGVMQSLTSLGLDSEQAMELLTHANISNAQRRGGGITDGLFDASDRQEGGDLIVYWNDFNKDKRYARWNPSLYALLRPMYPGQFPSIKGNLFNVILALDLSQTSNLHFIVGPMSNILEKNIPFRFGVAPIAETEDGTKMARLFYHLVKVFGRKKTLAFLRAISQPGSTASPDAIYWPVVEETYNNFLGIELSENPDAEKVPFATILKGDDSTQSRLEKLKSYHDRLGSGLAQSKTGSAFFNGKPYVFDGQFLRYLQTDFAEFQRYYQEAVYSGALGDKDVPEIGEHFYDLPTTTKRRSLYIFPKTPVDLHLVNLPEALSKAGLVFLPGSYLYSDAEAYPLSTYVVGDFDSESGLALVKEALESLTETSNARLSFIPNPTHEAMGVLKSALGITLPASDGAQAPLSKPGAVEKISKGIDFSAENYAECLRAGRVFLKQLKIEPGQLAVIVNGRVVSPITPGTFSAGDFEALEGYELRKRTEPVAAALEEVVPALAQDKLNFADAVALASSVIAKIQQPGPSESGLFDSPPKPRHRNYNILADTYTAFEFGNNRTALYHVAAIVDPLSEDGQKWSSLFKWLANVPDVFIKVYLNPGAYTNLPLKRYYRYNLVPKLTYDVEGQEVSSKVVFQDLPVDPIYTLAMDVPSSWLVRPRESLYDLDNIQLGQLLPQDDSVKAIFSLDALILDGHAREAATQAPPRGVQLQLVTPTPQGENTPIQDTQVVANLGYFQFRVAPGVFGLEIREGRGREIYTMESVGGSGWESPTVEEDGNEVALTSFEGVTLYPRLQRRPGMEKEDVLAEPADGDSGILENIATKVFGMFKKKDEVGLVPVKQQADINIFTVASGLLYERFASIMILSVLRNTNYTVKFWFIENFLSPSFLACIIQLHLFYAEFIPHMAAEYGFDYELVTYKWPSWLRAQSEKQRIIWAYKILFLDVLFPMDLKKVIFVDADQIVRADLKELVDLDLHGAPYGYTPMGDDNTDMEGFRFWKTGYWKNFLEGRPYHISALYVIDLVKFRQMAAGDILRQQYQALSADPNSLANLDQDLPNNLQQQVPIYSLHEDWLWCETWCSKDRLHKAKTIDLCQNPLTKEPKLSRARQIPEWEEYDTEIANLTRRLAEQGKISSGLSTADTNVLAGGSSGKKENTNEKAEESTSSEGSATKEERPRDEL

SEQ ID NO: 4361 - protein, 1250 aa, Kluyveromyces marxianus
MRQFCSQVVVIILFLLHATRGLEIGVSKLWLSTSIVGRETLSDTQWMNLYHDLIFGEEDADEEYDFIDDGDENKSTDLDSSNQVQSIRDLLYVIAEHEDFAPYDEKYNETCLILNHKKYSKSDDSFYFKTSELEAQAAMGDFELLAENEITIGTNSSAPIVILYGCETDLEFDDFNRNLFNEAKFGKIRMVWRPTCAIGEKSTYAYSETIPEALWGKEVKLENKIDIAGKKLPTVAKLEFLNQQQLEKLDIKFTALLLQKYEELNDFEKFFEYFKTLVSNFPAIAPIIASKSDIDTASAEALYNKFKERQISHELLGLYVNGQQWRLTELDEVTLPKIIAEEYTKTNDLKEKLQNFGDVNLEKFLRYLTVGYSFTSFFDKNRYDFYRVPGFSEAVIFFNDFEKDKMYEKLPDQNDAFLGPSDFEPIPNIRQNWNELIFIINLDDPQSFEEHGAVNAFLEALEQMKTGYPVRLGLIPFSAQRSNHAVNQLYELKSKPGSLKKVKTYLKKLVRKPEIITKTTDEKSDQCNDFLERFKISNTVVVMNGVILPFQQKAWKIHTSRILFDDIEYLKREVRSMAKRNDLSVRQILHHRSLTIRNTKYLPNRMLDESFTRINNAALGELGERMIFYAGSKKPSPIHTVTIVDDFNAEGAIQKLEALLKNNHKGVAIRLVHMGALTKQWKIIRTEFSSGRLPNRKSYNKNCAFQSESYLNDLKSWLPDVPIDALRKPFVVINGKFFNTDQDLSSVELWHNILVQHSSKTLDTLNTLYRIGNLGSSEVDTSHIEELTASVIKYVYHSVLVFDNGIPYTTEASLPRVSLFELGDQMIKKAVEYPVVNITLLLDPAEERTQRLLYLTSLIKDLPFVKTEFALIPTSNLTMNPIYRFYNTSVETKKGRFESEIEHPHNFKADSDSIILEAHVFDENDEVSVNSVEGVPNVCIKLVDSEGNVIDKAISMTSFGYTQLSIPHFMRGMTIQSCDSEYTVTSFSTAGTSNYIESKQIDVTNTLPTKVYVKVKKTTNESAVLDDSKVNIMMVIHDGQESLAVAKIAKIKKESQDKMKFYILAKNPKLLAKMIPKSTDYELLNYAWPLWLRPQRFSEQELEAKSILLLDTILPKSIQKLVFISLKDDSLDNISLNDLSKYSEGVFYLREAKTEHDSYWKSGYWKTYLEKYDLPFYNLSASYVVNMQQLRRLDAASTLRLHYHLLSKSFTSLMNFKSDLLNSIQLKIPIISLNSVSKQGNAQGLEHDEL

SEQ ID NO: 4362 - protein, 579 aa, Leptinotarsa decemlineata
FEVSSKIESQELNLKMLRVYCQRVLKLKESDRAVVANGRVLGPLDENEEFIAEDFNLLERFSSSSYLEKINGILSKDAEDEEEITSDSMMRIISLLISRPQSRSRFEIVYAGDEHSVLKLPAAHPDQVAFDIVAILDPVSRGAQKLGPILQVLQEVLNCNIRVFLNSVEKNSDMPVKSFYRFVLEPEIQFSEDGRQLPGPLIFCSFIYFIFSHDGSDTPENSTDIKVLISSLRSHIVKLRVQKKSDKQNVDLLSDDEGGSGIWNSIASSFSGTEEEPDQKLNIFSLASGHLYERFLRIMMLSVLKHTKTPVKFWFLKNYLSPQIKDFLPYMAKEYGFEYELVQYKWPRWLHQQNEKQRIIWGYKILFLDVLFPLDVKKIIFVDADQVVRADLKELQQLDLGGAPYGYTPFCESRKEMDGFRFWKHGYWRNHLQGRRYHISALYVVDLKRFRRIAAGDRLRGQYQALSQDPNSLSNLDQDLPNNMIHQVAIKSLPQEWLWCETWCDDASKDYAKTIDLCNNPMTKEAKLTAAVRILPEWKGYDDEIRELQKRIDSGELDADPSEEKEVVDKGATDIHSEL

SEQ ID NO: 4363 - protein, 1308 aa, Eremothecium cymbalariae
MLLLGWLLPVAVVATSVQRFEVGRLWQSVVRVGIEERSLWYGAITGAEDDFTVDELWDMLDPDESTLLNLVYDMHSGWNFPVEEGGKLNWFELNNKRYWKTDDSYYLKSGELESQRKIPDLDVLFEEEGVIGVNSEAPLIVFYGDPATEEFEAFNRNLYHEAMDGKLRLVWRPTGLRSKTPENKYSKYYPYDYTLKAEAWNQEVIAEVEIPREFSSTTYRLGNVSQEELETLDLKATTLILKRFKDTKNLNDTIQYARQIIDNFPLIASQLANIEVDVESAAEVLDACIENGISYDSIGVYVNGQQWKLTALNPWSFIMAIISERKKIKGVLSTLQSQNSDIRLHDAKNFLTKYSQIGVLNLQDLQPVRYDFHRIPGFSESVIYFNNLEEDPQYKNLSSDISVFYEKSEFGEIPAYKENWNEIVFVIDFDNLRDQNFKDILAGLHRSLNVVESGYPQRIGLLPLYRGKENEYVRNIYKLKDQDLSDLKSYLKSFNANDFNITSDASVPSVKEILQKFRITDNSIIINGQIHPFKKNSWNYFVASTIKHDVTYLKRALKKSKSENVRDVLHARSFTHRDQRLIPDFFEDAIYTTTNNSIFGTLKDRVVTYNSDKTYNILHTITLVDDFNTKQAIERLINLINIELKGLRIRLIHKGELSAKWKELCGKIASNDNILYEYLTKISKRASSKAKSDPSVKNALREWLLDLPLDLISQDSFCLINGRYFHFNSSDVLTNTQWHAILQRESRRTIDVMNILNGVIPTMVNEKVDPDFIEQLSSYATYLFYVGANIFNNGVDFTSEATLPRMNVLDFFDQKMLPSVIYNGNVNAEVNITVIMDPLEERSQKFLHLVDIVQSLSFVNLNIVLLPTKSLAVMPIHRIYSTDDLFEDADDLFFVSRDIPSTISAENSSIIVQAHVFQDELISKATVEGVGGVCLEIVNPYGIPLSRAISMTTFGYAQFSLPAFERNLTIRSCDESFTVSSFSNNAKPDFVPVKSFDVVDLKPHRVVVKIESKIKNHKGQKLFEYDNEINVHVTIHDLRDEYLFKQKLLTILSNLDSNGRVHFWLSHVSELSIELKRILTFVELNTDQRVLFSRITYAWPVWLRPQRFSERRQDVSRIMFLDVMFPYNHINKLIILSLKETDTPDLAALKNLKTRAYFTMKQHRGNGYWEEGYWKKFLGENNLKFYDFSSTFVVDMARYRDTQAGHYLRIHYQRLSSDINSLLNIDGDLANSLQLILPIRTLRVNKDLNIPHPEKEFISKFDADVEAFFASLDQDNDLSTDADTGTDSDYNTGQDSDLYDPEFEHDEL

SEQ ID NO: 4364 - protein, 1580 aa, Heterocephalus glaber
MGLLIVLTGLWLYSSVKADSKAITTSLTTKWFSYPLLLEASEFLAEDSQEKFWNFVEASQNIGSSDHHGTNNYSYYHAILEAAFQFLSPLQQNLLKFCLSLRSYSATIQAFQQIAADEPPPEGCNSFFSVHGEKTCDFDDLETLLLTASGRPKPLLFKGDHRYPSSNPESTVVIFYSEIGLQEFSSFHHQLVSKSNAGKINYVFRHYISNPRKEPVHLSGYGVELAIKSTEYKAKDDTQVKGIEVNTTVIGENDPIDEVQGFLFGRLRDLHPELTGQLKELRKHLVESTNEMAPLKVWQLQDLSFQTAARILAAPAELALVVMKDLSQNFPAKASLFDVLRNEARVMEGLHRLRIEGLSLHNILKLNIQPSEAEYAIDIRSPAISWVNNLEVDSRYNSWPSSLQELLRPTFPGVIRQIRKNLHNMVFIVDPAHENTAELINTAEMFLSNHIPLRIGFIFVVNDSEDVDGMQDAGVAVLRAYNYVVQDMDEYHAFQTLTRVYNKVKTGDKVKVEHVVSVLEKKYPYLEVNSILGIDSAYDQNRKEARGYYEQTGIGPLPVVLFNGMPFAKEQLDPDELETITMHKILETTTFFQRAVYLGELSHDQDVVEYIMNQPNVVPRINSRVLTAEREYLDLTASNNFFVDDYTRFSVLDSQGKTAAIANSMNYLTKKGMSSKEVYDDSFIRPVTFWIVGDFDSASGRQLLYDAIKHQKSSNNVRISMINNPSKEISYKHTQISRAIWAALQTQTSNSAKNFITKMVKEDTAEALVAGVDIGEFSVGGMDFSLFKEVFESSKMDFILSHAVYCRDVLKLKKGQRAVISNGRIIGPLEDNELFNQDDFHLLENIVLKTSGQKIKSHIQQLRVEEDVFILDAAYSPEAIPSFPDLSFVLLVIQLHEPLASDLVMKVDALLSVQPKGDARIEYQFFEDKHSAIKLRPKEGETYFDVVAVVDPVTREAQRLAPLLLVLTQLINMNLRVFMNCQSKLSDMPLKSFYRYVLEPEISFTSDNNFAKGPIAKFLDMPQSPLFTLNLNTPESWMVESVKTPYDLDNIYLVEVDSVVAAEYELEYLLLEGHCYDITTGQPPRGLQFTLGTSANPVIVDTIVMANLGYFQLKANPGAWILRLRKGRSEDIYRIYSHDGTDSPPDADEVLVILNNFKSKIIKVKVQKKADMVNEDLLSDGTNENESGFWDSFKWGFSGGQKTEEVKQDKDDIINIFSVASGHLYERFLRIMMLSVLKNTKTPVKFWFLKNYLSPTFKEFIPYMANEYNFHYELVQYKWPRWLHQQTEKQRIIWGYKILFLDVLFPLAVDKFLFVDADQIVRTDLKELRDFNLDGAPYGYTPFCDSRREMDGYRFWKSGYWASHLAGRKYHISALYIVDLKKFRKIAAGDRLRGQYQGLSQDPNSLSNLDQDLPNNMIHQVPIKSLPQEWLWCETWCDDTSKKRAKTIDLCNNPMTKEPKLEAAVRIVPEWQDYDLEIKQLQIRFQKEKEMGTLFEKKIKEPTQEVLEDRGPPLTAGFLARGAKVGEWQHPLSFLGRSAAVAVSKEARFRCSGTLGSVGSVVPKILAAAKELAPGCGHYL

SEQ ID NO: 4365 - protein, 1602 aa, Psilocybe cyanescens
MKRVFTLLGAAIPVLQVVGSASSPPVKVGLRSSWPAPPFLAEILETVSLENPDAFFTYLDRLTDPEVLQSPHGMKPEAIHQAALQVAIDNGILHEAGSLSIVEMNLAMHAATPKLEAFYNYYADNHNGSSGTQCGSWVDWYGEVVCDVETLVQLAGVEAIDPPRDPKTDAFQPKPKILTFDHIFPPPDIILERPPRTAIFYASLTSANFRELHTYLMKLTNRLDPHVEYVFRHIPPTTQSEGSNYLSGYGVSLDLKKMDYLALDDRNTNSAANNAESKSDSNSEDKRVDPILPLILSHPENLTAPGPDVPLSEEELEEEELDGLGGKAAQIIAESSDPLDVLTHLSQNFPKYATSLARRVVMNESIAEELHNNSLKAQRGINVLWFNGLQVEPKDINPFGLLRTVKKERNVIQSLTSQGLERSQAFQLLTHSAIAIAQKESAAMEALFDASDRPEGGDVIVWWNDMEKDSRYAKWNPSLYALLRPMYPGSLPSIKANLFNIVLVLDLSQTTSLNFLAGGVTNIINRDIPLRFGLVPIVETEDGKKMARLFYHLVKNYGRKKTLQFINSISQIRLPAQLQTAELDWHTVRHTYDELVAREREENPEAAFPALDSIFKGEEEDVARLDKINVYTERLGSTLASSETGHAFFNGKHFDVNENFMRQLQTEVATQMAYLQEKVYSGSLADDEERETMGNYFYDLPTTSKRRNKYIYPSTGSKSIHIANLPEIFSKTRFRLSPSAYLYPPAEAESIFESLFVVADFDTEDALGLVKEAISSLTVESKTRISFIHNPSIAKSPDNASRSPATWLFAHLHTRELLAKAAPSSLLSALGLDGFAGPTEGMQIPIKKYGAFEELTGGVVLGDIMEEEYVDYVKTSRLVSRELHIHPGQSALVVNGRVVGPIAPNDFHIADFKALEDHEFRGRTEPIVKALQDVAPLLAEDKYKFANVVSMASSVIAATQQPDPSEAGLFDAPLRPRQRSYQLLDSEYTSFEYGDNSTALHHVAAFLDPLSETAQKWSSLLKWLSNIPDIFIEIHLNPGGYKDIPLKRFYRYNLIPQLTFDKEGHEVSAQAVFEDIPVDPIYTLAMDVPTAWLARPREALYDLDNIQLGKLFPGDTAVEAVFDLDYIVIEGHAREIANQVPRGVQLQLATGDGVPVDDTQVVANLGYFQFKAKPGVFKLEIREGRGRKIFKLDSAGNEGWDSPSVEEAGAEITVTSFEGLTLYPRLSRNPGMELAEVLEEEEKEEESKGIFEDLSSRVMSIFKSSKKELSTEVVTVKPQADINIFTVASGLLYERFVGIMILSVLRNTNSTVKFWFIENFLSPSFLEFIPHMAEKYNFQYELVTYKWPSWLRAQTEKQRIIWAYKILFLDVLFPMDLKKVIFVDADQIVRADLKELVDLDLHGAPYGYTPMGDDNTDMEGFRFWKTGYWKEFLQGKPYHISALYVIDLVRFRQLAAGDILRGSYHQLSADPNSLANLDQDLPNNLQAQVPIYSLSEDWLWCETWCSKDRLHRAKTIDLCQNPLTKEPKLARARQIPEWDEYDTEIARFTRDLAKAGKVHSRIATADASVLAGGGAADKKQDAEVVEETQDDSQTEEPTRDEL

SEQ ID NO: 4366 - protein, 1542 aa, Lepisosteus oculatus
MAAIRLGEAGFGVCHWMGPFTVALFIWLSVTSVRGDSKAVTTTLTTKWASTPLLLEASEFLAEESEEQFWDFVEVNQEIGEDDRGDSDYSYYHLILKRAAPFLSPLQLNMLKFALSLRAYSATVHSFQQIAANETPPPGCKAFFSVHGEKSCNPESLSDMLETASERPKPYLFKGDHKFPVSNPDVPVVILYAEMGSKEFPKFHQLLVSKANRGQISYVLRHFLATPSNNKVYLSGYGVELAIKNQEYKAKDDTQVQGAEVNATVIGENDPVDEVQGFLFGKLKTLYPELQEQLKELRKHLVESTNEMAPLKVWQLQDLSFQTAARILAAPSVDALMVMRDLSQNFPTKARSITKTVVNSEIRKEIEENQKFFKGTLGLQPGDSALFINGLHIDLDVQDIFSVFDMLRNEARVMEGLRSLLIETPFIHDILKLNVQPSDSDYAVDIRNSAIYWINNLETDSRYNSWMSSVQELLRPTFPGVIRQIRKNFHNFVLLVDPTHESTGELMSVAEMFLSNNIPLRIGLVFVVDDTEDIDGMHNPGVALLRAFNYIAEEEDNQHAFEAVTTMYSHIPTGEKLKVETVIHFLEKQYPYVEVSSILGADSAYDKKRKEERLYYEQTGVGPLPVALYNGVPYQRDQLEPDELETVTMHKILETTSFFQRAVYLGELSSDQDVVDFVMSQPNVVPRINSRILSTTRQYLDLSSTNNHFVDDYSRFLFLDSKEKNAAVANSMNYLSKKDDSYIRPVTFWVVGDFDHPSGRQLLYDSIKHMKTSNNVRIGMINNPTESPSNETSRVARAIWAAMQTQTSNNAKNFITKLSKEETAKALESGADIAEFAVGGMDIKLFKSMYDSPKVDFLLSHSAFCRDVLKLQKGQRAVISNGRIIGPLGDSEVFNQDDFLLLESIILKTSGERIKSKIQQLGVEEDRASDLVMKVDALLSSQPKGEARIEHAFFEDRYSAIKLRPKEEEVYFDVVAVVDPVTRDAQKLAPLLIVLKQLVNINLRVFMNCQSKLSDMPLKSFYRYVLEPEVSFMTDNSFAPGPIAKFLDMPQSPLFTLNLNTPESWMVESVRTRYDLDNIYLEEVESVVAAEYELEYLLLEGHCFDVTTGQPPRGLQFTLGTTSDPVIVDTIVMANLGYFQLKANPGAWVLKLRKGRSDDIYKIYSHEGTDSPPDADDLIVVLNNFKSKIIKVKVQKKPDKINEELLSDGSHENDSGFWESLTRGFTGGKKTEEVKQEKDDVINIFSVASGHLYERFLRIMMLSVLKHTKTPVKFWFLKNYLSPTFKEFIPYMAEEYGFQYELVQYKWPRWLHQQTEKQRIIWGYKILFLDVLFPLAVDKFLFVDADQIVRTDLKELRDFDLEGAPYGYTPFCDSRREMDGYRFWKSGYWASHLAGRKYHISALYVVDLKKFRKIAAGDRLRGQYQGLSQDPNSLSNLDQDLPNNMIHQVPIKSLPQEWLWCETWCDDSSKKSAKTIDLCNNPQTKEPKLQAAVRIVGEWSSYDQEIKKIYNRFLEEKEKGTTPVTNDTTQIKKQGSVDHTEL

SEQ ID NO: 4367 - protein, 1510 aa, Urocitellus parryii
MTPAKTATAVRLLLGSVLWLWLLGAGTASASKAVTAHLAAKWPETPLLLEASEFMAEESNEKFWQFLETVQELAIYKKTESDYSYYNLILKKAGQFLDNLHINLLKFAFSIRAYSPTIQMFQQIAADESPPDGCNAFVVIHEKHTCKVNEIKKLLKVTSRPRPYLFKGDHKFPTNNENLPVIILYAEIGTKAFVEFHKVLTQKAQNGKILYVLRHYIQKPSSRKMYLSGYGVELAIKSTEYKALDDTQIKTMTSTIEDETKANEVQGFLFGKLKEIYSDLKDNLTVFQKYLIESNKEMMPLKVWELQDLSFQAASQIMSTPVYDTIKLMKDISQNFPIKARSLTRIAVNQRMKEEIQENQKDLQDRFEIQPGDAHLFINGLRVDMDVYDPFSILDMLKLEGKVMNGLRNLGINGENLSKFLKLNSHVWESAYILDIRHSSIVWINDLENDGLYVTWPTSCQELLKPVFPGTIPSIRRNFHNLVLFIDPAQEYTSDFIKVAELFYYNKIPLRIGFVFILNTDDKVDGTNDAGVALWRAFNYIAGEKGLSEAFASIVHMYQKAKDQNILTVDNVKSILQNEFPQANIWDILGIHSIYDDERKAGANFYKMTGLGPLPQALYNGESFNHEEMNIKELEMAVLHRMMDASVYLQRDVFMGTLNDQMNAVDFLMDKNNVVPRINSLILHTKPQYLNLISSSVTTAIEDFSTYFFLDSQDKSAVIAENMHYLTQEDDDVISAVTLWIIADFDTPSGRKLLFNALKHMKTSVRSRLGVIYNPTSKINEENTVISRGILVAFLTLQNSFLRSILKKLAKEETATALYSGIKIKTFLTEGIDKNAFEKKYNTIGVNIFRTHQLFCQDVLKLRPGEISIVSNGKFLGPLNEDFYVEDFYLLEKITFSNFVEKIKEFVENMEISSKNMSDLIMKADALVSSLPKQASRYDVTFLRENHSIIKINPQENDMVFDVIAIVDPLTREAQKMAQLLTVLGKIINMKIKLLMNCRGKLSEAPIESFYRFVLEPELMSGANGSPLGPVAKFLDIPESPLLTLNMITPESWLVETVHSNCDLDNIHLKDIEGAVTAEYELEYLLLEGHCFDATTEQPPRGLQFTLGTKNKPVVVDTIVMANLGYFQLKANPGAWMLKLRQGKSEDIYQIVGHRGTDSQPDIGDVIVVLNSFKSKILEVQVQKKPDKIKEDILIDNHEKKGMWDSIKSFTRRLHKDNKKEKDVLNIFSVASGHLYERFLRIMMLSVLRNTKTPVKFWFLKNYLSPTFKEIIPHMAMEYGFQYELVQYKWPRWLHQQTEKQRIIWGYKILFLDVLFPLAVDKIIFVDADQIVRHDLKELRDFDLGGAPYGYTPFCDSRTDMDGYRFWKTGYWASHLVRRKYHISALYVVDLKKFRRIAAGDRLRGQYQALSQDPNSLSNLDQDLPNNMIYQVAIKSLPQDWLWCETWCDDESKQRAKTIDLCNNPKTKEPKLKAAARIVPEWIEYDTEIRQLLDNLENKKKSAILAHDEL

SEQ ID NO: 4368 - protein, 577 aa, Cricetulus griseus
MENAGTAPYSYHCGSVIKINPPENDLFFDVIAIVDPLTREAQKMAQLLVVLGKIVNTRIKLFMNCRSKLSEAPLGSFYRFVLEPELMSGANSSPSDGPVAKFLDIPESHLLTLNMITPEGWLVETVRSNCDLDNINLKDTGGIATAEYELEHLLLEGHCFDLTTEQPPQGLQFTLGTENNPAVVDTIVMANLGYFQLKANPGAWILKLREGKSEDIYDIVGHEGTDSETDMGDVIVVLDTFKSKILKIEVKKKSGKIMEDILADKHEDKGMWESIKSFAKSLHKDDKKENDILNIFSVASGHLYERFLRIMMLSVLQHTKTPVKFWFLKNYLSPTFKEVIPHMAKEYGFQYELVQYKWPRWLHQQTEKQRIIWGYKILFLDVLFPLAVDKIIFVDADQIVRHDLKELRDFDLGGAPYGYTPFCDSRTDMDGYRFWKTGYWASHLMKRKYHISALYVVDLKKFRRISAGDRLRGRYQALSQDPNSLSNLDQDLPNNMIYQVAIKSLPQDWLWCETWCDDESKQRAKTIDLCNNPKTKEPKLEAAARIVPEWVKYDAEIRTLLDHLENRKNAISTHDEL

SEQ ID NO: 4369 - protein, 1493 aa, Penicillium oxalicum
MKVSTRSRASWRWYAALGAILPLALAQASPAVNVALQASFDSSPYLVELLETAAEENATSYFPLLDRIAGGAFEEAVSEKELYDRFLQVIHEDGHLRTPESLSSFKLAMSIRSSAPRIQAHYQYYNTSVQQSLMAAQDAACSVWVHLEGKQYCSSLMERAQQDVEGDSDPRDLPIDRVFGDKSLPPAVLYADVSAPAFREFHEKLSDMAKQGEISYRVRYRPPQHWISRPLFVSGYGVELALKRTDYIVIDDRDAEQLSDSVKDDAGKSSDELERDATDDLRPLSASELSRLGLNTASYVLDSQDPLRTLLGISQDFPKYSTAIAAHNASDELRQEIRHNRGRMIPAGYNIMWINGMQIDARQIDAFSLLDILRRERKLAENFRHLGLTAQEAVKLLSHQALAEAQAEEQPPRYDYRDTPEGGQVVIWMNDVENDLRYESWSSALEGYIANPYPGQLPRVRRDLHNVIFPVDLSNPEDILLVVNQIQTFINRLIPIRFGLVPTPSSPNAISQLKVAHYLYDTFGLEALLHYLQESVSSGKAGKADKAAFAAATKELKPMPEKQALSFDKVLKSDLYEAAVKRSSDYQRRLGLAGPNPPLLVNGIPVPRESNWMQELSRLISKDLKLVQQGIVEETLTERTLLSEYLLADAFERRNTLIMPEDPKGVRIANLVTIFEADSTEQEFFPRIPTAEDVHGGVHVIVVGDFETDSGLKLLTDALSFRKENEEIELLLVHNSASQSEQVTSPFEGLQASLSKASDIDHLLDLLSFTETAQSPTEEVAEVIGAHRRLARALGFTPGTEGLVVNGRVVGPIPADDQLSVKDLGQLIMYERAKRIEPVIKASLSLGLDKKLTKPLDIAKLTSMAALSAISDVPEGIFENVPDFRMNVESRWNTEHSVITISNSDDPVINVGVVIDPASETAQRWLPILQVLSELAGVQLKIFLNPKDELKELPIKRFYRYVLGSEPSFTSEGALTRPSASFKGVPVDALLTLGMDVPSSWLVAPKESVYDPDNIKLSTLKPGANVDAVYALEHILIEGHSRDTTTESPPRGVQLVLGTENNPHFADTIIMANLGYFQFKAQPGVWQINLKPGRSEKIFNIDSAGGLGYRPQSGDEVTEVTLLSFQGLTLFPRLSRKPGHEDDDVLESGPQPGSTRDFFSKGLNFASGVLSSVGVGSRSEEKHADINIFSVASGHLYERMLNIMMVSVMRHTKHTVKFWFIEQFLSPSFRAFLPHLAEEYGFSYEMVTYKWPHWLRPQKEKQREIWGYKMLFLDVLFPLSLEKVIFVDADQIVRTDMYDLVTHDLEGAPYGFTPMGDSRTEMEGFRFWKQGYWSTFLRGKPYHISALYVVDLNRFRALAAGDRLRGQYQMLSADPNSLSNLDQDLPNHMQHHIPIHSLPQEWLWCETWCSDEDLASARTIDLCNNPMTKEPKLARARRQVPEWTVYDDEIAALAKRVAAEQVGFVQTGEDAGQGVVNGNKVQNGEEDTRKDEL

SEQ ID NO: 4370 - protein, 1452 aa, Ophiocordyceps camponoti-rufipedis
MTGAAVVAVPSVNVGMNAAFSAGPYLLELLETAAAENSTAYFPLIDRIASGYFATASSDAELYSKFLDLLVHDGHVAGPEALSTFNLALTLRSAAPRIEAHYQYYSTAVEPSVDPNCLNWVLLEGKQYCSPQLDKPTREGLFTSGVTTLPFDRTLGSGKEAVLYADPVSESFGDYHKALSEAARARNLQYRVRYRRNEANPHRPLPVSGYGVQLALKRTDYIVIDDREAAADRSQKPLTSGGFEDEVADLRPLSTSELASLGLKTASFIQNSKTPFATLIKLTQDFPRYSASVAAHNISEPFNVEREMVAPGGINFLWMNGVQLIERQIEPFALVEMLRRERRLVDGFRRLGFTGKQAISILGHSAISTAKGDDETLRYDWTDKLEDGRAIIWLNDLENDSRYEDYPKSLVALLQRTFPGQIPQIGQNVFNIIAPVDLSNTEDIAFLSQIISLIRRGIPLRFGLVPLTPTADALAQAKIVMYLKEILNIDAVFAYLDGLSERKESGVNDQLFSTFVADAELLTDSQRLSSSEVIESDTWADHFKSALHWVKRLKADAAVRPLFINGVFIPRDGNWMQTMSMKISGDLQNIQKQIFQGSLSEDSESSSIFLKGALSGRNPYISVESDKALRMLDVSRVYSEHGSFFGAIPILEPYSESTKENWAVVTLLADLTSVNGRELVLAALEFKRNSPGVRLELVHSPKDLSKASRVNSALLAQVELVKEMETIDQLTKVVDSVEVESVNDGYAPALSAFLDMAKVEVGKNIIILNGRIVGPISADEPFTADDFQQLLEYEQGHRMLPVYEAIDDLGLGDKLTSAMAAAKATSITALSTISDLPEGIFESAPTMRSTMYDAWDVDHATIEVGDAETASIHIAGLLDPVSEKGQRWTPILRVLSELDGVYLKIILNPREKITELPLKRFFRYVMEPKPSFDDSGSVKALRASFEGLPSDVLLTAAMDVPPAWLVAPKESVHDLDNIKLSSVKSNIDATYELEHILIEGHSREGRGAPPRGAQLTLATEKDPMVTDTIIMSNLGFFQFKANPGFYKIKLKEGRTADIYMIESIGAQGWEATSGDEGTELALMDFQGTTLYPRLKRRPGMEQKDVLETSDSASSTGSIVSKGLKLAEELLGGSKATKSASAQKHAEINIFSVASGHLYERMLNIMMVSVMRNTKHTVKFWFIEQFLSPSFKEFIPYMAREYGFKYEMVTYKWPHWLRQQKEKQREIWGYKILFLDVLFPLSLDKVIFVDADQIVRTDMMDLVNLDLKGAPYGFTPMCDSRTEMEGFRFWKQGYWSNYLRGRPYHISALYVVDLGRFRELAAGDRLRQQYHALSADPASLSNLDQDLPNHMQFEIPIHSLPQEWLWCETWCSDESLAKARTIDLCNNPQTKEPKLDRAKRQVPEWTVYDEEIAALDRRRKGGDAAQSSEPEVNTKSRRLDGEDGQSRHTVDEL

SEQ ID NO: 4371 - protein, 1480 aa, Pseudocercospora fijiensis
MARNTIYQAAALFGLLASAKAAPSVNVALRTAFDAPPYLVELLETAAEENATSYFPLLDRIADGYFDSSKTDEELYKSFRTLLEKDGHLGKEDLSSFDYALSIHSAAPRIEAHYQYYNTSIVPSLSSDAQDGCQSWVYVPFSGQRYCSAELDETTAQSFGKPEASVHQLPFDRVLGDLNSDKPSVLYADIFSESFRKFHKTLSKTARDGSTSYRVRYKASVGHERKPLTVSGYGIELALKRTDYIVIDDRNAEEEKKEETVSANDGTLSEEEVSDLRPLSQSELRRLGLRAASFVMGSEQPFDTLLRLSQDFPKHSSSIAATEISEEFMAEHSTNREVLVPAGFNVMWINGVQIMPRDVEAYALLEHLRRERKMIKSVQEIGLSGTEAVELLSHEAITASQVGQEVQRYDWRDNAEGGDVIIWMNDIEKDKRYAEWPETVTRFLQRTYPGQLPTVRKDCHNLVIPIDFADFNDALLVVESLKGFVKRRVPIRVGVVPIIKSPDSEAQAKIIHYLIDRYGLATALNYLETSLETAGRKYGPVIEKLFSTAVETGKLRPDKEELTLESVNSDAYLQSRIKGAKEWISRLGSTDVTPPVLINGAAIQRSDDWLQSMSARVSQDVRVIQQAVYLGEVTDEDYLPDLFLEKASLRRNPLLIPEDDQDIRHVKLGELPSFGDLPSLGASEDTIERELVHLTVVADLDSTEGFEQLMEALMYRREHDNVELAWLHIPRDGTTDTRLGSRIYSELYKKAARTNSPELDERVRSIWTPFRSIVSAAGITPGKKALLVNGRIVGPIPDSIGLQVSDIEVLLSYERMKRLLPAALAIEGLGLQEKASTPLSFARVSNLIAVSMVSDIPEGIFEAAPTVRTGIFKTWNSSHTAIHLGDEKTATVQIYASIDPASEVAQKWIPIMKTVSEMEGVYVRLFLNPKERLEEIPVKRFYRHVLKSKPSFEPDGSLQVNGAQFRGLPADALFNMGMDMPPAWLVAPKITVHDLDNIKLSAVKSDIEAIYELEHILIEGHTRDVTVGPPPRGAQLVLGTDAEPHFADTIIMANLGYFQFKANPGVYNLALQRGRSEEIFHIDSAGAAGYNEQAGDNTTEIGLMSFKGTTLSPRISRRPGMEDEDPLEPAKTALGFVAEGAESLLSQIGLGNQASNIAERKHADINIFSVASGHLYERMLNIMMLSVMKHTKHSVKFWFIEQFLSPSFKDFLPVMAEEYGFQYEMVTYKWPHWLRGQKEKQREIWGYKILFLDVLFPLDLDKVIFVDADQIVRTDMYKLVTHDLKGAPYGFTPMCDSRTEMEGFRFWKQGYWKNFLGGLPYHISALYVVDLKRFRQMAAGDRLRQNYHQLSADPGSLSNLDQDLPNHMQALLPIHSLPQEWLWCETWCSDESLKDAKTIDLCNNPQTKEPKLDRARRQVPEWTEYDNEIAAVAARHKEKLAGGVPAVQGRDDGGESMQERLQREDAERERKKKAHVRDEL

SEQ ID NO: 4372 - protein, 1542 aa, Erpetoichthys calabaricus
MATTRRRKAGFGMPFNMRLFASLFLGCLCVAFANGDSKAITTSLTSKWASTPLLLEASEYLAEERQEFFWDFVEVNQYIGPDDHEGTDQSYYHLILKRASQFLTALQLNLLKFALSLRSYSTTVQSFQQIAANEPPPPGCSAFFSIHGERTCDPKSLTNLLESASERPRPFLFKGDHRFTLSDPVAPVIILYAEMGTKEFSQFHQLLVSKVNRGEITYVLRHYIANPNTNKVFLSGYGVELAIKNQEYKAKDDTQVQGGEVNATMFGENDPVDEVHGFLFGKLRTQYPDLVEQLKELRKHLVESTNEMAPLKVWQLQDLSFQTAARILSAPSVDALMVMRDLSQNFPNKARSITRTVVNLELRKEIEENQKYFKGTLGLQPGDSGLFINGLHIDLEVQDIFSIFDVLQSEAHVMEGLRSLLIETSFIHDILKLNVQPSDADYAVDIRNSAIYWINNLETDTRYSSWPSSVQELLRPTFPGVIRQIRKNFHNFVLIVDPTHESTVELINVAEMFFSNHIPLRIGLVFVVDDSDEIDGMQDAGVALLRAFNYISEEMDNHQAFQVITSMYNKVQPGEKLKVEHVISILEKKYPYVEISSILGADSPYDKNRKEGRGYYEQTGVGPLPVAMYNGMPFQKEQMDADELETVTMQKILETTSFYQRAVYLGELTSDQDVVDFIMNQPNVVPRINSRILATTRQYLDLSHSNNHFIDDFSRFVFLNLKEKNAAVANSMNYLTKKDDSYIRPVTFWIVGDFDKRSGRQLLYDAIKHMKSSNNVRLGMINNPTENPSMNNSHVARAMWAAVQTQTANNAKNFITKLSKEETAEALELGADITHFSVGGMDIDLFKSAYESFKLDFLHSHASFCKDVLKFRSGQRAVISNGRVIGPLEESEVFNQDDFLLLESIILKTSGERIKSKIQQIGIEEDRASDLVMKVDALLSSQPKGDARIDYNFFDDRHSAIKLRPKEGEVYFDVVAIVDPATRDAQKLAPLLMVLKQLINMNLRVFMNCQSKLSDMPLKSFYRYVLEPEISFMVDNSFAPGPIAKFLDMPHSPLFTLNLNTPESWMVESVHTRYDLDNIYLEEVDSIVAAEYELEYLLLEGHCFDVTTGQPPRGLQFTLGTASNPLIVDTIVMANLGYFQLKANPGAWVLRLRKGRSDEIYKIYSHEGTDSPTDADDLIVVLNNFKSKIIKVKVQKKPDKINDELLNDGSHENDSGFWESLTRGLTGRAKTEEVKQERDDVINIFSVASGHLYERFLRIMMLSVLKNTNTPVKFWFLKNYLSPTFKEFIPYMAEEYGFQYELVQYKWPRWLHQQTEKQRIIWGYKILFLDVLFPLAVNKIIFVDADQIVRTDLKELRDFDLDGAPYGYTPFCDSRREMDGYRFWKSGYWASHLAGRKYHISALYVVDLKKFRKIAAGDRLRGQYQGLSQDPNSLSNLDQDLPNNMIHQVPIKSLPQEWLWCETWCDDSSKKHAKTIDLCNNPQTKEPKLQAAVRIVSEWTDYDQEVKQLYNTFVEMKEKGSIPLTHDPAKRRKPDYNGHIEL

SEQ ID NO: 4373 - protein, 1688 aa, Sporisorium graminicola
MRALPLLSVGWAWLALALALAIPSTTVHAESPPVKVQLRASWSKIRLPSGGSSFLLELLEAARSQRPSSFFPLLELLTTKYTATELREATDEWLASTVQDLIESHKLFGASSTIADEALETWHMSLALSNSSPRIQALVQLYSTLQMDEIWKKGSKDESCISWVHFQDRVLCSGEEVRQATRDAMPATLVHDPSREVSLGHSRSSSSSSSSSSSTDSKAATQSFVLYADPFSDNFYDLFSALEEHVNQSDANLTYTLRWRPSFTNSAPLSEVEQTTLLSGYGAILDLKKVDYLVIDDRKLKDDSDIGDVGISASSQSEDGAAAKQAADEARWLRDQIGAASSAGGVALSSLSDDQIADLGIKAARLIMDSSDPMRALQELSQNFPLHAAGLAQTTKWDDADRSAALVDAVLNLASMRIEPGHSDLWLNGQSTSTRDFMPLTLLETLRKERGWNHALQHPLAGGGLNVTEASDLISSSLVGRAFLAQADTNAAAAIFDASDRIEVKDAPAGTQAGGAITWLNDLETDAATSEWSSDLMDLLRPMWPGKFPRLSLNLFNVVLVLDLSQKDTCRFLSDTVIQSLGRVGLHWGLVPGGLEDEVAGDSVRMARLLWFLLDHASAQVASDVLRKAAASSAGSAGALDVSLAVKEAKFTLKGIDADGSLSSKLDAALAGTDPTYTQREALSRAYIKRLRATRKESASGHVFINGQHQPFHPQIVHVLHQAIQEQIQVLAPQIYYGQISSSTPGLDTFFYDAVGALSFRSALVAGGGGGEDGEGAKHSAVDLFSVLVDDTVETATVEKVWNFFYPAASTGLLNSTVWVFADLDSEDGLVLLSRSFEALAKEDARFRLGVLHVPSTGLGADTRDSSVSTLLYRLLAEGYTEKFSPTEVLDVLKKAHDGPHQLEGALGLTAGGADFTQKARQFWQSIGSIVASKLDISEDGPAILVDGHLVSKLDVFSIEARDITALVEYEAGQKLPYIMQALALLRSDIDSMPIHQRQDLVFAALSVMNGVYDQGGAGQGMFTSKASSRSGLPEQLGTSDHVFEIGDRATADVRITLLLDPLSEAAQRWSSTLVMLRELRGVYLRVILNPQIKLRELPLKRFYRFSAPHALAFDSAGRAIAPELRFFDMPEDAVLTLGLDAPAPWLTMPMEAVYDLDNIRLADVPSSSRAKGVKAVYELKHILIEGHARQESPTASSAVTVPRGLQLLLETPDGSTKLDTIVMANLAYFQFKAQPGLWRLRIRGGRSDELYEMQSVGGEGWNSPPVEVTGEHLVLDTLSGLTLYPRVAKRRGKEREELLEELDAQGRPIKKQRGSAVRAEGGLAASAGQMFLSAKDKVASLARSVASGTASPSSAATTRAHADINIFTVASGHLYERMTYIMILSVLKHTTSSVKFWFIENFLSPSFKEFIPHLAAEYGFEYELVTYAWPHWLRAQTEKQRTIWGYKILFLDTLFPLDLGKVIFVDADQVVRTDMRELVELDLQGNVYGYPPMGDDSEDMDGFRFWKQGYWKDYLRGRPYHISALYVVDLHRFRLFAAGDRLRGQYQALSADPHSLSNLDQDLPNNMQASLPIFTLPKEWLWCETWCSHAWLPDAKTIDLCSNPKTKEPKLDRAKRQIPEWTVYDQEVARLAQRLVQEQKVGKSVVAPDSQVEAKAGRQQEEEQGKGNTDAHADTDTDTDAHVHDEL

SEQ ID NO: 4374 - protein, 1494 aa, Trichinella spiralis
MTVFCANFTVESLLEATVYSMWVFPLIVVCFVSPVLVSPRKAHKNVIVSVRSKWPSTSLIMEASEFMSKESNEKFWQFIEAVIDKHQNSLGNKTDREVYNGILQIGDQILKSKARLEFLKLALTVRVHSATVEMHRQIAATSLDVQNGKSVYAVVHGKQISDLQQLDTILKHAEALARPVTYQFDHIYPGSKQGSVCVLLYADIENPHFKPWHLQLKKLVQRDGISYILRHYPKMNDDMVALSGYAVELAIKSTEYKAVDDSDKQTGSESGVSSSEEEVTDLNGFNLHLLEADELTPLKVWQLQHLSFQAGQRVMLAPKEEALRVLRDISQNFPIMARKDFTLLYAMKGNDPNAEYAVDYTQWSPQIFVLRLGDRASQNLLSTAYQMYEHVLPIRIGFIFVVNNDKSVSGYDDAGVAMLNAFNFIKEDRSVSKAVMFLIKIYNTVMRETISVEDVHKLFKSSYRDEDLKSVFNSEEYNQGRSISPEHIEEAILSKVMRFTVDIQKDVYEGNLKENMDVQQHLMKKPTVLPKLNYNILQMENIFLDMTDTSMDMRIALIHNPKSEAQATKGTASLVQACIQFLPLYQSKAVIGKIFANKITTLEDLINLSPSGISWPEFKKAYNSMSDIWMQLHVHYAKFVLNLDPGVGAIVANGKLLLYSCVQIEASDPTAAQFDIVAIVDPLSPAAQKMSHLLVILSSVLNVHMKVCMNCKSKLSEIPLKNFFRMVLPRELEFADDGSLKAQPSARFSALPQKQLFTLNLIAPQSWMVESVDAVYDLDNIKMEEVKGDVVAKFQLEYILLEGRCFDERSGSPPRGLQFTLGTFHEPFMFDTIVMANLVAKKNDQLENELLAESEDAESESLWQSISKTFQSGEKYDVINIFSLASGHLYERFLRIMMLSVLKHTKTAVKFWLLKNYLSPGFKEFLPYMAAHYNFSYELVQYKWPRWLHQQTEKQRIMWGYKILFLDVLFPLDVKKIIFVDADQVVRTDMLNLMELDLEGAPYAYTPFCDSRKEMDGYRFWKQGYWENHLAGRKYHISALYVVDLKKFRQVAAGDRLRGQYHFLSRDPNSLSNLDQDLPNNMIHQVKIKSLPQEWLWCETWCDDKSKKFAKTIDLEPKLQSAMRIIEEWKDYDSEIKDLLDQRTKDKWKITEQKIVDIGFQFTAYFLVFLEESWNRAMNKENQVQDNRKAEITRRVVESCFAGLKCFPAYYSDQKMKNDSVDCSHNRDKFKNYYRKHWDTDITVEDETVVELKNRILKGDRSALASAITLVESNHPTKRAQGECLLQSMLKISKKRFDEHGPKSLIFRIAITGAPGAGKSTFIESFGLYLIRELKKKIAVLTIDPSSERTGGSIMGDVARMNELSKEPNCYIRQSATAGTLGGVRRGTHESVVLCEGAGYDVVLIETVGVGQSESAVANIADMVVLLLSPALGDELQGIKRGIMEMADLILVTKADGDLLKQARLTRAEFSSALKYSRSRFHCWRPQVCPFDSI

SEQ ID NO: 4375 - protein, 1567 aa, Diachasma alloeum
MWRIGIICLLLVSSNTASPGKKRSKYVTTLINANWRDTPIILEAAEYLNDKNPNYFWKFIDTVSRNSDANALDAHEETDKERYDRLINHTSNFLTSTENALLKLSLSLRTYSARIEMFSQMGENRRTEKVEACNNFVDVHGELTCSSDEVENLLESIENRIDGDDDDDEERTVYSLDHQYPVPLSGQSESGGKSKITGKYVILYGQIGSVGFSDFHEKLKGLADAKKIVYILRHYVRDRPEHHLRLGGYGVELHMKSTEYKATDDSDIKDNSGKEEYENEGVEEINGINFGVLRSLYPDKHAELDKFEKHLLETSDEIGALKVWQFQELSHQAAERIMKSPSQEAIKVLTDIAQNFPMQAKSLIRTKVSSEMKKEIKRNQELFFGNLHIQPTDTVLFINGLFFDLDTIDILGLLETLRAELTVMETLHKIGVSSSKMEKLLALDLSGSHSSDNNQDFAIDIRDSAVIWVNDLENDSRYNRWSPSLTSLLRPTFPGMLRNIRRNLYNLILIIDPLSPLSKPLIATAETLYAHSAPIRVGFVFNTNFDPSLTGQSDPSIAVNNAFHYLLESKSAKEAVYFLSVLLNDIEKRKSSGNNDNDSSENGVEVSDVVKALRSRDPSADVDDIFGENSDYDVGRPWADDFIRRTGFKVFPQALLNGVPLEGISSIVDGESLEDIILKMIFSQTPMLQKAVYKGEVTEGDDIVDFMMNQPNVMPRLNERVLKNDKTQWLNLVGEVPTTEDVSTWGPEDTSAWIIKNSNYLYMPRRKKSQHLYTYWIVTNLEHPDGRLLLREALEYLKSNADARLAVILNSNVDQDDSVNISVNKIVLSVLSADYPAENHNKIIRYIQEVIGEKNAALIEKGEFDRSKYHEHIGTDFDENANHEFMLKVHKHFANIVLRMDESSTTQRAVICNGRIIGPLDDGENFSNQDFALLERFSHSTYGEKLITNLEKIHASDDEEEQDISDDVIMEIASLLVPRLQTRSRYEVLSGGEDHSVVKIPASNPDQVAFNIIAIVDPVSRGAQKLGTILNTLQQALNCNIKIFLNCVDKNSDMPLKNFYRFVFEPELQFNSDGQLVGASAKFNKLPTSSLLTQNIHAPDNWMVQVVKSVYDLDNIKLDNVAIGVHSEFELEYLLLEGHCFEATMGNPPRGLQITLGTETHAMVDTIVMANLGYFQLKANPGEWILRLRHGRSAEIYNITSVDGHDVIQNGNGVRVLISSLKSHVLKLKVTKKSDKLDMDLLAEDDDKKSGIWNSISRTFGSDDAEEQEEKINIFSLASGHLYERFLKIMMLSVLKHTKSPVKFWFLKNYLSPTLKDFLPHMAKVYGFEYELIQYKWPRWLHQQTEKQRTIWGYKILFLDVLFPLDVKKIIFVDADQVVRADLKELVNLDLEGAPYAYTPFCDSRKEMDGFRFWKQGYWKTHLQGRAYHISALYVVDLKRFRRIAAGDRLRGQYQALSPDPNSLSNLDQDLPNNMIHQVAVKTLPQEWLWCETWCSDASKKYAKTIDLCNNPMTKEAKLQAAIRILPEWTGYDEEIKALQHAIENENKQTDKEEKVDSDDQTKHEEL

SEQ ID NO: 4376 - protein, 1135 aa, Rhizopus azygosporus
MGNDIISGVYDVRDTPENPFVIWWNDIEKDTRYEDWPSNIMEILKPTYPGQLHPIRKNIYNLLLVEDLASTASLSRIVNEIQTMIKRTIPIRFGLIAFVEDDNSASTLMARALYYFIKNNGKADAIQFLETILELTSSNGLDRATTEMIERAFNGHMSISHENLNSEQVIDQSQAFITATRQFMKRMGISQLKPNEGIMFMNGKLLEFDEERPWIHSLMPHLTEQTRFIQTMAYNQEFDPDLDYYEYTLSQPNVVQKRNPYILVSHTNPLRMHTFDAITASKGLKYFQNDNESLVKTNLWVVSDFDTANGLKLLLEAILFAEANPKVRVAFIHKSIHKVSTKDTNDTKFSDLLCKLIYEQDTNLTTLKEILQNTNLFAGIDGYSSQNPGEVTIQINGDGLEPVPIIPGTPITEMVAKAQREKWSNLNTALVKDGLEPDFTGIIMNGRVIGPLSLSENIQFTNQDFEILYQYENTKRIMHVEKAIVESGKDLQNNTSDAVMKLTAIIENDKAQATQDAIESREPVHRIRQYQKIPRTQYTQFIAGGYSDDTFLEIGLIIDPLSEAAQKIAPIVHTLSEIEGVSVVTYLNPVSTLQELPLKRFYRYVFDKEPHFDTITGEKQVPTAYFANLPVKPLYTLGVETTNAWHVTVKEANMDLDNILLTSIPDNQHGVSAVYELQSILVEGHCLDSINKSPPRGLEFELISPSGLDKKDTLVMANLGYFQLKASPGIWKLALREGRSSSVYSIQDVGANGKWNWNTEFNGSKGIDDTLALISFEGLTITPLVHKNPGMEDEDVLEPAQPKSKKNAGGLWSSINQKIFGTKETENASSLANKATNAEINIFSVASGKLYERFLSIMMASVMKHTKSTVKFWFIENFLSPEFKDFVPHMAKEYGFDYEMVTYKWPAWLRAQHEKQRTIWGYKILFLDVLFPLSLDKVIFVDADQIVRTDLKELIDMDLHGAPYGYTPFCSDRTEMDGFRFWKEGYWKNHLRGKPYHISALYVVDLVRFRQLAAGDRLRAQYQQLSADPNSLANLDQDLPNNMQHIVPIYSLPQEWLWCETWCSDESLKKAKTIDLCNNPLTKEPKLDRARRQVPEWETYDKEIDELRKRITAGGSSSLPKQDEPSIKKHLKDEL

SEQ ID NO: 4377 - protein, 1585 aa, Dictyocaulus viviparus
MIHVILLNERRQDVAIGADYAISCMAFFDVHGITGCEASELEHAVKIAYESFSKANVGIFQFRDAPKLLSVDHVFEFGKDAKVITIIYGEVGSKAWLRLHEKVLELAYAQQTQYVLRHYSGIISSVRKVSLSGYGVELAIKNTEYKAVDDSNEKKEVEFDEENLHGFNFKRLKELHPISTDFLDAFRMHLKEIQELAPLKQWQVQDLSFQASQSIINSGAENAIETLKQLSQDFPRHARSISRVTVDDFTRQEIEINQKQYLSGASLEPGDSALFINGINLDIDSLDAFQLVDIIKQEERLSSGFFNMGIKREYLSILVNMELSEEKTNYAVDYRDAFPFFLNNLDTDKRYKHWRNSVKLLLEPYYPGMIRPIARNLFTLIFVIEPSGESSRNLLKIAYAFYKHEIPLRQAHFILGNASGINDSGVAVLNLFNYLAVESSYHEALRLVNDMLDDYRTYETIDPVHIKTWFEANYGDALYEDIFGPKSDYDSGRTNGMEFLKRSAIGKTPKVLLNGYVLDDAGISGDKFEETVMLEVMRITPKLQDAVINGQLQDKMNVGNWIMEQKDVVPRHNLRILGAASEKRILDLAELSPCEAKTTSEFINLSVSMKTQCILSKMRYLRKTDDVSTLSLTLWIVADLESAKGRDVVYNAIKHLRHSRKTRLGIIMNPNNITNACDKNSISSLVQSAFRLLPRSQVKQLVTKLMKSEFADALRKGTKNLEDVAVGGMDLNKFDKERNFISCDDIKMESVFVREVIGFKSGQSGFVANGVIFGPFDEQSDDILESDVELIERIIESRGASVIVSFVDKRKIDVDISPSDIVMRSFALVLKHAVMRKRIRVVLGSEKHSTVTLTAEESQRGIMDIVAVIDPLSRSAQKLSSLVELLRKAVNCDLKIVLNPKAKLSEFPLKRFYRYVASPELQFDKFGDIVVNQARFANLPSRQLLTLSIHSPDAWMVENVYAECDIDNIKMEQASSDVVALFSLEHILLEGHCFDEVTGSPPRGLQFVLGTSNYPTQFDTIVMANLGYFQLKANPGAWLLQLREGKSRDIFEISSYINAERSEGEAIRVIIDSFSGRTIRVRVSKKIGMEKRSLLSDDSDDGDNFWSSISSSLTAEKHETINVFSLASGHLYERFMNIMMLSVMKHTQKPVKFWLLKNYLSPQFKVCSSLRTSTFRSSTDFQRNLPVLALEYGFHYALVEYKWPRWLHQQKEKHRVMWGYKILFLDVLFPLDVQKIIFVDADQVVRADLMELMELDLGGAPYGYVPFCDSRKEMDGFRFWKQGYWANHLAGRRYHISALYVIDLQKFRQIAAGDRLRGQYQGLSNDPNSLSNLDQDLPNNMIHQVKIKSLPQEWLWCETWCDDASKAKAKTIDLCNNPLTKEPKLDSAIRIIPEWKDYDKEIKNVLIKVGQKNRSNTLEHSELPVLLMSTRRLRIWQPGNPQNFIFLPDFWLAVVDGHNVGRNKLPKNCVKFEVDPRMTKHDIKEYLRRIYNLPVRNVRTEVKMGDISWSTPADFQYRKAMWKDNDKKFAYVYMSKDFEFTYPSIFRQDVETEELEKFKEQQEKLSVNSTIVNRDRMKVGEFFGI

SEQ ID NO: 4378 - protein, 1750 aa, Opisthorchis viverrini
MATHGQLFLCLVLLLNVVVCKNNRLSVTLQAQWSDTSIISEASEYVAEESTDSFWKFVDILEPVVSSHHWQTAITNAGTSEFLVDVDTYVQLENLVLDALGSGGKTSDQVRTKQRQLFRLFLSSRTYSPSVEMMQQLAITSASQIFNCSQQSAVDRLVSCMSGSSWAQVGAEVVCDIAELSRALEKANEGPVESGTISVTLSREKTFRSNGAKPTRTPPTVVLYGDLGKPDFYTWHKHLKSLTEKGLCSYVFRHFKKFPSKNKAVLSGYGVELALKSTEYKAMDDTKVEEKSSNKEALEAPEDAIVQGFNFTQLRLNHPDLDSQLREYQKYLLSTDEELRPLKVWQFRELNLQASQAIVDASRQAGSDTGSVLHPGLAALRDITQNLPSRAGRLVSMTVDSGLRSEVANNQLLLSAAEIQPGQTTWFINGLLLSPTVDVFALLDLLRHELKAMSRLYNLGVPAGRISELLTMTGSFSQSISDTNSAAVPGLRYSLSGRFVLDLSNSPVMYLNNLESDSAYATWPDSLQMLFIPDFSGGIRRIRRNLYNIILVLDPGSTECQEIIRLAESFLLHRIAIRFGLLWSVDSSVKSVSLILVRMFTYISSTVSHFGESPLPVGVSGLGSPGPMTALSFLTELYSEAERTKKELTIKFIQQRFEKLFPNADVEEIISPEAGASEYDSQLHLHHEFLSRSGLSTIENAPPLLLFNGIILDRVGLRKMGGFEDAVVTLCMEEMVNVQHAVYHGQMSTTDTVFSLYQKRNSVVPRFNPRILATSATATARYLEFGIESPRRSTSDGPPTSSELLTFFVDHMRYLQKGDLESAVRPVTVWIVVGDLDAIFDNPQDSPRRSQLEHDLGLVRTAVTHLRSTHASKDLRVGLVYNPPIDSWESPSSSSRWLARVLHLIGHPVRVPPGTDSPRLLEPRMKLMEQMAARNFANKLIKEALEALNSSSVLRPLSELVVSGVNIQTLETALQALDRADFLHGHSVFCQQILGFKPGERGVVINGRIIGPLNPTEEFTVDDFRLIERMTLDTGVKDLGNTLLDFAGEELGGPEAISELTWKVSAMLPIYKETSSTGITDIDTVEGILSKNRVRLKELSINHSGFFIPSDTGELAFDVLAILNPGSRDAQRLSHILAVVQQALPCNMRVVFNPVEPISELPVKNFYRFVWEPSIFPFESSISTSVLNKDPIVPRALFAHLPGQPVLTLGMDTPHGWMVAAVEAVHDLDNLRLADVHSVVEAVFELEYLLLEGHCFEQNSMKPPRGLQLTLGSASDLERHDTIVMANLGYFQLKAGPGLWHLNIRAGRSREFYTMADDEDVGTSLGSFGLLTTIDSFRSKIISVRVTKRPERMAENLLDESEKATPKKPEESWSWLYKNSQVWSTLSDYAEAFCPSWLTSLRKSLQTHVPWQKCSHKVETINVFSLASGHLYERLLRIMMLTVIRHTKSPVKFWFLKNYLSPTFKDFIPHMAAEYGFEYELVQYQWPRWLHAQTEKQRIIWGYKILFLDVLFPLSVTKIIFVDADQIVRADLQELVNLDLQGAPYGYTPFCDSRKEMDGFRFWKHGYWANHLAGRPYHISALYVVDLTRFRQLAAGDRLRGQYHGLSQDPNSLSNLDQDLPNNMIHQVPIKSLPQEWLWCETWCSDESKARAKTIDLCNNPQTKEPKLSAAMRIAPEWVGYDREIKNLWKRVYSTSGSSTESATSDKEAVVSSPSIPTEPPEVHSDCEGFFVHCIDLISFTPEIVFLCFF

SEQ ID NO: 4379 - protein, 1500 aa, Millerozyma farinosa
MIIETTRLAKIGLVILILNTFYVFSKPYDDKGERNIHVSVETWEKSPFKIRLLEGISGFNESLYLETLQFLSGIGSDEYEDESDEEALESDQSTDKQVYEGLFKKLALSKEEKSIIDFNIVYNKFSPRVKAHYDYYTQHLSPEHRIKLENRCTKDSFGSSVIQNDGRIDSWLEFDDKIYCSVDDLFALQTSKKKTEEIEPFDRVIGTNVKAPLMVLYGDIESPKFLMMLKYLLKEAENQKLRFVWRYIPPIDASKENMTGYGAFLPTSTNKNTVSNIGKKGKIDRISLKKNFDKIAKSESVKNLDQDDLKDLGTKIVSFVFDRTKSMHTRYSDLVKILQDFPKYASHLSSWTAANMKGIKEHMAVNEKLGLSKESIGLYINGSPLNKLELDVYKLADKILDELKLSKSLNRLGFSVNQTKKLLSKFALMSAVKEHQYRKGNTLLGNNENRFRVYKYRTDDNFYKGGVFFFNDIEKDKAYEKFDTDKSQAYSQESIRSLKPGHVPPLRENIHDVIFALHLSEKSQLRTFLTLARFILDEQFPMQVGIIALPGSEKDNHLAKLLYFLAAKTNPVEIYAFLYKYHEAKNQIEEDELLSKFSDFIPENVNDDIYLKTLKRFDIEGPSIVINGVINSLDDKWHLYLRNQIMQDVKFLQFYVENNMYSDESLKSIIYNNAKSKRNLQIIPRDPSEIKYKQITEKLLHHSYRLKRKGVSNDIPASLWVIGDLNTKEMKDQLIESLLFLKKAHNFPAQLRIISTAVNPQFDNYMKKMSSESLNEQAIDLLISKIESNSFDETKSKPNEEMLSVLDESNLPSSHLYLLFNSRYIRVLRTLSSAELLEVFEYEKSQRLGQIRNIVNEYSTVFSYKDLQDFVPSDQDFLDWFDLLSSHLTNSFHLDDNMFVNDVARYDFSSLDFHNSIFLQADERDGPIDVLLIIDPLDEDSQKYVSIVQSVMDFPFLSVRILLQSVDIDLKMNSRFYRGLYPRSTPYFIDNKLSVMESAIFDYVPVGETYSSSLDVPIRQIVMPSFVEPGIDINSIKPSESTNNNISIIYQLERILVEGFARNVVLDVPASGVSLSLENRVTTKNAVVMSNFGYFQLQAVPGAWKISIFSAEDAKDDFVLLSASKKRFNSNTKPISDAAVNVFSLDGELLRVRLAPDEGLQGSKKSANKDSKKSKGGISSLFKKEVPAHADINIFSIASGQLYERLMRIMMLSVSKNTDSSVKFWLLENFLSPSFKNSLPLLAKECSFEYEFITYKWPNWLRYQSEVHRAVWGYKILFLDVIFPQSLDKVIFVDADQVARGDYKELVDMNLEGAPYGFVPMCDSKREMDGFRFWKQGYWSQVLKDDLSYHISALYVVDLKKFRKISAGDRLRNHYQKLSSDPNSLANLDQDLPNNMQRSLKIYSLPQEWLWCETWCDDDDLLTAKAIDLCNNPLSKESKVDTAKRLIPEWTEYDNFVEGLLEHAKTSTYTSQYPGPSSSSTNAKGDAEDSDEIADAHDEL

SEQ ID NO: 4380 - protein, 1497 aa, Aspergillus ellipticus
MMASGTGLVASWRLTFVLIAALLASLGRASPSVNVALQASFDSGPYLIELLETAAEENSTSYFPLLDRIAGGAFDDAVSDKELYDRFLEVVHEDGHLRTPESLSSFKVSLAIRSASPRITAHYQFYNASVQHSLMAAQDAACPVWVHSDGKQYCSSTMERAQQDVVGSDDPRELPFDRIFGDTSLPPAILYADFASPMFKDFHQSLSALAKEGQISYRVRYRPPQHWRSRPLFVSGYGVELALKRTDYIVIDDRVAEQRGADKGGSKKSDDAESDDLDDLRPLSSSEVSKLGLNAASYVLGSDDPFGTLLKISQDFPKYSARIAAHDISEELLQDIKASRLRMLPPGLNALWINGIQIDPRQVDAFTLLDQIRRERKLIEKFRNLGLSAKEAVELLSHQILGQALVQDGPQRYNYRDEIEGGGVIMWLNDLEKDNRYESWSSELAGFMQRTYPGQLPAVRRDANNIVFPVDLTSAEDADIIVKTIQVFVKNKIPVRFGLIPITSTDGAAAQFKVAHYLQDTFGLASFMKYLETSAVKNKFASPDKASFQAAIQGRDVRPERQSLSLEEVLKSDELDVLVTRATAYMNRLGMKNKASHAFVNGVPVTRNDNWAQEMSTRISRDTQQIQQWIADGEVDEDTWLPSMFLSQAFDRRNPALIPEDPKEIRAVDLVKVADSQRDLFGQLPGLASDGKNVLESAHVIVIGNFDKDPGYELLTAALESHKENSEAELIFLHNSKSEAPSIGRSAAIYRSLKGEKEADVTQVLNDIANSESPSIEEAQNIAHFWETQQGLVEELGLSPGSRALIINGRVIGPIAEDITVTSNDLDQLLAFEKDKRITPVAKAAKELGFDEKLSGPLAFAQLTSLTTLSTISDVPEGINDATSDIRLYLFNRWNDSLSAITVSSSEDPAITIVASIDPTSEVTQKWLPILKVLSELASVRVRLVMNPREELKELPTKRFYRYVLDSQPSFNSDGSVSRPTASFSGVPVEALLTLGMDVPSSWLVAPKDSIHDLDNIKLSSVQDGSDVDAVYALEHILIEGHSRDMTTKAPPRGVQLILGTENNPHFSDTIIMANLGYFQFKAQPGLWNISLKPGRSERIFTLDSVGGLGYSPQPGDENTDVALLSFQGKTLFPRLSRKKGYENEDVLETGPKPGSAMDYVSKGFNFASDILSSVGVGSKDGKQADINIFSVASGHLYERMLNIMMVSVMRNSPNRTVKFWFIEQFLSPSFKSFLPHLAKEYNFSYEMVTYKWPHWLRAQKEKQRQIWGYKILFLDVLFPLDLDKVIFVDADQIVRTDMYDLVSLDLEGAPYGFTPMCDSRHEMEGFRFWKQGYWSNFLRGQPYHISALYVVDLNRFRALAAGDRLRGQYQMLSADPESLSNLDQDLPNHMQHHIPIKSLPQEWLWCETWCSDESQSQARTIDLCNNPMTKEPKLDRARRQVPEWTEYDDEIAALSNKVALEQQQQQQQQQVEQEEGEAYIDEEDEESSSGWDKDEL

SEQ ID NO: 4381 - protein, 1447 aa, Candida albicans
MSFARYIYYTIAVAVLLNFVKATENNNFKLELEASWSNIDFLPSFIEAIVGFNDSLYEQTIETIFGLGDTEVELEDDASDQEIYSTVINSLGLTDQDLDFINFDLTNKKHTPRIAAHYDHYSDVLTKFGDRLKSECAKDSFGNAVETKNGQIQTWLLYNDKIYCSANDLFALRTDLSSHSTLLFDRIIGKSKDAPLVILYGSPTEESTKDFLKILYPDAKAGKLKFVWRYIPSGIKKSDSISGYGVSLKMEKYDYSGAEGNPKYDLSRDFTRINDSQELVSVNEKHSYELGVKLTSFILSNRYKSTKYDLLDTILTNFPKFIPYIARLPKLLNHEKVKSKVLGNEDIGLSQDSYGIYINGSPINPLELDIYNLGTRIKEELQTVKDLVKLGFDTVQAKLLIAKFALLSAVKQTQFRNGNTLMGNNENRFKVYENEFKKGSSEKGGVLFFNNIELDNTFKEYTTDREEAYLGVGSHKLKPNQIPLLKENIHDLIFALNFGNKNQLRVFFTLSKVILDSGIPQQVGVLPVIGDDPMDSLLAEKFYWIAEKSSTQEALAILYKYFESNSPDEVDDLLDKVEVPEDYKVDYNHVLNKFSISTASVIFNGVIYDLRAPNWQIAMSKQISQDISLIKTFLRQGPIEGRLKDVLYSNAKSERNLRIIPLEPSDIIYKKIDKELINNSIAFKKLDKAQGVSGTFWLVSDFTKSAIITQLIDLLLLLKKKAIQIRIINTGDTDVFGKLKTKFKLTALTNGQIDEIIEILKKSNASSANNDELKKMLETKQLPAHHSFLLFNSRYFRLDGNFGYEELDQIIEFEVSQRLNLIPDIMEAYPDEFRSKKVSDFNSVLSGLDNMDWFDLVTSIVTKSFHVDEKRFIVDVNRFDFSSLDFSNSIDVTTYEENSPVDVLIILNPMDEYSQKLISLVNSITDFSFLNIRILLQPRVDSKEEIKIHKFYRGVYPQPTPKFDSNGKWIQHYSAQFESIPSNVTYSTELDVPHKWIVVPQSSSMDLNTINFSESHSVDAKYSLKNILIEGYARDIHTGKAPDGLIFRAFNKNYSTDTLVMTSLDYFQIKAYPSIFNFSTTSNDTLLSASENKYQANTEELESIEVPVFKIDGSTIYPRVMKSGNNKPMSTRKHADINIFTIAGGQLYEKLTSIMIASVRKHNPSSTIKFWILEDFVTPQFKHLVELISIKYNVEYEFISYKWPNFLRKQKTKERMIWGYKILFLDVLFPQDLNKIIFIDADQICRADLTELVNMDLEGAPYGFTPMCDSREEMEGFRFWKEGYWSDVLKDDLKYHISALFVVDLQKFRSIKAGDRLRAHYQKLSSDPNSLSNLDQDLPNNMQRSIKIFSLPQNWLWCETWCSDKSLEDAKMIDLCNNPLTRENKLDAAKRLIPEWIEYEQEIEPLVSLVQNNTAKEVVQEIEIDTDGEQEEQKQESNDDDFIHDEL

SEQ ID NO: 4382 - protein, 1600 aa, Erythranthe guttata
MGRSGFCFLILIVFCICLSGHSVSAQNRSKPKNVQVALRAKWSGTPLLLEAGELLSKEWKDFFWDFIESWLHSDNLDTESSTAKDCLKKIAKFGKSLLTEPLASIFEFSLTLRSASPRLVLYRQLAEESLSSFPLTDDVAPKTIEQNETAKTLTSESFLSGSNLKSPGNKCCWVDTGGSLFFEVVDLLTWLDTPNDVTDGAFQQPEIFEFDHVHPDSTAGSPTAILYGALGTECFKEFHKVLSEAAKKGRAKYVVRSVLPSGCESKTTSCGAIGTKEPPNLGGYGVELALKNMEYKAMDDSTVKKGVTLEDPHTEDLSQEVRGFIFSRILERKPELTSEVMAFRDYLLSATVSDTLDVWELKDLGHQTAQRIVHASDPLQSMQEINQNFPSIVSSLSRTKLNDSIKDEIIENQRMIPPGKSLLALNGALINVEDIDLHSLVDMVHLELSLADQYRKLQIPPSGVRKFLSVLPPSESYAFRVDFRSPHVHYINNLEEDAMYKRWRSNINEAIDTIISLFENNLPMRFGVILYSENLIEKIEENDGELPVAHLKDDQDDISSLVMRLFLHIKENHGALMAFQFLSNVNKLRVESAAEDSLEMHQVEGAFVETILPTATSPPQETLLKLEKDQTLSELSHESSVFAFKLGLAKMGCSLLMNGLVYEPNEEALINAMNDELPRIQEQVYYGQINSHTDVLDKFLSESGVQRYNAKIIADGKVKPKFVSLCASILAKESILNDLYYLHSLETMDDLKPVTHLVVVDMTSKKGMKLLREGIRYLISGSKIARVGVLFNANKDATLPSLVFMKAFELTASSYSHKKGVLQFLDQLCSFYEQEYILASGDTKSYQKIIDKVFQLADANGLPSNAYESSLSGFSAENLRSYLNKVAQFLFRTIGVESGASAVVTNGRVIQLLEGSTFLSHDLHLLESLEFKQRIKHIAEIIEEIKWDDVDPDVLTSKFISDVVMAISSSSSTRDRSSESARFEILSAEYSAVIMQNEHASIHIDAVIDPLSSSGQKLSALLRFLSKYVQPSMRLVLNPVSSLADLPLKNYYRYVVPTTDDFSGTDHTVNGPTAFFSNMPLSKTLTMNLDVPEPWLVQPLVAIHDLDNILLENLAETRTLQAVFELEALVLTGHCSEKDHEPPRGLQLILGTRNTPHLVDTLVMANLGYWQMKVFPGLWYLQLAPGRSNELYVMREDGEGGQDSTLSKQITIDDLRGKLVHMEVKKRKGMEREKLLVPVDDDDSHSTTKKGSQNGWNSNILKWASGFIGGKDQSKKEPNSSLEPRSGGRYGKTINIFSVASGHLYERFLKIMILSVLKNTHRPVKFWFIKNYLSPQFKDVIPHMAHEYGFEYELITYKWPTWLHKQKEKQRIIWAYKILFLDVIFPLALEKVIFVDADQIVRTDMGELYDMDLKGRPLAYTPFCDNNKDMDGYRFWKQGFWKDHLRGRPYHISALYVVDLVKFRETAAGDQLRVFYETLSKDPNSLSNLDQDLPNYAQHMVPIFSLPQEWLWCESWCGNATKSKAKTIDLCNNPMTKEPKLQGAKRIVTEWPDLDLEARRFTAKILGENIEEPQEQIAPPHQIESTNEDSSEDNESKAEL

SEQ ID NO: 4383 - protein, 1528 aa, Cutaneotrichosporon oleaginosum
MKWLAAALAAATALAAPPLSVSVETAWSAPPLLLEILEVAYDESPTSYFDVLHLLSFHLAPLSLTPQATLERATSLLDNHGLLTAERDTFRLALGLHTAAPRIAAAFSANDEDVGCASWVQFHGHVYCDAEELARAVTHGIESADYVPSPIEPGPFDRVRGAEPLSAVLYYAPTEASLPFLEFLDEFHAAHPQFSYAVRYAPQAGEERTKLSGYGVEMALKKTDYLVVDDRQVKASGSAEEYKQQDPFEDVLGADPWNEPALRKGEAGKIGIAATALIKAASNPMSAFVSLTQDIPKYAAALARKVEVPASIRKRVLRLGFKRPLGPALYINGRAVHERDLNAFSLLSIVRRERHHINSLMALGLSSKQAYELLSDKLIGEAATDVDPLEGLVDASDRAEGGGVVLYLNDLEKDIAYSRWPDSVQSFLRPLYPGQLHYVRLNAWNAISVLDFATMRGAETLAGSIAQLVQRNVPIHMGVVPMFDSPDSPSAQMARVLYYVADMQGATSVQQLCSAIVMANSGVKAKNVDLSVVRQLYGQMHAQATQEGKELLSFDEVLASPELGERLNATKAYLERLGATPADSATGHVFINGIHSPMHNQWTHQLQGVVSSQLGYLQEALQAGEGPTKETIGTFFYDLPTTSKRRNKVIIPSPDNDLRAYSVLDVFDGTAMVLAKQFIYPVDASRATPLSVWVVGDLDSKEGHALLEGALRNIDREGGATRVSFVHVPDEASKNVPGPRLSTLLFQLTAKNEHSSVQAEGLLDMMEEVSRIRTNLVDVGEIRAHSDPDAPLNSFLAEGWSSPDTALAAEFWSTVGPQVADKLGLKGLGLLINGRIINAKHFTTDDFAALEAYELRKRVQPVVNLLKTYVGADTPRDDFGDMVAVASSVIAAAYMPQGSEGIWVQQQAGRSRDYEGIDEGEISFSVGNKEDALVRVAAVLDPVSEEAQRWSALIQWLSSLDSVSTTVWLDPDIQAEEFKVKRFYRSALRTSLTFDVDGNEVLPAPTFHGLPSTPIYTLGMEVSPSWIVSPKDSPLDLDNILLSTLSAPTTVAFDLKLLVVDGHARESASAPPRGLQLQLSTNETVSDTQVMANLGYFQFKARPGVYDFAIRPGRGREVYEIESAGADGWDSPPVNVSGTKIRLDSFDGMTLYPRFTRRPGMEDADVLASPETSVSVVGGIVSKLKSLVGIQEVKPASRHADINIFTVASGLLYERFASIMILSVLKHTDSTVKFWFIENFLSPTFLRFLPAFSAKYGFEYELVTYKWPHWLRAQTEKQRIIWAYKILFLDVLFPMDLDKVIFVDADQIVRTDMKALVDLDLHGHVYAYPPMGDDRTEMEGFRFWKTGYWAKELQGRPYHISALYVVDLVRFRAQAAGDRLRGTYQALSADPNSLANLDQDLPNAMQRQLPIYTLDRDWLWCQTWCSDESLATAKTIDLCQNPLTKEPKLSRARQIPEWDSYDREIAEFAATLGDGALAANVDDLASGPGGAGAGAVGGAQPDAEQGEEQPPEAEEAQAPLGDRGKDEL

SEQ ID NO: 4384 - protein, 1499 aa, Acanthocheilonema viteae
MESLLLVIILLAFPSVINSAVSKKSVIVSLRAKWSQTSLIAEASEFMAQESDSLFWAYIDKIVEKLNVDEWHTYSDARQHDLSVRLAGSLLQEARVNLLKFALSLRAHSPTVLLFQTLGAERTKTCAAFADVHGTIICNVNDLEKVIENDVRGPAPTVYSIDHVFPATKEHNVTLIVYGELATASWRKFHLAAKALSRSGKVKYVLRHFVKDIRDDKLLLSGYGVELAIKSTEYKAVDDSSTVIDKVAMEENSEEYTDNEEDNFGFSFGTLRRLHGDLKESIEQFRLHLLERDELTPLKVWQVQELSYQAAQRIVQAGPQKALNIMMDSSQNFPLAARSLSRQIVRKEFISEVNANQEQFMEYGVSEGESVFLINGIMVDVDALDVFQVLDVLKQEEKLANGFFRMGIKNEYLPMLMDLELSNERISYALDFRPASPEYLNNLDTDKQYRQWANSVSLLLQPYFPGMLRPIARNLFTLIFIVDPSQKETRDLLQYALRFYAHEIPVRLGVVFVANDEKEITGFDDASVAMLNLYNFIKISNGIQKALNVLIEVLDGKEKSVSPKDVLSYFQMHYPNHDPNSVFGSNSEYDNGRSIGYKFLHDSGLGFTPKVLLNGVILDYSGITGDHFEETVMMEIMRVTPRLQKAVMEKKLKDQDNVMNWILSQPEVMPRINKLILDSPLSPDALYLDLTSIEKCTNISPTKYHKLPPEKHSQCMLKRMRYITRTEEMKTHFSTVWIVTDLETAEGRLLAYNAIRHLKRSYTMRVAIINNPKNIEAATISGSITMLVNIASRLLTARQMKSFITKLVKEEVVSKLLDEQVTLDDLAVNDMNMTLFYKESKQINSDEIFADAKYSRRVLGLKSGQLALVVNGLLVGPFGDDEVLDVADMELVDKLVLLRGGKVIGDYVEKWKIQTRHGESSDMVARIMSLIGSIGITKKRRFIPLSGEKESVLTVSGNKKEGLILALCIVDPLSTQAQRLGHLLTVIQKVVNVEVKLVMNPRAKLSELPLKRFYRLVLQPSVMFDDSGRIADSAYEARFTALPSKQLLTLAVVPPDAWMVQSVYAIYDLDNIRLENVAGNVIAKFELEHILLEGHCFDDMTGSPPRGLQFTLGTLANPNRYDTIVMANLGYFQLKADPGAWILNLRDGKSKDIYNIVSHVNTESEDETGVNVLIDSFSGRTIRVRVAKKKGKEKENLLNEGKSEEESEDYHSVWSSISTISGGEKHDAINIFSLASGHLYERFLRIMILSETLPQMASYYGFKYEFIDYRWPRWLHQQTEKQRVMWGYKILFLDVLFPLNVRKIIFVDADQIVRTDLMELMEFDLGGAPYGFTPFCDSRTSMDGFRFWKKGYWANHLAGRKYHISALYVIDLVKFRQVAAGDRLRGQYQGLSVDPNSLSNLDQDLPNNMIHQVRIKSLPQEWLWCETWCDDASKEKAKTIDLCNNPQTKEPKLDSAMRIIPEWKDYDAEIKALLDERSKKHTEEARRSEHEAVDEHAEL

SEQ ID NO: 4385 - protein, 1781 aa, Fasciola hepatica
MQPWFYLVVALSAASIIWAKNNRVSVVLRTNWLQTSLFSEASEYAAEEDLGSFWRLIDHVQPIVKEKNWPENLHASSSNELGLDAESYLQLEDAVIRSVVPPANVSDQTTVAFHRQLIRLFLSSRSYSPAVEMAHQVALTTASQLFNCSHNDAAQRLSECMTGTTWAQVGDRIVCQLAELPMAIRARISRPMDFGFLPREKFYPVDAEESNLKSPCVILYGSLDQPDFYDWHAQAKASTEQNNCVYVFRHYMKIRPEGKVRLGGYGVELALKSTEYKAMDDTKVDNAGDTSGNLADSPVDPVVQGFNFTTLNELHPDLKEQLKAFQKHLFATDDEIRPLKVWQFRELGIQTAQAIMNGFRLGNSSSEINTGLETLRDVSQYLPARAGRLVSLKVDPALREELSTNQYVLSNLGIQPGQTMLFINGLLISPSVDIFALLDLLRHESHLMLKLHKLCIPANRIPQLLEASSSGGQLSDGNSNDPAVPGSKYSLSGKFALDLANAPVIYFNNLEVDLAYSNWPNSLHTLFTPDFSGGIRRLRRNLYNVILLVDPASEDSRQMIRLVESFLVHQTSIRFGLLWAVDSTATNSASVALVRAFTFITSTVSSTRDSPLPLSVPNLGSPGAMSALSFLTELYSQAEKTNTELTVSLIRRTFERLFPSAHSEDVFDDEFGQGDYDSQLKKHQIFTELSGLKGIGRIPLMLFNGLVFDTTGMRQMGGFEDSVVTLCMEEMIRVQHAVYHGQMSNSDNVFVLYRKSNSQVTRFNARILSTRPQDIKYLDVVGSGSSPSARGPYDVQSFLNNMRYFQKGDTEVAIRPVTMWVVVSDLDAVFLTPKERQIHEKQLGRDLNMVRSALTHLRSAHASKGLRLGIVYNPSTVKKTAIPQTAWLTRALYLVGHPVRSPGSTEKLVKHADQMAARNFGIRLLTGALDAINASEKYATMESMLVSGIDHIVINKAIEAVDRDQFIETHAAFCHNSLGLKPGQRAIVINGKIIGPLDNNELIMEDFRLAERITLDTGARELSETINTLMGSELGGPEVVSELTWRISSILQPRLESADPIIGDADAVEGIGSKSRIQIKGLTLEHAGFELPVVTPEPAFDILAVVNPASRDAQRLSHVLVVLRQSIPNSMRVVLNPIINLPELPVKNFYQFVWEPSPFQFSRSQGSRELISSNPVIPRVEFSHLPGQPILTLGMDAPHGWMVAAAEAVHDLDNLRLADVYGSVEAVYELEHLLLEGHCFSEGSMKPPRGLQLTLGPASDLNRHDTIVMANLGYFQLKAGPGAWHLRIRDGRSRDLYTMAQGENIRQVDVNTTELITTIDSFRSKIVIMRVSQRPERAGESLIDESGLKSTTTTARSPWNWLSRQTQVLSKLSNYAENLCPSWLSELARSLQSKLPWQTCHRMEETINVFSLASGHLYERLLRIMMLTVIRHTESPVKFWFLKNYLSPTFKQFIPHMAKQYGFEYELVEYQWPRWLHSQTEKQRIIWGYKILFLDVLFPLNVTKIIYVDADQIVRADLQELADLDLEGAPYGYTPFCDSRREMDGFRFWKQGYWANHLNGRPYHISALYVVDLHRFRQLAAGDRLRGQYHGLSQDPNSLSNLDQDLPNNMIHQVPIKSLPQEWLWCETWCSEESKQYAKTIDLCNNPQTKEPKLSAAMRIAPEWVDYDREIKKLWQRVNPSTKPKASISEPSSSSSPPPPTTTTPGTPVSTGSSPEKARPFPPPGSETRDSEQCSSSTCSADTKPAAFKPPISARTPVSEPRTPEAKSEHEDKRSIHKIEL

SEQ ID NO: 4386 - protein, 1497 aa, Aspergillus sclerotiicarbonarius
MVPGIGAVASWQIASVLIAGVLANLGRASPSVNVALQASFDSPPYLIELLETAAEENSTSYFPLLDRIADGTFDDAVTDKELYDCFLDIVHEDGHLRTPESLSSFKLSLAMRSASPRITAHYQFYNASVQHSLMAAQDAACPVWVHSDGKQYCSSAMERAQQDVSGSDDPRELPFDRVFGDPSLPPAILYANVASPMFKEFHQSLSALAKEGQVSYRVRYRPPQHWSSRPLFVSGYGVELALKRTDYIVIDDRAAEERGTGGVESKKSGDAEDDLNDLRPLSSSEVSRLGLNTASYVMDSDSPFDTLVKLSQDFPKYSARVAAHNISTELLEDIRSSRLRMLPPGLNALWINGVQIEPRQVDAFTLLDHLRRERKLIEKFRNLSLSAKEAVELLAHPSLGEALARDGPQRYNYRDDIEGGGVIMWLNNLEKDARYESWSSELAGFMQRTYPGQLPAVRRDANNIVYPVDLTSSEDAEIVVKTIQVFVKNKIPVRFGLIPVTFTDGAIAQLKVAHYLQETFGLASFMDYLEASASKNKLASPDKACFQAATKDRNARPEKQPLSLDEILKNESSDVTVARTTAYLNRLGMKHEASHAFVNGIPVTRNANWAQEMSKGISRDTQLIQQRIADGELEEDTWLPELFLSQAFDRRNPAIIPEDPKEIRAVDLVKIVDAHKELFSQIPRIASEQDDALDSAHVIVIGNFDDEPGYELLSAALESRKAHGEIEALFLHNPNHETSATAISFTVYRSLTGDKGADVTQSLKAIADPDFPSAEEAQNISQFWEAQQSVVEEFGLAPGTRALVINGRVIGPIAEDIALTSEDLNQLLTYERHKRITPVAKAVKALEFGDKLSDPLAFAKLTSLTTLSTISDVPEGIYESTSDIRLFLFNRWNDLRSAITVSTSEDPAITIVASIDPTSEVAQRWLPILKVLSELASVRVRLVLNPREEIKELPTKRFYRYVLESEPSFNEDGSVSRPTASFSGVPVEALITLGMDVPSSWLVAPKDSIHDLDNIKLSSVKEGTDVEAIYALEHILIEGHSRDMTVKSPPRGAQLILGTENNPHFSDTIVMANLGYFQFKAQPGLWNINLKPGRSERIFTLDSVGGLGYNPQPGDENNEVALLSFQGRTLFPRLSRKKGYETEDVLETGPKPGSAMDYVSKGFNFASDILSSVGVSTKGASGKQADINIFSVASGHLYERMLNIMMVSVMRNTNHSVKFWFIEQFLSPSFKSFLPQLAQEYNFSYEMVTYKWPHWLRAQQEKQREIWGYKILFLDVLFPLDLDKVIFVDADQIVRTDMYDLVSLDLEGAPYGFTPMCDSRHEMEGFRFWKQGYWKNFLRGQPYHISALYVVDLNRFRTLAAGDRLRGQYQMLSADPESLSNLDQDLPNHMQHYIPIKSLPQEWLWCETWCSDESQSQARTIDLCNNPMTKEPKLDRARRQVPEWTEYDDEIAAVSKKFALQQQQQQQQQQQAEEEEMERQSYSDEEEDEKTWDKDEL

SEQ ID NO: 4387 - protein, 1541 aa, Aphanomyces astaci
MMSLMWMGVATVVAAACSSVAESRQVQVNLTTSFLASPLHPVLETSEYLSQDNPALFFTYVAAVDVRYNAIKDKNNANYTKVALEAAADVLPADSSVSRLLPFVLQTRAHSPSIELFNQLAIESAYKACPNQTVSAWAIIYRDAGCADVVLCDIQDFQPSMLHVDEDTSPSSDDSERTCAASGQHDFQLPVDHVYPSPNAAAAATAPHVIVYGALISPSFRAFHSTFVPLAVAGNVHYIVRHAPTDNTLPVLVHGYGVTLHVKNMEYKSFDDSKATSSHNSTATEDDIDADQDEFVVSVLMKKNDEVAQALREYLDGFEGGQGTDDDDEDAKDVTTPAPWQLTQLGYLATQYIMAAEDPLKRLQLLSQNFPKYASSLVLASKPVPQQTIDDINHARSQVATQRLYNRIVVNGLPVDFNEYGFNAFDFLKSLNGELRLADTLAKLDPTGSIKAAMGSLSSAPSDVRISLRGPVDGHAPLYLNSIETDEETAEWPTDLGSLRGPSWSLIYLRKAMYELILVVDPTTKQGINAMNELIFLRNRQAPVQFGVLWTSPELLALSAEERATYAPSVEDKDVATVFHVSKMFLAARANGKSARDKYLREVLSLNDLTVKEVLQIYSQAVGERYTNDDWLQSAKAILTDGDNDGVWAMTNLVAEKNLPINSQVFNGVVRNHVNVQEDIMTHFARDQPLYQTLVRANQITDDSDMLSELLGNEETYAVFCPWFDPEYKPPTTVVQLNWNDPVWKQVGSFHASGTVTKPKRQNVLLLANLDTSVGATSAYHALKRVADFPELRLSVVHTGSPLKDSLGNRIAYILTQLGHTDSTTATAVVLEVLRLMSKKPEADAISHARLFVQSRVDASSSTSDDEQVLSQLSTWLFSAVAPPFSATLPSLSSLQVIPDQHVIYVNGRPLELVAPVTPSLFDGLVAYESATRSKAVSKAYVSQFKHNVLTAEDAADKTLQLNVVLSMVDSYLKTPRVAAVLPDDVQRPTYSYVTPSGSSSLDVVAYLDPLSDTAQRASGILRMLHSVLHAKITLVLVPPPSYDEFPLKRFYRFLWGGTSSSLVEFDRLPRHPVLTLNIETPELWNVQMVQSDVDIDNIQQNASATFTIKDVLVYGQCVDKTNAQYPTLPNGLQLVLERSVAKLHSHKDTVVMKNLGYFQLQAAPGVWQLGLAKGRHSTIYELISNDARVDTVPVIVYDFLSKTLQLEVKKQPGQEGVRLLDDGPEAPKAPAQPEETSVWTSLVQWGAGSSKLETRKGDTIHVFSLATGHLYERMLKLMMLSVLKRTNNPVTFWLLENFLSPDFKNSVAALQAEFGMDIRLVTYKWPNWLRRQTDKQRIIWGYKILFLDVLFPLGVDKIIYVDADQVVRADLKELWTMDLHGKAYGYTPFCDSRNVGFQFWRKGYWKDHLRGKPYHISALYVVDLVKFKRMAAGDSLRAIYDQLSADPNSLSNLDQDLPNYAQHQIPIFSLPQEWLWCESWCSDESKAEAKTIDLCNNPKHKEPKLDMAKRVISGDLFPESWLQLDAEVKAAEAAYELASD

SEQ ID NO: 4388 - protein, 1555 aa, Bactrocera dorsalis
MLTEVVYRTLILVYIIFTTVTGNIASDLPSSHSQSYSVTTLINAKWQQTPLYLEIAEYLADENPALFWDYVNEIVAQQKPIKEYASESNQYLAAINIARNRLNVLQLPLLKLVVSLHSLTPRIQTHLQISNDIYSKSKCNQDTFVQIDTEVICSIDELREKLNSQKEDLEELVTYSFDHVYPGSENNSRTVILHGDFASNSFSAYHKILSKEARSGNIRYIVRHYLVNNSNNNPVRLSGYGVELHLKSTEYKSQDDAPKTHEDTFKNGTDDETEIKGFDFKVLKNRFPTLSASLDQFRYNLLKGNEEITQLKAWEFQDLGLQATRAITEVQGDESLQVLQFIAHNFPMQAHTLLHHKISDALRTEIKHNIEVFGRSLNIIPPDGALFINGLFFDADTLDLGAIVETVRAEIHVLESLHKNNIRGPLAAALLALDLSGASSKEFAIDIRDTAVMWINDIETDPQYRRWPSSVMDLLRPAFPGMLRNIRKNIFNLVLVVDPLNPASRNLIKLAESFVIHQAPVRLGLVFDIRSAEKDTAKDYNSIICAYNYVTQNKDGRSALSFLTDVFAAADATEKVRHTHIRSQFKKTFSSLSGGKIDDILGEDSDYDYGKQLSQEFIERLGFANSPQALLNGVPMQQNLLTSDSEFEEAIFSEIIQQTSTFQKAVYKGDLTDTDSVIDYLMNQDHVMPRLNQRILNTDTSKFLDFSGIEYKDLTNIQDLAQLSNRDMTATLLSNIKYFGAKHATEHIGNYELNFLTIWVIADIEQPEGRELLANALNYLKSGSSVRIGFLPNVEGSSISNKNNLNRLAWSATQTLPPVEATDLVLKWLNNPNTISEIPNAVNEILSSTELHMKMLRVYVQRIFGLPKSLRLVVGNGKIFGPLSKGEKFNVEDFGLIDRFNAFQYADKIRKILKQSVENEADTADDTVINSDTVLKLYASLVPRQSKTRFKIPDDIKKHNSVVSLAPKQSLMPHFDISAVVDPASRSAQKLAPILILLRNILNCEMNIYLTPVGQHSDMPVKNFYRYVVEPEVQFQTNGKLAEGPISKFTGLPVNSLLTQNLQVPENWLVEAVHSVYDLDNIKLSEIGGPVHSEYELEYLLLEGHCFDSNSGAPPRGLQVTLGTEKSPAIVDTIVMANLGYFQLKANPGVWELRLREGKSADIYDIGHAEGPNTIHQNQLTKVVINSLRSHVIKLRVAKKPGKQNADLLGDDEDDSKSGIWNSIASSFGGGSSPTASDKHGAEDSETINIFSVASGHLYERLLRIMMLSVLKQTKSPVKFWFLKNYLSPQFTDFLPHMAREYGFQYELVQYKWPRWLHQQTEKQRTIWGYKILFLDVLFPLNVRKIIFVDADAIVRTDIKELYDMDLGGAPYAYTPFCDSRKEMEGFRFWKQGYWRSHLMGRRYHISALYVVDLKRFRKIAAGDRLRGQYQALSQDPNSLANLDQDLPNNMIHQVAIKSLPDEWLWCQTWCSDSSFKKAKVIDLCNNPMTKEAKLTAAQRIVPEWKDYDVEIKNLMMKIEDHENTDHYAQASASNGSPKSSNENNDDKNMKHEEL

SEQ ID NO: 4389 - protein, 1642 aa, Populus euphratica
METRFRSGSCVLVILFCVVGFCGFGSVSCGENRRPKNVQVAVRAKWEGTPILLEAGELLSKERKDIYWEFIDSWLHSKKEDNDSYTAKDCLKKIMKHGHGLLSDTLASLFDFSLILRSASPRLVLYRQLAEESLSSFPLLDDSFSNSASGGLAKTNDTNEIKRSDPLLVGRNPEIPGGKCCWVDTGAALFYDVADLLLWLHSPSGMEGDSFQQPELFDFDHVHFESLSGSPVTILYGALGTDCFKEFHSALMEAAKQGKVKYVVRPVLPSGCESKVGRCVAVGASDSLNLGGYGVELAMKNMEYKAMDDSAIKKGVTLEDPRTEDLSQEVRGFIFSKILERKPELTSEIMAFRDYLLSSTISDTLDVWELKDLGHQTAQRIVHASDPLQSMQEINQNFPSVVSSLSRMKLKDSVKDEITANQRMIPPGKSLMALNGALINIEDIDLYLLVDMVQQALSLADQFSKLKVPHSTIRKLLSTASPPESSMIRVDFRSSHVHYLNNLEEDAMYKRWRNNINEILMPVFPGQLRYIRKNLFHAVYVLDPATSCGLESVDMILSLYENNFPMRFGLILYSSKFIKKATSCGLHLSAEENDGETEDISSLIIRLFIYIKESYGTPTAFQFLSNVKRLSMESDSADDVPETHHVDGAFVDTILPKVKTPPQDILLKLAKEQTYKELSQESSMFVFKLGLNKLQCCLLMNGLVFDSSEEVLMNAMNDELPRIQEQVYYGQINSRTDVLDKFLSESGISRYNPQIIAEGKAKPRFISLTSGVLGGKSVVNDINFLHSPGTVDDVKPVTHLLAVDITSKKGINLLHEGIRYLIEGSKGARVGVLFSSSQDSDLPGLLLVKVFEITTASYSHKKNVLNFLEHLCSFYEQKYILASSVAAESTQTFIDKVYDLADANELPQKAYKSILSEFSADKVKKQLNKVSQFFYLLLGLESGVNAVITNGRVMFPGDEGTFLSHDLHLLETMEFKQRVKHIGEIIEEVQWQDVDPDMLTSKFVSDIIMYVSSAMAMRERSSESARFEILNAEHSAVIIDNENSSVHIDAVVDPLSAAGQKVSSLLRVLRKYVQPSMRIVLNPMSSLVDLPLKNYYRYVVPTMDDFSSTDLTVNGPKAFFANMPLSKTLTMNLDVPEPWLVEPVIAVHDLDNILLENLGDTRTLQAVFELEALVLTGHCSEKDHEPPRGLQLILGTKSNPHLVDTLVMANLGYWQMKVSPGVWYLQLAPGRSSELYTFREGGDGSQEKHLSKLITINDLRGKVVHLEVVKKKGMEHEKLLISSDDDNNSQRKGTHDRWNSNLFKWASGFIGGGGLSKKNESALMEHEKRGRHGKTINIFSIASGHLYERFLKIMILSVWKNTQRPVKFWFIKNYLSPQFKDVIPHMAQEYGFEYELVTYKWPSWLHKQTEKQRIIWAYKILFLDVIFPLSLERVIFVDADQVVRADMGELYDMDIKGRPLAYTPFCDNNRDMDGYRFWRQGFWKEHLRGRPYHISALYVVDLVKFRETAAGDNLRVFYETLSKDPNSLSNLDQDLPNYAQHTVPIFSLPQEWLWCESWCGNATKSRAKTIDLCNNPMTKEPKLQGAKRIVSEWVNLDSEARQFTAKILGDEVNPQELVSPNQSQDSLTDNSLEEDAESKSEL

SEQ ID NO: 4390 - protein, 1221 aa, Fundulus heteroclitus
  MOD_RES (1191)..(1201): Any amino acid
MAPLKVWQMQDLSFQTAARILAAPAVDALNVMKDLSQNFPTKARSITKTVVNSEIRKEIEENQKFFKGTLGLQPGDSALFINGLHIDLDTQDIFSVLDVLRSEARVMEGLRSLLIETPYIHDILKLNVQPSDSDYAVDIRNSAICWINNLETDHRYSSWPHNVQELLRPTFPGVIRQIRKNFHNLVIILDPTQENAAELLSVAEMFYANNIPLRIGLVFVVSDEDDVDGMQDAGVALVRAYNYITDEVDSHSAFEAVVSMFNRVVIGGKLSVGDVVKVLEKRFPYVEVSSVLGADSSYDSNRKEGRAYYEQTGVGPLPVVMYNGIPYQREQLDPDELETTTMQKILETTSFYQRAVYLGELATDHDVVDFIMNQPNVVPRINSRVLSTSRTYLDLSSTNNYFIDDYARFSTLETKQKSTAVANSMNYMTKKDDGYIRPVTFWVVGDFDKPSGRQLLYDAIRHMKTSNNVRLGMINNPSSDLSAETSRVARAIWSAMQTQSANNAKNFITKMSKEETAEALEKGADIGEFAVGGMDLPLFRSAYEGPKFDFLLSHAAYCRDVLKLKKGQRAVISNGRVIGPLEENEVFNQDDFLLLENIILKTSGERIKSKVQQFEMEEDRASDLVMKVDALLSSQPKGESRIEYGFADDRYSAVKIRPKEGDVYFDVVAVVDPVTRDAQKLAPLLSVLKQLVNVNLRVFMNCQSKLSDMPLKSFYRYVLEPEVAFQADGTFSPGPMAKFLDMPQSPLFTLNLNTPESWMVESVRTRYDLDNIYLQEVENIVAAEYELEHLLLEGHCFDVSSGQPPRGLQFTLGTASEPVIMDTIVMANLGYFQLKANPGAWMLKLRKGRSDDIYKIYSHDGTDSPSDSDDIIVVLNNFKSRIIKVKVQKKPDKFNEELLSDGTEEDDDGFWKSLTRGFTGGGKAEEPKQEKDDVINIFSVASGHLYERFLRIMMLSVIKNTKTPVKFWFLKNYLSPTFKDFIPHMAKQYGFQYELVQYKWPRWLHQQTEKQRIIWGYKILFLDVIFPLAVDKILFVDADQIVRTDLKDLRDFDLEGAPYGYTPFCESRREMDGYRFWKSGYWASHLAGRKYHISALYVVDLKKFRKIAAGDRLRGQYQGLSQDPNSLSNLDQDLPNNMIHQVPIKSLPQEWLWCETWCDDSSKRTAKTIDLCNNPMTKEPKLQAAVRIVAXXXXXXXXXXXPTRFQQPVGVPAATRGRTWV

SEQ ID NO: 4391 - protein, 1487 aa, Trichoderma reesei
MTQHRWWPWNLICALLLALQAHSTPTVNVGMIAAFPAGPYLLELLETAAAENSSSYFPLLDRIAAGHFASASTDAALYAQVLDALQEDGSLSSPEALSTFKLALSLRSAAPRIEAHYQYYATAVASAVDDAAEPGCTNWVLLEGKQYCTPELDKVHREGLSSLRQAKDLPFDRTLGLGKEAILYADPTSSSFGDFHEALSKAARQGSLTYRLRYRRSETTHASNLPISGYGVELALKRTDYIVLDDRSHDEEAHADTLASATSLDDDEDVADIKPLASSDLSSLGLKAASFILQSDRPLDTLIKLTQDLPRFLTSVVAHNISSQIEEELQSNGALGVPEGMNVLLVNGVQLIERQIEPFALIERLRQERKLIDGFRALGLSGKQAVSILGHQSVSLAKDSDEPLRYDWTDRLEDGRVLIWLNDLENDDAYEHYPNSIASLLQRAYPGQLPPIAKNIFTLVAPVDFTSAEDVSFVAQLLSFVSRGISVRFGLVPLTSTPEAAAKAKIAYHILENYGIRGLVSYLGRLQQAASTLSNEELFAEITADHELLEDSEKMTLGEVLEADTYQQQLKLAQQWASRLKVDTPIRPTFFNGLSIPRDESWMQRLGMQIGEDLQTVQKGVFHGLLTDDDWAPGLFLSRAITRRNSYITPDDEKKSLRVLNIDKVYKEHANLFEAVPVLEAAAESQREDWAVVTVIADLTTTSGKELLLSALEFKRRNPSIRMDIVHNPLAATGAASANAALQASQGLLGDIQNIDELTNLLQTHSEDSINDGYFEALEQFLGASKIPSGARMIILNGRVIGPISEDSQFDADDFQQFLEVERMRRILPVYGAIEELGLSDKLATPLDAARLTSITALSTISELPEGIFESTSSVRTTLYDKWQSTHTAIERGDEETASIFIVGLLNPVSEQGQRWAPILKVLSELEGVHLKLFINPMSKVDELPVKRFFRYVLESQPSFDEEGGVRGLVATFKNLPSEALLTAAVDVPPAWLVAPLISVHDLDNIKLSAVKTAVHATYVLKHILIEGHSREGKGSAPRGAQLVLATEKDPLLTDTIVMSNLGFFQFKANPGVYSIRLKEGRNTEVYEIESIGAQGWNPVAGDNGTDLALIDFQGVTLYPRLKRRAGMEMEDVLQEKGPSNNIVAKGLKLAEGLFGGKSNKKSVSAQEHAEINIFSVASGHLYERMLNIMIVSVMRHTKHTVKFWFIEQFLSPSFKEFIPRMAQEYGFKYEMVSYKWPHWLRQQKEKQREIWGYKILFLDVLFPLSLDKVIFVDADQVVRTDMIELMNLDLEGAPYGFTPMCDSRTEMEGFRFWKQGYWANYLRGRPYHISALYVVDLRRFRELAAGDRLRQQYHSLSADPNSLANLDQDLPNHMQFHIPIHSLPQEWLWCETWCSDESLSQARTIDLCNNPLTKEPKLDRARRQIPEWTAYDEEIAALRQLFKQETGIAGKEKLADNGDSRAAESGAKNTKSRNLEGDRPHTKDEL

SEQ ID NO: 4392 - protein, 1492 aa, Colletotrichum sublineola
MLRLSRMPTGLALTLLASVNVLAVPSVTVDMKAAFPSGPYLLELLETAAGENTTAYFPLLDRIASGYFGEAKTDKDVYDKFLHVLNEDGHINFPDSLSTFKLALSLRTAAPRIEAHYQYYRTAVEPKLGSDAQDGCEVWVQLGGKQYCAPTLDTPKESVSTLDSSKVLPFDRVLGSGSEAILYADPTSPSFGPFHSTLAEKARKGEIEYRLRYTKPAGIYEEALPVSGYGVELALKRTDYIVIDDREAQSDDSQKVANAGEVLDATEDVADLKPLAKSELQELGLKAASFIMQSQDPFEALLRLTQDFPKFSTSIAAHNVSANFLAEHQLNRQQLVPSGMNVLWMNGVQLIERQIEAFTIIDLLRRERKLIDGVRALGFTGGQAVSLLGHPKVAESKSDEEPPRFDWTDDEEKEEVIMFLNDLEKDERYKDYPSQLMSLLQRVYPGQLPPIKRDIFNLIVPVDFSKIEDLNVVAQLNSFIQRRLPIRFGLVPLTPTEDAAKISKVLYYLLDNYGLEVFIEYLDAAMQVSKTDKPDQSVFEKAIKDREPLPTAKLLDFDDVLQSQELDNVVELSRSWVKRLKANTPIPPVFINGIPVPREKGWLQAMSMKATSDLQAIQRAVYLGMINEDFWVPDFFLEKAVKRRNTYIYPEDDKSIKILDVNKIYTEHDSLFSNVPVIEAYADSSKENWAVLTVVGDFVSDQGASLLLTALAFRRSNPGVRLDIVHNPPASASASAVNTALKNSGDKLAEVESLSDLKAIFDSAADESDGMFTAALSEFLSFAAIKPGSNVLILNGRVIGPFTEDQPFQGDDFQFLLEFEQKARIFPVYAAVDELGLTDKISGPLAAAKITSVTALSTISDLPADIFESAPSLRVSAHDTWNSTYTAIEIGNPETSSIHIVGVLNPASEQAQRWAPILKVISKLDGVYLKLFLNPQEKIDELPVKRFFRYVLEPEPSFDEAGKVRGLEASFKGLPSEALLNAGMDVPPSWLVAPKVSVHDPDNIKLSSIKSNVYASYELESILIEGHSREGGQSQPPRGAQLVLGTEKEPHFADTIIMANLGYFQFKANPGFYNIQLKQGRSSEIYTIDSIGAKGWTPVPGDEGTEVVLMDFQGTTLYPRLSRKPGQEEADVLAEPEDNSIVGRGLKFAEGILGKKKSASDEEHAEINIFSVASGHLYERMLNIMMVSVMKNTKHTVKFWFIEQFLSPSFKDFIPHMAKEYGFKYEMVTFKWPHWLRQQKEKQREIWGYKILFLDVLFPLSLDKVIFVDADQIVRTDMISLVNHDLEGKPYGFTPMCDSRTEMEGFRFWKQGYWANYLRGNPYHISALYVVDLRRFRELAAGDRLRQTYHSLSADPNSLANLDQDLPNHMQFQIPIHSLPQEWLWCETWCSDESQKDAKTIDLCNNPQTKEPKLDRARRQVPEWSVYDNEIAALDRKRKGLPVEAPKKEETKVGGGVESEQQKPVVAEEDKNTKSRNWEEPPAEKTHVIDEL

SEQ ID NO: 4393 - protein, 1625 aa, Helianthus annuus
METRVGSGFRVMILIVVCAMVCGCLVDAEIQRPKNVQVALRAKWPGTSVLLEAGELLSKEWKDHFWEFVEVWLNNESGNTDPYTAKDCLQKIYNYGKTLVTGQLTSVFELSLTLRSASPRLVLYQQLAEESLSSFPLSDDMHTNFNDGGVSDANEGEEAKKADSLLVGVNPRSPGGKCCWVDTGAALFFDVSELQLWLRNPHKDGDVFQQPELFEFDHVYFDSSPGSPIAILYGALGTECFKEFHRTLVEASKEGKVKYVVRPVLPSGCESKSGYCGAVGTRDPVNLGGYGVELALKNMEYKAMDDSEIKKGVTLEDPHTEDLSQEVRGFIFSKILERKPELTSEIMAFRDSLLSSTVSDTLNVWELKDLGHQTVQKIVHASDPLHSMQEINQNFPSVVSYLSRMKLDDSIKDEILANQRMIPPGKSLMALNGALIDIEDIDLFLLIDMVHQELSLADQYAKLKVPSSTIRKLLSTLPPPESNSFRVDFRSDHVQYINNLEVDARYKQWRSNLNELLMPVFPGQLRYIRKNLFHAVYVLDPATICGLETVDNIVTLFENSLPIRFGVILYSTKMIETLQANGGEFPHLESEINEDLSSLTIRLFFHIKESHGMLKAFEFLSNVNKLRMDSGEEDAPALHHVEGAFVETLLQKAKTPPQDTLLKLEKDQSFRESSQASSLFVFKLGLAKLECSLLMNGLVHNYDEEALMNAMNDELPRIQEHVYYGQINSRTDVLDKFLSESGIQRYNPQIVGDKAKSKFVSLTASIVGDESLLNNVEYFHSTGTIDDLKPVTHLLAVDVTSRKGVKLLHEGIRYLMVGSANARVGLLFNSDFDADSYSFIFMKAFEIAASSYSHKKQVLNFLDQLCTFYGNEYILESSQNSQALLDKISQLADANGIQSKGFMSALSEFSVAKFTSHMKKVGQFLYGQVGIEKGTNAVVTNGRVVPVPDSVTFLSQDLHLLESVEFKQRIKHVADIIEEVTWENVDPDTLMSKFMSDILMSVTSSLSTRDRSSESARFEMLSAEHSAVVLGSENSTIHIDAVLDPLSSSGQKLSSLLRILSKCSQPSMRLVFNPMSSLVDLPLKNYYRFVTPTMDDFSNTDLTVHGPKAFFANMPLSKTLTMNLDVPESWLVEPVIAVHDLDNILLENLGDTRTLQAVFELEALILTGHCSEKDHEPPRGLQMILGTKRNPHLVDTLVMANLGYWQMKVSPGVWYLQLAPGRSSDLYVLQDGPEKHSMKRITIDYLRGKPVHLGVAKKKGKEHEKLLIPSDDDDSSRKQGDKEGWNSNILKWASSLIGGNGHTKNSGSTKLDNVSNGRKGKTINIFSIASGHLYERFLKIMILSVLKNTQRPVKFWFIKNYLSPQFKDVIPHMAQEYGFEYELVTYKWPSWLHKQKEKQRIIWAYKILFLDVIFPLSLEKVIFVDADQIVRADMGELYDMNLKGRPLAYTPFCDNNRDMDGFRFWKQGFWKEHLRGRPYHISALYVVDLIKFRETAAGDNLRVFYETLSKDPNSLSNLDQDLPNYAQHTVPIFSLPQEWLWCESWCGNSTKARAKTIDLCNNPMTKEPKLQGARRIVAEWPDLDQEARHFTSKILGEDASPVEKVVSPPVQPQVVEEDLETKDEL

SEQ ID NO: 4394 - protein, 1462 aa, Nectria haematococca
MFRLSQLPWGLAMALVASLATASPAVNVGMNAAFPRGPYLLELLETAAGENSTSYFPLLDKIASGHFASASSDAELYDQFLEVLQQDGHIASPDALSTFKLALSLRSAAPRIEAHYQYYSTAVDPTTKEDVDEKCQSWALVENEKYCSPTLDTAAESDLSSKQTNVLPFDRVLGIGKDAVLYADPTSASFGPFHETLSKAAKQGDISYRLRYRRSTAQSSPLPVSGYGVELALKRTDYIVIDDREAGKDATQKPVAADVVLDEEEEVTDLKPLSTSELASLGLKTASFILKSENPFETLVKATQDFPKFSRSIIAHEVSKEFKEEQEKNVAAGVPTGINFLWMNGVQLIERQIEPFNLIDMIRRERKLINGVRALGFNGQQAVSLLGHSEIANAKADDEPTRFDWTDRSEDGKVFIWLNDLEKDDQYAELPKELKALLRRTYPGQLPQVALNLFHIIAPVDFTNLQDVRAFSQLAQFMQRGLTIRFGIAPLTSTPAAAAAGKIAYHLMETYGLESLVAYLSECEEGSKTGVDKKAFVKAVEGREPLPETTKMTLDEVLEAESYTQKIKAAQSWASRLNADTTVRPVFVDGFAIPREKNWVQTMGQRLTEDTQVIQKAVYLGEIDEESWVPGVFLNKALAKRNTYIFPDDDKSLRVLDVNKLYADHADLFSKVAVLEANTESTKETWAVLTVVTDLNTEDGQDLLVSALQFKRANPGLRLELVHNPSSPTDAHAVNGAFKTNTAKLAEIESKDELKGILEASWTGEDDGFGNSLAGFLNTAKILPGTKALLLNGRVVGPLPSNVLFKEDDLQQLLDFEQRNRILPVYAAIEDLGFADKLSDPVAAAKLTSITALSTISDLPQGIFESAPSVRTTLYSTWDSTHTAIEIGNPETASIHIAGLLNPTSEQGQKWAPILKVLSELDGVYLKLIINPKEVVSELPIKRFFRYVLNSAPSFDKDGHVEGPKAVFKGLPSEALLTAGMDVPPAWLVAPKASVHDLDNIKLSSVKADVDATYELENILIEGHSRDGKRGAPRGAQLVLATEKDPLVTDTIIMANLGYFQFKANPGYYNIQLKEGRSADIFTIESVGAQGYSAVPGDEGTEVALMDFKGTTLYPRLERKPGMGEADVLATTDDEDKGIVAKGLKFAESLLGASKTHKEISAQEHAEINIFSVASGHLYERMLNIMMVSVMRNTKHTVKFWFIEQFLSPSFKDFIPHMAAEYGFKYEMVTYKWPHWLRQQKEKQREIWGYKILFLDVLFPLSLDKVIFVDADQIVRTDMIDLVNHDLKGAPYGFTPMCDSRTEMEGFRFWKQGYWANYLRGLPYHISALYVVDLHRFRQLAAGDRLRQQYHTLSADPNSLSNLDQDLPNNMQFTIPIHSLPQEWLWCETWCSDESLSSARTIDLCNNPQTKEPKLDRARRQVPEWTVYDDEIAALDQRRKGTEEKNTKSRKLEEEMHTKDEL

SEQ ID NO: 4395 - protein, 1681 aa, Dictyostelium discoideum
MARIFKFFVFLLIVFISNVLLLVESNEGDNSFSSKSIQLSLVSNWGETPSYLEAAEFLHNQDKSLFWKFIEEFNKIDFSTNYSDKIYYESTISLMKSVLSSNTQFLSEFLSIDLAMRTYSPRVETYRQLAISNMKLNNIEHSITTADNKTITLFNSGGWVQIKNKIITDVNEINESLFKDVAVVDDEENEFIRLYDFDHIFPTLANTVSSSSSSPSSIPIVILYVDIKSEFFKLVHPKLKQFSQMGKIKYCLRYVVQESNQKLNLQGYGYELSIKNLEYKVMDDSAIKKDIIIDGVKSKTIINIPNEDVQGFNFHKLQKRKPELTSKLSTFRSYLMAKSQEAKELKVWELKDLGIQSAQKIIQSGDPLRSLEYISQKFPTLSNSLSKITLNESLKSVIESNQKIIPSTTDQTLLLNGRLIDTNELSPIELSRIILEEYEHSTTIQQQGPLSSKTVQDIISAQLPIRIQLLPTKEELELNGGNEPFVSLNNLELDYIYRQWEPKLQSSVLDKPVTSPQDIFIRKNLLTTVIVLDWNNINTFEIIPEIQEMVQGNSLIPTRIQLLFNTKSNNNNNNNNNNNDQNSQTSNFIQGKDLAKVFLTIKNSNLGNRGAFFFITALNYFKKMYIPNELGITRSVLSSSFQAVLQQMGGSVRSLQHALTNTDFDNLLESSNQLIERLELLDTTTSQSTTTTTTTKILPKVFVNGVQVKYSNIDQLSFDLLVSLYDEFDNLKPLFKESILSTTTAQYYETILTSSYWKDNNLPFLKKLNSMISNEKYSHLITNSKNRNQEVDAQNVLKNLLYFRNNENKDEQNLLNLIVIGDFDHYNTRDISLELLRQLEKGELKNCKLTFISNPIDINSVVNTAGNENQILGKLITILKHYGKILTPQLVIGLFEKVQSDPTIIDSFKTMKQIIELSGFDIAANDIWVAQSVNLFKQSSKVCKQYLGIQSTNKSPLSILVNGRIITPPLSYDDAASFIQSDFKLLLEIEMIKAKKTFELLNSDPILKDKSNLKISDLLNKVQSLVGYYYNGNNQLDSNIKRKRIPNSLSISFSHKPPTLSSSSSSSSSNSNDVPLKFLMIINPFNKVSQKLVPMVREFSNKLNIPVDVILNPPVSLSELPLKTYYTYVIKLSSEFNNENVLYNQPLGIATDIPEDRVVTLALDIPSSWLVQPIIAKYDLDNIRLKDLGDEQVLTAVYELENIVIEGSANDMTTDNAPAGLELLLNPISTQTNKTQDTIVMNNFGYYQLKSNPGIWKLTIAPGRSSDIMDMVDHPNQKEKETFVIVPHRLVVIDSLYQSLSSLSVVRKAGQELRPILQPIDEYEKQKEQEKEQKLKQNSSGFFSNLFSSKNDATDSVATHQKKSNLDTIHIFSVASGHLYERFLKIMMLSVVKNTESPIKFWFLKNYLSPAFKEFIPEMAKEYGFQYELVTYKWPWWLRKQTEKQRIIWSYKILFLDVLFPLDVPKIIFVDADQVVRTDLKELWDMDLHGASLGYTPFCDSNKDTEGFRFWKSGYWRQHLAGRSYHISALYVVDLVRFRRLAAGDQLRATYDQLSRDPNSLANLDQDLPNYLQHYVRIHSLPQEWLWCETWCDQESKSKAKTIDLCNNPLTKTPKLENAVRIIDEWTTLDNEAKEFELKIDQSKHHRQIELDHQNQLPNSKPIENIDDILLNLAESQKDLF

SEQ ID NO: 4396 - protein, 1539 aa, Fistulina hepatica
MRTRAALQWLSAVGLSFAASPTINVALRSSWPAAPALVELLETVALEVPEAFFPLADLLTDPGVHLLNQELRPEAVYGAALSVAADRGILTGESPAMVQTNLGLHSASPKVEAFYQYYETYTSRSHTSDCGSWVEWYGEVVCDIESLVQLAGHDTIDSPSSVPPKVLPFDHVYPPPERTLISPRRTAILYANMYSSNFRELHGYLLQAASERNPRLEYVFRHVPPSALGSLPAQYLTGYGVALDLKKTDYLAIDDRHVVERCACFSAESSEDQVVNVPDMIFDLIHAYPKNSTVSDPSVPLTEEEILELGFKASQLIADSVDPLATLKQLSQNAPVYASALARRVPVNESIAGELKHNTQLSNEGLNLMWLNGAILYESDINPWGLLRLMRKERKIMESLTLLGLSSGQAIELLTHRALAAAQNRPPVLEGIFDASDRLEGGDVIQWWNNIEKDQRYARWRPSLRMLLNPVYPGQFHNIRLNLFNVVLVLDLSDTVALNFMTGPMSNLIERGLPLRFGVVPSTETKAGEEMARLFYHMIKSYGRAKAMTFFKSISQYRRPVVYQTPTVSWKLVQAEYDKFVSEHGAPTKPADQEPTNAPTLPSIFLGELPVDLLPPVDAVSSYIERLCATRANGHNGHVFVNGKHFVMDDSVLKNIQNEVNRQLQYLQELVYEGVLDEPDGMRIATYFYDLPEANLRRNPYIYPSSPGDLLIVNVPQLVEQSGFTRFSTPHSYLYSDSSNHSVTLYVVADLDSEEGKKLMQEGVKHSQAKDSGIRLSFIHNPTDRDVSPSPAFHENDTEAFGNEFQTTWSPQNYDHAVYETYVYACGLFVKGLGIQPGASALLVNGRVVGPITEGGFVSEDFAELEKYELKRVQPLLTALGDIVPLSELDKFEFADLVGMSSSIVGSLQISDPSEAVIRETAQKPRRRNYRKLHSNYTAFEAGDNTTALYHIAAVIDPLSESAQRWSSLIEACSSWLLHLPDVFIEVHLNPGHSSEMPLKRFYRYNVRPSLSFDDAGFEVHAHTHFDRLPAEPIYTLAMDVPASWIVRPREALCDLDNIQLNKHGRVDALFDLTHLVIDGYARESPTNVAPRGLQLQLSNGLEPSIVVDDTLVMANLGYLQFKARPGVFRLDIRPGRGREIYQLETAGNLGWNSPLAVGNRDVTLTSFEALTLHPHLARLPGMETEEVLAVREGRVSIIDSIKTSVLALFSDSSAMAVPKPADINIFTVASGLLYERFASIMILSVLKHTKSTVKFWFIENFLSPSFLEFIPHFAEEYGFQYELVTYKWPSWLRPQKEKQRIIWAYKILFLDVLFPLDLKKVIFVDADQIVRTDLKELVDLDLHGAPYGYTPMGDDNVEMEGFRFWKTGYWKDFLRGLPYHISALYVVDLVRFRQMAAGDILRGHYQQLSADPNSLSNLDQDLPNNLQHEIPIFSLPEDWLWCETWCSKDRFERAKTIDLCQNPLTKEPKLSRARQIPEWEVYDAEIAKFTNSLAQSGRITGSMAVADTSVLANEAASAPASSPEIPVDDAQSEHRDEL

SEQ ID NO: 4397 - protein, 1296 aa, Microtus ochrogaster
MQEIKKPSSRKMLLSGYGVELAIKDTEYKALDDIQVKTVSDATIEQTDADEVQGFLFGKLKEIYSDLKDNLTVFQKYLIESSKAMMPLKVWELQDLSFQAASQIMSTPVYDAIKLMKDIAQNFPIKARSLTRIAVNELMRKEIQENQKDLRDRFDIKPGDARLFINGLLIDVDVYDPFSILDILKSEGKLMSGLKNLGLSEKDMSKFLKLNLPVWKHDYVLDIRHSSIVWINDLETDGLYSAWPASVWEFLKPVLHGTVPSIRRNFHNLVLFIDPAQEYTLDFISLAEFFYYNEIPLRIGFVFILNTENEVDGTADAGVALWRAFNYIEERHGTSEAFTSMIHMFQKVKGHRVLTVDDVKSVLQNKCPNADILDILGTHSKYDRRRAAGTSFYNMTGLGPLPQALYNGEPFDLKEMSPEDLRGAVLEKMTDAFVSLQRDVFMGTLNDEINAVDFLMDKNNVVPRLNSLILHTKPQYLNLLSSSVTADVEDFSTFSFLDSQDKSAVIAKSLQYLTQEDNVLSAVTLWIVADFDVPSGRKLLFSALEHMETSAHSRLGIIYNPTSKINEENTVISRGILAAFLTHKNSLLRRFLRKLAKEETAEAVYSGGKIKTFLTMEMDNNAFEKKYNTIGVNIFRTHQLFCQDVLKLQPGEIGIVSNGKFFGPLHEDLYLEDFHLIEKITFSNLVEKIKDIVENMEIDSKDMSDLVMKIDALVSPLPVRASRYDVTLLKENHSVIKLSPPEKDLFYDIVAIVDPLTRGAQKMAQLLVVLGKIVNARMKLFMNCRSKLSEAPIGSFYRFVLEPELISGANNGPSHGPVAKFLDIPESHLLTLNMITPEGWLVETVRSNCDLDNINLKDTERTVSAEYELEYLLLEGHCFDMTTEQPPQGLQFTLGTKSNPAVVDTIVMANLGYFQLKANPGAWILKLREGKSEDIYEIVGHEGTDSESDAGNIVIMLNTFKTKILRVQVKKKSGKIKEDILADKHENRGMWDSIKSFTKSLHKDDRKENDILNIFSVASGHLYERFLRIMMLSVLRNTKTPVKFWFLKNYLSPTFKEVIPHMAKEYGFQYELVQYKWPRWLHQQTEKQRIIWGYKILFLDVLFPLAVDKIIFVDADQIVRHDLKELRDFDLGGAPYGYTPFCDSRTEMDGYRFWKTGYWASHLVKRKYHISALYVVDLKKFRRISAGDRLRGQYQALSQDPNSLSNLDQDLPNNMIYQVAIKSLPQDWLWCETWCDDESKQRAKTIDLCNNPKTKEPKLEAAARIVPEWVKYDTEIRKLLDHLANKKSTMSVHDEL

SEQ ID NO: 4398 - protein, 1412 aa, Meyerozyma sp.
MHYVSWTLVWLVAWFGFACGQLGSLEFEIKAAWKHTPFSANLIESVAAHNESWYESAVAASIGLDDDSSYDSPQLSDKAIYENIMSQLPAESKDFISFDSVYKTHSPRIAAHYRQFEEVYGGNNLKKLEKTCATDSFGAKVPFINGHPHSFLVFNDKIYCSPEDIYALQTQGSSDYTPLEIDRVVGQHTKAPVVVLYGVPGSPSTIGFLRHLMADSQAGKLRFVWRYLPATNIGDSMVGYGVQLGLSNYTAPKHTSDEISVSVLAEKSANESYYHLRDILRSPLSKLNTAAEKVKQSFYDAKDKNARLGLTKASNGIYINGAIIPKAELSVFSLVAQIKSELTRMKDLKSLGFTTTQARTLLQKFALLSAVKDAQYRKGNTIMGGNENRFRVYQEDGVIFFNDIESDKNYVDYTTDAHEAYLEQSKGLKVGQIPALRQNVHDLIFAVNPSDRRQLEVFFTLAKIILDRGIPQQIGLLPLITSEIDEAVAKAVHFLFKKGSPQESLGFLYKCLQAEKGHEEIAQLAGTIPVPPEYRVPHFAESTSRYSIDQPSVVVNGVIYELQSPGWQTAMVNQLSQDVMVLKRHLGTSSETNMKQVLYENASKLRNLRISPQDPSTIIYKQITADLVSHSITLKMKAESTTDLPGTVWLIGDYTTSRVLEQLEVLLKFIKRERRFQINMIHTGKNEGFLENLLSGIKDAQNLDTKGHKLLLENIKLASSGSSYGLISSAAQHLLERNNLPSSYPYILFNSRFFRLDTNFDLKEISLLASYDSKQRMSILKDLVGAYKDIFDSKSLMEFAPEKDKGAWFDLLSSLVTTSYYNSEYITTGDANRFDFSGLAYESSIILHSNEDEVEIVLIIDPTDPYSRKLVETVHAVKEFKSVNIKILMHASEDGAETTECVYSSIIPSARPQFNQKGMYITESPIHISGPAKVCTSLSIDAPFSWHVVPSLSSRDLDLQKFNLSEEKWAVYELKSLITDGYAKNILTGSGPTGAVLQIYDTNFHQDTAVLGSLGYFQFRTPPGIFNLQTKCLADSENCFDLLSAGSDFNSSRDVVSSVQVPVFSLNGLQITPRLQISEKKQEKSGSKLNFWSSKSVENTGEDINIFTIASGEVYEHLLSIMLASATSHTKRSVKLWLLEDFLSPKFKSALPTLASTYGFSYEYISYKWPIWLRSQQSVSRTVWGYKILFLDALFPQDLRRVIFIDADQVLRADLMELMETDLQGAPYGFVPMCESKEEMKGYQFWKEGYWAQMLQDDLKYHISALFVVDLFEFKKRRVGDRLRAHYQKLSADPKSLSNLDQDLPNNLQRHVPIYSLPSEWLWCDTWCAKEELGRAKAIDLCNDPTSTEDKIVRAKRVISEWADYNDEISRVLNERRMDYSQRPEELGDLQLTLEDDDQIEDDESDYFHDEL

SEQ ID NO: 4399 - protein, 1599 aa, Acytostelium subglobosum
MYAQATLANEDQGSADTSKVVHLSMLSNWQSTPLYLEAFSFFKEKLDVDSYKQYIEEVNQRYVKKQAENGDTLLTDEESFQVIVDSSASILDSDQSQSQSYMTLFLKAVLALRTYSPRVEMLRQLYLQDLSNINNNDNDNNNDNNINNKRERTQVIVLGGVEGSFSAWAKSIDFTYHFADSINLEIPVRRPVVYQQDTIYAQNTLFKYDAQVLVPLQSVPVAVYYSDVTSATFAEVHRQLKKLAEGGKIIYALRFVVPSSKRKAHIQGYGYSLSIKNLEYKVMDDSVIEKDELQSQLAATAQNEDISGFNFKVLHTRHPELSSKLSTFRKYLLANQQTTELKVWQVKDLGVQAAQKIVGSSDPIRSLSYISSTFPSLQASLARISLNETLKQQIEAIHKHVTEGENQLFLNDRVIQVGDSVEDEFELNPLGLTDIVLDEVKFGAQLQQIGLSNDQILNVNKLILKPSSIRFDMLPDDQSIILYMNNLNSDYTYQRWDKSFSALSGNLDSSSVYFGKNLFTALFVLDMGSEEVFTQLAMVSSLINNNSPCRFGIIFNTESLPTDKKPPSDLVRPEVVARLFWTFKERMGHRAAFFFMNALNYFRSVYEADYNSYGIVQSAFQTVIGQMGNRMPNLIGLMESTELAPQLIGASQYINAKGITQFPQLFINGMLVEISEKRPLLDAVHSFCMDELHVIKALWQEDVLNDNTDDIYKTIMENFRTKGQLLSSFNPTVIPSSQSTVKLPGDIFGSKAAERVYQSLVWHLASGRDASAIDKVSVIVVADFNTAPGVKAALSALNSVFHSESNTQARYAMLPLADSPVSRVLAHPQIKTQSAIDLLNKQLNKLESDQTLSLEQALAAAGLSNDNDMTQRIGDQLQYVNSGLDLHSGVEKTYLLANGRLIAIDDNDLFNDFAYLERFESSRVEGAVAALGDATITSDLLMRVVSALASKMQSNAQHKELPTQMVPSFVYNPATTGARQLPLRFKMVVNPLSKTAQKMIPIVAELSRHFGIPCDVFLNVQLSLSELPLKTYYSYVVNLDTKFSATGASISEPAGTLVNLPDKKVLTLAIDVPSSWIVKPIIAKYDLDNIRLKDLGQEQVMRAVYELEHLLVQGHAVDVKDKSSLSGMELKLVPSKKQQQVETPEIDTIIMGSIGYFQLQGNPGVWYLETMGRGNQIMDILDMVTLKDKADHVIPRRLIIADSFKGSPIYLGVQHKPGKQHEPILPPVSNDDTGAVAEQQEEESTGFLSSLWGGGAKKKQPQVKASNNGTLDTIHVFSVASGHLYERFLKIMMLSVKKNTQNPVKFWFLKNYLSPKFVDFIPHYAEKYGFEYELVTYKWPYFLRQQTEKQRIIWAYKILFLDVLFPLSVKKIIFVDADQVVRTDLRELWDMDLQGASLGYTPFCDSNRETEGFRFWKKGFWHDHLRGRPYHISALYVVDLQRFRRIMAGDHMRMTYEQLSRDPNSLANLDQDLPNYLQHTVRIFSLPQEWLWCETWCSQESKTKAKTIDLCNNPMTKTPKLENAVRIIGEWTDLDNEAKRAEQDYNEQQQQQQQQQQQRVISQTTAGDQHQHHQQTVDQTTPDVELAQNALEEAQTYFN

SEQ ID NO: 4400 - protein, 1479 aa, Heterocephalus glaber
MAPAKATAPAKATNAVRLLLGSAALWLSLLGARKACASKAVTARLAAKWPETPLLLEASEFMADESNEKFWQFLETVRELEIYKQRGLTGQLRPEWIVLERNLKVKGLTVFEHFVLCFHFRPRPYLLKGDHKFPTDKENLPVIILYAEVGTRAFSEFHKVLSEKAQSGKILYVLRHYIQKPSSRKMYLSGYGVELVIKNTEYKALDDTQVKTVTDTTMEDETEADEVQGFLFGKLKEIYSDLRDNLTVFQKYLIESNKEMAPLKVWELQDLSFQAASQIMSTPVYDAIKLMKDISQNFPIKARSLTRIAVNQQMKKEIQENQKHLKDRFKIQPGDAHLFINGLQINMDIYDPFSILDILKLEGKFMNGLRNLGIDQEDMSKFLKLNSNDEKYILDIRHSSIVWINDLESDHLYATWPASCHELLKPVFPGSISVIKRNFHNLVLFIDPTQEYTLNFIQVAELFYFHNFPLRIGFVFILNADDEVDGRNDAGVALWRAFNYISEERSVSEAFISIVHMYQKVKDQNILSVENVKSILQNEFPHADIWDILGAHSIYDNERKAGASFYKMSGLGPLPQALYNGEPFKREEINEELDAAILHRMEATSVYLQRDVLMGTLNDHMNAIDFLMDRNNVVPRINSLILHAKHQYLNLISSTVSADIGDFSTFSFLESRDKSAMIAKNMHYLTHEDNNIISAVTLWIIADFDTSSGRKLLFNALAHMKTSVHSRLGVIYNPTSKINEENTAISRGILAAFLTQKNNLLWSFLRKLSKEETAAAIYSGNKIKTFLIEGMDKNAFEKKYNTVGVNIFRTHQLFCQDVLKLRPGEISIVSNGKFLGPLPEDFYVEDFYLLEKITLSNLAEKIKSIVESTKINSKDMSDLVMKVDAFVSSLPEHTSRYTVTFLKEKHSIIKISPQENNTFFDVIAIVDPLTREAQKMAQLLVVLGKIINMKVNLFMNCKSPLSEAPLESFYRFVLEPELMSGANDSPSLGPVAKFMDIPESPLLTLNVITPEGWLVETVQSNCDLDNIHLKDIERAVTAEYELEYLLLEGHCLDTVTKQPPRSLQFTLGTKNKPVVVDTIVMANLGYFQLKANPGAWILKLRQGKSEDIYQIIGHEGTDSPSDIEDVIVVFNSFKSKILEVEVQKKPDKINEDILTDSDGKKGMWDSIRRKFHKDDDKKEKDVLNIFSVASGHLYERFLRIMMLSVLRNTKTPVKFWFLKTYLSPSFKEVIPHMAKEYEFQYELVQYKWPHWLHQQTEKQRIIWSYKILFLDVLFPLAVDKIIFVDADQIVRHDLKELRDFDLGGAPYGYTPFCDSRTEMDGYRFWKKGYWASHLSGRKYHISALYVVDFKKFRRIAAGDRLRGRYQALSQDPNSLSNLDQDLPNDMIYQVPIKSLPQDWLWCETWCDDESKQRAKTIDLCNNPKTKEPKLEAAARIIPEWVEYDTEIRQLLDHLENKKKSTNIQFSRHHLLKRLSFPET

SEQ ID NO: 4401 - protein, 1550 aa, Drosophila busckii
MLWQSTLCVLLAIAVAPTRAESSQSYPITTLINAKWMQTPLYLEIAEYLADEQAGLFWDYVKAATELDTPLNEYDTESKQYNAALKLVRAHLSEPQLPLLKLVVSMHSLTPRIQTHFQLGDELRAAGSCKSDIYAQVGTELACSYTELSKKLKLPNAADSLDASVDSYSFDHIYPGSDNNTRTVVLYADLGSAGFRTYHKLLEHAANAGKVRYLLRHQLAKRSEKPVRLSGYGVELHLKSTEYKSQDDAPKPEAGAGSNTDNEEQANETDVQGLDFKVLKAKHPMLKRALDQLRQRLLQGNDDIAPLKAWEFQDLGLQAAAAIAEIQGDEALQLLQYTAHNFPMLARTLLAHKVTEDLRAEIKHNSEALGRSLNVAPPDGALFVNGLFFDADTMDLYSLVETLRAETRVLESLHANDVRGSLASALLALDLNSASKREFAIDIRDTAVQWINDIEQDAQYRRWPASVMDLLRPTFPGMLRNIRKNVFNLVLVVDPLQPEARSVIKLAESFVIHQAPIRLGLVFDARAQEANTADDYVALACAFNYISQKKDARAALSFLTDVYAAVGETSAVTKAHIVKQLGKEFSSLSSSKIREMLAEDSDYDYGRKLAEEFVQRLGFAAVRQPQALLNGAPMPSNIVGSDSDFEEAIFTEIMSQTTALQKAVYRGELSDAENMMDYLMNQPHVMPRLNQRILSQEDAKFLDINGVPSMQLGNAAALNKLSNRDMTATLMNNLRYFGGKQSTERIGKAELQFLTIWVFADLETTEGRALLLHALDYVKGGQSVRVAFIPNTEGASDKRSLNRLVWAAMQTLEPAQATDQVLKWLRLQPSKRIDDIPKQLEDILGSTELHMKMMRVYAQRVLGLAKSQRLIIGNGRLYGPLRSDESFDSADFALLARYSDLQYGDKVREVLKQSASEVGDSFTSDTLLKLYASLLPRQTKTRFKLPTDLKTAHSVVTLPAKQQQLPHFDIVAVLDPASRAAQKLTPLLILLRQTLNCQLQLYLTPVPQHSDMPVKNFYRYVIEPEVQFEASGVRAEGPLAKFSGLPANPLLTQQLQVPENWLVEAVHAVYDLDNIKLHDIGGPVHSEFDLEYLLLEGHCFDAASGAPPRGLQLVLGTKSQPTLVDTIVMANLGYFQLKANPGAWSLRLREGKSNDIYAISHAEGPNTQHQPQTDAVQVLITSLRSHVTKLRVSKRPGMQQAELLSDDATPAQAGIWNSITSSFGGSSGGTAADEDAETINIFSVASGHLYERLLRIMMVSLLKHTKSPVKFWFLKNYLSPQFTDFLPHMAKEYNFQYELVQYKWPRWLHQQTEKQRTIWGYKILFLDVLFPLNVRKIIFVDADAIVRTDIKELYDLDLGGAPYAYTPFCDSRKEMEGFRFWKQGYWRSHLMGRRYHISALYVVDLRRFRKIAAGDRLRGQYQALSQDPNSLSNLDQDLPNNMIHQVAIKSLPDDWLWCQTWCSDTSFKSAKVIDLCNNPQTKEAKLTAAQRIVPEWKDYDGELKALMSRIEDHENHSSSSSSTQKADDEDAEETVVFTEPPLPEHVHGEL

SEQ ID NO: 4402 - protein, 1484 aa, Lachnellula suecica
MGTFNLPWGLTGALLATTYFHSLCASASPSINVGLKASFSSAPYLLELLETAADENATSYYPLLDRIADGHFSKATTDKQLYEQFIELLKEDGHMPDPETLSSYQFALSMRSSAPRIEAHYQYYHTAAEPSLQAEQDTSCPVWVLFNGKQYCSPALDAPHGDISGDSQIQELQFDRILGNPTAPPSILYADITSPDFGKFHKTLVKTAREGKTSYRVRHRKALSAIDSKPLLVPGYGVELALKRTDYIVIDDREDGDSKPVEEKTEKKEVKFEDEEFADLKPLSTSELFSLGVKASSFIMQSDNPFETLVKLSQDFPKYSSAIASHNASKEFVAEHDYNRAQLVPGGYNIWWLNGVQMIEREIEALRILDLLRAERKLVNGVRELGFTGNEAIKLLSHQEIAEVQAEGEPQRFDWRDDTEGGNVIVWMNDIDKDKRYAEWPTTLQALLQRTYPGQLPSVRRDCFYAVLPVDFANPQDVLMIAETLQSFVKRKLTIRVGLVPITSTIHSLEQARVIYYLLDTFGISTALSYLERSYNSGKVTAPSKTVFDAAVEGRYPRGEKVSRPVDEVLKSEDYKDQIEASQKWIKRLSADSKIPPMFIDGAALPRDESWLQAMSQRVTADLQAIQQGIFKETFTEETWLPTYFLFSAAKKRNSLVVPEDEKNLRVFNVNKVVEENRELFNTLPRIEADSTSDKADWAHMVLITDLESEAGAKLLTSAVVFREANPAVELVIAHHPTSDSTATGLSSDLFAHTKANAGKPFTVKELTTLLSSEKSENADSEQDALSYWHGTNSLAKSVSLASGQTAILLNGRLVGPIPDPAAFDLKDFAQLLSYERTKRIVPAFTAVEALGLSDKLTDPLAAAKISSIVAISTINETPAGIFEQASTLRMNQFDVWNSSHTAIEVGDASTASIHMIILVDPASEHGQKWVPLLKALSELDGVYMKLYLNPKERLQELPVKRFYRYVIDSKPTFDDAGALQSLSATFTGVPQEALLNLGMDVPPAWLVAPKVSIHDLDNIKLSSIKTDVDALYELENILIEGHSREIPGGAAPRGAQLVLGTERDPHFADTIIMANLGYFQFKANPGFYKIDLQQGRSSEIFNIDSVGAKGWSPVPGDESTEVVLMSFQGTTLYPRISRKPGMATEDVLEAKPDSKLDFVSQGFKFAQGILGKGKPAVEVEAQADINIFSVASGHLYERMLNIMMVSVMKHTKHTVKFWFIEQFLSPSFKDFIPYLAAEYGFKYEMVTYKWPHWLRSQTEKQREIWGYKILFLDVLFPLSLDKVIFVDADQIVRTDMMELVNHDLKGAPYGFTPMCDSRTEMEGFRFWKQGYWERFLKGLPYHISALYVVDLHRFRQIAAGDRLRQQYHQLSADPGSLSNLDQDLPNHMQNILPIHSLPQEWLWCETWCSDESLKDAKTIDLCNNPQTKEPKLDRARRQVPEWTVYDDAIAAVDRRRKAPKNEALKNEKSRTLEEPVTSKKDEL

SEQ ID NO: 4403 - protein, 1496 aa, Betta splendens
MMSIGSKSEFIGEDGNEKFWQFIDTVKELTVYKQGESVRSYYNLIIKKAGQFLTDLQVNLLKFSLALRSYSPSVHASQQIASDEPPPEACPAFVSIHGQHSCSTKDMKKLLKTAAGRPKPYLYKNDHTYPRVIKTDVPVVILYAEIGTKKFTSFHKVLSEQAEGGKIVYVLRHYVADPKPQKMLLSGYAVELAIKSTEYKAVDDTKVKDSKTVINDEDDDNDEVQGFFFGALKKSHPELQEQLSELRKHLLESTNDMAPLKVWEMQDLSFQAAAKIMSVPKFDALKVMRDLSQNFPSKARSLTRVAVKQEMRKEIEANQKHLTETIGVHPGDGELFINGLHIDLDVHNPFSILDILRAEARVLEGLHNLGIRGEHQGNLMRLPVNAVDDSYALDIRHPAIMWINDIENDSTYRSWPAGVQELLRATFPGVIRQIRRNFFNLVLFLDPVQEESVELVKLAELFYKHKIPLRIGFVFVVNTKDEIDGFLDAGVGFYRLLNYIADEYDLYQALMSMVSLYNKVDVGETLSVDTLTAFLKRKFPKANAERILGTESEYDENRKDGALYYKKSGLGALPLALFNGVPLSPDEMDPEELETIILQRIMDTTTVFQRAVFMNQLTESSNVVDYLMEQPNVVPRMNSLILSSDRKYLDFTASPAVDDWEDTTMFSYLDSRDKTAVVSKRMKYFTNSDEDGISAVTMWIAGDFEKVSGRKLLLSALKHVQKASPGVRVGVIDNPSGKPSDDNTVLYRAIWASLLTQKNKASAEFVQKVLKEESKKLLQQGTKMKDLLMQGMNVDAFEKKFNTLEVDFIRSQQLFCRDVLKLSPGQRAVISNGRILGPFEEQEEFTVEDFYLLEKITLRGSAEKVKAKVKQMGMKPKHASDLIMKVDALLTAAPKGEVRRDVHFIKDSHSVLRLAPRENEVFYDVVAIVDPLTREAQKMSALLIVLSQVVNVRLQVFMNCRTMLSEMPLKSFYRFVMEPDVGFLANDTVSPGPVARFVDLPETPLLTLIMITPESWMVQAVRSPHDLDNIHLQEVSGIVTAEYELEHLLLEGHCFDLSTGQPPRGLQFTLGMSRDPLMYDTIVMANLGYFQLKANPGAWNLRLREGRSADIYQILSHDGTDSPADAGDVIAVLNSFHSKIIKVRVQKKAEKMNEDLLSETSESKGIWDSIASVWSTFEKSITGGGFKKDDEEKKEDVLNIFSVASGHLYERFLRIMMLSVLRHTKTPVKFWFLKNYLSPSFKETISHMAETYSFQYELVQYKWPRWLHQQTEKQRIIWGYKILFLDVLFPLAVDKIIFVDADQIVLADLKELRDLDLEGAPYGYTPFCDSRREMEGYRFWKTGYWASHLGHRKYHISALYVVDLKKFRKIAAGDRLRGQYQALSQDPNSLSNLDQDLPNNMIHQVAIKSLPQEWLWCETWCDDASKVTAKTIDLCNNPKTKEPKLTAAARIVPEWVEYDNQIKQLLRSVQEQGDAAAEKQTSSSSQHKKDNQRDEL

SEQ ID NO: 4404 - protein, 1653 aa, Melanopsichium pennsylvanicum
MRARQLLGFGWAWLALSTLIHLSSADESPPVKVQLRPSWASFTLPSGGSPFLLELLEAAHSQRPSSFFPLLKLLTTKHTPQQLHNATDEWLANRIENLIRDYHLFGKDDQAVAERLDLWRMGLALKHAGPRIEAHKQAYQSLELEDIWNKGNAGDSSCVSWVHHQDLVLCSAEDVKRALLERTAPLAPQQQEDQVVFGHPRTATATQRFVLYADPYSVNFQELLSTLDEHTSVPSFNLSYTLRWRPQLTDTQSSSADHPSLLSGYGAILDLKKVDYLVIDDRKLKDDSEIGDVGLPATSSDESSASQAAFAEAKWLRDQIGADPDATTAPLSKLSEDEIADLGIKAAQLIMQSSDRLRALRELSQNFPLHASALASSTKFEDDSAAALIESVLGLASMRIEPGHSDLWLNGQSTSTRDFIPLKLLDTLRRERRWFRALQHRLAGGGLNTTEAGDLISSSLVGRTFIAQTEGGGGNAIFDASDRIEKKQAPQGSQEGAITWLNDLENDEATRDWSSDLMDLLRPMWPGKFPRLRLNLFNVVLVLDLTQRESCRFLSETVIQSLGRVGLHWGLVPGGLEQGEGDSLKMARLFWFLLEEASPQILSDVLRKAAGSRAGTAESLDVPLAIREAKFSLKSIDSDNSLAAKLDLILSGSNPAYNQREELAKAYICRLRATNSESPTGHVFTNGQRQPFHPQIVHMLHQSIQEQIQVLAPQIYYGQLKGSDAGLSTWFYDAVGALSFRSALVGGTAENANGAQHSNVDLFSALVDESVPEGSVKQVFQFYYPINEPERLLNSTVWVFANVDTEEGLGLVRKAFEALTEERAQFRLGVLHIPSKASRNITVSTLLYRLLNDNHLNHVTPIQMLDALNQSDSFHASLGLSSSSTDAIESAAHQFWTSLTSISTSLALTGPAIIVDGHLVSNFGTSTISHRDITALVEYEAGQKLPYLTQALQLLRENFDSINSRQRQDLIFASLCVMNGIYDESGSGKGVFTAKATSRSGLPEQIGTSDHVFEIGDKNTANIRITLLLDPLSEAAQRWSSILVMLQELEGVWIRVILNPQIKVRELPLKRFYRFSAPNRLHFDEIGKPMEEELRFFTMPQDAVLTLGLDAPAPWLTMPTEAVYDLDNIRLSDVPSTSRDKGVKAVYELKHILIEGHAREESRSGSGLSASVPRGLQLILETPKARDEGKRLDTIVMANLAYFQFKAQPGLWKLGIRQGGRSGELYEMVSVGGLGWDSPKIEETGQSIILDTLSGLTVYPRVAKRAGKENEELLEELDAQGRPLKEPRTHAQGLNHGVAASASQLIFSAMDKLASFSNKVTGSTSSNAIVTTRNHADINIFTVASGHLYERMTYIMILSVLKHTNSTVKFWFIENFLSPSFKEFIPHLAQEYGFEYELVTYAWPHWLRSQKEKQRTIWGYKILFLDTLFPLNLGKVIFVDADQVVRTDMKELVDLDLEGKVYGYPPMGDDSEDMDGFRFWKQGYWKDYLRGRPYHISALYVVDLNKFRLFAAGDRLRGQYQALSADPNSLSNLDQDLPNNMQASLPIFTLPKQWLWCETWCSHDWLDQAKTIDLCSNPKTKEPKLDRAKRQIPEWTVYDQEVARLAQRLVEEKRVGMSVVAPHSQVETGREQEALKKERHQPKLDTDHPHDEL

SEQ ID NO: 4405 - protein, 1335 aa, Hippocampus comes
MKMRNIILLSPLLLMIMQHTASASKGVIASLKAKWHATPFLLETSEFIGEDGNEKFWQFVDTVKELTVYKQGESVRSYYSLIIKKANQFLTELQVNLLKFALALRFYSPAVHAFQQIASDEPPPEACPAFVSIHGQHSCSTKNIKKLLKAAAGRPHPYLYKNDHIYPGANKTDVPVVILYAEIGTKKFTTFHTVLSEKAEAGALTYILRHFVATPKQQKMLLSGYGVELAIKSTEYKAVDDTQVKDAKTIIKAEEEDNDEVQGFYFGTLKKSHPELQEQLGELRKHLLDSTNELAPLKVWELQDLSFQAAARVLSVPKFGALKLMRDLSQNFPNKARSLTRVAVKSEMRKEIEENQKHLSETIGVQPGDGELFINGLHIDLDLHDPFSLLEILRGEARVLEGLHNLGVKGEHQYTLLRLPVNHVADSYALDIRHPAIMWMNDIENDPMYSSWPAGVEELLRTTFPGVIRQIRRNFFNLVLFLDPEEEKSVELVKLAGLFYKHKIPLRIGYVFVVNTKDEIDGFSNAGVGFYRLVNYIADEYDLSQALISMASLYNRVNEGETLTADTIIAFLKSKFPKANTERILGAKSEYDGRRTDGTLFYKKSGLGALPLALFNGVPLSPDEMEPAELESIILQHIMDSTTAFQKAVFMGHLTEGTNVMDYLMEQANVVPRMNPFILSTDRKYLDFTSSPVVSDWEDATMFSFLDSRDKTAVMANRMKYLTKNDEDGMSAVTMWIVGDFQKASGRKLLLAALKHLSTSPGVRVGVMDNPSGRPSEDNTAVYRAIWASILTQKNKSAVEFVQKLAREESYQLLLQGTKMKDLLLQGMNTDAFEKKFNTLEVDFIRSQQLFCRDVLKLSPGQRAVISNGRILGPLDEQEEFTAEDFQLLDKITRSSSAEKVKAQVKLMGMKPKHGSNLVMKVDALLAAAPKAEIRRDVKFLKESHSVLQLSPRENEVFFDVVAIVDPLTRAAQKMSPLLIVLSQVVNLRLRLFMNCRAKLSEMPLKSFYSYVLESDVTFLANDTMSAGPMARFTELAETPLLTLNMITPEGWMVQALRSPHDLDNIHLQEVSGTVTAEYELEHLLLEGHCFDLSTGQPPRGLQFTLGMSRDPIMYDTIVMANLGYFQLKANPGAWLLKLRNGRSEDIYQILSHDGTDSPANNGDVVVLLNSFHSKIIKVRVQKKAEKMNEDLLSETSESKGLWDSITSIAGRGPKKDEGEKKEDVLNIFSVASGHLYERFLRIMMLSLLRHTKTPVKFWFLKNYLSPSFKETISHMAEAYGFQYELVQYKWPRWLHQQTEKQRIIWGYKILFLDVLFPLAVDKIIFVDADQFEQI

SEQ ID NO: 4406 - protein, 1539 aa, Otolemur garnettii
MKAANAVRRLLGFSALWLSLLGAGTVSASKAVTARLAAKWPETPLLLEASEFMAEESNEKFWQFLETVQELAIYKQTESDYSYYSLILKKAGQFLDNLHINLLKFALSIRAYSPAIQMFQQIAADEPPPDGCNAFVVIHKKHTCKINEIRKLLKKATSRPRPYLFKEDHKFPTNKENIPVIILYAEMGTRAFSAFHKVLSEKAQNGEILYVFRHYIQKPSSRKMYLSGYGVELAIKSTEYKALDDSQVKTVMNATAEDDTEANEVQGFLFGKLKEIYPALKDNLTAFQKYLIESNKEMIPLKVWELQDLSFQAASQIMSTPVYDAIKLMKDISQNFPIKARSLTRIAVNQHMRKEIHENQKDLRDRFEIQPGNARLFINGLHVDMDVYDPFSIVGMLKLEGKIMSGLHSLGINGEDTSKFLKLSPPVWENNYILDIRHSSIMWINDLENDELYVTWPASCHELLKPIYPGSIPNIRRNFHNLVLFIDPAQEYTLDFIQLAELFYFHKIPLRIGFVFILNTDDEVNGASDAGVALWRAFNYIAEEYDELEAFISIVHMYENVKDQNILTVDDVKNVLQNKFPHANIWDILGIYSKYDREREAGANFYKMTGLGPLPQALYNGEPFSNEELNIKGLEMAVLHRMMDTSVDLQREVFMGTLNDLTNTIDFLMNKNNVVPRINSLILHTTHQYLNLISTSVTSDIEDFSTFFFLDSQDKSAVIAKNMYYLTPKDDSVISAVTLWIIADFDKPSGRKLLFYALKHMKTSIHCRLGVIYNPTSKINEENTAISRGILAAFLTQKNSFLRSLLMKLAKEETAKAIYSGEKIQTFLTEGMDKNTFEKKYNTIGVNVFRTHQLFCQDVLKLRPGELGIVSNGKFLGPLDKEFYVEDFYLLEKMTFSNSLEKIKGIVENMDINSKNMSDLIMKVDALICSLPKRASRYDVTFLKENHSIIKINPQENDMVFDVIAIVDPLTREAQKMAQLLVVLGKIINMKIKLFMNCKGKLSEAPLKSFYRFVLEPELISGANDIPSLGPVAKFLDIPESPLLTLNMITPEGWLVETVHSNCDLDNIHLKDTERTVMAEYELEYLLLEGHCFDTMTEQPPQGLQFTLGTKNKPVMVDTIVMANLGYFQLKANPGAWILKLRQGKSEDIYEIVGHDGTDSQPELEDVLVVLNSFKSKILQVQVQKKPDKIKEDILTDKDEKQKGMWDSIKSFTISLHKEDKKEKDVLNIFSVASGHLYERFLRIMMLSVLRNTKTPVKFWFLKNYLSPTFKEIIPYMAKEYGFQYELVQYKWPRWLHPQTEKQRIIWGYKILFLDVLFPLAVDKIIFVDADQIVRHDLKELRDFNLDGAPYGYTPFCDSRTEMDGYRFWKKGYWASHLLRRKYHISALYVVDLKKFRRIAAGDRLRGQYQALSQDPNSLSNLDQDLPNNMIYQVAIKSLPQDWLWCETWCDDESKQRAKTIDLCNNPKTKEPKLKAAARIVPEWVEYDAEIKQLLDHLENKKENEGIYNLYTNSLDNEIVQDQDVRKILYLDQARKSQK

SEQ ID NO: 4407 - protein, 1483 aa, Cyphellophora europaea
MRPQKVPWRGALILSLACLLESHAAWASHSVNVALQTSFNAAPFLVELLETAAAESPASYFPLLDRIAQRTFAEAQTEKELYERFIQVLQDDGHFTDGESLASFKFALSLHEAAPRIEAHFQYYNATVQPHMMAAQDAVCPVWVHFDGQQYCSPALERAQQPVAFETSENVLPFDRVLGPAEAPASIIYADITHPLFADFHNTISETARDGTTSYRIRYRPSETRSEPVPLSGYGVELNLKRTDYIVIDDREAGSADEVKQDAAKEPDANDELQIKSLTTSELYSLGLNAASWVASNPNPMQALLQVSTDFPKYSSFLASQDANEDFLKEHLSNREILLPSGFNALWINGLQIENRQVNAYSLLEHLRRERKLIGQMKDIGLTPTEAVNILAHEVIAESARNAADHRFDWRDDLEGGEVIIFMNDLEQDKRYTGWPTSLTGLFQRTYPGQLPAVARDIHNIIVPFEVDNLKDLELVTTALQSLIKRKVPIRIGLVPIGASKAAQTYGKLSYHLLDTYGLATFLSFYQETVKSGKLAAQPEKLFAATIKERKLRQDKTALSYTEVLESEELEQRLRHRDAYVDRLELRGSTAPFIVNGVVLARTESWFETMSQRVYMDLQVIMQAVYEGSLPEDASARDHLIAEAITRRNELVIPHDLKDIKVVDVAALTADHADAFAKMPRIVGAEAVLMADRAHMLVVADLNTEDGRSLASAAVEFQTKVPEIEVMLVHSAGDPSEPGISTLMYHWQRETGPKLSAEQQAKVQAFLGGSDAKIRMPQEVQQEAAQYWALANGLIRDLGLKAGENGLWLNGRMLGPLRRSLGVEDLQLLLDFERSARLAPVTMAVAATGLEDKFKEPLDVAKITAVVARSQKSELPEGMRDSAPLLRLDRYRLWNDTHTAITVGTSDDPTLQVVAVLDPVSEVSQPWISILHTLSELEGVNLKIFLNPRGQLTELPSKRFYRQVLGSAPSFDADGIRVSPKASFNKLPEDTLFNLDLILPPSWLVAPKTSVDDLDNIKFSGTEHDVHAVYELEHILIEGHARDVTVNPPPRGVQLLLGTAEDPHFTDTIIMANLGYFQFKANPGYWQISLKPGRSSKIYNLDSVGPDGYLAVPGDETSSVALMSFQGTTLFPRLSRKPGMEEAEVLESTTPGSAMDYLNKGASFASSALSSLGIKTSSTTNADINIFSVASGHLYERMLNIMMVSVMKHTKHSVKFWFIEQFLSPAFKSTLPSLAEHYGFEYEMVTYKWPHWLRAQTEKQREIWGYKILFLDVLFPVDLDKVIFVDADQIVRTDMMELNKVNLKGAPYGFTPMCDSRTEMEGFRFWKQGYWETYLRGKPYHISALYVVDLKKFREVAAGDRLRQQYHSLSADPASLSNLDQDLPNHMQHNLPIFSLPQEWLWCETWCSDESLKDAKTIDLCNNPQTKEPKLDRARRQVPEWTEYDNEIREVIAKARGDVPAMQQAGDSVAQADAQTPLKKDEL

SEQ ID NO: 4408 - protein, 1424 aa, Candida auris
MLAHIWLCILVVSASSVSVKLHADWPEAPFALQLIEAVSSYNESLYAQAVRALYQRETEADDWDEDDEEGFEANQEDEGEQAALTDKSYYEAVTGNLSPVAKGMVDLNLVNKIYTPRIVAHYKHYEREVEPSLGSIEKQCAKDSFGNEITDPSASWVKYGNKIYCSDADLYALQLSKVSEKTLEFDRVVGEASKKPLLVLYGAPESPRFQSMFETLYQFSSSDKLRFTWRYVPSEGYKDRASIPGYGAVITPKEALNGTKKNSKVKYNGDLSKFLADVKQEGKPLRALDSDEYHDLSVKITALILEQPGSARYGLLEEILNNFPLYAPYLKLINNPVNFETVKSVAKSNEKKGASEDSVGLYLNGASVHKLEMDLPHVVKKLKTEVELIHKMNMLGFTTEQSKLLFSKYALMSAFKEVQYRSGDRENRYAIYKHEYDASDPSSGGLVYFNNIEKDDPYDLYDINRKEAYLGREASMLQFGQVPPLRENVHELVFAIHFSSSIQVKVFFTFAKIILDRNLPQQVGVIPLVESDEDEKVAEKFYHILSVSDAKEAFALLYQYYEAGTEAEKQAVLDKVEVSEESKGKFKNFKRTVREFSLDAPSVIVNGVIHDMKSPWQTAMTKQMGNDVRLLQQRIRNGDDTGKSLKAVLFQDSKDSRNSRVSPKDLSNIRYKEISSNLLENSYSFKKINKPNDAPGTFWLIGDFNSKIILSQFAKLLDVLETYEDKSLEIRVFSISEDNSLLINFFNKYGKAPLTDHSIEKLRAETLKAKSKVYTKISPSQAKLLEQHQIQLHQAGMLFNSRYFKLTEVFEPKELIELIEFEQRRRLSIFKDLTDAYPDIFRWKGIMHFKKSGYDDFAWFDLVSSVVARSFFLEDSQFQADVDRFDFSSLDFSNALNITDQNPMKFVDVLAFVNPFTGASQKIVSIVKSLKDLSFVNVQILMQPLEAVPESKSVDRFYSSAFETSLPRFNDQGAFVGSCHAAGFDALVSSTKYSSELDTPSRWLHVKDSIGDLDHDEFEPGSVHELNYTLDSLIVEGYAKDVKTAQSIATLTLEVTNGEAVFDAIVMHTLGYVQFQLKPDVWNLEIQKGSKGRQIYNLLSASDNKYDTNDLPLEHTELGVFSLHGSVIHPRLQEKSEKEIARAKKEVLVAKNADVNVFSLASGKLYERFLSTMMVSVKKHTKSTVKFWLLRNFLSAEFVNRLPILADNYGFEYEFVSYKWPLWLRQQKKKISPEKVIFVDADQIARVDLQELVDTDLKGKVYGFPPMCDSREETEGYRFWKQGYWKNVLKNDLVYHISALFVVDLKQFRMHYAGDRLRTHYQKLSSDKDSLANLDQDLPNNMQRSIPIHTLHQDWLWCETWCSDETKDRAKMIDLCSDPFRKEGKLERVQRSIPEWVHYDAEIQRLQKNGLENGSTANVPHDEL

SEQ ID NO: 4409 - protein, 1440 aa, Metschnikowia pulcherrima
MHLLQLLAIFATFSCHVLAAALTVNLHANWTDLPFEVQLVEAISSYDEALYILSMKLLFGNENEAGSEWDDDSDDDVEKNEHFALDLMGISPHNQIHTGIGPVTHGNLYSKLVMTLTKTQFGFLNLNLVNSLYSPRIRAHYDHYNTEIGPIFEHKVRKQCAKDSFGEPIADPLAVWVKYGSRIYCSEQDLYALQLDRTSEHLLPFDRPIGSDANAPILVLYGDPSSERFSGILSTLLLLAEAGNLQFVWRYVPPTESAPMELSGYGTTLTVLEKKQALPKANTPYTSLYDFYSQHANSPVHDVPEDRLPQISAKIASLVLDLPPKQRFEELCFILQNLPKYAAHLADLVPPSNFKAVSASARANEQKGASRDLIGLSINGAMVHRLETDLPNIVNKLRDEVKFIEDMELLGFTIAQAKKMFSKFALLSAYKENEYRTGSANNRFTLYQDTFRADDTSSGGVVFFNDLGLDENYNLYSTDRYKVYIEEASQFRHGQIPPLKENVHDIIFVVNFSSKSQLKVFFAMSKMILDKGIPQQLGILPLVETEKDARITQMFYHILEVGELKEALAFLYKYLDAKTEDEEQLFSLVANPGEKSYLQYENTLSKYSITEPSVVINGVIMNMRSTKWQAQMGQQIVHDVKLLQNAIRQGNDKNTPLKEVLYSGSKGFRNLRVTPKDPGNIRYKRITRDLIDASVAFKKDVDLSRASITFWLIGDFNTQVILDQFKQILGFMRQYNGRSTQARVFNTAKNSDILNGLVAEYANQLLTSSMFRKMTKAVGDMRIQTFSEPDPAKVKILERNQIQLHQSSLLFNSRQFRLDTVFSVQELQQIVQYEFPQRLDTIDEILRAYPEDFAYQSITDFKPDLFDDMDWFDLLTSLITMSFNMEDSMVRTDVARFDFSSLNFDNAISLRKYDSNKPLDILIVIDPIDEFSQKLVSMVQSLRDLPFVNIKVLLQPLSLAEGPTALNRFYASAFSPLVPNFDITERFEKASPGVFSNVPESRYRVKVDTPNRWLVVKNESRAGLDMENLELSKEIECVDFVLKGLAVEAFVRDVKTGAAVPGLAIEAKNNKHVTHEGLTMETMGYNQLRLEPGVWLLQVKAGDYDLLSADANRYISNDQKMTSLPLSVFSLAGDLIHVRTRENKALMDHSSRVTSKHADINVFSIASGLNYERLMAIMMLSVKAHTKSLVKFWLLEDFLSNQFRAQLPDLAATYKFEYELISYKWPLWLRQQTEAHRIVWAYKILFLDVLFPADLDKVIFVDADQIARTDLIELVNHDLEGKPYGFTPMCDSREDMQAFRFWDQGYWKTVLKDDLKYHISALFVVDLNVFRENAVGDKLRSHYQKLSSDPNSLSNLDQDLPNNMQRQVPIHSLPQEWLWCETWCSQALKKDAKMIDLCNDPASSESKLERAKRLIPEWTTYNQQLQKLGTGKLAIDHDEL

SEQ ID NO: 4410 - protein, 1534 aa, Gekko japonicus
MGTLIALIGIWVSCSLVNADSKAVTTSLTTKWFSTPLLLEASEFLAEESQEKFWSFVETCQDFGSSNRDGTEYSYHNAVLKAASQNLSPLQQNLLKFALSLRSYSATVQAFQQIAADEPSLKGCNAFFVVHGEKTCEFDKLGILLQTASERPKPFMFKGDHKYPVSNPESPVVIMYAEIGSEELSRYHRLLVSQAKAGEITYILRHYIANPSKEKVYLSGYGVELAIKSTEYKAKDDTQVKGADTNATVIGENDPIDEVLGFLFGKLRQLYPTLQEELKEFRKYLVESTNEMAPLKVWQLQDLSFQTAARILTAPTVDALMVMKDLSQNFPTKARAITKTVVSSELRSEAEGNQKYFKGTLGLQPGDSALFINGLQIDLDTQDIFSLFDVLRNEARVMEGLHSLGIVGHSMHSVLKLNIQPSDSDYAVDIRSPAIYWINNLEVDSKYSSWPSSVQELLRPTFPGVIRQIRKNFHNFVLIVDPSHENTVELLSLAEMFLSNHIPLRIGLVFVVDDSEDVDGLQDAGVALLRAYNYVAQEVDHNYAFQTVISIYNKVSTGERLKVEHVVSVLEKQYPYVEVTSILGVDSAYDQNRKEGHGYYKQTGVGPLPIVLFNGMPFQKEQLDPDELETVTMHKILETTSFFQRAVYLGELSNDQDVVEYIMNQPNVVPRINSRILMADREYLDLTATNNFYVDDFARFTVLDSKDKTAAIANSMTYLSKKGMSSKEIYDDSFVRPVTFWIVGDLDKPSGRQLLYDAIKHQKSSNHVRIGMINNPTEDPARENTVIARAIWAALQTQTSNIAKNFITKLAKEENAKELKAGAAITEFAVGGMDMDTFEDAFQSPKVDFILSHAMYSRDVLKLRKGQRAVISNGRIIGPLEDGELFNQDDFHLLENIMLKTSGQKIKSHVQELGVEEDLASDLVMKVDALLSAQPKGEARMENLFFEDRHSAIKLRPKEGETYFDIVAIVDPATREAQRLAPLLMVLNKVINMNLVVFMNCQSRLSDMPLKSFYRYVLEPEITFTPDKLFIPGPVATFLDMPQSPLFTLNLNTPESWMVESVRTTYDLDNIYLEEVESVVAAEYELEHLLLEGHCYDITTGQPPRGLQFTLGTSTSPVVVDTIVMANLGYFQLKANPGARILRLRKGRSEDIYRIYSHDGTDSPPDASEVVVVINSFKSKIIKVKVQKKLDMINEDLLSDGTSENESGFWESLKWGFTGGQKKEELKQDKDDVINIFSVASGHLYERFLRIMMLSVLKHTKTPVKFWFLKNYLSPTFKEFIPYMAEKYSFQYELVQYKWPRWLHQQTEKQRIIWGYKILFLDVLFPLAVDKFLFVDADQIVRTDLKELRDFNLDGAPYGYTPFCDSRREMDGYRFWQSGYWASHLAGRKYHISALYVVDLKKFRKIAAGDRLRGQYQGLSQDPNSLSNLDQDLPNNMIHQVPIKSLPQEWLWCETWCDDSSKKRAKTIDLCNNPMTKEPKLEAAVRIVPEWQDYDQEIKQLYSRFQQEKATGALSKTNETEQPSQEGVSAHIEL

SEQ ID NO: 4411 - protein, 1655 aa, Hydnomerulius pinastri
MALPCTLLTFTGAVLSALGAYGASPPVTVSLRSSFAASDPLLEAIETVAMEDSSVLFPLLSAFSLPGKPLTPQEAHTIVFDLASTHLDWSALASARARLGLHVASPRLAASAEYYDIHIANLTDSHKLHSPGCASWVDWYGQVVCDADTLLQLANSGNNDISATKPKHLPLDHVHKLPPSLEGPQYTAIHFAEPTAPSFAPLHSALLSLEPKVEYVLRWAKGTGERKDGDLSSHLSGYGVALDLKKMDYLVLDDRNQHQGDSDARETSHGDKVEGTEKLLSEEEILTCVFDSLPYIDEEAEARAKAGEPLSPEEIADLGVKAVQFIMSFSDRPRGGPLYIHPCWNNHHMAPFPSVILSRTLSTSFPLYATSLARKIKISPKLGDEVYDNWAKAAPGINMAWVNGRVISENEGSAANIFGLLRTMQRERNLVKYLVDLGLTSEQAIELLMHPAHSATSQPSSSTPPATSRKGMMRGSAKSFVVQDDGDDMNDAELETKTFNVSPKFAGFLEGLVDASDRQEGGGVVLYWNDIEKDQRYARFSPSIQGLLRVHMMSLFSPMNQIRLNLVNVIFVLDLSQTRSLSLLGSLSDGFVARGFPIRWGFVPEGEGDGLRMARLVYYVEHKYGRDRMEEFIQRLSQAHDELRLTSLSWQLVHEIFNSLHAEDDFAAVAGGDIPILDEATGEDIMTRAQKYARRLGVVTQSETGKGHAFVNGRYIPVSDTLMRQLAGEATTQLQILQEMVYMGDITDADAHLMSTFFYDLPSTLSRRNPYIFAKSTASGGHSLDGTGLQMFNLAELFSNAGFEQKDGSFAVPRDSDALPVTMYIIADFDSSEGVQLAEEALRFITNPAQTRVTFIHNPEGMTTSDISTLLSTLVHTGSLHDVPPSRLLEALSGGEGDAETQKAFSDEFVAGKGLGNADTFGVLQTSRLVTRQLGLEPGQRAILINGRLVGPFDSGSEFVAEDFEMLEAFEIKQRVGRVTEAIDAVLDGGDALDIHKHANLVSTASSIIYADQQPDPSEAGLFDTVPRPRTRNYRLLSDDYTKLEFGDRSTAQSHIALLLDPLSEAAQKWSTVLEHCFELFPEIFVELYFNPTQLSEIPLKRFYRYNAIPQLTYDANGQEIPAQVTFTGLPIEPIYTLSMDVPPSWLVRPREALYDLDNIQLGKLPSEERSSGIQALFALDYLVVEGHARELKTSNPPRGVQLQLISSKDGSAIDDTQVVANLGYLQFKARPGTFRLEIREGRGREIYDLESVGSEGWNSLSVVQAGDELTVMSFDGLTLYPRLARKPGMERVDVLDGLQAPVEESASMMESFVSRMASLFKSKDEGKDTQAVVAQGDGQADINIFTVASGLLYERFASIMIVSVLRNTNSSVKFWFIENFLSPSFLEFIPHMAEEYGFQYELVTYKWPSWLRAQKEKQRIIWAYKILFLDVLFPMDLKKVIFVDADQIVRADLQELVDLNLHGAPYGYTPMGDDNYEMEGFRFWKTGYWHDFLDGRPYHISALYVVDLVRFRQMAAGDILRGQYQMLSADPNSLANLDQDLPNNLQKDVPIYSLNEDWLWCETWCSKDRLSRAKTIDLCQNPMTKEPKLSRARQIPEWEEYDTEIAQFARKLAAQGKIHASVATADSNLLAGGNAPSSSGETPKEDASHPHDEL

SEQ ID NO: 4412 - protein, 1162 aa, Camelus dromedarius
MLRLEGKLMHGLHNLGVDKEDVSELLKLSSHNWDDIYALDIRHSSIMWINDLESDDLYVSWPANCREVLKPVFPGSIPSIRRNFHNLVLFIDPAQEYTLEFIKLAEHFYFYKVPLRIGFVFIVNIDDEVDGTADAGVALWRAFQYIAEEYDTTQAFISIVNMYKKVENRNILTVDNVKSVLQSTFPHANIWDILGTYSKYDGKREAGANFYKMTGLGPLPQSLYNGEPLQDEDFVKLEVAILQRMVDTTVELQKYVLTGILNDQTDTVDFLMVMNNAVPRINPLILHTEWQYLNLISTSVTADIEDFSTFFFLDSQDKSAVIAENMHYLTPEDDRLSPVTFWIIADFDKPSGRKLLFKALKHMKTSVHSRLGVIYNPTSKIDEENTAISRGILAAFLTQEKRFLRKFLRKLTKEETATAIYSGVKIKTFLAEGMDKNAFEKKYNTIGLNIFQTHQLFCQDVLKLLPGEIGVVNNGRFLGPLDENFYAEDFYLLEKITLTSLGEEIEDFAQSTKTIDLKVMSDFVMKFDALVSSLPQSASRYDITFLKENHSIIKINSLEDDMVFDVIAIVDPLTREAQKMAQLLIIFTDLLPVQSFYRFVLEPELMLTANGIVGPAAKFLGIPEAPLLTLNMITPEGWLVEIVRSNCDLDNIHLKDVEGAVTAEYELEYLLLEGHCFDVTTEQAPRGLQFTLGTKNRPVMVDTIVMANLGYFQLKANPGAWILKLRQGKSEDIYQIIGHKGTDSEPDLGDVIVVLNSFKSKILDVQVQKKPDKIKEDILSSKNEEKKKGMWDSIKSFTRRLHTKRDTQETDVLNIFSVASGHLYERFLRIMMLSVLRNTKTPVKFWFLKNYLSPTFKEVIPHMAKEYGFQYELVQYRWPRWLHQQTEKQRIIWGYKILFLDVLFPLAVDKIIFVDADQIVRHDLRELRDFDLGGAPYGYTPFCDSRKEMDGYRFWKRGYWASHLLRRKYHISALYVVDLKKFRRIAAGDRLRGQYQTLSKDPHSLSNLDQDLPNYMIYQVAIKSLPQDWLWCETWCDDESKQRAKTIDLCNNPKTKEPKLKAAARIVPEWVEYDAEIRQLLDHLDNKKTTARSGCSARTRTSPASLPHKPIKSKMALLAAAQLQSPLLSDAAAPVPHKLRGQSPSEALLTEGTTSMHPPVLQ

SEQ ID NO: 4413 - protein, 874 aa, Trichophyton rubrum
MHFLIDRLFKDVQGLQRRIYEGEYKEDVWLPSFYLEEASPKFNAFIIPDDPSDITLKSINDAYSKYKEAFETIPRIPGERGSGIEEWAQLALVIDLDDEHGAKQLANVVAFHKANPGVEVLILHKPSMPENGQGLSTELHKLLDDGRDLEIDALDALLDKETKSERTSTDAQRFYSTIQPVITELGADGNGMHIILNGRLIGPLNQTTVLDTQDLELVLQYERSKRLTPVVSALESLEETDKIRDHLAFARLTSMVALSTISDIPEGTFQRPPMIRTEIFNSWVTKHSAITVSKSEAPLIKIVATLDPATEVAQRWIPILKVLSQLHGVSLQIFLTPLEAIKELPVKRFYRHVLEPAPSFYDDGSLNRPGASFHGVPQEALLNLGMDVPPSWLVAPKDSVHDLDNIKLSSLKEGTNVDAIYELEHILIEGHSRDISRNKPPRGVQLLLGTERDPHFTDTIIMANLGYFQFKAQPGHWQITLKPGRSDNIFNLDSVGGMGYSPKPGDDNNEVSLLSFQGKTLFPRLSRKPGHESDDVLEDGSKKQGSAKNLLSQGLDFASGVFSGVSKTRKEKHADINIFSVASGHLYERMLNIMMLSVTKHTKHSVKFWFIEQFLSPSFKTFVPHLAEKYGFSYEMVTYKWPHWLRPQREKQREIWGYKILFLDVLFPLSLDKVIFVDADQIVRTDMYDLVSLDLEGAPYGFTPMCDSRTEIEGFRFWNQGYWKRFLRGRPYHISALYVVDLNRFRAIAAGDRLRGQYQSLSADPESLSNLDQDLPNHMQHSIPIKSLPQDWLWCETWCSDESLKTAKTIDLCNNPMTKEPKLDRARRQVPEWTVYDEEIAQLARTVGAKDTESDHTQKEAEKTEPEDMNKDEL

SEQ ID NO: 4414 - protein, 1532 aa, Oryzias melastigma
MKYAVLLTLLLLLNVHQVKSASKGVTASLKAKWNMTPFLLETSEFIGEDGNEKFWQFVDTVKELTVYKQGESVRSYYNLIIKKAGQFLTDLQAHLLKFALALRSYSPAIHSSQQIASDEPPPEGCSAFVSVHGQQSCSTKDIKKLLKAAAGRPKPYLYKNDHTYPGVNKSDLSVVILYAEIGTKKFSSFHKVLSEKAEEGKLVYVLRHFLVDPKPAKMLLSGYGVELAVKSTEYKAVDDTKVKDSKSVTNAGEDDNDEVQGFFFGTLKKSHPELQEHLGELRKHLLESTNDMAPLKVWEMQDLSFQAAARIMSVPKFDSLKVMKDLSQNFPSRARSLTRVAVTREMRKEIEENQKYLSESLGVHPGDGELFINGLHIDLDVHNPFSILEILRGEAKILEGLHNLEIKGEHQGKLLSLPVNTVDDSYALDIRHPAIMWMNDIENDHIYQNWPSSLQELLRATFPGVIRQIRRNFFNMVLFLDPLQEESVELLKLAELFYKHKIPLRIGFVFVVNPKDDIDGFSDAGVGFYRLLNYIADEYDVPQAVMSMISLYNKMDVGETLSADAISAYLKRKYPKADPENVLGTESEYDYKRKDGALFYKKSGLDALPLALFNGIPLNPDEMDPEELETIILQRIMDSTTTFQRAVFMGQLAEGMDVVDHLMEQANVVPRMNPLILSTDRKYLDFTGRPVVDDWSDTSMFSFLDSRDRTAVMAKRMKYFTKSDEDGMTAVNMWIVGDFEKVPGRKLLLNALKHVRASPGVRLGVIDNPSGKPSEDNTVLYRAVWASLLTQKNKAAAEFVQKLLKEESIQLLQQKTKIKDLLMQGMDVDAFEKKFNTLEVDFIRSQQLFCQDVLKLLPGQRAVISNGRIIGPLEEQEEFTEEDFHLLQKITLRGSAEKVKAQVKQMGMKSKLASDLVMKVDALLAASPKREVRRDVHFRKDTHSVLHLSQRENEVFFDVVVIVDPLTREAQKISQLLIVLSQVANVKLQVFMNCKAKLSELPLKSFYRYVLEPDVTFLANETVSPGPVARFMELPESPLLTLNMITPESWMVQAVSSPYDLDNIHLQEVNGVVTAEFELEHLLLEGHCFDLSTGQPPRGLQFTLGMSRDPLMYDTIVMANLGYFQLKANPGAWILRLRKGRSEDIYQILTHDGTDSPADAGDVIVVLNSFHSKIIKVRVQKKAEKINEDLLSETTEGKGIWDSIVSVWSAFKRSIAGGGGSKKDDGEKKKEDDLNIFSVASGHLYERFLRIMMVSVLRHTRTPVKFWFLKNYLSPSFKETISHMAEKYGFQYELVQYKWPRWLHQQTEKQRIIWGYKILFLDVLFPLAVDKIIFVDADQIVRADLKELRDLDLEGAPYGYTPFCDSRREMDGYRFWKSGYWASHLGHRKYHISALYVVDLKKFRKIAAGDRLRGQYQALSQDPNSLSNLDQDLPNNMIHQVAIKSLPQEWLWCETWCDDSSKQTAKTIDLCNNPKTKEPKLTAAARIVPEWVEYDSEIKELLGKVQDQEEMAAQRQTPSSSKGKEQNRRDEL

SEQ ID NO: 4415 - protein, 1518 aa, Parasteatoda tepidariorum
MMLNQVRWKPIYFLIVLILPTIAQNLHKSVSVVLDSKWIYTSLHLEASEFLAEEKPELFWRFVDDCSNLENNFFQTKSHKLQYDAITDIASNYLSSTKIALLKFALALRAYSPIVEMFHQIAYDQTFPSNCEAIVDVAGEHTCDVAHLKSLLDSSNRNASSLYEVDHVYPFSSSTASAILYGQIGSTSFNTLNRILKSYADQNKISYAVRHFVLKRQLKKVRLSGYGVELAVKSTEYKAQDDTKVKEEKGPVQEEVDKYEELEGFIFSKLNELHPSKKDKLEQLKKHIVESSKEIPSLKVWELQELSLQAGQRIIDSPIEETLRVMRDIAQNFPTQARSLIHVSVSNDMKREIERNQQTFMHHHNIGPADAGLFLNGIFFDMETTDIFTLLQYLKQETRVLEALHKLKISDKLLTNLLKMDFTEDKEEYAVDIRDLSIQYINDIENDRQYRTWPSSVQDLLRPTYPGMLRSIKKNIYHLVIVADPSKEDSRDIFKLAESFYVHKAPVRIGLLFSVNSSADGLHDGGVAFLNAFNFISQDKSPYDGLSFITEVYANVEDKDITSEKVISQFKTMYPSEDYELIFGPDSDYDTGKKAAWEFISKTGLSKPPQVLLNGVMLKQKQLTADMFEEAILTEVMRQTPFLQKSVYKGELSDSQNILDFIMEQKNVMPRLNQRVLSSDSKFVDLIGENAETVPVKDMKYFMKRDDDEFRPLTVWVVGDVDTSEGRALVSSAFAHLKATPHMRIGLIHNPKDENVNGNFRKAVDVALETLDLHTSKLFITKLFKTGNAQQIIDGEKSITDFSISNMDVESFLKNMDTFQDKHIALHKTFCKSVLKLLPGQRAVVINGRIVGPFDEDEEFIQEDFHLLEVYSKSLYSDKLVSELEKGVEKSRKNSDLVMKVASILLSQPQMKVRHELKFHGNKHSVVKIPAADTEEPAHEVVVIVDPVSKGAAKLSSILMVLQRVINAHFTIFLNCVDKHSAMPLQSFYRFVLNEEPVFGSDGNFGLAPFAKFSGLPSTPLFTLGMITPENWLVEVVKSPYDLDNIHLEQVESNVHADFELEHLLIEGHCFEQSSGNPPRGLQFTLGTKKKPEVVDTIVMANLGYFQLKANPGAWDLRLREGRSAEIYEISGSENTETLSDSSNVAVLISDFRSHIIKVKVSKKPGKQYEELLQDDTETDSGIWGTITSMPIIGGIVEEWRNIWLAMKSTFTGNKSEQEKGDDKINIFSLASGHLYERLLRIMMLSVLKNTKTPVKFWFLKNFLSPTFKDFLPFMSKKYGFEYELVQYKWPRWLNQQSEKQRIIWGYKILFLDVLFPLDVKKIIFVDADQVVRADMKELVDLDLQGAPYGYTPFCDSRRDMDGYRFWKSGYWASHLGSRKYHISALYVVDLKKFRRIAAGDRLRGQYQGLSQDPNSLSNLDQDLPNNMIHQVSIVSLPQEWLWCETWCSDDTKKYAKTIDLCNNPKTKESKLASAMRIIPEWKDYDTEIKEFHKEYEKSKTISQSTKEDKDTDTHDEL

SEQ ID NO: 4416 - protein, 1652 aa, Trypanosoma rangeli
MLTTVCRRDWGKGIRLLDATLTLLLLLGVSSVLFGALAVEGKGVQVTVTAPWTETPLLQEGCEMVAARGALVGDFYHCLQEVWQRVQAMNNVGGALGLTQKSQNDVLLDMMVKDKWSSIQVDLARMKLAARLYSPAVEAHWQLARTARKLAGGCSIEGRPFVLVAGKVVCSEDLLEDVLAAPGFADKPWKDEGDETFALFTGLDHIHPGSMGRRVIILYGVVGEEQTMRLLQVAERHLHAVRLAFRHLPVVGRMWEEALHVQGYGVTVDLKNVEYKVINEKKNDGAETDTDDADTINEAESLGPVGGFNIALLAQRYPQLRPQLTTFAGHLADMIDRDEVRVDFQMWETQHMGIAAAQQVMDAANEKRLGVLMNFMTKFPLYASKLSKMGASANKKMNTTMQEELSAFAGVLHLGTPQIFLNGRRVSSADFNLFSLLEKLEADEEVYEGVQRVLTSYRVPSANDDGFVSVNKDGLNQVVKLLTRNANQHIASSGLERDDTAPRVWLSKQKIVWLNNLEQDVRFVYMPSALRSILRMGFNGAPTIPRKNLIHVVSVVDPTTPGGAQDIGTILRLEQSSQPIRVGIVFADRKWTPQISSFTEEGSVHVQPSLSSVTAFIAATVWELMNGEEHLQEVLEFLSEITFTLVQHGSIKEEEVLGFSSNVLTLSGKRGVMDIITDPSFVEHYQATQENLRKLKLDKFPLTLINGNIFQENVMQSLRQGFLTELLHVRDLVENGALTDADNVDFYEVILRLSGARERYNDALYKDKTYMDWTLKPVLDFLHHRPFLLPPGKSKRTPLVSSVLVIQSPVGATALGALVKATSNLLQCVDETEKCMHVRLTYATCDVATEAKHRTLVGDLERLLLSRKERGDGNQRLQLVQEFLLKIIAQNKTRQLHDSEAYESWVSNVEFSAELQKLLDVFDADLSAQLQTQRGVLNGFCAQVKAEASSTVLSWSDEALAGEQKKDEETVYYYVNGRRFVYDDSFAEEDFKEADKHELSLAVAMSEALGEIDFTTLSHELQQSDLDSPFYASKVAALTELWRRSAARGSPTEEERSLPSTSGLTSFVVQPVNAGTEPRHTLTIVIDPVAQQSQLPVSLCDYVTRSPLGVSCIVHMGTPQRAVKPMRNFYQFVSELEIRFDAVGRVIPPTAVFHRLPSQHLLTLGVEEPESWTVFPLDAKYDLDNIILDKLPSSSQYVHATYRINSILLTGSAREAGRSAPARGLPLLIRSTNTNPSAGIARDTIAMAILGYFQLQSTPGVWYLTVQPGDYAETFYISQVNGIRVNDAPNNRHSDGFNYTAGQNISVVVSSFTGKFLTLDVSKAPGRERITMEDIEAAYPEHADWPPAGPRTKKPRRPTLNIFSVASGHLYERFLRMMIHSVMQTSSDIHGANTTRIKFWFIENFLSPQFKTLIPLLAKHYGFDVALVTYRWPWWLHKQTEKQRIIWAYKVLFLDVLFPLDVERVIFVDADQTVQADLHGLYNMNIGDAPTAYTPFCRKHPNPATKNFRFWDQGFWVKHLRGRPYHISAIYLVNLRRLRAIAGGDKYRMVYSQLSPDPNSLANLDQDLPNFMQEEVPIYSLPEEWLWCETWCGAESKSRAKTIDLCNNPLTKMPKLDNAKLIIPNWEETDTELEALSEKLLKQHGQQEREAN

SEQ ID NO: 4417 - protein, 1530 aa, Scleropages formosus
MIGTEHIDRMRILTVFLVWVSVVHAGTDSKAVTTSLTAKWPSTPLLLEASEFLAEESQEKFWDFVELNQELKNIDEGSDQFYYELVVERASQLLSPVQLNMLRFALSLRAYSPTVHAFQQIAFNEPPPTGCKAFYSVHGMTSCNTESLKALLETALERPKPYLFKGDHTFPSSAPNSPVVILYAKIGSKDFPRFHQLMVSKANKGEITYVLRHFLSSPKNSKVFLSGYGVELAIKNQEYKAKDDTQVQGADLNATVIGESDSVDEVQGFLFGKLKTLYPELKDQLRELRKHLVESTNEMAPLKVWQMQDLSFQTAARILAAPPTDALAVMRDLSQNFPTKARFITRTVVNSEIRKEIEENQKYFKGTLGLQPGDSALFINGLHIDLDLQDIFSVFDTLRNEARVMEGLRNLLNDMPFIHDMLSLSLQPLDSDYAVDIRSPAIYWINNLETDSRYASWPSNVQELLRPTFPGVIRQIRKNFHNFVIIVDPTHQNTAELLSVAEMFLSNNIPLRIGLVFVVSDNEEVDGMDDAGVALLRAFNYIADEVDNQQAFDAVISMFNIVPRGESLKVEHVTNVLEKRYPYVEASKILGKNSVYDQNRKEGRAYYEQTGVGPLPVVLYNGMPYQRDQLEPDELETITMHKILETTSFFQRAIYLGELGSDQDVVDFIMDQPNVVPRINSRILSTSRPYLDLSSTNNHFIDDYARFLFLDTRGKNTAVANSMNYMTKKDDGIIRPVTFWVVGDFDQPTGRQLLYDAIKHMKTSNNVRLGMINNPSEGVSNITSRIARAIWAAMQTQTANNAKNLITKLCKEETAAALASGVDIAEFAVGGMDVPLFKSSYESPKVDFLLSHAAYCQDVLKLKKGQRAIISNGRIIGPLGEGEVFNQDDFLLLESIILKTSGEKIKSKVQNLGLEEDRASDLVMKVDALLSSQPKGEARVKYTFFEDRYSAVKIRPRENEMYFDVVTVVDPVTRDAQKLAPLLLVLKQLVNVNLRVFMNCQSKLSDMPLKSFYRYVLEPEISFTSDGSLAPGPVATFLDMPHSPLFTLNLNTPESWMVESVRTRYDLDNIYLEEVDSVVAAEYELEYLLLEGHCFDVTTGQPPRGLQFTLGTASDPLIVDTIVMANLGYFQLKANPGSWILKLRKGRSDDIYKIYSHEGTDSLPEADDLIVVLNNFKSKIIKVKVQKKPEKLNEELLSDGTEEEDSGLWSSLKRTFTGAEKVEDNKVEKDDVINIFSVASGHLYERFLRIMMLSVLKHTKTPVKFWFLKNYLSPTFKAKEYGFQYELVQYKWPRWLHQQTEKQRIIWGYKILFLDVLFPLAVDKILFVDADQIVRTDLKELRDFDLEGAPYGYTPFCESRREMDGYRFWKSGYWASHLAGRKYHISALYVVDLKKFRKIAAGDRLRGQYQGLSQDPNSLSNLDQDLPNNMIHQVPIKSLPQEWLWCETWCDDSSKKKAKTIDLCNNPQTKEPKLQAAVRIVAEWSEYDQELKRIYNKFLEEKERGSTADNSKISQGSKTGRFAPVTSTSQ

SEQ ID NO: 4418 - protein, 1522 aa, Boleophthalmus pectinirostris
MRNRVVSLLLLLLLLSPQHATSSKGVSASLKAKWSMTPFLLETCEFVGEDGNEKFWQFVDTVKELTVYKQGESVRSYFNLIVKKAGQFLTDLQVNLLKFALSLRTYSPAVHASQQIASDEPPPDDCTAFVSVHSQHTCSPKDIKKLLKAAAGRPKPYLYKDDHIYPGGNKTEVPIVVLYAEIGTKKFTSFHKVLSEKAEEGTLLYVLRHYIEKSQPKPMLLSGYGVELAIKSTEYKAVDDTQVKDSRAPLAGDDDGNDEVQGFLFGTLKKAHPELKEELGELRKHLLESMNDLAPLKVWELQDLSFQAATKILSAPKFDTLKIMQDLSQNFPSKARSLTRVAVKQEMRKEIEENQKHLSETVGVHPGDGELFINGLHIDLDVHNPFSILDILRGEAKVLEGLHNLGIKGEHQAKLLRLPVSHVDDSYALDIRDPAIMWFNDIENDPMYRSWPSGVQELLRATFPGVIRQIRRNFFNLVLFLDPVQEESVELMKLAELFYKHKIPLRIGFVFVVNTKEEIDGFSDAGVGFYRLLNYIAEEYDLSQALLSTVSLYNKVDAGEQLSVDTISAYLKRKFPKANAERILGPDSEYDERRKEGALFYKKSGLGALPLALFNGVPLSPDEMDPDELETVLLQRIMDTTNVFQRAVFMGQLTEGTDVVDYLMEQANVVPRMNSIILSNDRKYLDFTANPIVHDWEDTTMFSYLDSRDKTAVVAKKMKYFSTSDSNEVNAVTMWVVGDFDKVSGRKLLINALKHVKVSRGVRVGVIDNPKGKLTEDNTVLYRAIWAALLTQKKKAAVEFGLKLLKEESNQLSQKGSKMKEFLLKGMDDDAFEKKFNTMEVDFIQSQQLFCQEVLKLGPGERAVISNGRILVPFNEEEEFTVDDFHLLEKITLSGSAEKVLAKVQEMGIKPKQAIDLVMKVDALLNTAPKGEVRRDIRFLKDTHSVLHLSPREHEVFYDVVAIVDPLTRAAQKLSSLLNVLGQVVNMRLQLFMNCKSKLSEMPLKSFYRFVLDPDVKFLANDTVSAGPVARFLDLPESPLLTLNMITPESWMVQAVNSPHDLDNIHLLEVSGIVSAEYELEHLLLEGHCFDLSTGQPPRGLQFTLGMSQNPLMYDTIVMANLGYFQLKTNPGAWILRLRKGRSEDIYQIVAHDGTDSPADAGDVIVVLNSFHSKIIKVRVQKKPDKINEDLLSESTESGGIWDSIASITGGGSKKEDADKKKEDVLNIFSVASGHLYERFLRIMMLSVLRHTQTPVKFWFLKNYLSPSFKETIHHMAQAYGFQYELVQYKWPRWLHQQTEKQRIIWGYKILFLDVLFPLAVDKIIFVDADQIVRADLKELRDLDLEGAPYGYTPFCDSRKEMDGYRFWKSGYWASHLGHRKYHISALYVVDLKKFRKIAAGDRLRGQYQALSQDPNSLSNLDQDLPNNMIHQVAIKSLPQEWLWCETWCDDKSKTTAKTIDLCNNPKTKEPKLTAAARIVPEWVEYDNEIKRLLRGVQEKQETVLERQGSSSRTKDIHKDEL

SEQ ID NO: 4419 - protein, 1622 aa, Fragaria vesca
MGTRLAYAFIILICLIGSVSAQNRRPKNVQVAVRAKWSATPLLLEAGELLSREHKDNFWEFIDIWHHSDKDDLDSYNAKGCLKTILKHGRSILSEPLASLFEFSLTLRSASPRLVLYRQLAEESLSSFPLVDETNSRSTSGNSETNEHVEIRKSDHLDVGLNPKSPNGKCCWVDTGGALFFDAAELKSWLHSPKDCSRDSFQQPELFEFDHIHFDSTVGSPVAVLYGALGTGCFREFHVTLVEAAKEGHVKYVVRPVLPSGCEAEIDRCGAVGAKDSLNLGGYGVELALKNMEYKAMDDSTIKKGVTLEDPRTEDLSQEVRGFIFSKFLERRPELTSEIMAFRDYLLSSIISDTLDVWELKDLGHQTAQRIVQATDPLQAMQEINQNFPTVVSSLSRMKLNDSVKDEITANQRMIPPGKSLMAMNGALINIEDVDLYLLVDLVHQDLLLADHFSKLKIPHSTARKLLSTLPPPESNMFRVDFRSNHVHYLNNLEEDAMYKRWRSNLNEILMPVFPGQLRYIRKNLFHAVSVIDPSTVCGLQSIDMLISLYENNFPMRFGVVLYSSKLIKHIETSSDDSQIEEDISTSIIRLFIYIKENHGIQTAFHFLSNIKKLRGESDGSADDLEMHHVEGAFVETVLPKVKSPPQGILLKLEREQTYKERAHESTIFVFKLGLAKLQCCLLMNGLVLDSNEEALTNSMNDEMPRIQEQVYYGHINSQTDVLNKFLSESGTTRYNPQIIAGGKPRFTSLCTSVLGGEGVFNDISYLHSPETVDDLKPVTHLLVVDVSSKKGMKLIHEALQYLIEGSDRARVGVLFSVNQGADLSTLLFVEVFQITASLHSHKKDVLHFLDQVCSFFEQNHMLAPSEGAEITQAFIDKVSELAEKNGLSSKAYKSALSDFSAEELRKRLNKVAQFLYRQLGLDSGVNGVITNGRVTVVNEESSLLSHDLSLLESVEFTQRIKHIVEIIEEVKWQDVDPDTLTSKFISDTIMFVSSSMAMRDRSSEGARFEVLNADYSAIVLNNENSSIHIDAVIDPLSPSGQKLSSILRVLWKYVQPSMRIVLNPLSSLVDLPLKNYYRYVVPTVDDFSTTDYTVNGPKAFFANMPLSKTLTMNLDVPDPWLVEPVIAVHDLDNILLENLGETRTLQAVFELEALVLTGHCSEKDHDPPRGLQLIIGTKSAPHLVDTLVMANLGYWQMKVSPGVWYLQLAPGRSSELYVLKDEGDGSQSKTLSKRITINDLRGTVVHLEVVKKKGKEHEKLLLSDVNEKTQDATEGNSWNSNFIKWASGLIGGSEHSKQSENTSWEKGKGGRHGKTINIFSIASGHLYERFLKIMILSVLKNTRRPVKFWFIKNYLSPQFKDVIPRMADEYGFEYQLITYKWPTWLHKQKEKQRIIWAYKILFLDVIFPLSLEKVIFVDADQIIRADMGELYDMDIKGRPLAYTPFCDNNKDMDGYRFWRQGFWKEHLRGRSYHISALYVVDLKKFRETAAGDNLRVFYETLSKDPNSLSNLDQDLPNYAQHTVPIFSLPQEWLWCESWCGNATKSKAKTIDLCNNPMTKEPKLQGARRIVSEWPDLDLEARQFTAKILGDEVAIQEPPPDPNQPGSVMDSPPEDLESKAEL

SEQ ID NO: 4420 - protein, 1485 aa, Helobdella robusta
MILSKSVIVNLNAKWPTTSLIAEMSEFFATRNAELYWTFVEGTTKFEFNQKTYNSFDSYKTALSVAENLLTSKQVSLLKFYLSLRYFSPMVQMHQEIADEKLSSSGHCEVFVEVENFITCELMAFKAFIRAINSSHPLVLKNDHIYPTNLKDGIHVILYGQLGTKSFNFWHDVLKQMSNDEKIIYVHRHFLKTAASTKCSLSGFGVELAIKSTEYKAKDDSKILEQSDKKNEMKKDDVIEGFNFSKLREIHPDSEKDLTEFQQFLIDGLNDMAPLKVWQLQDLSLQLAQVVLNAKENAMHVLVDLCQNFPSKTRELIKVTVKDDLRKEIKENQKYLEQALNLYPGDSAFYINGLNVGTDIIDIFNILDVVDTEMKLLDGLHQVSLQFNTTFQKLSALLHVDFKEADLSYGLDIRHPSIWYINNLESDEQYRSWPGSVQDLLRPSFPGMLRHIKKNMFHLVIFCDPVDKKSLEILKMIENFYFHSAPVRIGLMLVSLQEDEAKRNLSNSIIQMFAAIHKSRSPIDALQFLTNFDEKLGEEENLTFDAAVEYFKTKYSNEWSEVQSADHALYDLQESEDYFWRTGLMKLPQVLLNGVPFTEDEVNNEFDENVVRKLLKQTNDFQKAVFNVAGPSGLTNDIIKHLVLQKNIMPRINSQIFSENNVYIDLTQSNNNVAVASDFSYLFKNGLFRVDMLYELIYRPLTIWIVADLRFPEGRSLFNSALKHLKHTNKLRLGLIHNIDSWDSAEDVELVLAVQLAISTLKLNVAKNFINKILKEENVEMLKNREKSLSNFAVGNMEMDLFVENLNSVIPTVHSHRQFCHQVLKFGPSASGVIANGKVFGPLSKTFSFVEQDFDLLEKFSYSSFGEKISNHLKNLNIDELKSSELAMRLETLFGLNGMKEGRKQVQLPKQSASVLKMAANEEGPSFNLIAIIDPTSRIAQKLSQIIMVLCQFINCQTQIFFNSKEKLSELPLKSYYKFVLDRELYFDDDGELLSNSAIFTNLPEKSLLTLNMDTPESWFVESIYSPHDLDNIFMHEVVENNVEAVFELEKLLLEGHCYDVVSGNPPRGLQFVLGTNSTPALVDTIVMANLGYFQLKASPGLWYLRLREGKSKDLYDIVKQNPEEAKDIMVVMDSFKSKIIRVKVSKKPGKEFEDLLSGDDDDDGSEDYFGLWGSISKGSSATPKTSDEEDKTINIFSLASGHLYERFLRIMVLSVMKNTKSKVKFWFLKNYLSPSFKDFIPKMAEEYSFEYELVQYKWPRWLHQQTEKQRIIWGYKILFLDVLFPLNINKIIFVDADQVIIFNLYSLTDALVKNLTFAFAPSTFCIFLTTNMFLRFWKTGYWSSHLGHRKYHISALYVVDLKRFRRIAAGDRLRGQYQGLSQDPNSLSNLDQDLPNNMIHQVAIKSLPQEWLWCETWCSNEEKSKAKTIDLCNNPKTKEPKLEAAMRIVDEWKSYDDEIKRLWDSVYSQNETDSEQKHEGHVEL

SEQ ID NO: 4421 - protein, 1320 aa, Candida inconspicua
MIYFACVVSLILVWTSSIVNCQNISFSLQANWSKTPFKLNVLEAVSDVDNSLYEPLVLKLLGIDFDIDNNEYNIIEEFNELDDAAFYLYAKDLLNSDYKKFVVDMKIANVLNSPRIQAQVDYYNSNIKSGHKCNQDAFIVEPIGTNVYCDKDAAFMLQNHDNNMLFTDFKLSFDRMLGSHVTNKTYFIYGDFRDEYFRVMFFNMYQFVHSGKINLVWRYVDAHPSLAPEILSGYSVDVIAAEHHFTAAEDVRRHVINQLLENKFSILRNVPAETLQHYAETGIFNTADNQTEFNVEKGIYINDAKLEGYDFLNLIEIIGKEILVQEVFRKVNIDLKDSLKSLKSFTGNLSNDIEQYEQRYQIFKSPAIAFLNDIEKEPRYSKLENDDSVYRERFVIDDLPKMKQNIHQVIFIIDITQPEQINKLLEFYDVVFNNYLPIQVGVVPVVDSNRNGNMEGISKLYGTRDNLGRSKTHSYLLMLQRFLYSYRKVYERIFDEIMFPDATEDSLNSMILELKQLSESYELNVEHPLINVNGVFFELNDYESIFRQINRDSFYLHSSLMDGKIPHSIKMKSFLRRDSISLRNENVFPSNFEIVKSQILLPPNLEDFGVWIQSGLLGITKPQHDHETPITFNLIGSFENADFVQQVKEALTLVKHCSGIRLNIFDGSFSENFKYLMTISQLEEQIEYLQNEKVEKPEIRRIVENKPFSQYVKAFNIKDEDINSYIVISGRKIKLNRILNSNQLISLACYERLHRLRPIWQHYRAFLTLSKDVDIYTNFELFSWAISYSSYNMNNRNNLPFIDKADIHIDSDTELINIKLVTDLSTTSQEWFHVIELMKELDFVSVDIYFMTSTKFEESPLTWSKHHMGINPLGPKNVIEFDDLPQAYEVDVKTPSSWIISTLSSNSTHITYELRNLVVDAYLKDSEGNPMMNIPVGLLSDDQEIIEAYYSIPEDGYVQLKTSPGQWKIELEHGSDASILFDLRRKVFETIGFEREARYVSLKRKKHFVNISFNSLQPNASILERVYFKAQHLLHRRQETITADVNIFSIPTGTCEQKRLLYMIASVMKHTSSVVKFWIYDELLSAETKNHIEVLSKKLDFRYEYVYYQWPSWLPRPENKKQRAWGIQHLFLDTIFPTHVEKIVIISPIQIIKDNVMNLNKHTGDGNAIALSSISPSDIPESVNRDNILKQVFGSRKRVYVGNVAVVDLNTFRIEGIGAQLRQYFVGSYTDIMNSTNIVNTNQLYENIEAHQVPSSWLWCNGMSEFNLLDYLKDQEFGSDSINDFQFADEIMERQTLQEEIDKILNSNLLDDDVINHDEL

SEQ ID NO: 4422 - protein, 1526 aa, Bos indicus
  MOD_RES (758)..(758): Any amino acid
  MOD_RES (995)..(995): Any amino acid
MAKAAGVVRLLLGFMALWLSLLGARTASASKAVTHLRERKGRLGGGLWRLVQALQLMEAVLVFRNREFIAEESNEKFWQFLETVQELAIYKQTESDYSYNNLILKKAGQFLDNLHINLLKFAFSIRAYSPTIQMFQQIAADEPPPEGCAAFVVIHKKYTCKINEIKKLLKKATSRPRPYLFKGDHKFPTDKENLPVIILYAEMGTRAFRKFHAVLSEKAQNGEILYVLRHYIQKPSSQKMYLSGYGVELAIKSTEYKALDDTQVKTVTNTTAEDVTETNEVQGFLFGKLKERYSDLRDNLTIFQKYLIESNKEMMPLKVWELQDLSFQAASQIMSTPVYDAIKLMKDISQNFPIKARYLTRIAVNQLMREEIQENQKHLQDKFDIQPGDAGLYINGLRVDMDSYDPFSLLDMLKLEGKMMNGLHSLGLKGEDMSKFLKLSTRSWDHTYALDIRHSSIMWVNNLETDEMYLTWPSSYQELLKPVFPGSIPFIRRNFHNLVLFIDPAQEYTMDFIKVAELFYHHKIPLRIGFVFIVNTDDEVDGKNDVGVALWRAFNYIAEENGVSQAFMFIVHMYQEVENHKILTVNNVKRVLQNKFPHANIWDILGIDSKYDGERKAGTNFYKMTGLGPLPQALYNGESFDREELNFKELEMAVLHRMMDTTAYLQKEVFMGALNDRINAVDFLMGKNNVVPRINPLILHNKWQYLNLIPTSVTADVEDFSTFLFLDTQDKSAVIAENMHYVTERDDDVISSVTFWIXADFDKPSGRKLLFNALNHMKTSGHSRLGVIYNPTSKIDEENTTISRGILAAFLTLKNSFLRNFLRKLAEEKTAAAIYSGNKIKTLLTEGMDKNAFEKKYNTIGVNIFRTHHLFCRDVLKLSPGEKGVVSNGRFLGPLGEDFYAEDFYLLEKITFTKFVANIEDIVKNTEINSKNLSDLVMKIDALVSSLPKRASRYDITFLKESRSIIKINSVENDMSFDVIAIVDPLTREAQKMAXLLIVLGKIINMKLKLFMNCRSKLSEAPLKSFYRFVLEPELMLANDITGPVAKFLDIPESPLLTLNMITPEGWLVEIVHSNCDLDNIHLKDIEKAVTAEYELEYLLLEGHCFDLTTDQPPRGLQFTLGTKNKPVVVDTIVMANLGYFQLKANPGAWILKLRQGRSEDIYQIVGHEGTDSPPDLEDVIVVLNSFKSKILEVQVRKKPDKIKEDILSDKGEKKRGMWDSIKSFTRSLHKQEDNKEKDVLNIFSVASGHLYERFLRIMMLSVLRNTKTPVKFWFLKNYLSPTFKEVIPHMAEKYGFQYELVQYRWPRWLHQQTEKQRIIWGYKILFLDVLFPLAVDKIIFVDADQIVRHDLKELRDFDLGGAPYGYTPFCDSRTEMDGYRFWKTGYWASHLLRRKYHISALYVVDLKKFRRIAAGDRLRGQYQTLSQDPNSLSNLDQDLPNNMIYQVAIKSLPQEWLWCETWCDDESKKRAKTIDLCNNPKTKEPKLKAAARIVPEWVEYDTEIRQLLDHLENKKKNAVLTHDEL

SEQ ID NO: 4423 - protein, 1564 aa, Amyelois transitella
MQVTGCRIFFVCLACVFVTSATNNPTKRDERKSKSVTSFVSAKWEATPIVLELAEYLADENPDLFWSFVDGINSLKTSLESLENDKQVYDAIIGVASTLLAPAQLRMAKLALSMHMTSPTVHMFDQIATRDGAKDASCDVFVSIAKRKVCDNDVLRDILKEYDQYNPDINKQETYLLDHSYPSSDNRSLSAILYGELGFKEFATKHKILAAYADRGAINYVVRWNVKPRAKPKLRLSGYGVELQLKSTEYKSQDDSTPKESEGGEAPTPSEEEDENDPQNQIDGFNFARLKNIFPALRTPLERFRRHLSESSEELAPLKVWQMQALSMQAAVAVADAHDAGGDEALKVLTSIAQNFPMQTKSLIHINVPRSFREEVLYNQDVWASALGLRPAEPLLLVSGAQYDAEEVDVMALLAALREDIGPMNTLHALGLPKKLINTLMSLELGESYTWEEYGLDIRDSAITWLNDIEADERYRRWPSSYMELLRPTYPGMLRNLRRNIYNYVIVVDPTSFASGPPIQLGETLLRHATPVRVGLVLAPGTNALNAAVRSAFNYVAQEKNSNKEAFYFLSQLLNLKEETLTLDLVKSQLKKYASSSANINEIVAEDSEYNFGHQLAEEFVSKIGVNKYPQVLINGVPLWEEGATSMTSVELLEEALVSALSRHTARFQRAVFRGELSDSDDAVDYLMKQPHVMPRLNRRILGSETAQHLDLNGVPSSSELFAEDKIHRLMHLTGRDALATALPVLRYFTKPGKPDKVTQTIWVAGDLNHKRSRELLRNAITFMRETGGVRVAFIPNVEGTGADQSMNKVVLAAVTTLEPSKATKYVAQLLEDEGCHERQDCDILPELVPALNKYEWVLKASRVLCARSFKLRASQRAVVHNARIVGPFDDDEQFTLDDFLLLERYSNQVYGDKISEVLDKKKTSKNDVVQDDDDDSEEEIGPMNVETRLKVVSVLSGRKPRSRTAIPPGLRTEHSVVTLPPTNANEAAVEIVAVLEPASVAAQRLAPLLLVLRKVINCRIKLFLNPQDKNSDMPLKSFYRYVLEPELTFTPSGAMSGGALARFSRLPHAPLLSMELRTPPNWLVECVKSVYDLDNIRLADVDTVVHSEFELEYLLLEGHAWDTTLGTPPRGLQLILGTRENPELMDTIVMANLGYFQLKANPGAWILRLRPGRSDEIYEIVGHENTDTPAGSEDIQVLMSSFRSHVIKLRVQKRPDKQHVELLAEGDDNSGGIWNSIASSFGGGEEQEVQDETINVFSVASGHLYERFLRIMMLSVLKNTKSPVKFWFLKNYLSPSLKDILPYMAQEYGFEYELVQYQWPRWLQRQRDRQRTIWGYKILFLDVLFPLHVKKIIFVDADQIVRADLKELVELDLGGAPYGYTPFCDSRKEMEGFRFWKQGYWRNHLQGRSYHISALYVVDLKRFRRIAAGDRLRGQYQALSQDPNSLSNLDQDLPNNMIHQVAIKSLPQEWLWCETWCDENSKKYAKTIDLCNNPMTKEAKLSAAMRIVPEWKTYDEEIRALQARVRRGLYHTTDAEQEIDSAHHDDIPHESKIEKDHDQHTEL

SEQ ID NO: 4424 - protein, 1491 aa, Botrytis cinerea
MGGFTLPWGLSGALLASTYLHSICATASPAINVGLQTSFPSAPYLIELLETAATENVSSYFPLLDRIADGYFAKASTDKDLYDNFIKVLTEDGHMDAEALSSYKLALSMRVAAPRIEAQFQYYHTAAEASIKTEQSSSCPTWVLFDGHQYCSPTLDEPHGTVTGNSQTQELPFDYVLGNPTGPHSILYADITSPTFGLFHKTLVKTAREGKTSYRLRHRRAIDAGSNKPLMIPGYGVELALKRTDYIVIDDRKDDDEGTTKSKTEAKVKFEDEEVADLKPLSTSELSSLGLKASSFIMQSERPFDSLIKLSQDFPKHSSAIASHNVSSDFFAEHNYNRGKLVPAGVNVWWMNGVQMIDRQIDAIAILDILRKERRLINGVRDLGLTGPEAVQLLSHSSISEAKSDGDVQRFDWRDEIEGGSVIMWLNDIEKDKRYQEFPETLGALLQRTYPGQLPSVRKEIFNLVIPVDFSAIEDVALVAETLASFVKRKLVLHIGLVPITTSPAAVEQTRVLYHLLDVYGLSGAIAYLEASVMNGVAGPTEKSFQAATEGREVRAEKIAIPLVDLLKSDHYNDRIDAASRWTTRLSADGEFPPIFVDGVALSRDENWLQAMVQRLTADLQVIQQGVFNNLFTQESYIPDFFLSEATPRRNSLIVPESDKNLKIIDITTLSKQHGDVLSKLPKIGSDSASPKEDWAHMILVADLSSASGLELLFSAVKFRESVPALEITILHNSPGEMKTSDFSTHLFSHVQKKSDKPLVDAQVLPSLVSPEGPELDLTTQDSARTYWKEAGPLVRAAGLSPGENVILLNGRLVGPIPAGSKLNQEDFEQLISYERAKRITPVYAAMQSLGLSDKIADPLAGAKISSMVALSSVSDTPDGIFEQAPTNRISAFDVWNSSYTSIETGDSSTATIHMTVTIDPASEQGQKWVPIVKAISELEGVYLKMFLNPKERLQELPVKRFYRYVLESKPNFDDEGALIEPGASFTGVPQEALLTVKLDIPPAWLVAPKVSIHDPDNIKLSSIKADVDALYELEHILIEGHSRDMPSGSPPRGAQLILGTERDPHFADTIIMSNLGYFQFKANPGFYKIDLQSGRSSEIFKIDSIGSKGWAPGPGDDTSEVVLMSFQGATLYPRLSRKPGMEGEDVLEAKVESAMDYVSRGLNFAQGILGSKTKAAAAVEEQAEINIFSVASGHLYERMLNIMMVSVMKNTKHTVKFWFIEQFLSPSFKDFIPHLAAEYGFKYEMVTYKWPHWLRGQTEKQREIWGYKILFLDVLFPLSLDKVIFVDADQIVRTDMIELVNHDLQGAPYGFTPMCDSRTEMEGFRFWKQGYWEKFLRGLPYHISALYVVDLRRFRQIAAGDRLRQQYQSLSADPNSLSNLDQDLPNHMQQVLPIHSLPQEWLWCETWCSDESLKEARTIDLCNNPLTKEPKLDRARRQVPEWTLYDDEITAVDKKRKGINGDRNESAEGRNTKSRTLEEIVDTKTKKDEL

SEQ ID NO: 4425 - protein, 1298 aa, Rasamsonia emersonii
MFAQDRPSMWLYKLPLTLDRISWSFFYRAGANSVHTSIRETAAGENSTAYFPLLDRISEGVFEDAVTEKQLYDRFLKVVREDGHLADEESLSSFKFALAIRSAAPRIEAHYQYYNTSVQYSLGTAQDAACQVWVHMDGKQYCSSALERAQQDVAGELNPRELPFDRTFGDLSAPPAVLYADVASPVFGEFHQKLSALAKEGQVSYRVRYRPPQHEDPRPVFVTGYGVELALKRTDYIVIDDRQAEAKDEKDPKRTKVTTPDTDDLEDDSPADLKPLSSSEVDRLGLNSASFVMDSAEPFDTLLKLTRDFPKYSSSIADYNATDKFLKEYHGNRAAGFPAGRKIFWINGIQIDPRQIDAYSLLEHLRRERKLIADFKKLGLSASEAVDLLSHRALAEVQANNEPQRYDWRDDIEGGVVIIWMNNLEKDKRYEDWPTSIMALLQRTFPGQLPSVRRDIFNVIVPIDLASEADVLLLVNYIQTFIKRGVPVRFGLVPIVHSHDSTSQAKVAHHLHETYGLATLLKYFEEALSKKKIASADKSAFQAAVADRPVRSGRQSLTFEEVLQSKELDDVVLRTAKYLKRLDMEGPSPPSLVNGVVLTRNENWLQEMPMRLNRDLQLLQQGVLEEVFQEDTWLPSYFLFQAAESRNEWIIPEDASNVRIVDLPQVADSRQDVMNNLLRVASGEGHATNNVHLVVIGDFNTERGLELLTTALKLHQSHGEVEVIPLHNPDVEKPSSGISSLLYQVLTRADRTDISELLTEIESLKSSESTAEEPAYWTEAKPIVEDFGFVPGSRGVVLNGRAVGPLPSNVSLSEKDFEQLLSYERSKRLEPVSEALKALKLESKIPDTLSFAKLTSLVALSTIPDVPEGLFESTSKLRQNIFKNWNDTHSAITVSNSDDPTISIVATVDPTAELSQRWVPILKTLSKLAGVNVKIFLSPRDHIQELPIKRFYRHVLEPEPSFDEEGSLIRPGASFSGLPKEALFTLGMDVPSSWLVAPKESIHDLDNIKLSSLKEGTNIDAIYALEHILIEGHSRDTTTNSPPRGVQLLLGTDKDPHFADTIIMANLGYFQFKAQPGFWKIELKPGRSQRIFNLDSVGGMGYIPQPGDENNEVALLSFQGKTLFPRLSRKPGHENEDVLETGAKPGSAMDYVSKGLNFASGILSNVGIGPKSGTAEKHADINIFSVASGHLYERMLNIMMVSVMKHTKHTVKFWFIEQFLSPSFKSFLPHLAKEYGFSYEMVTYKWPHWLRGQKEKQREIWGYKILFLDVLFPLSLDKVIFVDADQIVRTDMYDLVSL

SEQ ID NO: 4426 - protein, 1504 aa, Trichoplax sp.
MASKGYDRFLSFLLCSLLILPISSFDDNVKSVNVALVSKWPSTPLLLEVSEFMSKQGGQTFWSFVNSINKLPDNSSDLDTYNFVMKKGQDLLQPLTLDVLKLSLSLRSYSPRVEMFLQISRHFKDKPKCAAFAQLNGKFICTTKELEAELKSSGLHSEPELYTFDHIYPTSAQASDLPVAILYGQLGENRCRELHSFLYKRAKDGQIKYVFRHFVVNEDQERLSLSGYGVELDIKSTEYKAEDDTKVDEANVDNLGSTQESSDDEVDGFLFHTLRKKYPQKLKELGQFKKHLLDDRNEVAPLKVWQLQNLGFQAAQRVLSAGNDALTTLRDISQNLPTFARPTIKFQVRNEVRKEIKANQKIFSAELGLDAGQSAMYFNGVPFALGEMTIYDLLEIIEEDSNVVSNLQKLGIAKEDQQHFIKLAAKSTFSSRVIDMRDNSVIYINNIETDQDYFRWPSSVQELLRPAFPGMLRYVRKNLYHVVFCIDPVESQSVEVIQMLDLFHRNYVPMRLGILFVSANKNKNVDGTVDASVGIVRAFSYIQESKGAQAALRWLTQLYGNSIPSAKQVVEKFKSWFGGTLVNKVLKNGGTYDNLRLESSSFFDSIGIRKLPQVIVNGVQLTDLHDIEGGIVGEYHNQMPKLQEYVQAGKISDSTNIYDYLMSQPHVIPRYSYQVFRDNLHYIKGLSRYTEESKADEVEGTSAAASIIKSVNYVISSKDSLKVRPLTFWVVVDLFTSSGKQLLLQALQYLSSSEKARVGVIHNTKSSSVLDGKRHSLIELYEALVQVDNFAEISSVKSLLSHFVEKQIDSISSLDEIRNVNVNDLKSALSEEAFQKSVYRKVQKGLEFCQSFINLEAGQNAIIANGKVYGPVSDDDPFVASDFRLVETLDWRHHLKKISKLLTKYQPGDTLDSIRMVSDMNMAISGLISDNSNYVRTQMPSLKHAHSAVTFSNSGSELGHEIVAIINPLSKDAQVMTPIIMNLLKATKVDITVLMNPASMLSEMPLNSFFRYVLEPELKFSKEGRLISKPVAQFTKIPESLLLTLNMKTPESWMVESMISVYDLDNIRLDQLNQGVKALYALEYILLEGHCFDSVTSEPPRGLQFVMGTDTDPAMVDTIVMANLGYFQMKANPGLWKLQLRPGRSENLYKIDSHDGEIGKSTDSIAISIENFKGKIIQVKVGKKPGKERESLLSDVPAGREQPGIWDSISNFVGSGTSQEGIETEFNETINIFTVASGHLYERFLRIMMLSVLKHTKNPVKFWFLKNFLSPNFKDSIPVMAKNYNFGYEYVQYKWPRWLRQQTEKQRVIWGYKILFLDVLFPLGIKKIIFVDADQIVRTDLKELMDLDLEGAPYAYTPFCDSRKEMDGFSALYVVDLKRFRLLAAGDRLRGQYQGLSADPNSLANLDQDLPNNMIHQVPIKSLPQDWLWCETWCSDGSKATAKTIDMCNNPLTKEPKLDRAIRIAEEWKDYDKEIKSVLEEYKNAESKSSSARDDHKSKRKDEL

SEQ ID NO: 4427 - protein, 1409 aa, Cyberlindnera fabianii
MLPLLPLFWTLVACQINIQLQAQWENPPFSLRLLETVSSENESYYLPALSKIAGFSVYIDDDDDAEGIQELTTDESLYHAVFDLLTPAERALFDIPLANKYHSPRIISHYKHYTDSVVPVFEKKVTSKCGNHSNTWLKFNDVVYCNPDDVYALMTDSSSTEELVSFDRLIGSSGPILVLYSNVEDVNFRPFVRNLYEAAQAGKLRFVVRYIPQGLDEKEVLSGYGIDLTLKRTDYIVIDDRDILREAQEPLGQGAKSNGALLNVHDEDIKAVGKEDIKNLGLQLSSYVMDLEDDETKLNTLVSIMEELPKYTSHLVKKEITQSFLDQVNYNQKLGISSTGTGIFINGRLLDEDEQTVFGLYDVIKDELQTVQSLGENGLNSTRSRQVIEKFALLSLYKSRSRPSTRYKLPANDSSPIVFFNDIENEQLYSSYSTDVASYIGRFQMGQIPEARTNLQTLIFMFDLSDSDHLSILNSVVQAVRSNGIAQRVGVIPLPLTEHGTTLANNLIHISKTGGMASSRKFIKSLQRSGAVPEEVTDMDYVSSHVRPFMERFDVNGPVLSVNGAFHDFDNNWVYSMTRQVGEDVNFVFGMAYQKAADTFEEVSEMFYEDALDFRNTILFPNDKSEIKYRLYDTTKKLGNVFEFTAGSKGNHLATLTLAGDYGSEFTLTQLREILTLALDSNWDLKVRMIHTSDGVSFLGRLHQALNKSVDHGLAVLDEILHEKQFSEAPPSPLVLQALSSMGVESSSFLLLNGRYVELKDRLIKAIYLKSFVQTEIDQRLSVIQDLLRTDLPASDNIHDWFENVSSLVTLSYYGESQFGAGSIPRFDLSRVRTEHSISFGERSQSLLHILAVIDPAQELSQRLISLIKAIKGLEMISVDIVLTPQQDMDALPVKRFYKGNVKGRVEFKDGSLWEEPFVTFENVPSKTLFTLDMDVPASWIVIPKKSRSDLDNVLLSQSGPVTGVYELESITIEGNAFDAVTNDPPTGLALQIDGSDTSVMTNLGYFQLKANPGIWNLSIKEGRSSDLYDLVSESELSLFTLKGLHIRSSMKKKSGREGESLLSADEDAVIAKDRGSKLTSWFSRDQKKKKQADINIFSVASGHLYERLLSIMTVSVMRHTSHTVKFWLIDNYMSPSFREFLPYLAEKYGFEYELITYKWPSWLRSQREKQRTIWGYKILFLDVLFPQDLEKVIFVDADQIVRTDMIELVEMDLEGAPYGYTPMGDSRKEMEGFRFWKQGYWKKFLGDNLKYHISALYVIDLKKFRSIAAGDLLRQHYQALSRDPESLSNLDQDLPNNLQQQLKIFSLPQDWLWCETWCDDESLKTAKTIDLCNNPLTKEPKLDRARRQIPEWTVYDDEISALMKETVYLGQGIGDNEKESKAEEEVVRSEVKLNDYLKDEPDLEHDEL

SEQ ID NO: 4428 - protein, 1547 aa, Lentinula edodes
MLLLLPFPAPPFLVEIIETVSLENSKAFFPFLDRVTDPDVVIITPNEAPEAIYSSSLEVAKNMGLFSESGALAFVEMSLALHAATPKIEAFYHHYTETVEQSARRKECGSWVDWYGSVVCDVESLAQLAGLDTIDSMENYSSNYTRPKILPFDHIYPPPDSRLETPPRTAILYASLASPNFRELHTYLMRLTGHAEHRIEYILRHVPPENLDTSKRSYLSGYSVALDLKKMDYLALDDRHLGTQRDDPSLSDDQEVEAPVVDPIFSLLDGYPENSTAPDANTPPTEDELHTIGFQASQLIMDSSNPLLTLMHLSQNFPKYVTTLARRVSVNEDLAQEVHENQLRVQGGANAMWINGVSVAEKDLNAFGLSRLLKKERGIMMQLIGLDLERGEAIELLTHPILSAAQDSKDVLDGLVDASDRAEGGDVIIWWNDLEKDKRYNQWGASITGLLRPLYPGQFHMLKLNLFNVVLVLDLSRPANLVFVAGTMHSIIERGFPFHFGVVPIVETEDGARMARLVYFLLNNFGRKITMNFLKRVAHPFTMPGAQGSLQWSNVRHEYDGLMVAEANAGATTDQTSVDFESVVSGTNSIFKSLDGVQAYTNRLSATLSVFPSGHGFINGKHFAFDESFLRNMQTEISRQLMHLQEEIYEGHLTEEDNGRISSYFFDLPTTARRRNKYIVPSKENLDIISLPELQKDSSSIFAPSSFVYPTEAEVIPMTLFVLADLNAKDGLDFVKEALLSMEKNSTARLGFVHNPATEGVSQGVSISSIFAHLVDHKQLSKTSPEELLQALNGGQHASEVDESNTQVPFSTVRALKNALKLDHLDNHKPNEQSGFLDACQWFVRSIGVEPGQNGIVINGRIVEPIIPNEFLAADFQALQEYELLKRIQPVLSALEDIRPGFKSLDRATITHIVSMASSIISAIQVPDPSEVGLFDAPRRPRNRNYQTLETKHTLFEVGDNSTALYQWISHIPDTYLEIRLNPTQYGEVPLKRFFRYNLRSSLSFDETGQEVSSQTVFENLPLEPIYTLAMDVPSSWLVRPREAMYDLDNIQLGSLAPEDFSVDTIFDLDYIVVEGHARDTTTQSPPRGVQIQLVSGSMPIDDTQVVANLGYFQFKTKPGVFKLEIREGRGRDIFVTESVGNEGWNSPSVDEVGNEITVTSFEGQTLYPRFSRLPGMEREDVLAEEEEEESSSVFESMFASVKSLFGTSEETGIVETADEQADINIFTVASGLLYERFVGIMILSVLRNTKSTVKFWFIENFLSPSFLEFIPHLAEAYNFKYELVTYKWPSWLRAQKEKQRIIWAYKILFLDVLFPMDLKKVIFVDADQIVRADLQELVDLDLHGAPYGYTPMGDDNEAMEGFRFWKTGYWADFLQGRPYHISALYVVDLVRFRQIAAGDILRGSYQQLSMDPNSLANLDQDLPNNLQREVPIFSLDEDWLWCETWCSKDRLHRAKTIDLCQNPLTKEPKLARARQIPEWEEYDSEIAKFARKLSEEGKIRSRIAAADANALARTASGAASLSPESDGLDDAEKEADEKKPDLRDEL

SEQ ID NO: 4429 - protein, 725 aa, Nilaparvata lugens
  MOD_RES (57)..(62): Any amino acid
NVDWPSVDRKVEEHRSFAKQVAWLEGGQLGIITNGRLLGPLADDEEFTVDDYGLLEXXXXXXFSLSAHVEKIHKTLNEGVELGEDMVSSDVLMKTVSLLVARPQTKSRFQVKAAGEKHSVIHLPAAVAEQPAFDITVIVDPVSRGAQKMAPILTVLRHVVNCHIRIFLNCLEKNSDMPLKSFYRYVLEPEVQFTADGHLASGPYAKFTNMPGAPLLTQNMHVPENWLVESIVSPYDLDNIRLEEVESAVHSQFELEHLLLEGHCFEATMGNPPRGLQMTLGTETQPVVVDTIVMANLGYFQLKANPGAWLLRLRQGRSAEIFDITSHEGSDTPVNSTDIKVLISSFRSHVLKLRVTKKPDKIGMDLLGEDDDSQPGLWNSITSTFGSTKEEQVEAETINIFSVASGHLYERFLRIMMLSVLKNTKSPVKFWFLKNYLSPTFKDFLPRMSKEYGFQYELVQYKWPRWLHQQTEKQRIIWGYKILFLDVLFPLDVKKIIFVDADQMLIRFWKHGYWRNHLQGRRYHISALYVVDLRRFRKIAAGDRLRGQYQALSQDPNSLSNLDQDLPNNMIHQVAIKSLPQEWLWCETWCDDESKKSAKTIDLCNNPLTKEAKLTAAMRIVDEWKDYDAEIKALQLKLGATEEHEEEDHSDQQTHDKNQVGKGVVVFLDRRHWLGHVFRHNEFTLRKLEGIIIGLRARGRPRLQYRKQTLETQGARAATAKRHDW

SEQ ID NO: 4430 - protein, 1488 aa, Talaromyces cellulolyticus
MMRAPLLGLATSLLVLLQPQSVVASPSVNVALRASFDAAPYLVELLETAAQENATAYFPLLDRIASGFFEDATNDKDLYESFLQVLIQDKHLANKESLDSFKFALAIRSAAPRIQAHYQYYNTSVTSTLGTAQDAACPVWVHWDGKQYCSSTLERAQQDISGDKDPRKLPFDRTLGDTSATPAVLYADIASPMFADYHRTLKRLADEGQIAYRVRYRPVHDGGSKPLFVSGYGVELTLKRTDYIVIDDRQAEERETSKSNAKAPSAQDLEAEEDEAPPDLKPLSSSEVAKLGMSAASFVLDSSDPFTTLVKISQDFPKYSSSVAAYNASEEFLEEYRKNRQAGLPAGRNAMWINGLQIDPRQVDAYSLLDYLRRERQLLAQFQKIGLSASEAIDLLSYPALAEVQGSSEVQRYDWRDEIEGGGVVVWLNDLEKDKRYANFPTTLQMLLQPTYPGQFPSVRRDIQNVVVPVDLANVEDVQFVVKYLYAFIKRLIPVRFGLVLTANTEESKAQAKIAHYLHQAYGLASLLQYLETSLSSEISRAHKPSFAAAIAERSLRPDQEAISFEEVLQSEGLDVIVASTERYLRRLDLKGPSPPTLVNGIPMSRGETYMQELPMQLSRDLQIIQQGLMQGVFSDDDYIPDYFLSQAAQSRNEWIVPERDSDILIADIRSAAEAHNDFADILRFPADAKHPGANVQLIVTGDFNTEHNFALLISALKFRQTHPEIEIVPLHNPDAEEKVGDNSSRLYELLLHPEPVDLDHVLARIQSGNSEQATQKEEEQAYWTQVQQLITDIGLPAGATSLIVNGRVVGPLPSSVEFTEADFELLFSYETSQRLGPLSAALKDLDIETKVAGPLNFAKLTSLVMLSSDAPEGVFEQRSKYRVNVWKRWNSTHSAIDASTNTKDASINIAAAVDPTSEMAQKWLPILKTLSKLAGVNVRIYLAPNGQLSELPIKRFYRHVLESEPTFDENRALERPEASFTGLPQDALLTLGMDVPSSWLVAPKYSIHDLDNIKLSAIKDGSDVDAIYELEHILIEGHSSDTTLRSPPRGVQLLLETEKGSFFADTLIMANLGYFQFKAQPGFWKIELKEGRSRDIFELDTIGGGQQSTGTNEVALLSFQGKTLFPRLSRRPGQEQEEVLETGPKPGSAMDYVSKGLNFAQGVLSSVGVKHTGKSESAEKHAEINIFSVASGHLYERMLNIMMVSVMKNTNHSVKFWFIEQFLSPSFKSLLPHLAEEYGFTYEMVTYKWPHWLRGQREKQREIWGYKILFLDVLFPLSLDKVIFVDADQIVRTDMYDLVTLDLEGAPYGFTPMCDSREEMEGFRFWKQGYWKSYLRDLKYHISALYVVDLQRFRELAAGDRLRGQYHTLSADPESLANLDQDLPNNMQTLIPIKSLPQDWLWCETWCSDEALKTAKTIDLCNNPLTKEPKLERARRQVPEWTEYDDEIAELARRVASSASASASASKEDGDDDDGKEEEEYERKDEL

SEQ ID NO: 4431 - protein, 1323 aa, Lachancea lanzarotensis
MFGSIFLILLGVFHVSGLTTITFPHSSSGQTLRAWNTLVKLVDDRNVLQQLYFEIAGVADDSDDWDGADDSAQFSDRIVDVLYSYNSDLAGLFPLHFASEPGFSSNTSNENFFILNDKKFQSPDDLFYLKSSDLAAQKLTIESEITSPEDVILGSNENAPLIQFYGCDRVSSWESFNRNLLTECQSGKIRFLWRSTCPNDQILDFVPSAVALTVKNSQWDKPVELPLEVPESFRDNEYYAQQVNDAKLSDLDKKVTSAICDLYEETKDFSKTLKYMKQVVDNFPALAQKLTKLQVSDTKLVEALNKTTENGIDHTMLGFYINGQYHKLSNLDKVSVVEAVTAELTRIDLIRKLLQDYEGLNDKESTTVAKDLVQKFSTHSLATLQNSQPAKYDLHRVPGFSESVIYFNDIENGAVYKEKLSDNIGEFFKQSEFGHIPAYRENWNEVVFVINLSELESKDTLEALQGLLRAVSVVENGHPQRIGFLPMVTSCQDNGLLRRIYELKSKSLKRLTNYLQELSVGTGVRSSEYKNLPPVLDILHAKLKLKNSSIIINGEIYPFKSNLWNYMIAKVIKKDVSYIKDELRRINAAGVLTAREILHRRSFTERNLKLAPDYFEDATYFVTNTTVLKKLGTRLLEFTKSRDHNVLHTISIVDDFNTPLALRRLLNASKVGLLGVRIRAIHTGVETKQWNKVRQLVENYSFTNIEKIISTIKAKSAINVIDHAVFNAWIFELPYDKSVRNSFMTINGRFVQFEEDEVPSTNEYEMILQREALRVLDATQALQDIFPHFLDTSIDSDLIEMVSSVLTKLFYDGQRFYNNGIDYTAEGSLSRIDLEEFVNFAAYNSFQHSSDVKKVDITLIVDPLEERTQKLLTLVSELQGLDFINIRLHFLPTMDLKLFPIHRFWFEISDLTPEIEEPGKYYVDIERPLHWHLGPLKEGSAEFEYAILEINAFDDAAVPSKGLVEGKGNVCLQLVNRENKVIDKTFTSTTFGYGQLRIHNLGGHYRIESCSENLKVTSFSFDAHSNYAPAKSFDVTSFSPLRAYVKIKDEENFQTTESLDVVRSSVDIFSIVENQDEENALKGLIASILNSNLENGIRLWVLTGEPPSIDLLQFLNDVSRKFGSRIKFEFIKYDWPRWLRPQRFTEDELVAVKVLMLDYVFPGEVDKLMYMEPGTRLEDLKALWEFKFDTTFCLPRAYHSDGIPYWKEGYWQTFLSKHNLKFHAIDPVFIVNLTKYRNDHVGEKMRIHYQRLSAGINFLAKIDQDLINDMQPKVPISTMRRSLVAQKVTQRDWDDENIESLYRQLIEDDAAPVNQNDFDHDEL

SEQ ID NO: 4432 - protein, 1436 aa, Myotis lucifugus
MGLLIVFTGLWLFSLVKADSKAITTSLTTKWFSAPLLLEASEFLAEDSQEKFWNFVEASQNIGSSDHHGTDYSYYHAILGAAFPFLSPLQQNLLKFSLSLHSYSATIQAFQQIAADEPPPEGCSSFFSVHGRKACDVDALETLLLTAPERPKPLLFKGDHRYPSSSPESPVVIFYSEIGYEAFYNFHRQLVSKSNAGKINYIFRHYVSRPRREPVYLSGYGVELAIKSTEYKAKDDTQVKGTEVNTTVIGENDPIDEVQGFLFGKLRDLHPDLKGQLKELRKHLVESTNEMAPLKVWQLQDLSFQTAARILAAPVELALVVMKDLSQNFPTKARAITKTAVSSELRTEVEENQKYFKGTLGLQPGDSALFINGLHIDLDTQDIFSLFDVLRNEARVMEGLHRLGIEGLSLHNVLKLNTQPSEADYAVDIRSPAIAWINNLEVDARYNSWPSSLQELLRPTFPGVIRQIRKNLHNMVFMVDPAHETTAELMSIAEMFLSNHIPLRLGLIFVVNDSEDVDGMQDAGVAIMRAYNYAAQEVDHYHAFQTLTQIYNKVRTGEKVKVEHVVSVLEKKYPYVEVNSILGIDSAYDQNRKEARGYYEQTGVGLLPVVLFNGMPLEKAQLDPDELETITMHKILETTSFFQRAVYLGELSHDQDVVEYIMNQPNVVPRINARILTAEREYLDLTATNNFFVDDYARFTALDSQGKTAAIANSMNYLTKKGMSSKEIYDDSFIRPVTFWIVGDFDSPSGRQLLYDAIKHQKSSNNVRISMINNPKEDINYENTRISRAIWAALQTQTSSTAKNFITKMAKEGTAEALAAGADVGEFAVGGMDFSLFKEVFESSKMDFILSHAMYCRDVLKLKKGQRAVISNGRIIGPLEDNELFNQDDFHLLENIILKTSGQKIKSHIQQLRVEEDVASDLVMKVDALLSAQPKGDTRIEYQFFEDRHSAIKLRPKEGVTYFDVVAILDPVTRESQRLAPLLLVLTQLINMNLRVFMNCQSKLSDMPLKSFYRYVLEPEISFTSDNSFAKGPIAKFLDMPQSPLFTLNLNTPESWMVESVRTPYDLDNIYLEEVDSVVAAEYELEYLLLEGHCYDITTGQPPRGLQFTLGTSASPVVMDTIVMANLGYFQLKANPGAWILRLRKGRSEDIYRIYSHDGTDSPPDAGEVVVVLNNFKSKIIKVKVQKKADMVNEDLLSDGTNENESGFWDSFKWGFTGGQKTEEVKQDKDDIINIFSVASGHLYERFLRIMMLSVLKNTKTPVKFWFLKNYLSPTFKEFIPYMADKYSFHYELVQYKWPRWLHQQTEKQRTIWGYKILFLDVLFPLVVDKVLFVDADQDLPNNMIHQVPIKSLPQEWLWCETWCDDTSKKRAKTIDLCNNPMTKEPKLEAAVRIVPEWQDYDQEVKQLQIRFQEEKAAAARGKEPLADGPQTHEEL

SEQ ID NO: 4433 - protein, 1382 aa, Komagataella phaffii
MIGHALILISQCLTAVASEKSVDISLRANWFKTPFPLLLLETVASENESGFHTILDAMFHVSFQSLEFEDADLQFDAIPFAKSDKELYEAWSQKAGATAEKSITDVYLANKYYAPRVQAHYQHYEEVRSSILGDRCGTNSKAWLYFNNEVYCSSNDVFSLKTGNETGQRQILPFDRVIGAKDNDVPVAIIYGDYKSPLFSQFLSNLAGFIKDGRLRLVWRYIPDESIWQKETLAGYGVDLTLKNTEYIDIDDRDVVANKPVEAKPTVAESNDFWDVYSKEIETVSKKDISLLGYKLTHYVKNLEVSESEKLSILIKLIQDLPKYASFINRQVTDTDATESIVDGWENSFDHIPQGLYINGAVVAQSNLNYMDILNILKREYAFVDDLTRFGVAKVHAQDIMKSFAAHVPDRSVNNTELKRFDIRVHADAIIYLNDIETDPLYSNLSSSREPYTRQPLSTGEFPPVRENIHELVFVIDLEDRDQVKILLTFFYSMSESRPLRIGLVPFTSDYSVDENFLHVVETQGIHEVIAFLRHVATTVLKNDEEGRLSVLDLGCLYDICYTDLGPKVDDFIDGFSITHPVVIANGKFFDFGKDWWNNPTNKIHLAQELFKDILDLGKAISNGALSADMRAQDFLYNGSQTYRNPIFSALNKKEPLYGFPDSMKADIPFFAPFDSLEVFKIIEQNEISIATLVIDDQPDSIPITIWLIGNSWDLVFLSQLRYLMSVASDLNPVKIRVYDTSLNPEFSSWLQAEMDKSLADLIILIGARRFDRRDGKYPECPEEAKDFVLKTFNLDISKAGDPYLILNGRAIKIDGILSDTRLKQLVRSETDSKLQTTYQLLSEHNISTPIVLDRFELFEYFTMSVSKTYYFSDGYQPDQKLFPRYNTNLLNDTFSIEMAKSNAEGSTMEVTLFIDPLQEESQKLVSLLSLFEELNRVRIKVILNPQKANELDVKRFYRGVFPNSVKFSSAGFALDNEDKALFALVPEKNLFTVDLDVPNRWVVVIKEAVTDLDNVLLEYSGEARGVYELKSLLVEGYSYATTKQDQITGFNVFHAVLRGHSETTVMPDYGYFQLQANPGLWKFSMNAAGAEVLQLVKFVGKSNYNRIQYTVLNETAIIPVLNLNGNFIEPLFDRTPGQKNASLIGNTTTTKKESSRGRWISWNNQEESKNAGINIFTVTSGHLDERFLSIMANSVMKHTEHTVKFWLIENYMSPAFKENLPFLSQRFGFEYELINYKWPAFLEGQRKRQRAILRYKILFLDVFLPQSLDKVVVVDADQIVRTDLKELVNLDLEGAPYGYVPMCDGREEMTEFKFWKQGCWLKDLGDTFKYHSSGLYVIDLKTFRNIGAGFYLRQLYHLSRDSKCKLEIDDLPNNLQCQVPN

SEQ ID NO: 4434 - protein, 1488 aa, Lachnellula arida
MGAFSLPWGLTGALLATTYLHSICASAGPSVNVGLKASFSSAPYLLELLETAADENATSYYPLLDRIADGHFSKASTDKQLYEQFIEVLKDDGHITDLETLSSYKFALSMRTSAPRIEAHYQYYHTAAEPSLQAEEETSCPTWVLFNGKQYCSPALDAPHGDINGDLQTQELQFDRILGNPTAPPSILYADITSPTFGQFHKTLVKTAREGKTSYRVRHRKALSAESKPLLVPGYGVELALKRTDYIVIDDREDGDSKAIEQLSEKEVKFEDEELADLKPLSSSELFSLGLKASSFIMQSENPFETLVKLSQDFPKYSSAIASHNATKEFVTEHDYNRAQLVPGGYNVWWMNGVQVIEREIEALSILELLRAERKLINGVRELGLTGQEAIQLLSHQDIATVQAEGELQRFDWGDDIEGGNVIIWMNDIEKDKRYREWPTSAQAMLQRTYPGQLPSVRKDCFYLVLPVDFSNPEDVLMVVETLQSFVKRKLTIRIGLVPISSTIQSLEQARVVYHLLDTYSLSTAISYLERSYTAGKVTAPSRSVFEAAVEGKPPKGKKVSREIYEVLKSNDYQDQVEASKKWIHRLSAGSKIPPMFVDGVALPRDENWLQSMSKRVTADLQSIQQGIFEGSLSDETWLPTFFLSQAAKKRNSLVIPEDEKSLRVFNVNKIVGEHQDLFDTLPHVKADPASEKADWAHMILFTDLEAEEGAKFLAAAAVFREANPGVELVIVHNSASDSVESGLSADLFARTQNGVEKGSLSVNDLTKLLSSEDSAQVTNKDDVLRYWHGADLLAKSFALTSGQTAILLNGRLVGPIPSPAEFDLEDFEQLLSYERNNRIVPAYTALEALGLSDKIADPLAAAKVSSIVAISTIDDKPAGMFEQASTLRMSKFDVWNSSHTAIEVGDASTASIQMTVLVDPASEHGQKWVPLLKAISELDGVYLKLFLNPKERLQELPVKRFYRYVIDSKPTFDDAGALKDLSATFTGVPQEALLNLGMDVPPAWLVAPKVSVHDLDNIKLSSIKANVDALYELEHILIEGHSREIPGGAAPRGAQLVLGTERDPHFADTIIMANLGYFQFKANPGFYKIDLQQGRSSEIFKIDSVGAQGWTPVPGDNTTEVVLMSFQGTTLYPRISRKPGMKTEDVLEAKSESKLNIVSQGFKFAQGVLGKGKPVVEMEAQADINIFSVASGHLYERMLNIMMVSVMKHTKHTVKFWFIEQFLSPSFKDFIPYLAAEYGFKYEMVTYKWPHWLRSQTEKQREIWGYKILFLDVLFPLSLDKVIFVDADQIVRTDMIELVNHDLKGAPYGFTPMCDSRTEMEGFRFWKQGYWERFLAGLPYHISALYVVDLHRFRQIAAGDRLRQQYHQLSADPNSLSNLDQDLPNHMQNILKIHSLPQEWLWCETWCSDESLKDAKTIDLCNNPQTKEPKLDRARRQVPEWTVYDDEIAAVDRRRKGLNGNGNGEKKNEKSRTLEEEPVATSKKDEL

SEQ ID NO: 4435 - protein, 1523 aa, Thermothielavioides terrestris
MLQLSRLPWGLAAAVLAATWLPSARVAASPSVNVALKAAFPSPPYLVELLETAAADNATVYFALLDRIAKGHFSDAATDKALYEKFVEVLRDDGHMDAESLSTFKLGLSMRTAAPRVEAHYQYYATAVEPSLSGDQDGCVHWFLVDGKQYCKPTLDAAHGDVKGHSQARTLPFDRKLGSGSRDVILYADITSKDFGAYHETAVNLARQGEGSYRLRYRRSPAHPVEALSVSGYGVELTLKRTDYIVIDDRDTGAAGAPADEAQKPITSSDIVLDEEEEITDIKPLEKSELSLLGVKAASFIMQSESPFDTLLKLTQDFPKYSNSLGAHNVSAKFAAEYEENQKMLGPDGRNILWMNGVQLVDRQIQPFGLVDVLKRERKLIKGVLDLGLTGQQAVSLLGHTEVAQAKSGDEEPRRFDWRDRLEDGRVIIWLNNLEKDKRYADFSPHLWALIQHFGHGLPQVRKDIFNLVVPVDFSDPEDLKLITTQLLTFMKRLVPIRFGLVPLTPTEKAIDQAKVVYYLLENHGLAATVSYLEKSLENDKAARPDERIFNEAIKDRPLRPNATPLPFQDIFTSEAHEKQIHLAKRWVERLRADGDVPSIFFDGFPIPKDEHWLRGMNQKLMVDLQAVQQAAYFGAINETTWIPGYLLENAVSRRNTLIFPEDARDLTVLNVNKLYTEHRDVFDQVPVVEAEKQSTKEDWAALTVIADLDSAEGQKLLLYAIQFRKAHPGIRMEIVHNPGDVSRDASELTQRLKARVDKLLGADRLSDLEAILESGESKADPTYDAALAGFLAAANLKAGQNALMLNGRLVGPIPSAEHFKKEDFEQFLEAERSSRIIPVYKALEDLNLGDRVSGPVAAAKLTSATALSGMSDLPQGIFDSASPIRMTVFKELNSTYTSFEVGDASTATIFFAAVINPASEIGQKWAAMFKVLSELEGVHLQIFLNPAAELAELPVKRFYRYVLQSSPSFDEDGKVKALSANFASVPEDTLLVAGMDVPPAWLVTSKVSVDDLDNLRIKDIKARRGTAHVEAVYELENILIEGHSREVPSGQPPRGVQLVLSTEKDSHFADTIIMANIGYFQFKANPGVYSIRLKEGRSSDIFTLESVGPQGWHPVPGDETSEIALMDFQGATLYPRLKRKPGMEQEEVLGESKANATTAGAAMDFVSKGLRFAEGILGRGKAAAETKSASDTEHAEINIFSVASGHLYERMLNIMMVSVMRHTNHTVKFWFIEQFLSPSFKDFIPTLAAEYNFKYEMVTYKWPHWLRQQKEKQREIWGYKILFLDVLFPLSLDKVIFVDADQIVRTDMYDLVTLDLQGAPYGFTPMCDSRTEMEGFRFWKTGYWASYLKGRPYHISALYVVDLRRFRALAAGDRLRQQYHTLSADPQSLANLDQDLPNHMQFHIPIHSLPQEWLWCETWCSDETLAAARTIDLCNNPQTKEPKLDRARRQVPEWTEYDEEIAALARRRREELYQQQQQQREEQVVEKQEGRKKEEETVERNPKSRRFEDEEAAAGGRVRDEL

SEQ ID NO: 4436 - protein, 1624 aa, Cucurbita moschata
MGTSCFRSGCRPLIVVLLLAIYGGSGVFAEIRRPKNVQVAVQAKWSGTSILLEAGELLAKERKDLYWDFIEVWLREEGNGADADASTAKACLKKILKHGRFLLNEPLASLFEFSLILRSASPRLVLYRQLADESLSSFPLPEENNCNIVGEGNEGIERRKSDTSLVGQNPKSPRGKCCWVDTGGSLFFDVPELLTWLENPAESVGDSIQPPDLYDFDHIHFGSSSESRVAILYGALGTDCFKQFHVTLVKAAKEGKVKYVVRPVIPSGCEVKINSCGAVGARGSMNLGGYGVELALKNMEYKAMDDSAIKKGVTLEDPRTEDLSQEVRGFIFSKILERKPELTSEIMAFRDYLLSSTVSDTLNVWELKDLGHQTAQRIVQASDPLQSMQEINQNFPTIVSSLSRMKLNDSVKDEITANQRMVPPGKSLMALNGALINIEDVDLYLLIDMIHQDLLLADQFTKLKIPHHTIRKLLSSLPPADSDMLRVDFRSSHVHFLNNLEEDAMYKRWRSNINEILMPVFPGQVRYIRKNLFHAVYAIDPATVCGLQTIDMILSFYENNLPIRFGVLLYSSKFIKQTESGDDELTKSEADTSCLMIQLFIYLKENHGVQAAFQFLSNVNKLRLEADGLADDAPEMHHVEGAFVETLLPKSKSPPQDVLLKLEKEQTYKDLAEESSMFTFSLGLSKLECSLLMNGLVFDSSEESLINAMNEELPRIQEQVYYGHISPHTDVLENFLSESGLSRFNPQIVAEGKPRIVSMFASTHGGESLLNGFKYLHSPGTMDDLKPVTHLLVIDAASKKGIKLMKEGLHYLIRGSKSARVGFLFTTSNHTSESSLLLAKVFEISASLHSHKKNVLDFLDRVCSIYSQKFIPESSVAVDSPQEFIEKICELAEAYELPPKAYRIAFSDSFVDEMRKYLSQLGLESIVNAVITNGRVTLLTDESSFLSHDLSLLEVVEFKRRIKHIVEIVEEVKWHDFDPDRLTSNFLSDVIMFVSSSMAQRERSSESARFEILNAEFSAIVVDNENSSMHIDAVIDPLSPSGQKLSSILRVLSKYIQPSMKIILNPLSSLVDLPLKNYYRYVLPSMDDFSSTDVTVNGPKAFFANMPLSKTLTMNLDVPEPWLVEPVIAVHDLDNILLENIGDTRTLQAVFELEALVLTGHCSEKNQEPPRGLQLILGTNSTPHLVDTLVMENLGYWQMKISPGVWYLQLAPGRSSELYLLKQGGDRSQDKTLSKRIIIDDLRGKVVHMEVEKKNGKEHEKLLVPDGDDDLLENKKEGHTNWNTNFLKWATGLIGSNDQSKKSKSTTLEKRKGGRHGKTINIFSIASGHLYERFLKIMILSVLKNTRRPVKFWFIKNYLSPQFKDVIPHMAEEYGFDFELITYKWPTWLHKQKEKQRIIWAYKILFLDVIFPLSLEKVIFVDADQVVRTDMGELYDMNIKGKPLAYTPFCDNNKDMDGYRFWRQGFWKEHLRGKPYHISALYVVDLKKFRETAAGDHLRVFYESLSKDPNSLSNLDQDLPNYAQHTVPIFSLPQEWLWCESWCGNTTKSKAKTIDLCNNPMTKEPKLQGARRIVPEWPDLDSEATTFTAKILGDVTPQTPVSSIAEISVSKKSIDEDVESKAEL

SEQ ID NO: 4437 - protein, 982 aa, Diversispora epigaea
MKFKYNIITFVIWIINIIIAIDSLSSYAETPPVQIWLKASWNAPQLVLEILESVAAENSKAYFPLVEEFLRQGLFSSKLTNYEIYKSALDIIEKKKFLSTPTTKSLFEFGLSLHTTAPTIQSYYHYYNSTIIPTRKFSNDEFNPECNVWADWYGNQACNVETLTKFIDTKLDISKATPKLLSFDHIRKSKIYSTQRQSRIIIFIRIWSRIGFKNTEYNLFDDRKVEEETDNVDKESINNSESSDDYLFDQNISEIKPAGEIESLGVKTAQVILESQDPLKTLTQLSQDFPKYSHYISQVPISYSLGQEIEMNQQNLRLEPNSFWLNGLVMDPLSVDPFSLLKLLCRERRTVSSLLNLGLNSNQAIGILSSPIIAKAQSPQDSSRGIFDVRDISPNNNVVVCLNDLEKDSKYSSWPNRIYGLLRPAYPGQLRMIRKNIFSILFILDLSSPENLEIIAEHINAFILRDTPLRFGLVPLFSKDQHDSIAISRIFYYIVDQFGPSTVKKFFKTIYSEIRKPLTIEFLQIVEQEFNKLIYKEVPRIEKLVNSFKEIINGNNTLVEEQIYESSNFIKRLKINTHDKGVLFVNGKFFDLDESHQRNVIQTVNEHLQLKAYVGEIDDTNIYEYLLTLPNIPNRRNPYIFTSELQPLQVINLADDNNNDYDDDNGFSLINNLKYIYSEIDEKVPVTIILISDTIVMTNFGYFQLKANPGVWTLNLREGKSTDIFDIQSVGSEGWLSRNISEIDNEIILNGFEGLTIYPRMIRKSGKENDDVLKTENSNDSEHMFTPKMDEKKGAEINIFSVISGHLYERFLYVMILSVLQHTNSTVKFWFIENFLSPSFKDFIPYMTKEYNFEYELVAYKWPHWLRAQTEKQRNIWGYKILFLDVLFPLDLDKVIFVDADQIVRTDLKELVDMDLQGAPYGYTPFCDNRPEMDDFRFWNHGHLKDHLRGKPYHFGLLFFIINIQFITINNTSYCCHYCHFL

SEQ ID NO: 4438 - protein, 1498 aa, Halyomorpha halys
MELLKIVLLLLVASLDYVLCKKKPKSVTTVIDAKWDSTPLVLEMAEFLADENESFFWDYVNSITSLDPPLIEAATDKEYYDRALNVSKTFLSSTQVSLLEFALSLHVYSPRVEMFNQIAKEKEISCQTAVDIGGTLICDCDKIIENINEAKAASEVKSGEVLRVDHKYSNSEGVVVILYGELGTSEFSRFHKILKEEAEKGHITYLIRHWIKKSSNKKLRLSGYGVELQMKSTEYKVQDDTKVEGTAAEESEEEEEEVEGLNFHRLKQLYPDRIENLDKLRQNLLETSSELAPLKVWQFQELSLQAAQRIMSAPKEEVLHVLTYISSNFPTQARSLVKTVVSQELKTEMRQNQDKFSTSLHLQPSDTALFINGMYFDLETQDIFTILEYIREELRVMEGLHIIGLTDKKLSKSLLALDLNGGGVDFALDIRDSAVVWINDIELDKQYRRWSSSLLDLLRPTFPGMLRSVRKNLYNLVVIGDPSKKEVVPLIKLLQSFLIHNAPLHLGIVFSVDETKNGYEDSGVAMLNAFNYVSEIKDVSQALNFITDVYATVSNNDIAPADIHNLLKSKFPGFKQDEVFGPDSDYNTGIKLSVDFISKSGLRNLPQVLLNGVALPEKSLNADEFEEAVLSEIMVQTPNLQKAVYKGELTDKDNVIDYIMSQPNVMPRLNERVLSSTRSHYLPLPKFTNKLTLDMIDSGISYLSSKSSKQGIHLLTNWIVCDLRDEDGRSVLQNAIEQMEGSGKIRIGLIVNEKETESSSSDINRIALAVLRQLPPDAALEKVKEILQDFPAIEAGVRTFTDYDVLPDQEEIETVIQLHRQFSKEILNFDGGVRGIVNNGRLIGPLQSGEDFTVDDFSLLERFSLSTYVDKIYTAIAANSVDLDTVTSDMLMKSVSLLASRPESKSRFEIIPAGEEHSVVKLMANDDGPAFDLVAIIDPVSSGAHIVGYLLSTLQQVVRADIRIFLNCVEKNSDMPLKSFYRYVLEPTLQFTPSGSLGPGPVARFSNMPGTPLLTQNMLVPDNWMVENIASPHDLDNIKLDQVDSNVHSQFELEYLIVEGHCFDSVLGSPPRGLQITLGTDRSPTEFDTIVMANLGYFQLKANPGLWKLRLRHGRSEALYDITGYSFAGVDYPVNSSEIKVILSSFRAHTVKLKVTKKPDKSGIDLLGEETEEQSSLWGSITNTFGGGSKTDATEGEQEPINIFSLASGHLYERFLRIMMLSVLKNTKSPVKFWFLKNYLSPTLKDFLPRMAKHYGFQYELVQYKWPRWLHQQTEKQRIIWGYKILFLDVLFPLDVKKIIFVDADQVVRADMKELVDLDLGGAPYGYTPFCESRTEMDGFRFWKSGYWRNHLQGRKYHISALYVVDLKRFRRIAAGDRLRGQYQALSQDPNSLSNLDQDLPNNMIHQVAIKSLPQEWLWCETWCDDGSKKRAKTIDLCNNPMTKEAKLTAAMRIVEEWKDYDNEIKRLQLQLGETEGHEEEPILPQVPVPEVHEHSEL

SEQ ID NO: 4439 - protein, 1637 aa, Camellia sinensis
MWTHFRSGCWVLFVFVGFLSLSGNLVSVESRRPKNVQVALQAKWSGTPLLLEAGELLSKEWKDYFWEFIEVWHHNEDADSQTAKDCLKKIVKYGQSLLSEPLASLFEFSLTLRSTSPRLVLYRQLAVESLSSFPLYDDINSQSVNGGIPETNENVESKKVEPLLVGMNPRSPGGECCWVDTGGAFFFDVSEFQTWLHSPKESARDSFQQPELYEFDHIHFDSSIGSPVAILYGALGTDCFREFHVALVAAAKEGKVKYVARPVLPSGCQSKSGHCAAVGTNDPVNLGGYGVELALKNMEYKAMDDSAIKKGVTLEDPHTEDLSQEVRGFIFSRILERKPELTSEIMAFRDYLLSSTVSDTLDVWELKDLGHQTAQRIVHASDPLQSMQEINQNFPTVVSSLSRMKLNDSIKDEIAANQRMIPPGKSLMALNGALINIEDIDLYLLVDMVHQELSLADQYSRLKIPPSIVRKLLSTLPPAESNTFRVDFRSTHVHYLNNLEEDAMYKRWRSNINEILMPVFPGQLRYIRKNLFHAVFVLDPGSACGLESIDMIISLYENNLPMRFGVILFSTKFIKMIEMNDGEIPAAPMSNDDVSSLIIRLFIYIKEHHGIHMAFQFLSSINKLRIESADPTEDAPEMHHVEGAFVETLLPKAKSPPQDALLKLEKEQTFTELSQESSMFVFKLGLVKLQCCLLMNGLVVDANEDALTNAMNDELPRIQEQVYYGHINSHTDVLDKFLSESGVPRYNPKIIADGKVKPKFLSLSTAILGNDFGLNDVSYLHSPETVDELKPVTHLLAIDITSKKGIKLLREGIRYLIEGSKNSRLGMLFNANPGASFPSLLFVKASEVAASSYSHKAKVLDFLDQLCAFYEQEYVHASSVVAESNQAFIDKVCDLADANALSSKRLRTALSEFSVDELKGRLNKVGQFLYRQLGLESGDNAVITNGRVIHLDGSTFLSHDLHLLESVEFKHRIKHIVEVIEEVKWEDIDPDMLTSKFISDIIMFVSSSIATRDRSSESARFEVLNAKYSAVVLNNKNSSVHIDAVIDPLSATGQKLSSLLRVLWKSVQPSMRLVLNPLSSMVDLPLKNYYRYVVPTVDDFSSTDYTVYGPKAFFANMPLSKTLTMNLDVPEPWLVEPVIAVHDLDNILLENLGDLRTLQAVFELEALVLTGHCSEKDHDPPQGLQLILGTLSTPHLVDTIVMANLGYWQMKVSPGVWYLQLAPGRSSELYVLKDGDGSQGMTSSKRITINDLRGKLVHLEVVKKKGKEREKLLVSSDDDSHSQGKKKGNQKGWNSNILKWASGFIGGSEDSKKSESTSEHGNSVRRGKRINIFSIASGHLYERFLKIMILSVLKNTNRPVKFWFIKNYLSPQFKDVIPHMAREYGFEYELVTYKWPTWLNKQKEKQRIIWAYKILFLDVIFPLSLEKVIFVDADQVVRADMGELYDMDIKGRPLAYTPFCDNNRDMDGYRFWRQGFWKDHLRGRPYHISALYVVDLVKFRETASGDNLRVFYENLSKDPNSLSNLDQDLPNYAQHTVPIFSLPQEWLWCESWCGNATKSKAKTIDLCNNPMTKEPKLQGARRIVSEWLDLDSEARRFTSRILGEDVDPQEQVISPSQTQNSVSDFVSEEDIESKSEL

SEQ ID NO: 4440 - protein, 1793 aa, Violaceomyces palustris
MSTTTHRPAYLGLATSSLLLLLLLLLLLLSSTTATIAKIKRSESPPVKVQLKTPWPRLTSPTRGSPLLLEILESANSQDPDSFFPLLDRITSPTLHIDATSQVLLRDGPSNNLSQLSSHQLQSVAERLISQNHLFTNAGENRSTPAILEDWKLSLALHTETPKIEAFSQLYKTLGMQQVWETSMAHRSDQERQACGSWIYWYGEVLCTPEQVENAVLLYYNGNQGERKPHEAPPLYPFDHLQQPPLWTGHQPTTHPNRDVPEVSPPPPLAVLYADPFSSNFWQLHKVLYQHANQLDPHQRGTVLRYALRWRPSSEQDGAGHPPSSDQIHLSGYGAILDLKKVDYLVIDDRKVSSESSSKSTGAKENDRQSDRDQAAKLESHRNRQWLDGQINDLGREGGGSEILSAEEEDREPFLGSISSLTREELTDLGLRATRVIASSSDPLRALQQLSQDFPSHAVRLAKATMDNETLIESLVKMQARRLMPGGSDMWINGRGLSEREISSLHLLENLRFERKLSDSLASQFVGLTPRQAVDLLSNSAVGRSFLEASSEGQQGSSSTFFDASDRIEKRKSKTGSKVISWWNDLESDQATSTWSKDLMSLLRPLWPGNFPQVGKNLFNVVLVLDLGKKESCRFLSESVGPSVGRVGLRWGVVPGGLDDKGNVAALQVARLYWEVMDKGGPELATKFLKRLSIPKPGRKGAALDLAVDVKSAKSEFANILRSHVQPSPSADDSSAQVDDDWVEKVVAGEAAPGQAEREEATRSYLERLRLDMSESPRGHVLVNGQYLPFGSQLISQVHEAVQNQIQILAPSIYYGKIKASDELENHFYDLPGSMAYRSALVFPPPPRAARRDGLEERSKGAEGESRRSGVRFSHINLPEAFGSCAHDHEEARLLTTQYVYPNSDSMINATVWLVGDLDSDQGSSLIKKSLEAMKLGAFRLGFVHVPGSANQGWAGARNESDSKAPPISAFLHQMMVSGKLDELSAEKLREALDLFEVQGDNLDPLGPIGEAEQNVFSGVGGRGEGRGGSWMDPLGSAKQKGYTIPGTMQAANFWEKVGPSLSREFGLQDRSSLGLIVNGRMALGLELDSIRAEDIASLVTYEEGKRINAVTETLKLQKHDLDSMPRSRRTDLISMATSVLGKAYERNEAEEGVLVTQKRSRTSVAEQLGSADHVFEVGDRESANVRVSVVLDPLSEEAQKWSSILALLSRKKGFHVRVVLNPKLSYDELPLKRYYRYSFPDEIRFDEEGEEVGDSILFSGLGEDSVLTLGIDAPPSWLTMAKEAIYDLDNIRLRDVTEEQGVKAVYELKHILIEGHARDVKGPIPRGLELVLETPDGSERLDTIVMANLAYFQFKVSRPGLYNLRIRGGGRSQEIYEMVSVGNNGWDSPSVDATGEAITLSSFTGLTIYPRVAKRRGKEEEGLLLEEELEEVGGRGGGRSSKHATVGFRGALTRMAKGMLESIKARALAGGRGEAKGKEVESAVEVKRHADINIFTVASGHLYERMTYIMILSVLKHTKSSVKFWFIENFLSPSFKELIPHLAREYGFEYELVTYAWPHWLRRQKEKQRTIWGYKILFLDTLFPLDLSKVIFVDADQIVRTDMKELVELDLGGAPYGYPPMGDDSEDMEGFRFWKQGYWKDFLKGRTYHISALYVVDLNLLRKVAGGDTLRGRYQALSADPNSLSNLDQDLPNNLQDSLPIHTLDEDWLWCETWCSTDRLERAKTIDLCSNPKTKEPKLERARRQIPEWNEYDAEVERLRRRLEEEKERGGGGGGGGERGETRIQTHRRDEL

SEQ ID NO: 4441 - protein, 596 aa, Sphaerobolus stellatus
MEPFDFASQDSVYVQIFLNPPASLKELPLKQFYRLNLPHRLKFDKKGSEIIPTAEFRNLPPDPIYTLGMDVPQAWLVRPHVSHHDLDNIHLASFTGLDKIEGVEAIFDLDYIVVEGHARDPLTGLPPRGLQLQLSTSNSTPIADTQVVANLGYIQFKVKPGVFQLGIREGYGRDVFEMESVGNEGWNSPPVTKAGTEITVTSLEGLTLYPRFKRKPGMETADVLIAPVKDKGTVVDQVMGKKDVEVMQQDQAEINIFTVASGLLYERFVGIMILSVLRNTKSTVKFWFIENFLSPSFLEFIPHLAKAYNFQYELVTYKWPSWLRAQKEKQRVIWGYKILFLDVLFPMDLKKVIFVDADQIVRADLKELVDLDLQGAPYGYTPMGDDNEEMEGFRFWKTGYWHDFLKGRPYHISALYVIDLVRFRQLAAGDRLRGSYQALSADPNSLANLDQDLPNNLQYEVPIFSLPEDWLWCETWCSKDRLHRAKTIDLCQNPMTKEPKLSRARQIPEWDEYDREIANFAKKLADEGIIRSAAYATGVDDLANVGSAKAEKKGEETQPHHKADEAADSGSPSTAELSSQEAKQEGAEPVAPRDEL

SEQ ID NO: 4442 - protein, 1618 aa, Absidia repens
MVKSLPIIFTICSAAALVAGSKHISPPVELSLVAPWFAPDPFLEILELVKKESPFSYIECLDELTSVDRTTSPRQQYEEALTIATKHLDGSDDTDIFKLNLATHSSAPIIQAHHQYYNQTVVPSIKNYDPSCEVWAQVDSHQACSVKELDTYLQMASMAVADANLSPNGLEHLICNPCKNVPQVNLYTSSLNPAFTDFHRYLIKKVGSQGDGTLVYSLRYKPVSQQPQGGSSPLYLTGYGVELALKNTDYLVIDDRASTRGKDDQEKGDNSGSGSAGFIKQQLGNMGKKVNQVLFETNGKSTIEPLTSDEIKLLGLKATQFIMTSKDPLATLTQLSQDFPKYAQKISTVSLKDDLTNEITSNQRRFVKAGANALWINGRKLEDSEINPFSIARDLHREMQLVKSLVKLGGTRQQAIRLISSKLLSAETSKPMDGALQDVYDVRVPTDQSVVIWWNDLESDSRYKGWRGDLSALLQPTYPGQMRAIGRNIYNVLMVENLSSRASLLRLTNEVQNMIHHGAPLRFGIVPYLGEVDSPASLAAKTLQYLTKRFGKRTGMVFLTQLQAELAKHNIDYATEDNIFSALEKTSDHNDTPLIHTKTAWPEIKNQSQNTGIVQFLKRMGINQLEDDQGVLFMNGQYMEHSSERPWTRLLMGLMNIQTQMLTRSVYLGDINDDDNVYDFFLNQPYVSSTRNAYVAVSDNHPLLVSGAPAIRNSIDKVVYLDNGSGETVTTNILAVGNMNSPAGIKLALNAIQYVENNNQTRCSILHVPSLVDPTNDDVTEFSDVLYHELYDNNINLENTKKLLETSLLNKLKSHWNWDGKHWKENEHDDGKPSERVIKSKFITPGSPVVDFTIRKNAFSKWLTLALMYMHEQNGSSSYHFTNAQDQHLGLIVNGRIIGPLADEDDFTVDDFDALWQFENTQRITPMVNALQQVEWPMDVDGMSSADLITLITALLSDDKSKTTRNILLSEEDAPVREMYYAQMDNDHSGIYINRNDKNGKDSVYAEIGVLLDPVSEDAQKWSTILEVLSKLEGVAIDIHWNPIPHLEELPLKRFYRYVLDSAWHFNDNDNKNDENERHQQQMVNPSAYFDDLPVDALYTLGVDTIDAWHVTVKDANVDLDNIQLATLAASSEEGEREGVHAVYELERILVDGHCLDSTDQRPPRGLQFVLGTESQPAMTDTIVMANLGYFQLKAQPGIYQLRVRPGRSSQVYGIESIGSNGNWIKKPSSSTSSSSQQDNSATTPLILTSFEGLRLFPTVKKHAGMETADVLDDESTGNVPQENEGILSSLSNKLFGKKDDTGKVAVTMQKQADINIFSVASGHLYERFLAIMMASVMENTNSTVKFWFIENFLSPSFKDFVPELSKQYGFDYEMVTYKWPSWLNAQKEKQRTIWGYKILFLDVLFPLDLDKVIFVDADQIVRADLQELVDLNLHGAPYGYTPFCSDRHEMDGFRFWSQGYWRDHLRGRPYHISALYVVDLVRFRQMAAGDRLRAQYQQLSADPNSLANLDQDLPNNMIHSVPIFSLPQEWLWCETWCSDESLKKAKTIDLCNNPLTKEPKLDRARRQVPEWETYDKQIESIRQSFLQQKTTGKHTTILDDKRDPTAKIEMNHIKDEL

SEQ ID NO: 4443 - protein, 1414 aa, Pseudogymnoascus destructans
MVQFGNIWSLTGNALAFSCLQSIKVSASPTINVALATSFTSAPYLLELLETAGDENSTSYFPLLDRIAEGYFKDARTDLEQYNSFVKVLRDDGHLDSEGLASYSLALSLRTSAPRIEAQYQFYDTAIEPSGDDSSCPVWVLFGGKKHCSPALDGAHGYNGRRGTEQLQFDRITGNLSAPPSILYADITSSEFNQFHKKLIQKAQNQEISYRIRHKKPNAKESKPLVIGGYGVELALKRTDYIVIDDREAEAQVQEESIKMEVVLEDEELADLKPLSASELASLGLKASSFIMQSENPFEVLTRLSQDFPRYSSAIAAHNVSSDFAEEHLYNRGQLVPAGANVVWINGLQVPTRQMDSFSMLDILRKERKLLNKFSQLGLTGSQTISLLSHKDIAFTKADDEPARFDWRDDGDGDVIIWLNNIEKDKRYDGWPATVRTLLQGGYPGQLPQVRKDLFNLVFPVDLSNIEDVELVVTQLSGFVKRALPLRFGLVPLTNSNAALEQAMIVYYLLDSYGLSTMVAYLNGYFASKGTKSSRNANFEAAIEERKLLGYKVAKSLEEVLDANEANGSIAHSKQWNFRLGANEKVPSVFVNGAAVPRDENWMQGMSQRVQMDLRLMQRAVFENTVTDDHWPPMLYLHDAASGRNPFLMPENDKDLQLFDVNAIYSDHAEALDGLPVVKNDPSAVQDDWAQMILIADVKSTQGKHLLTAAAEFTKRNPSVELVIVPSSETPAGILSVYEYMTARLFQPLKSDGDLDRLVETVSITAGDEERQITTQMSEKWSAIEGFLGSLGLRPGQQGLLLNGRLVGPILSEIEMAVSELEQLLGFERTKRIRPVLAAVKALGISEAISDPLASSKLTSLVTLSFISNVPEGIFEQASTLRIDSFKAWKSEYTAIEIGDESTASIHIQVALDPASQESQRWIPILKVLSELNGVYLKLFLNPKDILMEIPIKRFYRYVLESKPLFNADGSLKDIKAQFASVPQEALLTVGMDVPAPWLVAPKQSVTDLDNIKLSSVNGDVNAVYELQHILIEGHSSDKETGQAPRGAQLLLGTAADAHFADTIIMANLGYFQFKANPGFYKINLQEGPSSKIYSIDTLGASLRDATKPDETTEISLISFQGLTLFPQLSRNPGQETEDVLEPTTDLKDDILSKGRKLAQNILGLGKKSTAVQTTPQAEINIFSVASGHLYERMLNIMMVSVMKHTNHTVKFWFIEQFLSPSFKQSIPSLAAAYNFDYEMVTYKWPHWLRSQSEKQREIWGYKILFLDVLFPLSLDKVIFVDADQIVRTDMRELVDIDLQGAPYGFTPMCDSRAEMEGFRFWKQGYWKSFLRGLPYHISALYVVDLRRFREIAAGDRLRQQYHQLSADPASLANLDQDLPNHMQAHLPIYSLPQEWLWCETWCSDESLGGGKDD

SEQ ID NO: 4444 - protein, 1625 aa, Collichthys lucidus
MKKSLNHWLIRDLTIFGRSVLSKAEGSCYVEPEIMRKVIVLSLSLLLLLNIHHVISAPKGVTASLKAKWNMTPFLLETSEFIGEDGNEKFWQFVDTVKELTVYKQGESVRSYYNLILKKAGQFLTDLQVNLLKFALSLRSYSPAVYASQQIASDEPPPEACPAFVSIHGQHSCSTKEIKKLLKAAAGRPKPYLYKNDHTYPGVNKTDVPVVILYAEIGTKKFTNFHKVLAEKAGEGKLVYVLRHYVANPKPQKMLLSGYGVELAIKSTEYKAVDDTKVKDSKTAINAEDDNNDEVQGFIFGALKKSHPEIQEQLNEFRRHLLDSTNDMVPLKVWEMQDLSFQAAARIMSVPKFDALKLMRDLSQNFPSKARSLTRVAVKQEMRKEIEENQKHLSETIGLHPGDGELFINGLHIDLDIHNPFSILDILRGEARVLEGLHNLGIKGEHQGKLLRLPVNAVDDSYALDIRHPAIMWINDIENDPVYRSWPTGVQELLRATFPGVIRQIRRNFFNLVLFLDPVREETVELVKLAELFYKHKIPLRIGFVFVVNTEDEIDGSSDAGVGFYRLLNYIADEYDLSQALMSMLSLYNRIGVGETLSVDTVTDYLKKKFPKANAERILSAESEYDYKRQDGALFYKKSGLGDLPLALFNGVPLSSDEMDPDELETIILQRIMDTTTAFQRAVFMGQLTEGSDVVDYLMEQANVVPRMNPLILNTERQYLDFTAKPVVDEWEDTTMFSFLDSRDKTAIMAKRMKYFTHSGIKSYRCFGLDPDGMTAVALWIVGDFEKVPGRKLLLNALKHEKANPGVRVGVIDNPSGKPSEDNTVLYRAIWASLLTQKNKVSAEFVQKLLKEESSQLLQQGAKMKDLLIQGMDDDAFEKKFNTLEVDFIRSQQLFCRDVLKLSPGQRAVISNGRILGPFEEQEEFTVEDFHLLEKITLSGSAEKVKAKVKQMGMKPKHASDLVMKVDALLTAAPKGEVRRDVRFVKDSHSVLHLSPRENEVFYDVVAIVDPLTREAQKMSPLLIVLSQVVNVRLQVFMNCRAKLSEMPLKSFYRFVLESDVAFMANDTVSPGPVARFMELPESPLLTLNMITPESWMVQAVRSPHDLDNIHLQEVSGVVTAEYELEHLLLEGHCFDLSTGQPPRGLQFTLGMSRDPLMYDTIVMANLGYFQLKANPGAWTLRLRKGRSEDIYQVLTHDGTDSPADAGDVIVVLNSFHSKIIKVRVQKKADKINEDLLSENSESKGIWDSIASLIHKTAPDVFDRRTATRKLPVSNTTAQQENITGGGSKKDDAEKKKEDVLNIFSVASGHLYERFLRWVAFTSPSLTHDTVQVLTRYIHLSPDPQTDPSVRFRIMMLSVLRHTKTPVKFWFLKNYLSPSFKETISHMAESYGFQYELVQYKWPRWLHQQTEKQRIIWGYKILFLDVLFPLAVDKIIFVDADQIVRADLKELRDLNLEGAPYGYTPFCDSRREMDGYRFWKTGYWASHLGHRKYHISALYVVDLKKFRKIAAGDRLRGQYQALSQDPNSLSNLDQDLPNNMIHQVAIKSLPQEWLWCETWCDDTSKVTAKTIDLCNNPKTKEPKLTAAARNRARVGRIRQRDKAVTEAGPGTGGRGGSETDSLFTT

SEQ ID NO: 4445 - protein, 1524 aa, Dendroctonus ponderosae
MRFRMRIGAFLQLLLVGLVVVEKCTAKQKSKSVTTLLEAKWSRTPLVLEVSEFLADENPDLYWSFIDSISLQSPALNQIENERKRYNVLLEHAARLLSPSQLAVLKLSLSLHIYSPKVQMFQQISTELSLPKCQCVADVGGQFSCDLKEIEKLIEQPSNVVSNAELFNVDTHYPGSENRSLVAVLYGELGTQCFSHFHALLKTQAVKGGIDYVIRHYHQGKSEPRLRLSGYGVELQMKSTEYKSQDDSEVQDSEGSAEASQEDEELEIDGFDFAKLKQLFPDLRNNLDKFKQHLEDSSNELAALKVWEFQELSLQAAERIMNAPKDEALKVFTNIAQNFPMQAKALVKTVVNPDLKMEMKINADIFGSTLNLQPSDTALFINGMFYDIDVIDIYSILDVLRQELKTMEGLHALGLSNGKLRAVLHLDFSESSGSPEFAIDIRDSAINWLNDIEQDTKFRYWATSLMDLLRPTFPGMLRQIRKNLYNLVGRVLIIDPTDTSLRPLLKIVESFVVHATPIRTGLVFRVNSSKSVSGLDDAGVAMLCAFNYVQQSKGPIAAFSFLRSMLGSTERPQVSVEDVKRELSAQFSEDPADILDEDSDYIFGRQLSSDFIDRTGLNLFPQALLNGIPLPQAKITAEDFEEVVLQEVMSQTVNFQKAVYKGKLTDSMEVIDYLMDQPNVMPRLNDRVLNRERSFYLDMSGKATSTHKLEELLQLSRQDMTATAIDNLRYFTVPKRGNQYRSLTYWVVGDLDCPKGRKLLLDALEHLKSESDIRVSFLPNVNGNKANIFNKVVLAALETLSSGAALSLVLSLLRSEDTPEQLQSGHKLNIPSEVWSKVSAQELNLKMLRVYSQRVLDLKEEQRAIVANGRVLGPLDDGELFTNEDFSLLERFTSASYLDKISKAFEGTLDEDDDDKPITSDTILKLEPLLLSKTASKSRFDITYGSDEYSAVKIPARRPDLVAFDLVAVVDPVSRGAQKLGPILQVLHELLNCNIKLFLNSVEKNSDMPVKSFYRFVLEPEIQFSEDGKQLPGPIARFNNMPTSPLLTQNYHVPENWLVEVVRSVYDLDNIRLENVESNVHSEYELEYLLLEGHCFEQSSGSPPRGLQITLGTVREPVIVDTIVMANLGYFQLKANPGSWLLKLRQGRSADIYDIVSHDGHDMPPNSTDIKVLISQLRSNIVKLRVQKKPDKFHMDLLSDDDEHGGIWNSITSSFASKEEESEEKLNIFSVASGHLYERFLKIMMLSVLKQTKTPVKFWFLKNYLSPQIKDFLPYMAKEYGFEYELVQYKWPRWLTPQTEKQRIIWGYKILFLDVLFPLDVKKIIFVDADQVVRTDLKELRDFDLNGAPYGYTPFCDSRREMDGFRFWKQGYWRNHLQGRKYHISALYVVDLKKFRRIAAGDRLRGQYQALSQDPNSLSNLDQDLPNNMIHQVAIKSLPAEWLWCETWCDDASKAKAKTIDLCNNPLTKEAKLSAAMRILPEWKGYDDEVRELQKKIDSGVLDEDPAADSGSAGRDTTDRHTEL

SEQ ID NO: 4446 - protein, 1584 aa, Batrachochytrium salamandrivorans
MVQMLAPTRFLWTDPLYKAVTTNSNMGNAKTTLLWIIAACAAVVSISGTSASTSQSHPDAAILSPPIKVWLKTQDSWPAPPFVLEIIEFSAEEIGGSAVPFLSMLSADGLLSSDVKPKQIYEALFIGDTTKDAIQGVDSFVETPGPKILQFLSSPASLGLAKLSLAIHSTAPRIQAHYRFYMQTVVPLQKKTRFDPSCPVWANWAGRQICSVDEIRQLLSLPIKPSTSAPPLLPFDHIYQSPIHVLGTPLFTVIFYVDVLAPEFKDMFTTLRDAVATLPLQLVLRYKPPHSFLENSAKAGNPLYLSGYGVELAIKSTEYKVEDDREIKSDIADVYTPDTISNINKEEDEFLFQAIPTIKSLSKEKLNDISFKTASYIAQSASPLDTLVLVTQNFPKYAHILSTFPVDKNIRDTAALIRQPSAASNQLYLNGHSVELTRIDAFKLLRLVRKESKIINGLHQLSWTTSQAIELLSTSLSKSLRHSWGECFDTRFDRVIWLNDVEKDSRYTQFSRSLKDLLRPSYPGQLKYIRRNLFTSILLLDLTNAQHIAVASTSFSIIEASAPLRFGIVPLVDLETEAHPANIAAKSLYWIKENGRIKHIKQIIDLFSAAASTTDGVTAEVIKESFLKVTGKEYDSVFNEREAQTKELLKGLSDYSERLGINQLSGAVFSNGKYIEVSASWQKSIVETYSEMVEYLTADIYTNQVTNNEDLYEYFLNMNNVYSKRNSHIFPTSNKPATLINWMDGPVAGIVDGLPWLYGTDSPDFAELSLVVFGDFSTAEGVKFALAAAQATTMSSRPVRISFLHNGAQESSDTSIFVDEAAFHILAKPTEGSLPIEMLKSAIKEDTTKFDGFNPSDEFRLLRRDAMMAIRAAAYVKAGEYGVIANSRFISPLMSSELFDLRDFESLISFELHNRASEMATLISTLKDDMDARSEISDLHFKTQSLVISANVATDAFLSEGPPPKRISSSQFSGARNKTGYIYTGDFKTAAIHFTALIDPTSNLGQKTASILETLSKVQGVAIEVFLNPQGQGDSDQLPLKRFYRYVLGSEPIFDSHGDIAPVGAHFKRIPTAPLLTLGMDVVGAWLVRPTRSLHDLDNIKLSSLPADASMSGVEADFELQSILVEGHASDAATAGPPRGLQFVLGSDSEPNMVDTITMANLGYLQLKANPGVWHLRIREGRSRLIYNMESLRYMSSNGTLIASSKLGDDGATVIVDSFEGVIVFPNVAKRPGMMKEDVLLPLDKGAGGIWDIIKKSTLDAFGSGSSTSETINVFSVASGHLYERFLSIMMLSVKQQTKNPVKFWLIEDFLSPSFMEFLPHLAKAYKFDYELVTYKWPKWLREQTEKQRIIWGYKILFLDVLFPLKIDKVIFVDADQVVRANLKELVDIDLQGAVYGYTPFCSDRTDMDGFRFWKQGFWQSHLQGRPYHISALYVIDLVKFREVAAGDRLRQQYHMLSADPNSLANLDQDLPNSMIHQIPMFSLPQEWLWCETWCSDASLKQAKTIDLCNNPLTKEPKLARARRILPEWEGLDKQVQDERLKFEALHRKTSVIVKPTAVASATPSAVISTAPPSEPNDEAHSEL

SEQ ID NO: 4447 - protein, 1493 aa, Sclerotinia borealis
MGGFNLPWGLSGALLASTYLHSICVTASPSINVGLQTSFPSAPYLLELLETAATENASSYFPLLDRIADDYFSKATTDKDLYDRFMQILNEDGHMDAEALSSYQLALSMRVAAPRIEAQFQYYHTAVEASVKSEKDSSCPTWVLFDGYQYCSPSLDEPHGVVTGDSQTQELPFDYVLGNPTGPHSILYADITSSTFGQFHKTLAKTARESKTSYRLRHRRAIDSDPKKPLMIPGYGVELALKRTDYIVIDDRKDDDEKAPPSNTETKVKFEDEEVADLKPLSTSELSSLGLKASSFIMQSDKPFDSLIKLSQDFPKHSSAIASHNVSSDFLAEHNYNRGKLVPAGFNIWWMNGVQMIDRQIDAISMLDILRKERRLINGVRDLGFTGPEAVQLLSHSDISGAKSDGDVQRFDWRDEIEGGSVIMWLNDIEKDKRYADFPATLGALLQRTYPGQLPSVRKEIFNLVIPIDFSVLEDITLVAETLANFVKRKLVLHIGLVPITTSPAASEQAKVLYHLLDVYGLSGAIAYLEASVTNGAASPAEKVFEAANEGREVRAGKVAIPLKDLLKSDHSNDRIDASSRWTSRLSANGDFPPIFVNGVALSRDENWLQAMVQRLTADLQIIQQGVFNEIFTQDSYIPEFFLSQATARRNALIVPESDKNLKIIDITTISKKHGDVLIRLPKIGVDLTSPKEDWAHMVLIADLSSVSGLDLLLSAAKFRESVPALEITIIHNPSSEKETSDFSTHLFSHINKRSDEASVDAQDLFSLVSPEGLELDHTTKESAQTYWKMAIPLIRSVALSPGENGILLNGRFVGPIPVGSELNQEDFQQLLSYERTKRIAPVYAALKVLGLSDNIADPLAGAKISSIVALSSVSDTPDGIFEQAPTNRISTFDIWNSSYTVIEAGDALTATIHMTVVIDPVSEQGQKWVPIVKAISELEGVYLKMFLNPKERLQELPIKRFYRYVLESKPTFDDEGALVAPGASFTGVPQEALLTVKLDIPPAWLVAPKVSIQDPDNIKLSSIKSDVDALYELEHILIEGHSRDMPSGSPPRGAQLILGTEKDSHFADTIIMSNLGYFQFKANPGFYKIDLQRGRSSEIFKIDSIGSKGWAPVPGDESTEVVLMSFQGATLYPRLSRKPGMEGEDVLEAKIDSPMDYVSRGLNFAQGILGSKAKADTGVEEQADINIFSVASGHLYERMLNIMMVSVMKNTKHTVKFWFIEQFLSPSFKDFIPHLATEYGFKYEMVTYKWPHWLRGQTEKQREIWGYKILFLDVLFPLSLDKVIFVDADQIVRTDMIELVNHDLQGAPYGFTPMCDSRTEMEGFRFWKQGYWEKFLRGLPYHISALYVVDLRRFRQIAAGDRLRQQYQSLSADPNSLSNLDQDLPNHMQQVLPIHSLPQEWLWCETWCSDESLKEARTIDLCNNPLTKEPKLDRARRQVPEWTVYDDEIAAVDRKRKGANGYGTDDGNGDAKNTKSRTLEEMVNTKTKKDEL

SEQ ID NO: 4448 - protein, 1546 aa, Cynoglossus semilaevis
MEVGSFRTGFIGIGVRMWLLWALLFSLVSASSAGADSKAVTTTLTTKWADTPLLLEASEFLAEESQEKFWDFVESNQNIEGEHDDTDQAYYELIVKKASALLSSVQLNMLKFALSLRAYSATVHSFQQIASNEPPPSGCSAFFNVHGEKTCDADGLDALLKMAPERPKPYLFKGDHKYSGSNPDAPVVILYAEFGKPHFRDLHEVVASKAREGLVTYVLRHYLANSNERKVYLSGYGVELAIKSQEYKAKDDTQVQGTEVNATVIGENDPVDEVQGFLFGKLKTIYPELKEQLKELRKHLVESTNEMAPLKVWQMQDLSFQTAARILAAPAVEALNVMKDLSQNFPTKARSITKTVVNSEIRKEIGDNQKFFKGTLGLQPGDSALFINGLHIDMDTQDIFSVFEILRSEARVMEGLRSLLIDTPFIHDILKLNVQPSDSDYAVDIRNSAINWINNLEADHRYSSWPSNVQELLRPTFPGVIRQIRKNFHNLVMILDPSQESASELLSVAEMFYANNIPLRIGLVFVVSDEDDIDGMQDPGVALVRAYNYISDEVNSQSAFEAVISMFNRVPVGAKLSVGDVVKVLEKRFPYVEVSSVLGADSSYDSNRKEGRAYYEQTGVGPLPVVMYNGIPYQREQLDSDELETVTMQKILETTSFYQRAVYLGELVSDQDVVDFIMNQPNVVPRINPRVLSTSRTYLDLSDTNNYFVDDYARFSTLDTKEKSTAVANSMNYMTKKGMTTNNRHDDGYIRPVTFWVVGDFDRPSGRKLLYDAIRHMKTSNNIRLAMINNPSTDPSAETTRVARAIWAAMQTQSANNAKNFITKMAKEETAATLQEDTDIGDFAVGGMDVVLFKSAYDSPQFDVLRSHATYCRDVLKLKKGQRAVISNGRIIGPLEDEEVFNQDDFLLLESIILKTSGERIKNKVQHFEIEEDRASDLVMKVDALLSSQPKGEARVEYDFADDRYSAVKIRPKEGDMYFDVVAVVDPVTRDAQKLAPLLTVLKQLVNVNMRVFMNCQSKLSEIPLKSFYRYVLEPEVMFQSDGSYSPGPLAKFLDMPQSPLFTLNLNTPESWMVESVHTRYDLDNIYLEEVDNIVAAEYELEHLLLEGHCFDVSSGQPPRGLQFTLGTASEPVIVDTIVMANLGYFQLKANPGAWILKLRKGRSDEIYKIYSHDGTDSPADSDDVIVVLNNFKSRIIKVKVQKKADKLNEELLSDGTEENDTGFWESLTSLFLSFRGFTGGGKVEEVKQDKDDVINIFSVASGHLYERFLRIMMLSVRKHTNTPVKFWFLKNYLSPTFKEFIPHMAKEYGFQYELVQYKWPRWLHQQTEKQRIIWGYKILFLDVLFPLAVDKILFVDADQIVRTDLKELRDLDLEGAPYGYTPFCESRREMDGYRFWKSGYWASHLAGRKYHISALYVVDLKKFRKIAAGDRLRGQYQGLSQDPNSLSNLDQDLPNNMIHQVPIKSLPQDWLWCETWCDNSSKKNAKTIDLCNNPMTKEPKLQAAVRIVAEWTDYDQEIKRLQTRVQEGATLRPQEQQGTDSHTEL

SEQ ID NO: 4449 - protein, 1495 aa, Caenorhabditis briggsae
MNLFGSLLIICQAALVVAAEKKGVQTSLKAMSSLPKRAISSFGNLWKLSIMMLLRSNGRLVRNHHPTWIQFIPFSVTDEQKYDYTIKTAAKVISSSSADLLKFALALRQYSPRVQAFQQMAAEYGENCPVFAVVGEQVSCDYDKFEHLIRDAKKASHVLESDHFVGDKKSKKVVILYGELGTTSFAKAWQKLTKSQKTGLIFRHFSKHVEQNAVSLSGYGVELAIKNTEYKAVDESNEKKSVEEDETDLFGFNIKLLKELHQDSVEAIESFRVNLKESDELTPLKRWELQDLSYQAAQKIVNAGPAEALGTLEEYSQNFPTHARALAKTTVNEKLRKEVLLNRKILEESGIDVGETSLYINGINQDINSLDLFKLADMLKQENKLAEGFHSMGINREYLSVLVGMDTSDEEKASYAVDHREGYPFFINNLDTDKKYKQWGNSVKLMLQPYYPGMIRPIARNLFSLVFVVDPSTSDGRKFLRIGQTFNSHDIAMRIGYIFAVNQDSKASGENDLGVALLNLFNFVAIDSSNAEALKVLNNFLDGYRSQEPTVADLKEFFEAKYGDANFKEVFGADSDYDKGRKHGYEFLQKTGLNSAPKVLLNGFILDEEGVRGDNIEETIMMEVMKISPKIQRAIMEGKLTDRMNVGNWVLDQKEVMPRINKRILSAPSKKVYVDLLGSKNCKTLKGWETFSDADKAACLLQTTKYLQKAATDAILPVTLWTVADAESVEGRRFIYNSLQILKNSVKARVGIVLNPENVEKSCGANSISSYIRAALEHLPMDQAKRLILKLSNEEYAADFLSGKMTFDDLSVGGMDTAKFLADKKKTDCERTRVEAALVQNLLSISAGDRVVVGNALQVGPLDKDEHFDAADFKLLESMLLNRGAEVISSHLNKWEFASANGAGSNVAFSIGGLVGKHASSQKRTWVSIKGDEHSVVTLPADEVEKPAVDVFAVVDPLTLEAQKLGTILQLIKKVTNCDIKLIMNPKDKHSELPLKRFYRYAAASELSFDHTGKLNTNVVRFDNLPSKQLLTLSLQAPDSWIVEAVSAKYDLDNIKMEQASGDVVAVFALQHLLLEGQCFDEVSGQPPRGLQFVLGTDKNPKQFDTIVMANLGYFQLKANPGAWKLEIREGKSSEIYRIGSHVGAEKIGDDTLQVVIDSFTGKSVRVRVEKREGMEERNLLADDEEGVWSSLSNLVSSKEKPQEVINVFSLASGHLYERFMRIMIVSVMKNTKHPVKFWLLKNYLSPQFKETLPTLAKHYDFEYELVEYKWPRWLHQQKEKQRIMWGFKILFLDVLFPLDVGKVIFVDADQVVRADLMELMKFDLGNAPYGYVPFCESRKEMDGFRFWKQGYWANHLAGRRYHISALYVIDLQKFRQIAAGDRLRGQYQGLSGDPNSLANLDQDLPNNMIHQVKIKSLPQEWLWCETWCDDASKKNAKTIDLCNNPLTKEPKLDSATRIIGEWKTYDDEIREVISGNSRSENVISDPEEDTHTEL

SEQ ID NO: 4450 - protein, 1500 aa, Golovinomyces cichoracearum
MIEISKSGFYFRNMEGRKLSWSFPLIFLFTLYQASIHASASPSVTVDLITAFPAPPFLLELLETAADENANSYFPMLDRISEGFFSTASTDKELYERFLQALKDDGHLPNSECVSSYQLALSMRLSTPRIEAHYQYYHTAVEPSLNIEQGSSCSSWVFFKGNKYCSPSLDQALVPVISGLRSGELQFDRVLGNRSAPASILYADITSPEFAEFHKVLAKNARNGKSSYRLRHIKSKSREYRSLAISGWGVELALKKTDYIVIDDRTDDESGTDTSVAENEILLDDDELENLRPLSSSELSSLAVKASSFILQSTSPLDSLVKLSQDFPKYSRVILSHNATQEFVSEHQYNRAQLIQDGNNIFWINGIQLLERQVEIVELIDLLRKEREIVNGLRELGLSALESIQLLSHSKLWSTQTLDGVNRYDWRDNDEGGHVIIWMNNLEKDKRYANWPYAITAMLQRGYPGQIPFVRRDAFNLVVPVDLSDPSDVSLIIGTLLSFVNRLIPIRIGLVPITNKPHAADQAKIVYHLIDTYGLQASIAYLRESSESKKLNVPNLSIFDRIIRERKVKVGRSRLSIEEILKRDEAQNQIISAQSWLERICADDALPPILIDGVIIARDDTWLQKVSQQINSDLQSIQETIALRQGQGKHNDFWLPSLFLDQAVRHRNPLIIPEDQKKLRIFDLNLLVKQHPDAFQKLPRVLASTSNKSEWALMVLIVDLDTEAGKKLLSAATDFCITAPSIELFIVHNPASSSHVKLSANFYLQLKDIGFRDLERTNDFTAKLLSQEAVHVKTILDESKNFWRQFLPIIESLGLKPGQNSILINGRSVGPIPDTDSLKISDFEILLAYENKKRITPVYNALKDLEIEDKILNPLQAAMIYSIVAATTTQKQNSMFDQESTLRMGQFDIWKSSHTVIESGDKNTASIHIFVLIDPASHLGQRWAPILKVLSELEGIYLKLYLNPKERLTELPVKRFYRYVLGSKPEFDENGVIKSPSGSFKGIPQEALLTVGLDIPPAWLVAPKVSIHDLDNIKLSTIKTNVKVTYELEYILIEGHSREAKGGRAPQGAQLVLGTKRNSLAGDTIIMANLGYFQFKANPGYYYISLKGERSSEIFNIDSLGQDGWSSLEVGQKNAVVLMSFKGTTLYPRLSRKPGMENEDVLAHSSSKKGIVFQSLELAKQILGKGVSVPQNQADINIFSVASGHLYERMLNIMMVSVMKHTKHSVKFWFIKQFLSPSFKDFIPHLAEEYGFTYEMVTYKWPHWLRAQSEKQREIWGYKILFLDVLFPLSLDKVIFVDADQIVRTDMIELVQLDLHGAPYGFTPMCDSRTEMEGFRFWKKGYWERFLRGLPYHISALYVVDLRHFRQIAAGDRLRQQYHALSADPASLSNLDQDLPNHMQNVLPIFSLPQEWLWCETWCSDESLKDAKTIDLCNNPLTKEPKLDRAKRQVPEWIVYDTEISELDKKRRMSDPDHAREKNPKSRSFDEIPETKPFGKKDEL

SEQ ID NO: 4451 - protein, 1638 aa, Phaseolus vulgaris
MGLRSESPLLLLILILLLAIASAHTPTPKNVQTSLRAKWFGTPLLLEAGELLFKEEPRLFWNFIHAWLHADDHGDAHSHSARSCVNEILHHSRPLLREPLASLFEFSLILRSASPALVLYRQLAHDSLSSHSYAPITKLDPLHLGVSLQSPGGKCCWVDTGDTLFFDVSELLLWLQTPLEKVGGSIPGPQLFDFDHVHFDSSVGSPVAVLYGALGTVCFKEFHDALVGAAKQGKVNYILRPVLPAGCETNFGHCGSVGASESINLGGYGVELAFKNMEYKAMDDSTIKKGVTLEDPRTEDLSQEVRGFIFSKILERKPELTYEIMTFRDYLLSSTVSDTLDVWELKDLGHQTVQRIVRASDPLQSMQDINQNFPNIVSSLSRMKLDDSVRDEIMANQRMIPPGKSLMAINGALVNVEDVDLYLLIDLVHQDLLLADQFSKLKIPPSIVRKLLSTLPPSESSMFRVDFRTTQVHYLNNLEEDAKYKRWRSNLNEILMPVFPGQLRHIRKNLFHAVFVLDPATISGLEASLFSKANTLFFVNSFSKRNLSFLELLLGTLQSIDMIISLYESDFPVRFGVVLYSSKYITQLENLSAKEDRDKFEEDISDMIIRLFSYIKGHHDTQLAFEFLSNVNKLRTESDDGHLELHHVEGAFVETILPKVKSPPQEILLKLEKESELKELSQESSMLAFKLGLSKTHCSLLMNGLVIDPTEDALLNALNDETQRIQEQVYFGQIKPHTDVLAKFLSEAGIQRYNPRIISDSKPRFVSLSAFLFGEESILNDIEYLHSPGTMDELKPVTHLLAVDITSRSGLHLLRQGLNYLREGSKDARIGLLFSANWSTDSLSVLFVKVFEITSSSYSHKKNVLDFLDQLCLLYQQKYFPTSAVEVEGTQTFIDKVCELAEANGLPSEGYRPALLKFSADEVRRHLNKVGIFLHRLLGSESGVNAVFTNGRVTYPIDESTFLSADLLLLESIEFKQRTKHILEIIEEVKWQHVDPDMLTSKFISDIVMAVSSSMAVRERSSESARFEILNDQHSAIILHNENSSIHIDACLDPLSATSQKLSGILRVLWKYIQPSMRIVLNPLSSLADLPLKNYYRYVVPSMDDFSIADSSINGPKAFFANMPLSKTLTMNLDVPEPWLVEPVIAVHDLDNILLENLGDTRTLQAVFELEALVLTGHCSEKDHDPPRGLQLILGTKTTPHLVDTIVMANLGYWQMKVSPGVWFLQLAPGRSSELYILKEGADGIQSKQLSKLITISDLRGKVVHMDVVKKKGRENEKLLVSDDEEDPQETKKGSGWNSNLLKWASGFISSNEQPKISETNAEKVKGGRSGKTINIFSIASGHLYERFLKIMILTVLKNTQRPVKFWFIKNYLSPPFKDLIPRMAQEYGFECELITYKWPTWLHKQNEKQRIIWAYKILFLDVIFPLSLEKVIFVDADQIVRTDMGELYDMDIKGKPLAYTPFCDNNKEMDGYRFWRQGFWKDHLRGKPYHISALYVVDLKKFRETAAGDNLRVFYETLSKDPNSLANLDQDLPNYAQHVVPIFSLPQEWLWCESWCGNATKSRAKTIDLCNNPMTKEPKLQGARRIVPEWPDLDLEASKFTAQILGDDLEPFPSPNQSKDLISEDALKEDLESKAEL

SEQ ID NO: 4452 - protein, 1096 aa, Coffea canephora
MQTIEMVISLFENNLPMRFGVILYSANIIQKIEANGDELQRSLEDDLKSEEDVSSLVIRLFLHIKENHGNLMAFQFLSNVNKLRIESAPEEAPEIHHVEGAFVETLLPSAKTPPQDILLKLEKEKTYHELSQESSMFVFKLGLAKLQCCLLMNGLVYDSNEEALFNAMNDELPRIQEQVYYGLINSNTDVLDKFLAESGIQRYNPQIIAGGKVKPKFVSLSASILRNGSWINEISYLHSSDTVDDIKPVSHLLAVDFTSKKGIKMLREGLSYLMGGSKIARLGVLFNSNEEANSLSYIFVKVFEIAASSHSHKKGVLEFLDQVCSLYEREYMTSTSPDNEKSQEFIDKVVDLAVASGLPSKGYESPLSTFSVGKLKNHLIKVAQFLYRQLGFHSGVNAVITNGRVVPVGGGVFLSHDLSLLESIEFKQRIKQIADIIEELKWEDMDPDLLTSKFISDIILSISSSMAMRERSSESARFEILSSTCSAVVLDNEDSSIHIDAVIDPLSSSGQKLSSLLRFLSKYIQPSMRLLLNPVSSLVDLPLKNYYRYVVPTLDDFSSIDDTVYGPKAFFANMPLSKTLTMNLDVPEPWLVEPVIAIHDLDNILLENLGDARTLQAVFELEALVLTGHCSEKDHEHPRGLQLILGTKSTPHLVDTLVMANLGYWQMKVFPGVWYLQLAPGRSSELYVMKEDGDGSPYTTLSKQITINDLRGKLVHLEVLKKKGKENEKLLLASDSDESHSRQNRNGDQKSWNSNLLKWASGFIGGSDRSKKIESTSVEHGNTGRRGKTINIFSVASGHLYERFLKIMMLSVLKNTRRPVKFWFIKNYLSPQFKDVIPHMAQEYGFEYELVTYKWPTWLHKQKEKQRIIWAYKILFLDVIFPLALEKVIFVDADQIVRADMGELYDMNLKGRPLAYTPFCDNNKEMDGYRFWKQGFWKEHLRGRPYHISALYVVDLVKFRETAAGDQLRVFYETLSKDPNSLSNLDQDLPNYAQHLVPIFSLPQEWLWCESWCGNATKSKAKTIDLCNNPMTKEPKLQGAKRIVAEWPDLDLEARQFTAKISGEPIDLKEQVALPLESQSSTIHDSSEDWESKSEL

SEQ ID NO: 4453 - protein, 1644 aa, Amborella trichopoda
MVKNTGIRVSGCLLIILTLSFLSGIAPSLADPRRPKNVQVSLRAKWSGTPLLLEAGELLSKEWKDLYWEFVEAWLGKETDSNSLTARGCLQEIVHHGRNLLNEPLASLFESSLTLRSASPRLVLYRQLAKESLSSFPLGEETNTKDINESIPEEVTSSKNKKLNQLLVSQNPKSLGGKCCWVDTGNSILFDVSELRLWLDSPSRLSEDLSEQPELFDFDHIYFESSIGSHVVILYGAVGTNCFKEFHVALVEASKKGEVKYVVRPVLPSGCESKAGSCGAIGAGDALNLGGYGVELALKNMEYKAMDDSAVRKGVTLEDPRTEDLSQDVRGFIFSKILERRPDLTTEVMAFREFLLSSTVSDSDTLDVWELKDLGHQTAQRIVHASDPLQSMQEISQNFPSIVSSLSRMKLNASVKDEILANQRMVPPGKSLMALNGALINVEDVDLYLLMDLIHKELSLADQFLNIKVPRSSIRKLLSSPPHSESNGFRVDFRSSHVHYLNNLEEDAMYKRWRSNLNELLMPVFPGQMRYIRKNLFHAVYVVDPSTIKGIESINLIFSMYESHIPMRFGVILFSSKLSTKIEDNEGELPICSGEKCQSDMKEDIGSLIIRLFLYIEENYGTTLAFEFLRNVYKLWSDSEALTDETLEIHQVEGAFIETLVSKVKSPPNDVLLKLEKETVFMDKVEESTLSVFKLGLSKLGSCLLMNGLVYESNEDAAINAMNEELPRIQEQVYYGHIDSRRDVLDKLLSENGYNRYNPEITGEGKEQKRFVQLTPAVIRGEKLILDVCYMHSPETMDDLKPVTHLLVVDITSRKGVKLLRQGLHYLIEGSKRARVGVLFNVNSTSLSKRSPSLLLIKAYEVTASLFGHHQNALQFLNQLFSIYESEIPFLDAEGFELLIEKISDLAMANGLRPEAYRSSLTEDSLDSMKSHLEKVAHFLYKLGLEYGTNAVITNGRVVLSTDGGALLSEDLGLLESLEYEQRIKSVASIIEETDWGDLDPDHLTSKFLSDLVMLISSSMALRSRSPDVARFEILNAKYSAVILNNENSSIHIDAVIDPLSPLGQKLSSLLRILWKCIRPSMRIVLNPLSSLVDLPLKNYYRFVVPSMDDFSSADYSINGPKAFFANMPLSKTLTMNLDVPEPWLVEPVIAVHDLDNILLENLGDVRTLQAVFELEAFVLTGHCSEKDHEPPRGLQLILGTKSVPHLVDTLVMANLGYWQLKVSPGVWYLQLAPGRSSDLYMFKGHGEGSMSKKITIDELRGKVVYMEVVKKKGKEHEQLLANVDDKNHMHENKGNLNTWNMNILRWASGLIGGNEQSKKQAAHVEEYGKIGRRGKQVNIFSVASGHLYERFLKIMILSVLKNTNRPVKFWFIKNYLSPQFKDVIPHMAEHYGFEYELITYKWPTWLHKQTEKQRIIWAYKILFLDVIFPLSLEKVIFVDADQVVRADMGELYDMDIKGRPLAYTPFCDNNKDMDGYRFWRQGFWRDHLRGKPYHISALYVVDLLRFRQTAAGDHLRVFYETLSKDPNSLSNLDQDLPNYAQHNVPIFSLPQEWLWCESWCGNSTKSKAKTIDLCNNPMTKEPKLQGARRIISEWVDLDGEARAFTAKILGEETETPSEPVSGPRTEAIATDYAEEDRESMAEL

SEQ ID NO: 4454 - protein, 1594 aa, Dentipellis fragilis
MGVISVLASGLAVAAALSSAVASPPVKVALRSSWPSPPLLLELIETVTLEEPDAFFPLLDTLTDPANLPSKEPLAPEALHQLALEAATSLGYLSSPGAFESVEMQLALHAATPKIEAFYQHYADTSKSVLESNGTGDCGSWVDWYGEVVCDLDRLQHLVGAESIESQEQISHHAEFFPRPKILPFDHIYPSPSRVLETPPRTAIFHASMTSENFRELHAYLMRMSELSPAKVEYVYRPIPSSNAGKSRVSLSGYGAFLDLKKMDYLALDDRHSHEQDSDVENPDATDGSVSSNEADHIVTLLSPYALNDTLGLNEPLVEHELAVIGHQTTQLVKDSETPFATFKQLIEDFPKYMTAIARRVTVSQELTHEVRVNSMKTQAGMSLAWLNGGAVSDADMNPFGLLRLLRKERGLMTSLTALGIEPSAARDLLAHPAISSASSNELLDGIFDASDRPEGGDLIVWWNDIEKDSRYARWPSSLYTLMRPTYPGQINVVRLNFYNAIVVVDLSRTSSLDYLLGIVSNMIERGFPIRFGIVPIADTESGSKMAKLFYYLVDTHGRKRTMAFFKKLLLSDGVDAIPEYVDMAKARSVFEYLANTEEPVEGKIALDFPTIIEGAGEDELARLAKARAYTKRLGADPASDGHIFANGKYHPLDERLAQVIQFEITQMVQYLQERIYEGTLSDESSSEISTLFYDLPTAQKRRNKHIVPAGGAKDVRAVNVPQLFRTTGFQASSACFIYPTADSVPLTIFVIADLDSEAGLSLVEAALHYVKSSKARVSFIHNPSSNSRTYDRHRASSVLSRLQFHGLLSEKAPERLAEALELYTTVQADGGDQTVLNPEAALEEITEGIAFDEDLADFAAYLKAGRLLAREFGIKAGDAALLVNGRIVGPIGTGEMTTEDFTALQEYELFRRVQPVAEALEKIVPGFVDLNKTASAELISMASSVVTHVLTPDPSQSGLFNQPSISRNPTYEVLLGEQTKFDVGNKSTSMFHFAVVLDPLSEHSQRYMNLLHWLSQSPHVSVEVHLHPAPYHDVPLKRFYRYNLLPRPSFDESGQEIPSSVVFKNLPIEPIYTLGLDEPSSWLVRPREALYDLDNIQLGVLSREEARRGVEATYELDYLIMGGHAREMPANAPARGVQLQLTTSKSEPVDDTLVLANLGYFQFKATPGVYRLEIREGRGREIYDLQSVGNEGWDSPTVEKVGDQITLTSFEGVTLYPRLVRLPGMELADVLQVDEEDQLSGLGSVVSRVKSFFQPKTTDVATTLQKHADINIFTVASGLLYERFASIMILSVLRNTNHTVKFWFIENFLSPTFLEFIPHFAEEYGFQYELVTYKWPTWLRQQREKQRIIWAYKILFLDILFPMDLDKVIFVDADQIVRTDLKELIDLDLHGAPYGYTPMGDDNTDMEGFRFWKTGYWQKVLQGKPYHISALYVVDLNRFRQLAAGDILRTHYQQLSADPNSLANLDQDLPNNLQMHVPIYSLPEDWLWCETWCSKDRLDRAKTIDLCQNPLTKEPKLARARQIPEWEVYDSEIARFTRRLAAEGRIQSSVAAADVNELANAGAAKAAAPSSSADEPLVDEASDSPEAPVRDEL

SEQ ID NO: 4455 - protein, 1637 aa, Puma concolor
MPDEESESPRSTSAQLNKTEYFDLMNHLPCAVTGGRIADPPEHQPRRRRFRHRPHLRGSRIQPRGAPGTAPERDAHALRARQAPAPSNGLELPPPEVGGRGQRSRLCRGGCGLWAPGTRGSRFSLPAMAKATDVVRLLLGSTALCFSLLDARTALASKSVTAHLAAKWPETPLLLEASEFMAEESNEKFWQFLETVQELAIYKQTESAYSYYNLILKKAGQFLDNLHINLLKFAFSIRAYSPTIQMFQQIAADEPPPDGCDAFVVIHKKHTCKINEIKKLLKKATSRPRPYLFKGDHKFPTNKENLPVIILYAEMGTRAFGKFHPVLSEKAKNGEILYVLRHYIQKPVSQKMYLSGYGVELAIKSTEYKALDDTQVKTVTNATVEDGTETNEVQGFLFGKLKERYSDLRDNLTAFQKYLIESSKEMMPLKVWELQDLSFQAASQIMSTPVYDAIKLMKDISQNFPIKARSLTRIAVNHLMREEIQGNQKGLHARFEIQPGDACLFINGLRVDMSAYDPFRILDMLKLEGKMMNGLHNLGISQEDMSKFLKLKSHVWDHTYALDIRHSSIMWINDLENDDLYVTWPTSCQELLKPVFPGTVPSIRRNFHNLVLFIDPAQEYTLDFIKLAELLYYHKIPLRIGFVFVVNTDDEVDGADDVGVALWRAFNYIAEEQDVSQAFLSVVHMYQKVKNDNILTVDNVKSVLLNVFPDANIWDILGIHSKYDNDRKVGASFYKMTGLGPLPQALYNGESFKLEELNMKELEMALLRRMMDATVYLQRDVFMGRLNDRTNAVDFLMDKNNVVPRINPLILHAKWQYLNLISTSVTADVEDFSTFFFLDSQDKSAVIAKNMYYLTQEDDDVISSVTLWIIADFDKPSGRKLLFNALKHMKTSVHSRLGVIYNPTSKINEENTAISRGILAAFLTQKNSFLKNFLRKLAKEETATAIYSGKKIHTFLTEGMDKNAFQKKYNTIGVNIFRTHQLFCQDVLKIRPGEIGVVSNGKFLGPLDENFYTEDFYFLEKITFTNLVEKIKGVVENMKISSKNMSDLVMKADALISSLPKRESRYDITFLRENHSIIKIKPQENGMFFDVIAIVDPLTREAQKMAQLLIVLGKIINMKIKLFMNCRGKLSEAPLTSFYRFVLEPELRLVGNDITGPVAKFLDIPEAPLLTLNMITPEGWLVETVHSNCDLDNIHLKDIERTVTAEYELEYLLLEGHCFDTVTEQPPRGLQFTLGTKSKPVVVDTIVMANLGYFQLKANPGAWILKLRQGKSEDIYQIVGHEGTDSQPDLGDVIVVINSFKSKILEVQVQKKPDKIKEDLLTDKDEKKKGMWDSIKSFTRSLYKEKDEADVLNIFSVASGHLYERFLRIMMLSVLRNTKTPVKFWFLKNYLSPTFKEVIPHMAEEYGFQYELVQYQWPRWLHQQTEKQRIIWGYKILFLDVLFPLAVDKIIFVDADQIVRHDLKELRDFDLDGAPYGYTPFCDSRTEMDGYRFWKKGYWASHLLRRKYHISALYVVDLKKFRRIAAGDRLRGQYQALSQDPNSLSNLDQDLPNNMIYQVAIKSLPQDWLWCETWCDDESKQRAKTIDLCNNPKTKEPKLKAAARIVPEWVEYDTEIRQLLEHLENKKKNAILTHDEL

SEQ ID NO: 4456 - protein, 1522 aa, Pyronema omphalodes
MRIQAASLLLLASLFSRALAASPAVNVGLKASWNSAPLILELLETAALENEAAYFPLLDRISAGALDEKKTDKELYDEFLRLANDEGFLKNPEELSSFNLALSIHAAAPRIEAHYHFYDNNMGRWDPDCNVWVQLGLRQICSPKGELDEIIKTVTNDEKKLQFDRTLGTQEGKPTAILYADIMTPQFKRHHDRLKRYADQGKISYRLRYRRPYESEDRPIMLSGYGVSLVLKKTDYIVMDDRDVGDAENAKAPAADSAQQPLIKLENKESQDIKPISKEDMAGLGYKAASFIMASEDPFGTLQQLVQDFPKHSATIAAGEVNESVAKELDDNFAMMIGGGKNLFWVNGLLLDHSQVNAFALLDHLRGERKHIKSLQSFGLESSEAIKLLSHPVLAASKEEDKALRFDYRDDIEGGDVLIWMNDIEKDSRYSQWSDNPMTMLRRIFPGQLHPMRINMHHLVVPIDLTSKADLSFINNEIRQFIERKIAIRFGLVPLLTNDNAKDQSKIFYYLRDTYGLETALKYFETALEKNDFSKPSEEIFDEVIKGGKLRKDKTALPFELALAGEVISGRLTKLEAWSERMGFNIPAPPVLINGQPVAKEDDWMSSMSDKLQMDVQLVQRYVYETGGQDPEMDLRTHLLQGAAKRRNSYIFPEKEADVKMLDVTQIIESNKDIFEKLPSIDSDKPEVTSEASIWVVGDFDQNDGYDLLNAAAELQKEEQAVNLVLINNPESATEKSTLSSLLFQLHQSKSLTHDLLRKVLDEAHPAKTEDLLGAVKQNGWALPDTIEAGKFWKQSRVVLEKAGVKPGEKAIIITGRVVGPIPKDSTFVTADFQALLDYELTKRIKPVLESAQELGVIEKVKNSGPHSLSSLTSAIALATVPEVPNGLFSPPESTRSDVPGKMLSGDHTAISLGDASTSSIHIVATIDPASELAQKWVPLISALSSMSGVYTQILLNPVKQIGELPVKRFYRHVLSSKPSFDEAGRLESPVARFENIPEGPLLSLSMDVPPAWLVSPKESIHDLDNLKLSTLKERLRGSSVEATYELESILIQGHSMEANGNPPRGAQLVLGTPNTPNFADTIIMANLGYFQFKANPGIWEMSLKRGRSDEIFTIDSFGTAGPSKPTGVDEDIAVLSFQGTTLFPRVSRKAGMEEADVLESAVAGPPSVVDTAKQWLSSLGVLKYVPIPPALQDNAQAEINIFSVASGHLYERFLGIMIASVMRHTDKTVKFWFISNFLSPSFKDFLPVLAEKYKFKYELVTYKWPHWLRPQSEKQREIWGYKILFLDVLFPLDLDKVIFVDADQIVRTDMSELVNLDLEGAPYGFTPMCDSRTSMEGYRFWKTGYWASFLQGRPYHISALYVVDLKEFRAIAAGDRLRQQYHQLSADKDSLANLDQDLPNHMQSLIRIKSLPMEWLWCETWCSDEGLSKAKTIDLCNNPMTKEPKLDRARRQVKEWVEYDEEIAALAKSVKGAGHLSEAKEEKKAEEVKEETHEKAQEKIGEQKTEVMDNIEDKIEIKDEL

SEQ ID NO: 4457 - protein, 1559 aa, Alligator sinensis
  MOD_RES (166)..(176): Any amino acid
MAAKSALPVPLLLLLLPLPPWPGGAAASRKAVTARLAAKWAAAPLLLEASEFIAEESNEKFWQFLETVQEITIYKQGDSDHSYYNLILKKAGQFLSNLQINLLKFALSIRAYSPTVHMFQQIAVDEPPPEGCSAFVVIHEKHTCKTNEIKKLLKKAAKRPRPYLFXXXXXXXXXXXPTLKENVPVVILYAEMGTKDFVKFHKVLSEKAQKEEIIYVLRHYVQNNIFKQKSGSRKTYLSGYGVELAIKSTEYKAVDDTQVKATNDTTEEEGDEENEVQGFIFGKLRQMYPNLKDNLKEFRKHLIESTNNMELLKVWELQDLSFQAASQIKSTPVYDALKVMKDIAQNFPVKARSLTRVPVNQQMKNEIEENQKHFYETLGIQPGEARLLLNGLHIDLDFHDPFSILETLKMEGKVMHGLHELGIKEEALSKLRNLDIHPANDGYALDIRHSSITWVNNIEKDHIYSTWPTSFQELLKPTFPGVIKQIRRNLYNLVLFIDPVQENAADFMKLAELTYHHNMPLRKQFIAVTKHNCMGADSFKNGSLDENCMRVGVVFILNTNEEIDGNEDAGVALWRAFNYIAEESDISQAFISIINMFHEVKEGDFLTVNHVKNVLRNEFPRANVPSILGIHSEYDEERKAGATFYKKIGLGPLPQALFNGVPFNSEEMNAAELETIILQKIIDATGFFQRAVFMGLLNDQMDTADFLMEQYNVISRINPTIFSTERRYINFISTSVPVDTEDFSTFSFLDSQDKSAVISENMKYLTRKDEDVIYAVTIWIIADFDKPAGRRLLSNALKHLKTSSHTRLGLVNNAGSKITEDNTAIARGILTAFLTQKNSSLRSFLSKLVKEETAEALAIGTKIKEFFVLGIDDNIFEKKYNTLGVNVIKTHQMFCQEVLKLLPGQMAVVSNGRILGPLDENEFYTEDFQLLEKITFSTSGEKIKAIVKEMKISNKRASDLIMKVDALLSSLTKKEMRQAVQFLKEHHSIVKIDPQQNEPFYDVVAILDPLTREAQKMAHLLIVLRDIVNMKLKLFMNCRSKLSEVPLKSFYRFVLEPELTAGANNLFPSEPVAKFLEMPESPLLTLNMITPESWLVEAVNSSYDLDNIHLEDIEGIVTAEYELEYLLLEGHCFDITTGQPPQGLQFTLGMKNNPVMVDTIVMANLGYFQLKANPGAWTLRLRKGRSDDVYHILYHEGTDSPAGLKDVVVVLNNFRSKIIKIQVQKKANKINEDLFNDGVTEEKGIWESVTSFSGGIQTEEKKRKNYSLNIFSVASGHLYERFLRIMMVSVLRHTKTPVKFWFLKNYLSPTFKEVIPYLAKEYGFQYELVQYKWPRWLYQQTEKQRIIWGYKILFLDVLFPLAVDKIIFVDADLIVRDDLRELRDLDLNGAPYGYTPFCDSRTEMDGYRFWKSGYWASHLGKRKYHISALYVVDLKKFRRIAAGDRLRGQYQALSQDPNSLSNLDQDLPNNMIHQVAIKSLPQEWLWCETWCDDESKKKAKTIDLCNNPQTKEPKLKAAVRIIPEWVEYDSEVQKLIKQIEREKKSLTQSSQKIFKRDEL

SEQ ID NO: 4458 - protein, 1389 aa, Naumovozyma dairenensis
MILINILLVLLTLAFRTFSIGLDVSSFGVHEAVVAWSILTHLSSSSLFSNEPTFHELEGLYSIITGLDESVDYEEIDLIPYIEQLLTEKYNNPDIASLFSLYTELYPMGIINNDLQKQLRHYAIEENENCFILNGKKYTKPDDIFYLKSNDLKQQALLPDSQIVLSNEYIISDAAAPATTTAENGNSPILTFYGCPNNNDLFNEFNRNLFSEITSKSGKFRFIWRSTCSIGSNNEEYKEIQFPLALTIKENSDFNSLSNKKTNEFKIPLDIPKRFQNDQYEHYNPSETELEELDMKVTYLISKYYKQTSNLTSTSKFAKGIINNFPLLMSQLIQVELPPTALKKIKKSNSDLEKFGVDYKMLGLYVNGQYIKLSSLNEFSLLNMIVKEHSHVSKLLFLFENMFPNTMKPTLSSVKKIINYFSSISLDNLNTLQPIKYNLHMIPGFSESVIYFNDIEIDSQYDELSNDISAFFQESKFGELPEYRQNWNELIFVIDFNNLQDESTIHALKGLITAINVITQGYPQRIGLLPLDTSQGTNLLVQRMIRKVYELKNFDLIELQSFLQELSEINEDVDLDMEDENYPSPNVNKLLKNLQIFETSIIIDGEIYPFKKNTWHYLIAKVIKKDVSYLKNELRQIANKIQNNAANPVKDVRSLLHMKSGNARHSKYTPDYFSDAVYTTMNNTVLFEIQERIVEYVASEEYNLLHTITLFDDFNTLSSLKRLQNLLENTYSGIRVRIIHNGSMKGKTWTKLKKVLEKKKNVKSQLSALIQQTKNNEYEGTSSINPNMLARWLPDISVPFVPGLSSFMIINGRFIHFEPTEIPTTTNFEAIIKREAQRTLQTTFSLIKEFPTLEDAKFNPDLIEMTSALLTKEFYHSTNVFDNGIEYSTENYFPRLNLDELLKFNSYTTLQSNSHNSIKPVDILLLIDPLEERSQKILSLISKLKNLSFINLQIILLPTEKLKIVPIERIYIDNPIEETYPLPNILMENFEVDIDIPSQFSSNNFQELKKISIEVHTFPTNSYPSQSQVDGIGGVCLELINSQGDVVDTTTTMATFGYGTLHANDINTKYQVRSCGDDFIIGSFSVNTYSDYIPVDSFSIADFTPIKLYVQVMKNPNFHEKVKKVDDNNYHVFTLLKDDPDEETIYQDMVFSLLKNPERKQDSILHFWIIDQPFFSQEFREFIRLINEETENLRGIIHLFSYDWPSWLRPQRFRSRTLDVSKILFLDTLFPQNISKVLYMNPVAQNIVDPAKVIDQYNVDNAFSMLKMNGKGYWNEGYWSKMLDENNLEFYSVNPFFLINLENVRKNEVCEKLRVHYQRLTTNINSLQVIDQDLLNDIQLLVPISALPDKLRTISVHSTETNFLQWKQNKEQKYSQIKTTQEQISHDEL

SEQ ID NO: 4459 - protein, 1260 aa, Chaetomium thermophilum
ETGQVAASPSINVALKAAFPSPPYLVELLETAASDNTTIYYSLLDRIAKGHFAEATTDKALYEKFLEVLRDDGHMDPEALSAFKLALSLRTATPRVEAHYQYYTATVEPSLSGTQEGCDQWFLIDGEQYCSPTLDTSHGKVKGEDQLRTLPFDRKFGVGSRDVILYADITSKSFAPFHEVAMDLAKKGKASYRVRYRRSPSHSRESLSVNGYGVELVLKRTDYIVIDDRDTGAAAKPAEENDQKPLVGHETVLDDGEEIADIKPLEKSELAALGMKAASFVMQSEKPFEALLKLTQDFPKYSNSLGSQNVSAEFEAEHRGNREVFLPEGSNVLWLNGLHLIDRQIQPFGLVDLLTRERKLIKSVLDLGLTGQQAVDLLGHAEVAHAKSGDDEPRRFALSRRNTLIFPEDKNELTVLNVNKIYIENHDLMSKVPVIEASKESTRDDWAALTVVADLDDIEGQELVYYALRFRKSNDGVRLDIVHNPKDTSRSPSVLAQRLKSREDKLLDFTRFLDLETALETGEFEPDVAYDASLANFLASSNMKAGDNFVILNGRVLGPITSADDFKKEDFEVFLQAERRTRILPVYKALEDLGLDDKVSGPLSAAKLTSVTALSTISDLPQGIFDNAPTVRTTLFKQWNSTYTSFEVGDASTATIFFVAVINPASEIGQRWVAVLKVLSELEGVHLRVFLNPTVMIEELPVKRFYRYVLSSSPSFDESGKVKALSARFTGVPRETLLVVGMDVPPAWLVTSKVAVDDLDNLRIKDIKAKRGTEHVEAIYELEHILIEGHSREIPGAHAPRGVQLVLETENNPHFADTIIMANLGYFQFKANPGVYNIRLKEGRSSEIFTLESVGAKGWGPIPGDDNTEVVLMDFQGTTLYPRLRRKPGMEEEDVLEPSTKSGEESGSGARNLVSRGIKFAEGLLGRGNKAAEATKSVSKTEHAEINIFSVASGHLYERMLNIMMASVMHHTNHTVKFWFIEQFLSPSFKDFIPHMAAEYGFKYEMVTYKWPHWLRQQKEKQREIWGYKILFLDVLFPLSLDKVIFVDADQIVRTDMYDLVEHPLDGAPYGFAPMCDSRVEMEGYRFWKTGYWANYLKGKPYHISALYVVDLQRFRELAAGDRLRQQYHALSADPNSLANLDQDLPNHMQFTIPIATLPQEWLWCETWCSDETLKDARTIDLCNNPMTKEPKLDRARRQVPEWTKYDEEIAELARRVREEKPKKKEEEKVQKNPKSRRLDGDEEEVKTVREGTKHHHHHH

SEQ ID NO: 4460 - protein, 1488 aa, Ophiocordyceps sinensis
MARPRSLPWALCAAIMAALPAMAAPSVNVGMNAAFSAGPYLLELLETAAAENETAYFPLLDRVASGCFASASSDADLYNEFVAVLKNDGHMPGSETLSTFNLALSLRSAAPRIEAHYQYYATAMEPLVTDSQCENWVLLEGQQFCTPALDSSVKEGLTSSRETALPFDRTLGSGREAILYADPTSDSFGEFHRALCKAARAMRLNYRLRYRPDKTSAVQPLPVSGFGVELALKRTDYIVIDDREDASDSVQQPLGSGDILDGQEEVADLKPLSSSELASLGLKAASFIQKSDSPFETLVRLTQDFPRFSAFIATHSVSETFSNAREQSLANAAHGGANFLWMNGVQLIDRQIEPFALLEMLRRERKLINSVRDLGLSGKQAVSLLGHSTISTAKGEEESPRYDWTDRLEDGRVIVWLNDLETESRYDDYPKTLISLLQRTFPGQMPPIGLNVFNLVVPVDLSNSDDVKVVNQIASIMSRGIPIRFGLVPLTSTAEATAQAKVMYHLLENHGVQALLAYTERSERDTQTAVDERHFAKVAAAGDPLPGSQRMSLSEVLEAETFEKQIELARHWAERLKVDTATRSLLINGVIIARDQNWMQTMSVKIGEDLQTIQKGIFQGALDEGTWIPGIFLEGAATRRNVYIALDNEKTLRMLDVSRLYTEHATLFGTIPVLESYAESTKENWATANIVADMTTQDGLKLVLAALEFKRNNPGVRLELIHNPENSSSASQMNWALKSNEGILKDIETIDELSALPKATESAAADDNYALGLSAFLKMGKIEPGKKVIILNGRVIGPISAGDPFTADDFQQLLEFEQKRRILPVYAAFDDLGLSDKLSSAVTAAKATSIIALSMNSDLPEGIFETAPAVRSTLYDSWNSSHAAIEIGDSEKASIHITGLLDPVSEKGQRWAPILKVLSELNGVYLKLILNPHEKIAELPLKRFFRYVMDSKPSFDERGKVRALKATFGGLPSEALLTVGMDVPPAWLVAPKESVHDLDNIKLSSVRSDVDATYELEHILIEGHSREGRGKPPRGAQLVLATERNPMVTDTVVMANLGFFQFKANPGFYNIRLKEGRTAEIYAIESIGAQGYEAAPDDEGTELALMDFQGTTLYPRLKRRPGMEQQDVLETADGSSASSIVSKGIKFAEELFGGSKSKSVSAQEINIFSVASGHLYERMLNIMMVSTMRNTKHSVKFWFIEQFLSPSFKEFIPFLAKEYGFKYEMVTYKWPHWLRQQKEKQREIWGYKILFLDVLFPLSLDKVIFVDADQVVRTDMMDLVNLDLNGAPYGFTPMCDSRTEMEGFRFWKQGYWATYLRGRPYHISALYVVDLRRFRELAAGDRLRQQYHALSTDPGSLSNLDQDLPNHMQFEIPIHSLPQEWLWCETWCSDESLAQARTIDLCNNPQTKEPKLDRARRQVPEWTVYDDEIAKVVKKWRQGPRGNERPGDTTPIDKGVRQPDAIGEEKQREVNIKSRKWDKGEVHPKDEL

SEQ ID NO: 4461 - protein, 1681 aa, Trypanosoma theileri
MSYHTIQANIGSRLTAVVALLLCFGTVLQLWGISIAEAKGVHVTVAAPWTETPFLQEGCEWAAVRESNRDGFYECLQDVWHHVGALNNNNNNHNNNNNSISSIAGGALTLTQKSQYEMLFDIMERKNRSSYQMALLKMKLAARVYSPAVEAHWALARIAMRLADGCSIEGKPFVMIFGNAICNEHTLEKMLKDLSLSYSKDTNKRENNKEVEKETMMLFPKLDHIHPESKGQHVVILYGLVGEQQTMRLFKIIQSYLHIVRFAFRHLPVTGGMWENPLFVQGYGVTVDLKNVEYKVMDKKSSETETEQQENKSEGEGRDIEPVGGFDLNILKRRYPNLTKQLNSFGDYLAEMIDREEVKVDFHMWETQHMGGAAVKQVMNAAKEERLNVLLNILTNFPLHASKLSKMGSATGGAIDGEMQQVMMQLLSLVQAGSSLAFLNGQRINTPEMDLFSILEKIEAEDKLLESLTQILTSYHLPSPETDNGFLSVESTKMTGLLNDITETVQNRIALKGLDLKRATTRIWFPQKSILWINDIEKDSNYEHLSLDLNTIFETSYSGIPQIPKRNLLNIVGIVDPTTPEGHQAIITLMKIVAQGQPLRAGIVIVNPHWLPEIHVSIDKKEDDVEIPEKSSPSKAIMMIAATLWELLRENTGNAREAIQFMVYLREYVINGQTISDSDINVVAESILSMANKRSLLEIMGDKDFNKYYHETQETIYNLHFKEFPTILINGNMFSGDVLAALEKGLMMELSHIRDLVGEEKIKNTDVDMYESIMESSGAIHRYFRDLYEDQVYVNWASKSIIDFLQYRSFLFPLSNTKEVPLLSTVLRVQAPLKSRDLQAILKITEELYECKDRSEKCRFIRHTFAICGMLKDNKRRTLAVDLERLLINENINGNNKDGSRRLEFMREFLLKVIPKSDKIDMNNPDVYEKFLSTVHFSSDMEKVLANTSPKSDILLKEEEQEKLVDGFCKDMRNSHTLLTGEVEDIKSIYYYVNGRRFTYSDDYTLKDLEDAALRELSFAEIVGEVIKDIHFEKIHTYLQKNKPNNAFYASKISAVSALLKEYYIRVDLPKEYQHLPPAPGPISFVVNPISGKQPRHRFTIILDPISQKSQLLVSLCDYIVHSPIDASCTVYLNPSQHSGKPMRNFYQFVGDVNVNFDNTGRVIPPAAIFRRLPSKHLLTLGVVEPEGWTVFPMKAQYDLDNIILSSLPQASQYLYAIYRINSILITGSAKESGGSTPPRGLPLLIRSLRNNTNTNRNSVNSANSNSGSLTRDTLVMANLGYFQLQSTPGVWYLTVQPGAFAKSFYISKVKGVRTNYVEKIEYNGVFNFSKGQSIPIVVSSFTGEFIKLEVAKVPGEGNVQIGDLVEASAIHMEWPPRGPQKTRPVRPTLNIFSVASGHLYERFLRMMIHSVMKTSSDVHGANTTRIKFWLIENFLSPQFKELVPLLAEHYGFDVGFVTYRWPWWLNKQTEKQRTIWAYKILFLDVLFPLEVERIIFVDADQTVQADLHELYNMNIGNAPTAYTPFCRKHPNEATKNFRFWDQGFWLRHLNGKPYHISAIYLVDVRRLRAIAGGDKYRLMYSQLSRDPNSLANLDQDLPNFMQEEVPIYSLPEEWLWCETWCGAESKAQAKTIDLCNNPLTKIPKLENAKLIIKGWEEMDAELETLSEKLRQEHHAKQQRK

SEQ ID NO: 4462 - protein, 1524 aa, Thamnocephalis sphaerospora
MRKHCPPFAALVALLLGAAELASAGTPPVRAGLRTPWAAPNILLEVGEYIAAENASAYFPYIGAVTKSLPEARTPAALHQHAFSIIKDNGFLAGDLALPLLNMSLALHTGAPAVEADYQYYRVEVAPHAEARDACDVWADWQGQRACSPDELVKLANLHKGATPRLHEHDRTLGPKGEEKGTVVLYGDIASPQLPAFHQFLIKLSESAGVRYVLRWKPSDADDATQASTEKLWLAGYGVELALKSTEYMVLDDRNKKDGDADKNAESGDEAADAAEDDDSDGNEKLVDDDVDAELGMNAAQMIVAARNPLAALRKLSGNFPKYAPHLAGRKPSKELQDEIGRLQALSTKPGVTGLWVNGVPLNLQFTGVFQLLRLLRSEYAGVTALQQLGLSANQAVELLYHAHRLNEKSRKMAWFGEAYDVRDHVEGGRAVVFMNDIEKDARYRSWPRDLFEILRPTRPGQLIRLAKNAVTVQIMLDLSSVQSLIAISKDVLDIIQANVPMRFAVVPIVGDDEDANGTKMAKLFYYFSQQYGRKGFIQFFDKERADKKKKKAKKAEEGENTDADDAAATPVKLSLEEVLQADSEATALTAAARAMCRRLRLRAGKDEAMYVNGKYYKFSPVDYRRHLADIYNSIIQYLQQRLFDGGVEEKTDIYEHFLTLPEVRTRMNPHVYEETPRSINWLDTKTISPAALRDILYINGGESSCLDADQHHHARTLTLPILPQATTSQLRIAALHNPGQKTVQPLVPASFFYQLARKPLSKEHLQAAIAELDRVIAGKVLLDEGDDESAAAVAAHNAAAATIVAAVGAQSADRYIVINSRIVGPVPTEDRFESDDFELLIGYERENRITRPHQYLSALSVRPEYSDTLLYASSILGRLAQSSFVGDAFDKPGVIQRENTMDRIGARHALFTVGTPFKSTIRVQAILDPLSEMTQKWASILEVLGGISGVSVQVYLNPNTLMQELPLKRFYQFLMPSRLEYDEQTGATLATRATFTDLPEDMLLTMGLDTISAWLAMPTVSEHDLDNLKLDSSSRFSSVDAVFELEHLLVEGHVRDLTPDNPRGLQLNFGTTANPAQEDTSVMANVGYFQLKANPGVFHLTIREGRSSEFYRLQGIDRVMWNNEDEAEGSAASDEQEETKVDTRITINSFEGVVLFPTVRKRPGYETRELLGEDGEQDHTLLGSIKDKMTGWMGGKKADGVAPGKAEINIFSVASGHLYERFLSVMITSVMRHTKSTVKFWFIENFLSPSFKDFLPHLAKELNFDFELITYQWPHWLRKQSEKQRKIWGYKILFLDVLFPLDLEKVVFVDADQIVRADLKELVDLDLQGAPYGYTPFCADREEMDGFRFWREGYWKTHLRGKPYHISALYVVDLVRFRAMAAGDMLRGQYQALSADPNSLANLDQDLPNNMQDDVPIFSLPQEWLWCETWCSDASLKQAKTIDLCNNPLTKEPKLDRARRQIPEWSEYDAEVAALAARVAAAKEQQSTEQPTEAETPTSSNSDEEYEADADVDAEEDAEHDEL

SEQ ID NO: 4463 - protein, 1620 aa, Sus scrofa
MGQKPSSVSRLCVLSVQEGRGITGASRTFRIPAPPAPTWLGVRPGGSWAGSERSAHAPGTRQGPARVTDSGSPHRKWEAARREEPAVAWRLRAGLWASGPRGLRFSLRAMAEAADAVRLLLSSTALWLLLLGAGTASASKAVTAHLTAKWPETPLLLEASEFMAEESNEKFWQFLETVQELAIYKKTESDYSYYNLILKKAGQFLDNLHINLLKFAFSIRAYSPTVQMFQQIAADEPPPDGCDAFVVIHKKHTCKINQIKKLLKKATSRPRPYLFKGDHKFPTNRENLPVIILYAEMGTRAFRQFHTVLSEKAQNGEILYVLRHYIQKPASQKMYLSGYGVELAIKSTEYKALDDTQVKTVTNTSVEDKTETNEVQGFLFGKLKERYSDLRDNLTTFQKYLIESNKEMMPLKVWELQDLSFQAASQIKSTPVYDAIKLMKDISQNFPVKARSLTRIAVNQHMREEIQENQKYLLDEFEIQPGDAYLYINGLHIDIDSYDPFSLLDMLKLEGKLMNGLHSLGINGEDMSTFLKLSSRGWEDTYALDIRHSSIMWINDLENDDLYASWPASCQELLKPVFPGSIPLIRRNFHNLVLFIDPAQEYTLDFIKLAELFYYHKIPLRIGFVFIVNTDDEVDGTNDAGVALWRAFNYIAEEHGVSQAFISIVHMYEKVKNKNILTVDNVKSVLQDKFPHANIWDILGVYSKYDDERKAGANFYKMTGLGPLPQALYNGESFDGEELNVNELEVAVLHRIMNVTKYLQKEVFMGTLNDETNAIDFLMDKDNVVPRINPLILQSKWQYLNLISTSVTADVEDFSTFLFLDSQDKSAVIAENMYYLTHEDGDVISLVTFWIIADFDKPSGRKVLFNALEHMETSVYSRLGIIYNPTSKIDEESTAISRGILAAFLTQRNNFLRNFLMKLTEEETATAIYSGAKIKTFLTEGMDKNAFEKKYNTIGVNIFRTHQLFCQEVLKLNPGEIGVVSNGKFLGPLDDNFYAEDFYLLEKITATNLIDAIEDIVETTEIDSEDLSDLIMKIDALVSSLPNHASRYDVTFLKENHSIIKINSQEEDMVFDVIAIVDPLTREAQKMAQLLIVLGKIINMKIKLFMNCRGKLSEAPLKSFYRFVLEPELTLTANDVAGPVAKFLDIPESPLLTLNMITPEGWLVETVHSNCDLDNIHLKDIERTVIAEYELEYLLLEGHCFDITTEQPPRGLQFTLGTKNKPVMVDTIVMANLGYFQLKANPGAWVLKLRQGKSEDIYQIVGHKGTDSQQERGDVVVVLNSFKSKILQVQVQKNPDRIKEDILSDKDGTKKGMWDSIKSFTKSLRKKDEKETDILNIFSVASGHLYERFLRIMMLSVLRNTKTPVKFWFLKNYLSPKFKEVIPHMAEEYGFQYELVQYRWPRWLHQQTEKQRIIWGYKILFLDVLFPLAVDKIIFVDADQIVRHDLKELRDFDLGGAPYGYTPFCDSRREMDGYRFWKTGYWASHLLRRKYHISALYVVDLKKFRKIAAGDRLRGQYQTLSQDPNSLSNLDQDLPNNMIYQVAIKSLPQDWLWCETWCDDESKQRAKTIDLCNNPKTKEPKLKAAARIVPEWVEYDTEIRRLLDHLENKKKNAILTHDEL

SEQ ID NO: 4464 - protein, 1538 aa, Rhizoclosmatium globosum
MQLSGLLQGLVIVGSTATTVLGAPTITVHLNATFGAPSFVVEAVETASLLTPVFPLLTLLTSNHNNNFNTNTTTHSPNVLASIQSIPPFSNDPISAKLLSLSLAAHVAAPRINAHFNFYNNVVNQNYPENNEVASKRDCASWVAFNSKKYCKLDLDALEQTVYSETSFSETEDDEPLSLDHVYSFSDSAPRAILYADLTSTDFKLFHLTLSKWADAGHIQYVLRYKPSSFSEKEASKTGTLDPLFLSGYGVELAIKSSEYKVIDDRATSQKVHDDATVPKEDAILNEQSDEEASLFDFGADQEASMQSLSAEDIKEIGVKAASIILAAESPIEALIQISQDFPKLSHLIAKRQVTSSMRQEIRKNQRTIVAAGTNAVLLNGVQLNLKELNVFSLLSAMRNELALIQSLKTLSLSSTQAIQILTLPPSANSKSSSDLGWGDAFDVRDPSVVWWNDLEKDARYKKLPNSFTELLQPSYPGQLKYIARNIFHVLFVFDLTNIEHLMIQLDVFKYIEHSVPLRFGVLPLIGDGKENSGALLAARAFLHIIKAHGRKEAKEFIVQLHGLIKTNLNHQDPVDSAKLVGIAFEKVVSKGFLELMQKHEDAEVLVSYKKLLNRLGLLGDVGAVFMNGKYIDLDEGWQQNMLAPYPKMLQFLQLKVYEGKVSEKDNLYDVFMTQPNVHQRRNPYIYASEEHPLKFVDFLAPNVDQTVLRDMPYLSERDAPIMSIQVIADFESASGLQLAVSALEFASNSPNSRIAFLHNPSTNKITTLQTRTPLHKAVHLLVKQGKAQGAASLLVDAIKALGKGDFDFAGEGKLFDQSVVDSMDGNGKFEVWAAKAKIFVKKVVGFEAGESGVVVNGRVVGPFESPARFTEEDFELLAVNEYRDRVERIDDALNGMELSGVEDRESWTPDALMKISSTISASQSGSKLDSGDAASKNRAVTDWGENLYSLTVGDVAEASLRFTVVLDPLSETAQKISSMLKVLSKIPGVSIKLLLNPVPMLEDLPIKRFYRYVFQEEVHYDSQGKRVAAQAQFKNIPTEPLLTLGLDVPRAWVVRAVDSVHDLDNLKLDALKPGQNVDAIFQLNNILVEGHARELHSSTPPRGAQFILGTPSKPHIVDTITMTNLGYLQLKANPGVWQLRLREGRSNQVYQIDSVPDKYMGKGGESKGDGYATVVVDSFEGVTIYPVVKKRVGMEAEDVLEPVDNVPVTSPSSAAKTKKDPVGAVWDQLKSRVWGDSKKGVQTTASNVTINIFSVASGHLYERFMGIMMLSVMRNTKSPVKFWLIENFLSPKFMSFVPHLAKEYGFEYEFITYNWPHWLRATTRKERTIWAYKILFLDVLFPVGLDKVIFVDADQVVRTDMKELVELDLEGAVYGYTPMGDSRPEMEGFRFWKTGYWANHLQGRPYHISALYVIDLKRFRQLLAGDRLRQQYQMLSSDPNSLANLDQDLPNNMIHEIPIFSLPKDWLWCETWCADNELRTAKTIDLCNNPLTKEPKLKRAKRIIKEWTELDNEVQAVADRVEAEAAKTIGQKRHDEL

SEQ ID NO: 4465 - protein, 1347 aa, Tetrapisispora blattae
MLFSISFLLVFWLKITVLAAAAQTPESFKIWSILCYLIGDTDPKLLTSLFPIVTQLEESSLNENNGDLNLVDYISYVLEMDFDRAELSSLLPIFAKYYPLGLSISQHNISSKTYFELNGQKYNNPDDVFYLKSSDLKKQKQLDDLDDAFYKYPIIGEKLEAPIVKLYGCPIDNSNFEDFNRNLYSEASTTGKFRYIWIPTCIPEGNFSPDTFFMSATPIKVTDKKFSRLEWNNEEINIPDDLKEASYTVFNPTPEDLKDLDIKVASLITDRFQKRKNIKDIIMYTKELVNNFILLGERLLKLNINEKILAANEEWKSLGVDYNLLGLYINGQNIKLTSLNEYTLLNGIVAEYKRMIFLKNSLLNYGKNLKDDLVKKLLNNFSQLSLSNIQESQPIKIDLHKIPGFSESIIYFNDIEIDAQYNELSSDIGVFFDKTKYGEIPELRQNWNEVVFAINFNRLEDDITKEALLGMLRAIEVTLQGYPQRIGLLPICDDEKILSKIYKLKNRNLENLTKFLEGLLEGKKPKSLTTDIDIPNVKAITEDLQIRDNYIIVNGEIYPFLANTWRYLITRVTKKDIDAIRRGLKKYHNMNDKNINVRGILHLASTDTRHFKYTPDYFVDADYTPINNFALSSITDRVLEYINNDNYNTLHTISLVGDIDEEDFIRNINNALSIGFDGVRIRIIHTGSISSRNWKLLKSSKKSDLVNILTDLKGATNKSKTKDELQRNIFKDWLLEINADRLLSSSFITLNGRFIHLNKNEIISSIQFKSLVMREARRTLDCIKALDTIIPDYSEQRVDADFIESITSILSKLFYQGTDYFHNGIEFTAETQLSRVDFSGLLSKKIITNLNDKSKSDELIDLLLVLDPLEERTQKILSLVNEISSLPFVNIQLLILPTKELTINPINRFYGNNMKSIVNEKQSFFDIEYDIPSMVILNEENNKFEGLEIIVHTFNFEEPIISSNVDGLSGICLELVDSDGNVESQTTTMSTFGYGRFEVHNLLNNYTIRSCDPRYEVDSFSMDCRSDYIPQTHISIASFSPKKVFVKLKETGEEVISNGNTNNNYLNIYTVLKTEEDEELYKEMVIKLMSSLKEDQRLRFWVIKDKFSNNMETFRKTLDVIDKDHSQIELNFIKFNWPYWLRPQRFKNRRLDVSKMIFNDILFKPDVNHVVYMDPQQEPFDPFQLYESEKMKKGPFVITRMRGKGYWNEGYWDKMLKEKKLRFHNIHPGFLINLNTLRETHGSDKLRVHYQRLSGDVVSLNNIDQDLINDIQSEVGISPLRRTLLAPMALDDTKYSHLKSKFESSAKSLNIQETTLETLNPYPDDLLDDDLEDNGSEDNGFFEQDEL

SEQ ID NO: 4466 - protein, 1447 aa, Cricetulus griseus
MGNLRPKVSHLDAEGGIGSVVPGFCYNMGLLIVLASLCLFSLVEANSKAITTSLTTKWFSAPLLLEASEFLAEDSQEKFWSFVEASQNIGSSDHHDSEHSYYNAILEAAFQFLSPLQQNLLKFCLSLRSYSASIQAFQQIAVDEPPPEGCKSFFSVHGQQTCDFDSLETLVLTAPDRPKPLLFKGDHRYPSSNPESPVVIFYSEIGHEEFSNIHYQLKSKSKEGKINYVFRHYISNPRKEPVYLSGYGVELAIKSTEYKAKDDTQVKGTDVNTTVIGENDPIDEVQGFLFGKLRELYPNLEGQLKEFRKHLVESTNEMAPLKVWQLQDLSFQTAARILAAPVELALVVMKDISQNFPTKARAITKTAVSSQLRTEVEENQKYFKGTIGLQPGDSALFINGLHIDLDTQDIFSLFDTLRNEARVMEGLHRLGIEGLSLHNILKLNIQPSETDYAVDIRSPAISWVNNLEVDSRYNSWPSSLQELLRPTFPGVIRQIRKNLHNMVFIVDPVHETTAELISIAEMFLSNHIPLRIGFIFVVNDSEDVDGLQDAGVAVLRAYNYVVQEVDGYHAFQTLTHIYNKVRTGEKVKVEHVVSILEKKYPYVEVNSILGIDSAYDQNRKDARGYYEQTGVGPLPVVLFNGMPFEKEQLDPDELETITMHKILETTSFFQRAVYLGELPHDQDVVEYIMNQPNVVPRINSRILTAKREYLDLTASTDGHLGVLHNSDLKSYGEPMRSLFQTFNGISPNTWKYDNFFVDDFARFSSLDSRGKTAAIANSMNYLTKKGMSSKEIYVRGNGCHLKLYQDLKLQNKVIENNCQGMDVSLFKEAFESSKMDSILSHALYCRDVLKLKKGQRVVISNGRIIGPLEESELFNQDDFHLLENIILKTSGQKIKSHIQQLQVEEDVASDLVMKVDSLLSAQPKGEARIDYQFFEDKHSAIKLKPNEGDTYYDVVAVVDPVTREAQRLAPLLLVLTQLINMNLRVFMNCQSKLSDMPLKSFYRYVLEPEISFTADNSFAKGPIAKFLDMPQSPLFTLNLNTPESWMVESVRTPYDLDNIYLEEVDNVVTAEYELEYLLLEGHCYDITTGQPPRGLQFTLGTSANPTIVDTIVMANLGYFQLKANPGAWILRLRKGRSDDIYRIYRNCRTNTAVVWVFTAFGDCDLYSVLLFSLSHDGTDSPPDANEVVVILNNFKSKIIKVKEFIPYMASKYNFQYELVQYKWPRWLHQQTEKQRIIWGYKILFLDVLFPLVVDKFLFVDADQIVRTDLKELRDFNLDGAPYGYTPFCDSRREMDGYRFWKSGYWASHLAGRKYHISALYVVDLKKFRKIAAGDRLRGQYQGLSQDPNSLSNLDQDLPNNMIHQVPIKSLPQEWLWCETWCDDASKKRAKTIDLCNNPMTKEPKLEAAVRIVPEWQDYDQEIKQLQILFQKEKEQERTQRPQKHEEL

SEQ ID NO: 4467 - protein, 1494 aa, Glomus cerebriforme
MLIILFLISRESVSVENSTAYYPLIDEFISQELFSSELTDQEVYNEALGVIKSKQYLSTPTSVSILEFSLSLHTTAPAIQAYYHYYNATVVPSKQEFDDNFNPECDVWVDWYGHQACNVEDFEKLSGFGNSGQHPKLLPFDHILSSNAETSTPLVILYADVISPSFVTFHQFITELVDNGEAEYVLRYKPPKKSQDTLYLAGYGVELALKKTDYIVIDDRKVETGRILISNSESYNDSRSEKLSDHLFEEDISDIKPLTTRAIKELGVKAAQFITASQSPLSTLAHLSQNLPKYSYHIAQLNLNSSLQQEIRINQNYVGLKSNSFWLNGLIVDPSSIDPFSLLKMLRRERQNVLSLMSLGMNSQQAIDLLASPIISELKSSQDLIKGIFDVRDKSDKKNILIWLNDLEKDERYSSWPTRIFDILRPVYPGQMRYIRKNLFNVLFVIDLSSTENLNIITEIKLFIERNVPIRFGLIPLVDKEKNESLIMAKLFYYLVGQYPKSLTMQFFSQNKSVNKVKIAEKQFNKVISDQTPKDKTSVRSFYEIIKSDGESLLEEQIFGATEFINKFRINTDGKGAIFVNGKYFDMDDNYQRDMVQTINEHTAFIQQKIYVGEISDHTDVSEYFMTLPNIPSRRNPYVFISDLQILNVINLADEKNGNSEKLNNLRYIYSMKQDDNEVPISLLLVTNFDSEYGAKQGLEALKYLDESPNVRLAFIHNPSTQTSAHKIKMPFVEQIGESQEISISDSEKINSARSFGWQSVDKVKSQTYWRGWNSFTRKTLKLNENDTAIIVNGRVVGPFINEDLFVLEDFKLLIDIEVSERIDPVINATKAVNLTMYLSNYSDFVTKATSIIAASMISDVPVGLFDGQELKRDLSFKKLKSKHSKVVIGDIEAALYKISVVIDPLSETAQKWSTILEILSQVDGVAIELYLNPRMGLNEIPIKRFYRYVLEPRLNFNSTTGNLIAPSAYFSNLPEDPLLTLGMDVIQAWLVTPKVSIHDLDNIRLANLDSRSRIKGVESVFELKNILIEGHARDMTLNAPPSGLQIILGTKNYPSMVDTIVMANLGYLQLKANPGIWIFSLREGKSTEIFDIQSVGSEGWYSRNVETIGNEIVLNNFEGLIIYPRFTRKPGKENEDVLKFEGKDGIWDYIFNGILTVSFRRFSNKDVSKQNKAEINIFSVASGHLYERFLSIMILSVLRHTKSSVKFWFIENFLSPSFKDFIPYMAKEYNFEYELVTYKWPHWLRAQKEKQRTIWGYKILFLDVLFPLDLDKVIFVDADQIVRADLKELVDMDLQGAPYGYTPFCDNRPEMDGFRFWKHGYWKDHLRGKPYHISALYVIDLQRFRHMAAGDQIRGQYQSLSADPNSLANLDQDLPNNMQHIVPIFSLPLEWLWCETWCSDESLVGAKTIDLCNNPLTKEPKLDRARRQVPEWESYDKEVATLAARIFQSLKTLITESNSQSGSAIEESSESQIPAETTTTMPDKSSTLVHEEL

SEQ ID NO: 4468 - protein, 1487 aa, Microdochium bolleyi
MKASFPTPPYLLELLETAAGEDANAYFPLLDEIAAGAFVGAETDKALYERFLEVLAKKNLVRGPEGLSTFKLALALRASAPRIEAHYQYYTTTVAPSVLEGGLDCDNWILFSGHAHCSSSLDRAGPGVKDDSQLHQLPFDRELGVGPQAILYADPSHVEFPELHRQLVAKARNGEVTYRLRYRSYTRASALPLPVSGYGVELQLKRTDYIVIDDREANAADTAGKEETVAPVVLDEEEEVSDLKPLSSSDLASLGHKASSFVLKSESPLNTLVKLTQDFPKFSSSIASQNVSDEFFNEHQDNRGVLVPAGMNVLWMNGLQMTDRQIDPFTLVESIRRERRFIQGVTDIGLTGQQAVALLGHHEVAAVSSAEESERFDWTDRSEDGRVIIWLNNLEKDSRYADFPSNIMALLQRSYGGQISPIRKDVFNLVVPVDFSSPDDVHLVADQLMGFIKRTLPVRFGLVPLTPTRDATDQAKVAYYLLENYGLAAFMTYLQTSVAGAKMSKSKSADDFAKVIEGRQLRDDESVTLSLDEVLDSESYNSQVELARQWVRRLGADSKVPPVFFNGFALPRDQAWLQTMSRRLGTDMQMVQQGIFMGTINDDMWVPSIFLENAASRRNPYVLVGSDNPLVVLNINKLCAEHKDMFQQLTVIEADEEAGKDDLAALTVVADVETVEGKNLLLSALAFRRNNAGVRLEIVPNPSRLITSDSIIKALKGQSQELLEATTIEQLTTVLDRPVIAMYNGFDKLLEPFLKAINMEPGMQGVLLNGRVVGPFAQDAPFGEDDFQQLLDYERISRIAPVYRAAESLGLLDKISNPIAAAKLTSITALSTISDVPEGIFESAPTVRTSTYNSFKSDHTMFEVGNADTATIQFVATLNPVSEQCQKWASILKVLAELDGVHLRVFLNPLDRLNELPIKRFYRQVFESAPSFTEDGKVAPILARFAGLPSEALLNLGTNVPPAWLVSAKETVHDPDNLKLANIKGDVDIIYELEHILIQGHSRDNNNSPPRGAQLVLGTKQDAHSADTLIMANIGYFQFKANPGYYNIELKDGRSSEIFEIESVGTQGHAAVPGDEGTDMALMSFEGATLYPRLKIKPGKEGEDVLDEGGSAGGDDLLSRGLKFAEGLLGKSKTKSIDKVKHADINIFSVASGHLYERMLNIMMVSVMKNTKHTVKFWFIEQFLSPSFKEFIPHLAAEYGFQYEMVTYKWPHWLRQQKEKQREIWGYKILFLDVLFPLSLDKVIFVDADQVVRTDMIDLVRHDLQGAPYGFTPMCDSRTEMEGFRFWKQGYWANYLRGLPYHISALYVVDLKRFRELAAGDRLRQTYHSLSADPGSLANLDQDLPNHMQFNIPIHSLPQEWLWCETWCSDDSLKEARTIDLCNNPQTKEPKLDRARRQVPEWTVYDDEIAAVDRKRKGLPPVSQSSPATGGQPDKKDAQEPVRVIPGAGDHSQKVLRGDDTTASNAGKNTKSRTLQEEPTSSVKDEL

SEQ ID NO: 4469 - protein, 1090 aa, Notothenia coriiceps
MRNVIVLSLLLLLNIHHVTSAPKGVTASLRAKWSMTPFLLETSEFIAEDGNEKFWQFVDTVKELTVYKQGESVRSYYNLIIKKAGQFLTDLQVNLLKFAMSLRSYSPAVHASQQIASDEPPPEACPAFVSIHGQHSCSTKDIKKLLKAAAGRPKPHLYKNDHTYPGVNTTEVPVVILYAEIGTKKFTLFHKVLSERAAEGTLVYVLRHFVANPKPQKMLLSGYAVELAIKSTEYKAVDDTKVKDSLVNAEDDNTDEVQGFVFGTLKKAHPELQENLVELRKHLLESTNDMVPLKVWEMQDLSVQAAARILSVPKYDALKLMRDLSQNFPSKARSLTRVAVKQEMRKEIEENQKRLAETVGVHPGDGELFINGLHIDLDVHNPFSILDILRGEARVLEGLHNLGIKGEHQGKLLRLPVNAVDDSYALDIRDPAIMWINDIENDPPYHSWPRGVQELLRATFPGVIRQIRRNFFNLVLFLDPVREESVELVKLAELFYKHKIPLRIGFVFVVNTEDEIDGASDAGVGFYRLLNYIADEYDLSQALISMVSLYNKVDVGETLSVDTISDYLKRKFPKTDAERILSVESEYDDKRKEGAFFYKRSGLGALPLALFNGVPLSPEEMDPEELETIILQRIMDTTNAFQRAVFMGQLTEGSDVVDYLMEQANVVPRMNPLILSTERKYLDFTAKPVVDEWEDTTMFSYYDSRDKTAVVAKRMKYFTNNDEDGMSAVTMWIVGDFEEISGRKLLLNALKHMQKASPGVRVGVIDNPSGKPSEDNSVLYRAIWASLLTQKNKAAAEFVQQLVKDESSQLLQQGTKIKDLLTQGMDVDAFEKKFNTLEVDFIRSQQLFCRDVLKLSPGQGAVISNGRILHPSPPTCLSPLCSEQNSLHSSKPSAATLSAALYVTIVMGFIATGMKWRVIICFMKSFLRALPSGNGFLTPAFYVSPSYIPTSALYVVDLKKFRKIAAGDRLRGQYQALSQDPNSLSNLDQDLPNNMIHQVAIKSLPQEWLWCETWCDETSKVSAKTIDLCNNPRTKEPKLTAAARIVPEWVEYDNEIKQLLRRVQGQEDTPAPKHTPTASQHEKDNQRDEL

SEQ ID NO: 4470 - protein, 1717 aa, Citrus unshiu
MEYRFRSGFCVLIILVCVSLCGFASVCAQIQKPKNVQVAVRAKWSGTPLLLEAGELLASERKDLFWEFIEKWLHSEENDTDSRTAKDCLKRIVRHGSSLLSESLASLFEFSLTLRSASPRLVLYRQLAEESLSSFPPFDDSNLKNEVGGASEANEKLETKKSDLLLVGVNPKSPGGKCCWVDTGGALFLEVSELLMWLRSPSELTGESFQQPELFDFDHIHAESSISSRTAILYGALGSDCFKEFHINLVQAAKEGKVMYVVRPVLPSGCEANVGNCGAVGAKDSLNLGGYGVELALKNMEYKAIDDSMIKEGVTLEDPRTEDLSQEVRGFVFSKLLAKLQCGDCYGERKPDLTSEIMSFRDYLLSSTTSETLEVWELKDLGHQTAQRIVHASDPLQSMQEISQNFPSVVSSLSRMKLNDSIKDEIVANQRYMPPGKSLMALNGALINIEDIDLYLLIDLVHQELSLADQFSKLKVMHADSVSQSDLVGFNINGTSFLYFLRIISRHHLRCILAEVASFYGHLVYVMTAAIPRTITQKLLSTVPPAESSMFRVDFRSTHVQYLNNLEEDAMYKRWRSNINEILMPVFPGQLRYIRKNLFHAVYVLDPATVCGLEACFISVVIDMIMSLYENHFPLRFGVILYSSKFIKSIEINGGELHSPVAEDDSPVNEDISSLIIRLFLFIKESHGTQTAFQFLSNVNRLRMESADSADDDALEIHHVEGAFVETILPKAKTPPQDMLLKLEKEKTFMDQSQESSMFVFKLGLTKLKCCLLMNGLVSESSEEALLNAMNDELQRIQEQVYYGNINSYTDVLEKVLSESGINRYNPQIITDAKVKPKFISLASSFLGRETELKDINYLHSPETVDDVKPVTHLLAVDVTSKKGMKLLHEGIRFLIGGSKGARLGVLFSASREADLPSIIFVKAFEITASTYSHKKKVLEFLDQLCSFYERTYLLASSATADSTQAFIDKVCEFAEANGLSSKVYRASLPEYSKGKVRKQLNKEVQFLHRQLGVESGANAVITNGRVTFPIDESTFLSHDLSLLESVEFKHRIKHIWEIIEEVNWQETYPDIDPDMLTSKFVSDIILFVTSSMAMRDRSSESARFEILSAEYSAVVFNSENSTIHIDAVIDPLSPTGQKLSSLLRVLQRYAQPSMRIVLNPMSSLVDIPLKNYYRYVVPTMDDFSNTDYSISGPKAFFANMPLSKTLTMNLDVPEPWLVEPVIAVHDLDNILLEKLGDTRTLQAVFELEALVLTGHCSEKDHEPPRGLQLILGTKSTPHLVDTLVMANLGYWQMKVSPGVWYLQLAPGRSSELYVLKEDGNANEDRSLSKRITINDLRGKVVHMEVVKKKGKENEKLLVSSDEDSHSQAEGHWNSNFLKWASGFIGGSEQSKKEKAAVDHGKVERHGKTINIFSIASGHLYERFLKIMILSVLKNTCRPVKFWFIKNYLSPQFKDVIPHMAQEYGFEYELITYKWPTWLHKQKEKQRIIWAYKILFLDVIFPLSLEKVIFVDADQVVRADMGELYDMDIKGRPLAYTPFCDNNKDMDGYRFWRQGFWKDHLRGRPYHISALYVVDLKRFRETAAGDNLRVFYETLSKDPNSLANLDQDLPNYAQHTVPIFSLPQEWLWCESWCGNATKSKAKTIDLCNNPMTKEPKLQGARRIVSEWPDLDSEARQFTAKILGEEVVTLETPAPVGPMQTSGSDASSKGDLESKAEL

SEQ ID NO: 4471 - protein, 1543 aa, Betta splendens
MDAGSYGAGFASSPPGIRLRMWLLGVVLLSLLWVVSGGADSKAVTTTLSTKWADTPLLLEASEFLAEENQEKFWNFVEANANIEGQHDDTDQAYYDLIVKRASALLSSVQVNMLKFALSLRAYSATVHSFQQIASNEPPPSGCKAFFSVHGEKTCNADGLAALLKTAPGRPKPYLFKGDHKYPGANSNAPVVILYAEFGTPDFQRLHQIITSIAYEGQATYMLRHYLANPSKRKVYLSGYGVELAIKNQEYKAKDDTQVQGAEVNATVIGENDSVDEVQGFLFGKLKALYPELKEQLKELRKHLVESTNEMAPLKVWQMQDLSFQTAARILAAPAVDALNVMKDLSQNFPTKARSITKTVVNSEIRKQIGENQKLFKGTLGLQPGDSALFINGLHIDLDTQDIFSVFEVLRSEARVMEGLQSLMIEPHYIHDILKLNVQPSDSDYAVDIRHPSISWINNLETDHRYSSWPYNVQELLRPTFPGVIRQIRKNFHNLVIILDPAQENAAELLSVAEMFYANNIPLRIGFVFVVSDGDDIDGMQDPGVALVRAYNYIKDEVDGQSAFDAVISMFNQVPVGGSLTVANVVKVLEKKFPYVEISSVLGADSSYDGNRKEGRAYYEQTGVGPLPVVMYNGVPYQREQLDPDELETVTMQKILETTSFYQRAVYLGELATDHDVVDFIMNQPNVVPRINARVLSTSRTYLDLSDTNNFFVDDYARFSSLDSTQKSTAVANSMNYMTKKGMTATNRHDDGFIRPVTFWVVGDFDKPSGRQLLYDSIRHMKTSNNVRLGMISNPSAAPSAESSRVTRAIWAAMQTQTANNAKNFITKMAKEEAAAALERGVDIAEFAVGGMDVSLFKSAYESPKLDFLLSHAAYCRDVLKLKKGQIAVISNGRIIGPLEEGEVFNQDDFLLLESIILKTSGERIKSKVQQFGTEEDRASDLVMKVDALLSAQPKAEARIEYGFADDRYSAVKIRPKEGDMYFDIVAVVDPVTRDAQKLAPLLSVLKQLINVNLRVFMNCQSKLSEMPLKSFYRYVLEPEVAFQADGSFSPGPLAKFLDMPQSPLFTLNLNTPESWMVESVHTRYDLDNIYLQEVENIVAAEYELEHLLLEGHCFDVSSGQPPRGLQFTLGTASEPIMVDTIVMANLGYFQLKANPGAWVLKLRKGRSDEIYKIYSHDGTDSSADSDDVIVVLNNFKGRIIKVKVQKKPDKIGEELLSDGTEENDTGFWKSLTRGFTGGANTEEPKQEKDDVINIFSLASGHLYERFLRIMMLSVLKNTKTPVKFWFLKNYLSPTFKEFIPHMAKEYGFQYELVQYKWPRWLHQQTEKQRIIWGYKILFLDVLFPLAVDKILFVDADQIVRTDLKELRDFDLEGAPYGYTPFCESRREMDGYRFWKSGYWASHLAGRKYHISALYVVDLKKFRKIAAGDRLRGQYQGLSQDPNSLSNLDQDLPNNMIHQVPIKSLPQEWLWCETWCDDSTKRSAKTIDLCNNPMTKEPKLQAAVRIVAEWTDYDQEIKRLQTRVQAGANHRAQQQGTDVHSEL

SEQ ID NO: 4472 - protein, 1554 aa, Lentinus tigrinus
MLRALVPLLAWPLLHTAAGKPPVNVELRTSWPSTPILLESLESVAIEEPGAFFPLLDAVTNPETFKDHPSPQDAHQHVFDTALALDYLAEPGAYVAAEMHVALHSASPKLEAFYQYYNDHHAARREDSEGCGSWVDWYGEVVCDAKALSRFVETESLDAPETAIDNTTSFAHASPKLLPFDHVLPDPSRLLELPPRVAVLYAQVNSANFRDLHSYLYAAVHSPTPRLTYVFRPIPPTNRDPAVRTYLSGYGVALDLKKTDYLAVDDRLQGGAGTTDDTAAAAQADEPDPIVTLLQQYPMDESVDVTVPLTEQELKEIDLQAAQLIYDAEDKLAALKHLAQNFPRYAGALARRVSVEQELVDELAANQPRARGGVNVAWLNGVTLDEKDINPFSLLRLIRKERNIMLSLMSLGLSSEQAIELLTHMTIAKAQSESGALDGLFDASDRAEGGGVIGWLNDFETDERYSMWGGNLKIILRPMYPGQFPTLKLNLFNIVLAVDLSQLSSIDFIASTVQSLINRGMPFRWGVAPLVETENGARMARLYYYLLENFGSTETFAFLYNLAQRGTPLQALSPTVDWLLVRQAFDALMARKDDIAETVETDLDAILEGTEGDLEKQRAYAARLSTTLESAPQGHVFFNGKHFDLDDDFLRYLQTESAEHLQHLQFKVYKGELTEEDDVSTYFYDLPTTAKRRNMYIHPSPKAGSLRIFSLPDLIERNGLKSSAGSFVYPAESEQVPLTTYVVADFDNEESQQLVKEALLSTPGSLSRLSFIHNPASVSPFCKSDDFASPSRFLAQLVSWDLLSRLTPEQLLSALGLSSAEVSDDNGAQEPFSFDDIIGTKAFTGEDCMKYLTASRLVVRQLELKPGEQALVVNGRVVGPIQPGEFVAGDFETLAAYEHHKRVKSVYEALFDVYEPLKDANNREDAAEITAIASSIVSSIQLPDASEAGLFNAPQRPRLRNYQMLNSAYTAFSIGDNTTALYHFGVLVDPLSEAAQKWSSLFEWISEIPGVYVEFHINPTRYNELPLKRFYRYNLLPRLAFDDSGNEVCTKTTFTDLPVEPIYTLAMDTPQSWLIRPREALYDLDNIQLGMLSPQDRTRGIKAVFDLDYLVVEGHARESATNAPPRGLQLQLVTSNSTPIADTLVMANLGYLQFKTKPGVYRLEIRPGRGREIFKMESAGNEGWNSPSVEEGGDEVTVTSFEGVTLYPRLVRLPGMENVDVLQVQSDVHEETGFVENVMSKVSSLFGSKQKEEKALVPIDDGQAEINIFTVASGHLYERFASIMILSVLRHTKSTVKFWFIENFLSPSFLEFIPHFAAEYGFQYELITYKWPSWLRAQKEKQRIIWAYKILFLDVLFPMDLKKVIFVDADQIVRTDLKELVELDLHGAPYGYTPMGDDNPDTEGFRFWKTGYWKDFLRGRPYHISALYVVDLVRFRELAAGDMLRGHYQQLSADPNSLANLDQDLPNNLQREVPIFSLPEDWLWCETWCNKDRLHRAKTIDLCQNPLTKEPKLDRARQIPEWEVYDSEIAKFARRLREGEGSTDGGELPKRDEL

SEQ ID NO: 4473 - protein, 1302 aa, Allomyces macrogynus
MLAVVCAVFLIFTLQVASTAAADGGQAAQDDTTQESPAFRVTLAARWQSDPWLEYFEEVARHNTSALDRLLPSVSQINSIDAAHRHLETTGALARETAQLINLGIQFRETLPRVAALLDVYNSTVHAHADLQSCSIFVVIDDKWTCDLDEALAWLSSDHDHGQDTHFDPAIDTAPMGDASARQKAIVYGHPRHASFAPFWQRLRKLPVRVALRYVPDTSSIVPARQRLNGYFVHLNIKDLEYKVTDDRTPTGEEAATQDAPTRLESLDAAGLETIAARVAQNVTTLDALARITAAYPAALPGIAATTTAPSAQLRAKLDANREMAEARLGRAETMLWANGKLLPASSVTIYHLLETLRGEVELAHDMQRIGLPWALAVSVLQHNVNSEAADYFDTCTIEPVVWLNDLESDVQYKPWPKSLRNLLTATRGMKAIRRNIFTLLFFMDAANPKHVAMALEFVTMVENNIPLRFGLVPLVNADPVSKTSRLGVELWDIYVAKGRDAALQWLASTPALSSTHPDKAAHATLLAARHQLAVHDDGEMFFNGRPIDVGESYQHQVMAEYQQQVEQLAMMVYYGQLDDRTDMNKYWCTKPTTWKTRSEFAFAKRKPEHRWADFPASALPEDADLAAQDQYPFVHVTVRGYIRDAALEAIKAAQATARFALEVIADATTDQGIVINGKLIRHLPVEMTVDDVKTLVHVEWVRRLKQLKLSPTCVAMDPPTFWKASSLWWKNHVASKKNENGFRSGLGDRMNPFDIVSCDEDKCLMVPAATESTESDGADEVPVVQLVALLNPVSTDAQRLVPLLQEVHRALPYVSVTVVWLATPVTKVPDRFTQLVGAGHDAAVFRDLPPILFTLFLDAPHPWVVMAAKSEHDLDNLIVRKNRGGDAEFELKHLLVEGHAVEAPHQSPPRGIQFELRGSTGHVEDTIVMANLGYFQLKASPGQWNLTLRAGRSSNVYEPVQQSVLVDSFLGVTLYPTVHKRAGKEDMSVLDEDRPHQSWWQQVVQTVTGPRKETVHVFSVASGHLYERFLSIMMQSVVDRTQNPVKFWLIEDFLSPSFKATLPALAREFQFEYQLVTYKWPEWLTAQSVKQRTIWGFKILFLDVLFPLNVDKIIFVDADQVVRADLAELVNMDLEGAVYGYTPFCDSRAEMDGFRFWKHGYWLSHLRGKPYHISALYVVDLKRFRQVAAGDILRQQYQGLAQDPNSLANLDQDLPNSLQHMLPIHSLPQEWLWCETWCDDTSLTRAKTIDLCNNPLTKEPKLDRARRLLPEWEAFDERAEKVRHNVLLELAAESRPGHDEL

SEQ ID NO: 4474 - protein, 1521 aa, Austrofundulus limnaeus
  MOD_RES (925)..(925): Any amino acid
MWFLCALLLSLLSAVSGGADSKAITTTLTTKWADTPLLLEASEFLAEESQEKFWDFVEANQNIEGEHDDTDQAYYELIVKKASALLSSVQLNMLKLALSLRAYSATVYSFQQIASTEPPPPGCSAFLSIHGVKTCDVEGLGTLLKTAAERPKPYLFKGDHRYQGSNPDAPVVILYAELGKADFQRFHQVLTSRASEGSATYVLRHYLAKPSEKKVFLSGYGVELAIKNQEYKAKDDTQVQGEEVNATVIGENDPVDEVQGFLFGKLKTIYPELKEQLKELRKHLVESTNEMAPLKVWQMQDLSFQTAARILAAPTVDALNVMKDLSQNFPTKARSITKTVVNSEIRKEISENQKFFKGTLGLQPGESALFINGLHIDLDTQDVFSVLDVLRSEARVMEGLRSLLVETPYIHDILKLNVQPSDSDYAVDIRNSAICWINNLETDHKYSSWPYNVQELLRPTFPGVIRQIRKNFHNLVIMLDPTQENTAELLSVAEMFYDNSIPLRIGMVFVVSDEDDVDGMQDAGVALVRAYNYIRDEVDSHSAFEAVISMFNRVAIGGRLSVADVVKVLEKRFPYVEVSSVLGADSSYDTNRKEGRAYYEQTGVGSLPAVMYNGIPYQREQLDPDELETVTMQKILETTSFYQRAVYLGELATDHDVVDFIMNQPNVVPRLNPRVLSTSRTYLDLSSTHNHFIDDYARFSTLDTKEKSTAVANSMNYMTKKGMTTTNRHDDGYIRPVTFWVVGDFDKPSGRQLLYDAIRHMKTSNNVRLGMINNPSADPSAETSQVARAVWAAMQTQSANNAKNFITKMAKEETVAALKKGADVEQFAVGGMDLSLFKSAYEGPKFDFLLSHAAFCRDVLKLKKGQRAVISNGRIIGPLEEKEVFNQDDFLLLENIILKTSGERIKSKVQQFEMEEDRASDLVMXVDALLSSQPKGEARIEYGFADDRYSAVKIRPKEGDVYFDVVAVVDPVTREAQKLAPLLTVLKQLVNLNLRVFMNCQSKLSEMPLKSFYRYVLEPEVVFQADGSFSPGPMAKFLDMPQSPLFTLNLNTPESWMVESVRTRYDLDNIYLEEVENIVAAEYELEHLLLEGHCFDVGSGQPPRGLQFTLGTASEPVIVDTIVMANLGYFQLKATPGAWMLKLRKGRSDEIYRIYSHDGTDSPADSDDIIVVLNNFKSRIIKVKVQKKPDKLNEELLSDGTEENDSGFWNSLARGFTGGGKVEEPKQEKDDVINIFSVASGHLYERFLRIMMLSVLKNTKTPVKFWFLKNYLSPTFKEFIPHMAKEYGFQYELVQYKWPRWLHQQTEKQRIIWGYKILFLDVLFPLAVDKILFVDADQIVRTDLKELRDLDLEGAPYGYTPFCESRREMDGYRFWKSGYWASHLAGRKYHISALYVVDLKKFRKIAAGDRLRGQYQGLSQDPNSLSNLDQDLPNNMIHQVPIKSLPQEWLWCETWCDDSSKRSAKTIDLCNNPMTKEPKLQAAVRIVSEWTDYDQEIKRLQTRVQENQTTQEQTTDVHSEL

SEQ ID NO: 4475 - protein, 1492 aa, Pseudomassariella vexata
MIRLLKLPCGIAATLLAAVCLNADHVAAAPSVNVAMKASFPSPPYLLELLESAAVENSTSYFALLDRVAAGYFDEAKSDKDLYEKFLRLLQADGHMNSPEALSTFKLALSLRSAAPRIEAHYQYYETAVQPSLGSMEEECADWILLGGKRYCSASLDHTETTTQAKQQIQLLPFDRTTGSGPEAVLYADISKPGFGSLHTALADKAKKGELSYRLRYRIGENDEREPLPVSGYGVELQLKRTDYIVIDDREAHFNPDTENSSPFEVVLDAEEEVTDLKPLSSSELSGLGIKAASFIMQSEDPFQNLIKLTQDFPKYSASVAAHNESEAFLAEHLFNRGQMVPAGMNVLWMNGVQLIERQIEPFTLVDLLRRERKLIKGVTDLGFTGKEAVSLLGHREVTAAKSGDDEPRRFDWTDEIEEGEVIIWLNNIEKDKRYAQYPTSLMALMQRTYPGQIPPIRKDLFNLILPVDFTNPDDLYVVVEQLQSFIQRLLPVQFGLVPLTPTKEAEDQAKMVFYLLENYGLAALLSYLESCHTGKKIEKLDQSQFETAIKDRSLLAEATALPFQDVFESEHHTKQVQLAKHWVERLKADTPVPPVFLNGQSIPREKGWLQAMSMKLGGDLQTIQQGIFLGNIDEEMWIPGIFIDGAPSRRNIYIYPDKNNQLTVLDVNKVYTEHGDLFNVVPVIEANADSSKETWAALTVVADFTIKAGLDLLLSALDFRRNNPGVRVDLVNNPASGTGFNVNALLKNDVEKLLEIENLETLEVLVAGEIRDKYEPSSYDSALGRFLAAAGINPGDQVLLLNGRVVGPLAAGSGFKEDDFQQLLEFEQSTRILPVYNAVDALNLTRKVSDPLAAAKITSITALSTISDLPEGIFESAPTLRTVVFDDWESEHTMIEVGDASTANIHLVAVLNPASEQGQKWAPILKVLSELDGVYIRIFLNPKEKMDELPVKRFYRYVLESSPTFDEAGKVRHLGASFKGLPSEALLNLGMNVPPSWLVAAKDSVHDLDNLKLSTIKSDIEATYELENILIEGHSREGAGGAPRGVQLVLGTERDPHFADTLIMANLGYFQFKANPGYYNIQLKHGRSSDIYTIESVGAKGYGAVAGDEGTEVALMDFQGTTLYPRLNRKPGMEQEDVLQEASTAGDLLSRGLKFAEGFLGGSKLKSASAEEHAEINIFSVASGHLYERMLNIMMVSVMKNTQHTVKFWFIEQFLSPSFKEFIPLLAEEYGFKYEMVTYKWPHWLRQQKEKQREIWGYKILFLDVLFPLSLDKVIFVDADQIVRTDMIDLVNHNLEGAPYGFTPMCDSRTEMEGFRFWKQGYWSNYLRGLPYHISALYVVDLRRFRELAAGDRLRQQYHQLSADPASLSNLDQDLPNHMQFQIPIHSLPQEWLWCETWCSDESQKEARTIDLCNNPQTKEPKLDRARRQVPEWTVYDSEIAAVARQKKGVSDVVSEESQKVVSGDEAKNPMSRRLEQESASEPTERPKDEL

SEQ ID NO: 4476 - protein, 311 aa, Poeciliopsis prolifica
SAFYNNNFPWLYESMVATAEVLICCLHMKSHESYRRRLTYSGFICSITGGGSKKDEGEKKKEDVLNIFSVASGHLYERFLRIMMLSVLRHTNTPVKFWFLKNYLSPSFKETISHMAKSYGFQYELVQYKWPRWLHQQTEKQRIIWGYKILFLDVLFPLAVDKIIFVDADQIVQADLKELRDLDLQGAPYGYTPFCDSRREMEGYRFWKSGYWASHLGQRKYHISALYVVDLKKFRKIAAGDRLRGQYQALSQDPNSLSNLDQDLPNNMIHQVAIKSLPQEWLWCETWCDDASKATAKTIDLVSPGAVTFKV

SEQ ID NO: 4477 - protein, 841 aa, Pythium insidiosum
MHQDGTITSPKKQTLLFWLDLGDRVHAAHVYEAVKAVQEDMGSLMRVGVVHRLSTASGGDGIGELVAGVIATVGDSDNEKHIGLVIEALRCVVKGKTVEATKSKMRGLVEKIDAWDADEVLTSLMQVFDASADVAVLSDEARQSLQLLNEALRDSHGAKVGDTPAMLFLNGFRVDLPVHSISNEDISALTSFDLSHRSQPVAKAFIKRSGKYTRDEANARSMEIVKACAIIDEYRKATRYSGISQDGSLLAIKLPGDQSLRVTAYVDPLSEAAQRMSSLIEMLHSHLNASVELMLVPSVDYSEFPLQRFYRFLFDKKSPTATKVSFRKLPIKPILTMKIDTPEAWNVQIHRSTEDLDNLRVDPDSPSDVRAVKTASFRLENLLVYGQCRDKTFEMYSPPNGLQLVLERDVGSVRLHRDTLVMKNLGYFQLQATPGVWDLHLARGRAVELYEILDAETERVLSSRNVIVSDFGSHVEQLLVRKRQGMEHEELLAPSKAGTKSKSDVEPISEDAGLIGSYWNSMLSLFGKKKDKAQKDDAKAVATATGSDSERTGETIHVFSLATGHLYERFLKIMMSSVLKRTKNPVTFWLLENFLSPDFKDSIPALRQKFGMDIRLVTYKWPNWLRQQTQKQRIIWGYKILFLDVLFPLGVQKIIYVDADQVVRADLKELWEMDLKGSPYGYTPFCDSRNVGYQFWRQGYWKDHLRGRPYHISALYVVDLALFRQMAAGDILRAIYDQLSADPNSLANLDQDLPNYAQHQISIFSLPQEWLWCESWCSDESKANAKTIDLCNNPKHKEPKLDMAKRVISGELFQESWLELDQEIREAEQEYVRVATTTSTS

SEQ ID NO: 4478 - protein, 1203 aa, Cercocebus atys
MTPLKVWELQDLSFQAASQIMSTPVYDAIKLMKDISQNFPIKARSLTRIAVNQHMREEIQENQKDLRDRFKIQPGDARLFINGLHVDMNVYDPFSILDMLKLEGKIMNGLRNLGINGEDMSKFLKLNSHIWEYTYVLDIRHSSIMWINDLENDDLYITWPTSCQKLLKPVFPGSIPSIRRNFHNLVLFIDPAQEYTLDFIKLADLFYSHKVPLRIGFVFVLNTDDEVDGANDAGVALWRAFNYIAEEFDISEAFISIVHMYQKVKKDQNILTVDNVKSVLQNTFPHANIWDILGINSKYDEERKTGASFYKMTGLGPLPQALYNGEPFKHEEMNIKELEMAVLQRMMDASVYLQREVFLGTLNDRTNAIDFLMDRNNVVPRINSLILHANQQYLNLISTSVTADVEDYSTFFFLDSQDKSAVIANNMYYLTQDDDSKISAVTLWIIADFDKPSGRKLLFNALKHMKTSVHSRLGIIYNPTSKINEENTAISRGILAAFLTQKTRFLRSFLGQLAKEETATAIYSGDKIKTFLIEGMNKNAFEKKYNTVGVNIFRTHQLFCQDVLKLRPGEMGIVSNGRFLGPLDEDLYAEDFYLLEKITFSNLVEKIKDIVENMGINSNNMSDFIMKVDALMSSLPKRASRYDVTFLRENHSVIKMNPQENDTFFDVIAIVDPLTREAQKMAQLLVVLGKIINMKIKLFMNCRGRLSEAPLESFYRFVLEPELMSGANDVSSLGPVAKFLDIPESPLLTLNMITPEGWLVETVHSNCDLDNIHLKDTEKTVTAEYELEYLLLEGHCFDKVTEQPPRGLQFTLGTKNKPVVVDTIVMANHGYFQLKANPGAWILRLHQGKSEDIYQIIGHEGTDSQADLEDVIVVLNSFKSKILEVKVKKETGKIKEDTLTDEDEKTKGMWDSIKSFTIRLHKEEKKEKDVLNIFSVASGHLYERFLRIMMLSVLRNTKTPVKFWLLKNYLSPTFKEVIPHMAKEYGFQYELVQYRWPRWLRQQTERQRIIWGYKILFLDVLFPLAVDKIIFVDADQIVRHDLKELRDFDLGGAPYGYTPFCDSRREMDGYRFWKTGYWASHLLRRKYHISALYVVDLKKFRRIGAGDRLRGQYQALSQDPNSLSNLDQDLPNDMIYQVAIKSLPQDWLWCETWCDDESKQRAKTIDLCNNPKTKEPKLKAAARNVSQNGWSMMLEITTTVRSS

SEQ ID NO: 4479 - protein, 1735 aa, Anthracocystis flocculosa
MRAAALRPLLLVLLALGISTLTALAEPTQPSPPIKVQLRAPWTKPSLSNNASSLLLEILEAANARAPDSFFPLVTQLTAPWNAADSSSSAAAATAHPDAKATSHRHRHHKGKHHLQHPGPTLASLSDRQLVSQAEDAIRSSHLFGTDKDEDQRASVDAALQLWHTSLALHDQSPRVQAFMQLYRTLNLDHRWSQKARTYKHGVERCHSWVDFEGQVLCDEDEVVQAIRQAAGQQHRQQQPPVRLLPFDHVLPARSPVSQSSSRSAHGHGPDLTFILYGDPFSFNFWGLHSLLEAYATGHREAEGGHRISYVLRWRPSADDKRADGAAQATPPKLHDDSTLYLAGYGAYLDLKKVDYLVIDDRKLREDAEVGQLDDGASDGEDHGHREQSAENRAWIEQQIGQALPAKINTGDDAVAELAKEARAALTKEEIDELGIRAAHVVASSSDPLRALEELSQNFPLYAERLARSSKLADWDNADMVNSLLALGDHRVKSGASELWLNGKSLDSQDFSPLRLIKTLDDERRLIAPLLGRLAGGVLDTEMAVDLISSLLIGRAFVASSDQSLGQAFFDASDRLERQQLLSEVDKNSGAADPASPGAITWWNDVTKGATSRWSKDLFNLLRPMWPGQFPQISLNLFNVVMVLDLGRRESCRFLSESIGPSIGKVGLHWGLVPGGLEGQDASSDSAKLARLFWEVFDLGGSEAATSYLRKLASSKKGGESRVDVKSARNEASLILHAHLAPGEVAQRLDDVVQGRVARHQQREKMARAYIARLRASTAESPRGHVFVNGQHVPFGSQLIQMLHQKIQDQIQILAPAIYQRHLTAESENLETVFYDQPETLKFRSKLVFPPVVATLDGGEDAPQHEGVTFAPGDIVSALHSLKDGRGDAEVLNRFLYSDSASQGEAETHDEAQYVNSTVWVMGDLDSSEGAEVVLKVISASQQAGKASERFRIGFLHVPVVGDVDTKRFGSSSPPLSAYLHRLMQDSSIERLAPAQLAEAVAAYVPLSDNLDQDDKIDGPSAPANQHEPTLEHDAAAGSAAERAWATPAMAAADKFWQRAGASVAATLRLDASRGPALLVHGKVVQGFKASDIGPEDIAALLTVESAKKVDAVVRALTTLKPDFDRLPARERSDLVAAVVSIATRAYAVDPADEGIFVKGKTPRTAILEALGSDEHVFELGDRASAALRLSVLIDPLSEAAQKWSTILRTAVKLQGAYVRVILNPKLAYGGEMPLKRFYRFSAPTKLRFDERGRELVLETPDGSRSVDTIVMANLAYLQFKAQPGLWRLAIRPGRSSQLYEMVSVGNVGWDSPGVEVTGEDITLDTLSGLKIYPVVRKRKGQEAEDLLEELDAEGRPVKKAARTGANGIGGGGVVGMLRYALDGASRAASQAVDVVRTTLGLDSSSSASQTSTTAVARKRHADINIFTVASGHLYERMAYIMVLSVVKHTQSSVKFWFIENFLSPSFKEFIPHLAERYGFEYELVTYAWPHWLRAQREKQRTIWGYKILFLDTLFPLDLSKVIFVDADQVVRTDLQELVDLDLGGAVYGYPPMGDDSDDMDGFRFWKHGYWKEYLRGRPYHISALYVVDLHRFRRVAAGDKLRGQYQALSADPASLANLDQDLPNNMQGSLPIHTLDKEWLWCETWCSSAWLDDAKTIDLCSNPKTKEPKLDRARRQIPEWSVYDAEVAALASEVAKRGESRNVVDPEQVVVDGGPRQGSHEADGGETRGGHDEL

SEQ ID NO: 4480 - protein, 218 aa, Artemisia annua
MANLGYWQMKVSPGVWYLQLAPGRSSDLYILQDGQEMHLTKRITIDYLRGKPVHLGVVKKKGKEHERLLIPSDDDDSSRKQGDEESWNSNILKWASSLIGGNGQSKKSVSTKVDLPNYAQHTVPIFSLPQEWLWCESWCGNSTKSRAKTIDLCNNPMTKEPKLQGARRIVTEWPDLDLEARRFTSKILGEDVSPVEKVVSPPAQQEVPEEDLERKDEL

SEQ ID NO: 4481 - protein, 1765 aa, Nannochloropsis gaditana
MGCEHRNKRSSESARVGYGLKQLLLVAALSCILPGFVLSAQARSVEFAVTADWPTWTLSSLQEAAEYLASEVEGDEGLLWSFVDSLQQSPSRWELDKALESPTFEEDALDTVWALTLNQTTPLLHPLSQSMLHLYLSIRAYSPTLEMHRSLRKGVAFQAAAAAPDRSGCREGTSTSWAVVSLGPGLEEEVYCEASRLEAALAALPTDGTQGAGPGSPEAKRALPFDHVYPGALPAHRLAPSVLVTLYSTIGTSEFYGYHNLLAPAAAAGTLTYVLRHYVPALSEERTVRTALQGYGVYLDVKNMEYRNIDDSPAPGSAAATEGTQEEPQEGEEGGGVVGEEDVSGLVFSTLLAREPSLSAQLRQLRLNLLKEEAEGESSVEAASGATNMKVWRMRDLGLQAAQTIAAAKDPLRKLQELAQNFPSRATRLSSLKVKEEYRTGAATALRSRALGYGTVLKPGTLFLNGLPRSLAGPIFNVFDILKALRGEIRALQRLAHLPAPPALRQQLIGMAATAPLLAHASEGQGRRGPPGQETRLDIYRGSKGALVYLNNLEKDAQYKRWPSSLRQLLFPSWQLQTIARNLYTLTLVLDLEDPDSWEALATLRRIYSRQFPVRFSVLLVSQACLARAEGKQGSLEAGGEEEFFLAGVREVVEGEGKHREPATSEVVGMLFHHLREEHGLEAATAFLFGLGVGGSWEVPAGAGAVGGEKVPAELGTYADVVSAYSQAVAVVKKSWKGGAYAEEAWAALAAGKGAEGARLMHKLVAERGIPVGSVVLNGKLQVTLDVEEALMQMLGEEQQLLSQMVGAGTLKDSTKSVLGALLKGPGVMERYHPWMDEDLRREAPAVMWLGGGKGGRARELVERLDYLHPPGTRAEVKALTVVLQGDLGSAEGLASASALLSFLRGGRWRSEEAAAVSKRKKEAPRCALVHTPAPTAADKGGLLAHMTRVVSCRSEAGEEREDVLLQVLERLAIFLRAEEGEAAEVGERPSAYDRFLDVLKKESEAGGPAQGPEASALLRTAEELREDATEGFRKASAQEQSRNSGSSPREGLGIQSADGGEEEGSLALVVNGRQVDLGGKALHPLDMEVILKLESQVFTLPLLALCNPRASPDAGAAQASPATARRISDLVAVAHSFLNVYARHPRVDVEGHLRLLQDSPAESLLLDLQPLGSAGGRVGQEDDPVLSNLSVTVLLDPLGEAAQRLAPILTTLRDHFHLPLRVLLAPHPELSEFPLKSYYRFALFPTRETHVLFQSLPPSLVLTTRVDTPEAWNVQTRQALQDLDNLKCEQGETGLVCGDREGSSHTSAELVLKNLLVSGQCFDAKLLEPVNGLQLVLVDGLEGAEGGEETAGRRQHHSDTLVMQNNAYFQLRADPGIWKVRLAEGRARELYEVVREDPTGRALVRVPEQELVVAKRDFTNALETLRVQKQAGKEDIPLLDEINQDEAEGGKEQRESKTWSTLSNLWAGRKAEVEGKPTGEGSGEEDETVHVFSLATGHLYERMLKIMMLSVSKRTSVPVKFWLLENFLSPAFKTAALAMAEHYNFQVEFITYKWPDWLRQQTEKQRIIWGYKILFLDVLFPLSVKKIIYVDADQVLRADLKELWDLDLKGRPYAYTPFCDSRNETLGFQFWRSGYWATHLQGRPYHISALYVVDLARFRLMGVGDKLRAVYDQLSRDPNSLANLDQDLPNYTQHMIPIFSLPQEWLWCETWCSDESKARAKTIDLCNSPLAKENKLHMARRVISGPLFNESWVELDEEVKALVG

SEQ ID NO: 4482 - protein, 1643 aa, Marchantia polymorpha
MASLSDFQFLRGCRMTFAVVVLALLVLAMVAEGSTHQSKNVNVAVRAKWTGTSLLLEASELVAKEGDPQFWRFVEGWMRDAEPAELSDEECVHKIVKEGTEIVGSSLAPLFQFSLSLRSASPKIVLYRQLAQQSISEHFSMRANTNNDGLDKVDQWSVSENPIAPEGQCCWVEVGSHVLLGESELKKWLQFTQDRSHAEEDEVEVYDFDHVYPGSEGGLFVAILYGALGTSCFRTSHSLLSESSKMGHVKYIYRPVLPSNCASSVESCAQVGAGSTLYLGGYGVELALKNMEYKAIDDSEEKKGDDSDNSQAQAEDLSQEERKVEEDGEVMTFRDNLLSSEIVDKINVGELKDLGYLTVQRIIHSSEPLRLMQEINQNFPKLVSSLCRMQLNDTVKEEIANNQRRVPPGKNLFAINGALVNPDTLDIFSLLELVEGELSVAGKIDQVKVPPNYIRKLLRLTDPRESSAFRLDFRSEHVHYMNNIEEDSMYKRWRPNLNEILMPAYPGQMRYIRKNLYHAVYIIDPALPVELKLLETMTYYVQNSVPMRFGVIFMSSKKIKAIESHGGDIAATLETTGEEDVSELIIRLFHYFKENMDLQTAFGFLNLVNEELDGSGEVDEEPFQASVAENIFLDILREKGKSTGPTILQNLKEGNEFKEKALESSAFAYRLGLSPMHPCMLMNGLFYGPSQVQNAAIAAMNEEMPRIQEAVYYGRINARTDVLDKMLSEGGQPRYNPQIVSSRRDDRRYVSLSSPVAEEDKVLTRLQYLHHPGSEDNLKPLTHWICVDLTQKSGIHLLQQGLRYLMEGAEKGRIGVLHNLESRDFSGSYSLLIQVVTTVANSPSRRAKVVPFLQKLLGNEEFIGASLGDSDATLEKKYVKLVLDLADEMGLKRDYLEDALLEPVRKQAVLEQIHEERVFVARAVGLKAGAMAVVTNGRVYDQQEGSHFVAEDFALLDSVEYERRIKPVEEIIQEIEWTNVEPDELTSEFLSTKIMAVSSSMASRSRGGDSANFEMLRAEHSAIVREVDGAYIHVDAVIDPLSVTGQKLTPLLVLLEDWLKPSFRIVFNPMNAITDLPLKNFYRYVVPSKNVFSSDGVLSPGPVGVFTNLPPSRTLTMNLDVPESWLVEPVVAVHDLDNIVLEKLKNERTMSAVYELEALVATGHCYEKDGDPPRGLQLLLGTKLHSHLVDTIVMANLGYWQMKAAPGVWTLQLAPGRSTELYTLEGPGEGTDAGLITKRVVVQDLKGKLVRFEVVKRHGKEDQQMLEVNDAEEDFEEISPRRQEKKKEGKGFLKWASDFLVGGGHSGENRNVLNSVAGGGQSQLRRGETINIFSIASGHLYERFLKIMMLSVIKNTNRPVKFWFIKNYLSPQFKDVIPHMAKEYGFEYDLVTYKWPTWLHKQTEKQRIIWAYKILFLDVIFPLSLKKVIFVDADQIVRTDMGELYDMDIKGRPLAYTPFCDNNREMDGYRFWNQGFWKDHLRGRPYHISALYVVDLVKFRQSAAGDNLRVFYESLSKDPNSLSNLDQDLPNYAQHTVPIFSLPQQWLWCESWCGNGTKAQAKTIDLCNNPQTKEPKLEGARRIVAEWPALDEEARQLTARILGGKVTQHVSDQHIKKQVPQSLDSGVVEEESNFVDLESKSEL

SEQ ID NO: 4483 - protein, 1543 aa, Acropora millepora
MAAKMSASSKISDILVATVLILLSKAKKKSCKSSNSKSIVTTLDARWHSSPLLLEASEYLAADSNEKFWAFVDLCKKVEFSHDSDEYQHIFQAAGKLLPPLGLNFLKFSLSLRYYSPRVELFNKVAHELPAPDCEAFIQLGSQIICDVSEAVSAIKKAENVPFSQAFEFDHHYPKSVNKSVAVVLYGKIGSRSFRLLHEQLEYFAKNENVDYVLRHYFQSSSKRKIRLSGYGVELAVKKTEYKAVDDSKVKDDAAGKVQEADDANEDEVEGFLFGKLRKMYPNVKENLEQFRMHLKESAHEMAPLKVWQLQDLSFQAAQRVMSSDPQGALKVLRDISQNLPMQTRSLVKTKVKEEMRKEILSNQKNFAHLGVEAGDSALMVNGLTLPVDELNPFQLLDLLRDEALAMDRLASLGIKDDFLGKLVSLSTQPEHESFVLDARHDSIVFINDLEKDRQYWGWPSDVQEILRPTFPGMMRYIAKNIFNLVIFVDPLDTHTAQLLKIVNELLHNSFPMRFGVSVVANIPLDEEADATSNAAVGIARAFHFIASDKDPRQALDWLLQVYDGVSEGEAPSADKVMQSFSSWYGQDEREEVFGEDSEYDENRKSAKRFFDKTGFHGLPRVILNGVEIDQDEDNIEEAIIREVMMQTGPIQHAVFSGSVHRYSNVYEYVMSQPNVVTRVNNLVQSLERPYIDLTGSGKITDVDINDSEAFSKLDSSEMISAVVKDVKYFTKQDEELSLKPITNWVIADLGIKEGRSLVRAALKHVKSSTSTRVGLIHNPAVKAGDNRPELLQIARTVEAVLASKPHVTPSMLAAMETLMNEENDFNLLSQDSKAMEDLLAKVSGLKKDGIKAKLSDKTSFNGKLFSHQLFCEQVVNLLPGQPAVITNGRVLGPLAGNSLFNEDDFKLLENFDMDLYARKVRNQVDEMEFDDLSADDDTSEFRSDLIMKAASALISREKRSRQEISFKQDEHSVMRIKPTHDGPSFDVVVIVDPLTKAAQKIAPILTVLQNVTNVNIQIAMNSREKLSELPLNRFYRYVLEPQLTFDKDGGLSEGPLALFLDMPQSVLLTMGINTPLGWMVEAVYSPHDLDNIKLQEVEKQVMANFELEYIFIEGHCSDFDTRQPPRGLQFTLGTRRNPTMFDTIVMANLGYFQLKAYPGAWSLRVREGRSAEIYDIESVSDSKEEEDKHFAVVVDSFVGKLLKVKVRRKPGMEGKDLLGDSDSQSGGIWDSLSSIVGSDSKEKTAQDETINVFSVASGHLYERFLRIMMLTVIKNTKNAVKFWFLKNFLSPSLTAFLPHMAQKYGFDYELVQYHWPHWLHAQTEKQRTIWGYKILFLDVLFPLHVKKIIFVDADLIVRADLKELNEIDLHGAPYAYTPFCSSRSEIDGFRFWNSGYWRSHLGGRPYHISALYVVDLDRFRRLAAGDRLRGQYQGLSQDPNSLSNLDQDLPNNMIHQVPIRSLPQEWLWCETWCDDASKSAAKAIDLCNNPMTKEPKLKSAVRIVKEWQDLDNEVRRLQESVAAANKTQSKQTDTTREEKDEL

SEQ ID NO: 4484 - protein, 681 aa, Electrophorus electricus
DGAIRPVTFWVVGDFDQPSGRQLLYDGIRHMKTSNNVRLGVINNPTESPSNGTALIGRAIWAAMQTQTANNAKNFITKLTKEETARALYTGADPADFAVAVKIRPREQEVYFDVVAVADPVTRGAQRLAPLLLVLKQLVNVNLRVFMNCQSKLSDMPLKSFYRYVLEPDVSFLADNSFAPGPMAKFLDMPQSPLFTLNLSPPESWMVESVRTRHDLDNIYLQEVESVVAAEYELEYLLLEGHCFDVSTGQPPRGLQFTLGTAAEPVIVDTIVMANLGYFQLKANPGAWVLRLRKGRSDDIYKIYSHDGTDSPAEAEDLIVVLNNFKSKIIKVKVQKKPEKMNEELLSDGTEEIDSGFWHSLTRGFTGGSKVEEGKPEKDDVINIFSVASGHLYERFLRIMMLSVLKHTETPVKFWFLKNYLSPTFKEWIPYMAQEYRFQYELVQYKWPRWLHQQTEKQRIIWGYKILFLDVLFPLAVDKIIFVDADQIVRTDLKELRDFDLEGAPYGYTPFCESRREMDGYRFWKTGYWASHLAGRKYHISALYVVDLKKFRKIAAGDRLRGQYQGLSQDPNSLSNLDQDLPNNMIHQVPIKSLPQDWLWCETWCDDTSKTKAKTIDLCNNPQTKEPKLQAAVRIVAEWVDYDQEVKSLYARYLEERERGGAPDRSHAQKGRRDDQEHTEL

SEQ ID NO: 4485 - protein, 3569 aa, Trichinella sp.
MTVFCANFTVESLLEATVYSMWVFPLIVVCFVSPVLVSPRKAHKNVIVSVRSKWPSTSLIMEASEFMSKESNEKFWQFIEAVIDKHQNSLGNKTDREVYNGILQIGDQILKSKARLEFLKLALTVRVHSATVEMHRQIAATSLDVQNGKSVYAVVHGKQISDLQQLDTILKHAEALARPVTYEFDHIYPGSKQGSVCVLLYADIENPHFKPWHLQLKKLVQRDGISYILRHYPKMNDDMVALSGYAVELAIKSTEYKAVDDSDKQTGSESGVSSSEEEVTDLNGFNLHLLEADELTPLKVWQLQHLSFQAGQRVILAPKEEALRVLRDISQNFPIMARSLTRMSINPNFKNEVEENQADAFSKLNIEPGDSAFFIDGIVIDLEEKDIFNLIELLKNEEMLISGLLKLGIRRKDFTLLYAMKGNDPNAEYAVDYTQWSPQYINNLESDAAYRNWGNSIHAILQPYFPGMIRPIAKNFFTLIFVLRLGDRASQNLLSTAYQMYEHVLPIRIGFIFVVNNDKSVSGYDDAGVAMLNAFNFIKEDRSVSKAVMFLIKIYNTSMRETISVEDVHKLFKSSYRDENLKSVFNSEEYNQGRSSGVDFIKESGLSMVPMVLMNGYPFTAEEISPEHIEEAILSKVMRFTVDIQKDVYEGNLKENMDVQQHLLKKPTVLPKLNYNILQMENIFLDMTDTSKYGAMSVEKFSHLDSSGKTQFIIESILYLTKNDDDILRPVTLWIVADVESDDGQQFFLNAIKYLKYSVDMRIALIHNPKSEAQATKGTASLVQACIQFLPLYQSKAVIGKIFANKITTLEDLINLSPSGISWPEFKKAYNSMSDIWMQLHVHYAKFVLNLDPGVGAIVANGKVLAPLSASDFNSLKDFNFIERYLLTSGCNDIAQHLKIIPYLDKSPKALSDLVMRLYAFLRRYNANEKRHWPIIENYHHSCIQIEASDPTAAQFDIVAIVDPLSPAAQKMSHLLVILSSVLNVHMKVCMNCKSKLSEIPLKNFFRMVLPRELEFADDGSLKAQPSARFSALPQKQLFTLNIIAPQSWMVESVEAVYDLDNIKMEEVKGDVVAKFQLEYILLEGRCFDERSGSPPRGLQFTLGTFHEPFMFDTIVMANLGYFQLKANPGAWILALREGKSAEIYEVKSVDGVVQNQTTSVVILDGFSGRMIHVKVAKKNDQLENELLAESEDAESESLWQSISKTFQSGEKYDVINIFSLASGHLYERFLRIMMLSVLKHTKTAVKFWLLKNYLSPGFKEFLPYMAGHYNFSYELVQYKWPRWLHQQTEKQRIMWGYKILFLDVLFPLDVKKIIFVDADQVVRTDMLNLMELDLEGAPYAYTPFCDSRKEMDGYRFWKQGYWENHLAGRKYHISALYVVDLKKFRQVAAGDRLRGQYHFLSRDPNSLSNLDQDLPNNMIHQVKIKSLPQEWLWCETWCDDKSKKFAKTIDLCNNPMTKEPKLQSAMRIIEEWKDYDSEIKDLLDQRTKDKWNITEQKIVDIGFQFTVYFLVFLEESWNRAMNKENQVQDNQSDDLPQATESINNATEMKARQRGMIEKKLRKYVVGIKNQNSLMKLRIMPANSLGTLRLSNRRLSKKSCGKLLCSDQKMKNDSVDCSRNRDKFKNYYRKHWDTDITVEDETVVGLKNRILKGDRSALASAITLVESNHPTKRAQGECLLQSMLKISKKRFDEHGPKSLIYRIAITGAPGAGKSTFIESFGLYLTRELKKKIAVLTIDPSSERTGGSIMGDVARMNELSKEPNCYIRPSATAGTLGGVRRGTHESVVLCEGAGYDVVLIETVGVGQSESAVANIADMVVLLLSPALGDELQGIKRGIMEMADLILVTKADGDLLNQARLTRAEFSSALKYSRSRFHCWRPQVLLVSSRTNKGITEIWNEMEHFRNALSENGVLLQQRHQQMLRWMWNHIDHVLSGLFRHHPDVVKMLPQLIREIQNDNVTPVTAGEKMEHFKKEHWKFRQEKNMLEIKVSKAAEKVYTDGFDLANASGSVNLKKNVRMSEENDLHEEEPERVPVSFADLRREQCEADNKIDPEFWRNRERMKTVSVALVLCLNIGIDPPDTVKPKPCARTECWIDPQCMPMQKALESIGTALQRQYQWWQPRARYKQALDPTVDDVRRLCISMRKNAKEERVLFHYNGHGVPRPTKNCEIWVFNKMFTQYIPLAIYDLQTWMGAPGVYVWDCNGAAQAIRAFKTCAKKQIQAYRCSLAARRKESTKTTVEFEPGVDLFQADDARQAELDRSRRRKTGLDCVSSKPLEVNFRSSSMVPDGPKIETNNKATAKDASKHLAGNSSGNNNHCIQLAACARDQTLPTDPALPADLFTCCLTTPIRMAVMYYILQNKLTDRYPVCIADRIPGSTGDRRSPLGELNWIFTAITDTIAWNLLPSETFQRLFRQDLLIASLYRNYLLADRVMRSYYCTPVSSPRLPPTHEHVMWQAWDMVVESVLEQLDVQALVAEVEANEATVMLPPGVPTAAGHGGAGVGAGASTAVAAAAMPGGGTATTGVSDAGSRAVGNDPTLTAGQQAQHDKLIAFEVWLQYGFYQGSAPQQLPIVLQVLLSQVLRVRALELLARFVDLGPKAVEQALAVGIFPYILRLLQSVSRDMRPLLTFIWAKILAVDNSCRLMLLKDHVHRYFLVHLNDPTVEVRRKLFAVFALARLMADCRQFQEAAFDCNDAPMRQWLALALGHLWTDYEAAKWQAIRCSLHQTLIGLLEDRLASVRAAAVFALGRLISTGGAGDKENKQNDGDQGNHCPNDEQSTNLAHSVAMSLVQHVCADSSATVRREALLGFFAFVRRFYPQFVTIAYEIDRELASSVPSRRHQHHELVSSYTVTTATIQRTRNFGISSSPVAANVDSSTLVKSTSLLFQPLLTAVSSSLNSSSNSMINIPLVRPSSRKSVSWLFGLARSSQENQKADNSKQEQSSQETITVLSRREVRRHRSIGPAALVNVNNVYVSVWRAVLKFLYDPDIEVSRLAHRLFKYVDRSVQNLRLLSSVGHQDSVDSLPVRRRSTAGYFHSSPDNGTAGQHPSPRPKFSFSGTHDHHQQQLVNDGNGNSGGYESPMGASPIALCTYSAIYTNPRRPVFGDGPASESSVHSSEASPETRRHLAPEREIGTTAASILSPPVDSEPVMKTDYLSTCAQQFRSPMFYLLSESCAPSPAALNAQPRTTQRILPSFIADRISLIHQHSSIEWNDKRKKYGKLWTYKNDFPATCMEFLPLEPLLCIGERDSVTVWNCNKGSVVAHFDNSSTSYTGQSGSDLSGNLVYLTFVNPYTHGFILTGTDCGEVRVWDVRLINEPDLTSKVPKGSIDFALLTAWMCADDARRFHTKPFTCYFWEQDPGLLFAAGDFRSIILWDAHTELKLAELKVGAGGDTYVCTLSADSNGHHLTAAGCSDGSVRLFDRRLPTSDSRIMTLRDLGRAVFKVHLEQASVGGGGGGGGRLVAASRSGQLCIWEPRMYREPVLFRDVGVRCRSSFDVHRYYPLIAAWNGAQVDLINFDGKSMGLFRPDVLNMTTTLGRLAALRFHPVQVSIGLAEQDGQFSLYGLRP

SEQ ID NO: 4486 - protein, 1435 aa, Pseudogymnoascus sp.
MVRLGNRWSLTGSALAFSCLQSIKVSASPTINVALATSFTSAPYLLELLETAGDENSTSYFPLLDRIAEGYFKDAKTDLELYNSFVKVLRDDGHLDSEGLASYSLALSLRTSAPRIEAQYQFYDTAIESSGDDSSCPVWVLFEGKKHCSPALDQAHGTYNGRRGTEQLQFDRITGNLSAPASILYADITSPEFNQFHKKLIQKAQKQEISYRIRHRKPNAKESKPLVIGGYGVELALKRTDYIVIDDREAEAQLQGESVKTEVVLEDEELADLKPLSASELVSLGLKASSFIMQSENPFEVLTRLSQDFPRYSSAIAAHNVSSAFAEEHVYNRGRLVPAGANVVWINGLQVPTRQMDAFSMLDILRKERKLLNKFSQLGLTGPQTISLLSHEDVAFTKADDEPARFDWRDGDGDVIIWLNNIEKDKRYNGWPETVQALIQGGYPGQLPQVRKDLFNLVFPVDLSNLQDVEIVVMQLSDFVKRSLPLRFGLVPLTNSDAALEQAKIAYYLLDSYGLSTLVAYLNGFYASKGAASSRNANFEAAIGERKPRTDKTTKTLEEVLDTNEANGPLEHSKLWTSRLGVNDKVPTVFVNGVAVPRDENWLQGMSQRVQMDVRLMQRAVFESTVTDDNWPPILFLHDAASGRNPFLMPENDKDLQLFDVNAIYSDHAEALDGLPVIKASPVAVQVDWAHMILVADVESEQGRHLLKAGVEFSKRNPTVEFVIVPSSESPAGILSTYEYMAERSFQFLKSGDLDNLVEAVSKSTGNEQKYTQKVADKWTAIGDFLGSVGLKSGQQGLLLNGRLVGPIPSEIELGISEFEQLLGFERTKRIKPALVAVKELGLSEAIADPLASAKLTSLVTLSFISNVPEGIFEQASTLRIDSFKVWKSEHTAIEIGDEPTASIHIQVALDPASQESQRWIPILKVLSELDGVYVKLFLNPKDKLMEIPIKRFYRYVLESKPLFNADGSLKDIKAQFASVPQEALLTVGMDVPAPWLVAPKQSVTDLDNIKLSSVNGDVNAVYELEHILIEGHSSEKETGQAPRGAQLLLGTAADAHFADTIIMANLGYFQFKANPGFYKISLQEGPSSKIYSIDTLGASGRDAAKPDESTEISLISFQGLTLFPQLSRNPGQETEDVLEPSTDLKDDIVSKGRKLAQNILGFGGKKSTSVVAAQPTQAEINIFSVASGHLYERMLNIMMVSVMKHTNHTVKFWFIEQFLSPSFKQSIPSLAAAYNFDYEMVTYKWPHWLRSQSEKQREIWGYKILFLDVLFPLSLDKVIFVDADQIVRTDMRELVDVDLQGAPYGFTPMCDSRVEMEGFRFWKQGYWKSFLRGLPYHISALYVVDLRRFREIAAGDRLRQQYHQLSADPNSLANLDQDLPNHMQALLPIHSLPQEWLWCETWCSDESLEGAKTIDLCNNPMTKEPKLDRARRQV

SEQ ID NO: 4487 - protein, 1453 aa, Candida dubliniensis
MSVIRYILYAIAVTILLNFVKATENNNFKVELETQWSNIDFLPNFIEAIAGFNESLYEQTIENIFGLSDNDEVLEDDASDQEIYSTVANSLRLADEDMDFVNFDLVYKKHTPRVAAHYDHYSDVLAKFGDRLKRECAKDSFGNTVETKNGQIQTWLLYNDKIYCSANDLFALRTDSSSNSTLLFDRVIGKSKNAPLLILYGNPTEESTKDFLKVLYPEAKAGKLKFVWRYIPSATKKLDSIPGFGVTLKMENYDYSYSEANPKYDLSRDFTKINESQELVSVNEKHLYELGVKLTSFILSNRYKTAKYDLLNTILTNFPKFIPYIARSPKLLNHEKVKSKVLGNEDIGLSQDSYGIYINGSPIHPLELDIYNLGSRIKEELQTVKDLVKLGFDVVQAKLLIAKFALLSAVKQTQFRNGNTLMGNNENRFKVYENEFKKGSSEKGGVLFFNNVESDNTFKEYTTNREEAYLGVGSYKLKPNQIPLLKENVHDLIFALNFGNKHQLRVFFTLSKVILDSGIPQQVGVLPVIGDDPMDEMLAKKFYWIAEKSSTQEALAILYKYFESDGPDEAADLLDKVEVPEDFKVDYDHVLNKFSIATASVIFNGVIYDLRAPNWQIAMSKQISQDISLIKTFLRQGPIEGKLKDLLYSNAKSERNLRIIPLEPSDIIYKKIDKELINNSIAFKKLDKEQGVSGTFWLVSDFARPEMITQLIDLLSLLKRKSIQVRVINTGDADFSEKLETDFKLTTLTNGQIDEIIEILEDSNISKAPNDGLRELLVTKQLPAHHSFLLFNSRYFRLDTAFEYEELDQIIEFEISQRLNLIPDVIEAYPDEFMSKKVSDFNSMLSGLDNMDWFDLMTSIVTKSFHVDDKRFIVDVSRFDFSSLDFSNSIDVKTYKENNPVDVLIILNPMDEYSQRLLSIVSSITQFSFLNIRILLQPRVDSKEEIKIHKFYRGVYPHAKPKFDSNGKWIQHYSSQFESIPSDVTYSTELDVPHKWIIVPQMSSIDLNNIYFNNHHSVNIKYSLKNILIEGYARDIRTGKAPDGLIFRAFNKNYSTDTSVMTSLDYFQIKAYPSIFNFSTTSNYTLLSASENKYQTNIEELESIEVPVFKIDGSTIYPRVKKSDNKKAMPMRRHAEINIFTIAGGQLYEKLTSIMIASVRKHNHRSTIKFWILEDFVSPQFKHLMKLISIKYNVEYEFISYKWPNFLRRQKSKERIIWGYKILFLDVLFPQDLDKIIFIDADQICRADLTELINMDLEGAPYGFTPMCDSREEMEGYRFWKEGYWSDVLKDDLKYHISALFVVDLQKFRSIKAGDRLRAHYQKLSSDPNSLSNLDQDLPNNMQRSIKIFSLPQSWLWCETWCSDKSLKDAKMIDLCNNPLTKENKLDTAKRLIPEWTGYEQEIESLVSLVQNDSAKEVSEEIESDVEKEVDHSDKNEEEEEDDDGDDYFHDEL

SEQ ID NO: 4488 - protein, 1512 aa, Wasmannia auropunctata
MKGLIFFYILSLCSSQLGADKKINKYVTTLINAKWNETPLVLEAAEYLSDENPSYFWKFIDSYSNRISNLVLATQKENYDVILELAEKFLSQSEIAVFKLALSLRIYSARVEMFSQMAVNKNVSSYGCNNVVNVGGTFTCSLEDVDRLLEQDTWEIIDTYDVDHRYLSTSESDKIMILYGQIGTPMFTDFHEKLKNIAETKGINYILRHYVKEREDKKLRLSGYGVELQMKSTEYKATDDSDIKDNTGKSSEMANDGMEEIEGINFMTLKKLYPDQQAELDKIQTYLLETSHEIGAFKVWQFQELSHQAAERIMKSPSTEALNILTDISQNFPMQAKSLIRTKVNSDMKKEMKLNQEIFMASLNIQPTDTALFINGLFFDLEAIDVLTLLESLRSELRVMEALHKIGFSNKKMSKLLALDLSGSTDNQNFAMDIRDSAINWINDIENDPRYSNWSPSLTELLRPTFPGMLRNIRRNLYNLVLIIDPLNEESMPLVALAQSLYAHSAPLRVGFVFVTNYNTSVTGLMDASVAVNNAYHYFADTRSPKEALHFLSELGNYIGPSGADVDDVKKVIRSKDSSASVPYILGEESEYDVGRHLASDFVKRCGFKKFPQALLNGVPLTPNQINSESYEEAVLSTIMSQTPMLQKAVYRGEVTEGDDIVDFLMNQPNVMPRLNERILKVDKNAWLNLIGTIPEDDDYTKWTSPNLSTYLMKKMHYLFVPRRNMRHLYSFWVVADLKSLAGRQLLREALEYVESNTDARISIIINAKDDANLKSDINKIVLAVISALSPEKAILYMRKILKEENAALIADSNFEIEDESVAAILKDQNSMLLLHQHYVKTVLNMEIGIRAVLCNGRIIGPLDNNEEFTNEDFSLLERFSQSTYGEKLFMKLIKDQIFNEDEYEESDITDDTIMKITSLLVPRPQTRNRYDVPFHGDDHSVIKIPATNSDEIAFNFIAIVDPVSRGAQKLGPILKTLQQALNCNIKVFLNCVDKNSDMPLKSFYRFVLESELQFTTEGDISGSIAKFTKLPTSSLLTQYIHAPENWLVEVVRSVYDLDNIKLDNVAMGVHSEFELEYLLLEGHCFEAVMGNPPRGLQFTLGTEKQPVMVDTIVMANLGYFQLKANPGEWVLRLRQGRSAEIYDFTTVDGQDVIQNGNDVKVLISSLRSHVLKVKVSKKPDKAGMDLLSDNEKDSGLWNSISRTFTATDENEDKDEKLNIFSLASGHLYERFLKIMMLSVIKHTKTPVKFWFLKNYLSPTLKDFLPHMAKEYGFEYELVQYKWPRWLHQQTEKQRTIWGYKILFLDVLFPLGVKKIIFVDADQVVRADLKELATMDLGGAPYAYTPFCDSRIEMDGFRFWKQGYWRNHLQGRAYHISALYVVDLKRFRRIAAGDRLRGQYQALSQDPNSLSNLDQDLPNNMIHQVAIKTLPQEWLWCETWCDDASKKNAKTIDLCNNPMTKEAKLQAAMRILPEWVGYDEEIKVLQQKVENANRQTEKDSETVDHVSGHTEL

SEQ ID NO: 4489 - protein, 1491 aa, Aspergillus homomorphus
MVSGSAFVASWRLTSVVIASALSCLVHATPSVNVALQASFDSAPYLIELLETAAEENATSYFPLLDRIADGAFDDAATDKELYDRFLEAVHTDGHLRTPEALSSFKLSLAIRSASPRIAAHYQYYNASVQQSLAAAQDAVCPVWVHSEGKQYCSSTLERAQQGVMGPSDPPELPFDRVFGDSSLPPAILYADVASPMFKDFHQSLTALAKEGQISYRVRYRPPQHWSSRPLFVSGYGVELALKRTDYIVIDDRAAEERGADGSDSKKSVDMEGDDLDDLRPLSSSEVSRLGPSTVGYVLDSESPLETLVKLSQDFPKYSARIAAYNVTRELLQDIQSSRLRMLPPGLNALWINGVQIDARQVDAFTLLDHLRRERKLIEKFRTLGLSASESVELLSHKFLAAAMAQDGPQRYNYRDEIEGGGVIMWLNDLAKDARYESWPSDLGGYMQRVFPGQLPSVRREANNVVIPVDLTNANDATLIVKSIQVFVKNKIPVRFGLVPTTSSAGSIAQLKVAHYLQDTFGLSSLMSYLEASLSRNKLSSPDKTAFQTATADRNVRPDKQLLTLDEVLKNDSLNATASRTTNYLKRLGITDKASHSFVNGAPIVRNENWAQELSARVSRDIQAIQQLIADGALDEDTWLPGLFLSEAFDRRNPVIVPEDPKDVRVVDMSQVAEAHGELLGQVPRIASIENDVLSSSYVIIVGDFNDESGFKMLSGALESLKNHGEAEVLLLHNPGADSSVWTGANTIHRYLKNPKTKEDGFDAAQLLEELTGTDLWSHKQIQEVDEFWAAQRPLVKDFGLASGASAIIINGRVVELPAEFALTSVDLDQLLAYERQKRIAPVAKAAKALGFDAKLRDPLAFAKLTSLTASSTVSDVPEGIYESTPDIRVNLFERWDKARSAVTVSNSEDPAITIVASIDPTSEVAQKWLPILKVLSELANVRMRLVLNPRDELQELPTKRFYRYVLDSEPSFSEDGSVAHPAASFSGVPAEALLTLGMDVPSSWLVAPKDSVYDLDNIKLSSVKEGSDVDAIYALEHILIEGHSRDLTTKTPPRGVQLILGTEENPQLSDTIIMANLGYFQFKAQPGLWKINLKPGRSERIFQLDSLGNEGYILHPNDDTSNEVALLSFQGKTLFPRLSRKKGQEMEDVLETGVKSGSAMEYVSKGLNFASDILSSVGINSSPKDVSAGKQADINIFSVASGHLYERMLNIMMVSVMRNTKHSVKFWFIEQFLSPSFKAFLPHLAAEYGFSYEMVTYKWPHWLRAQTEKQREIWGYKILFLDVLFPLSLDKVIFVDADQIVRTDMYDLVSLDLEGAPYGFTPMCDSRHEMEGFRFWKQGYWKNFLRGQPYHISALYVVDLSRFRALAAGDRLRGQYQMLSADPGSLSNLDQDLPNHMQHHIPIKSLPQEWLWCETWCSDESLGQARTIDLCNNPLTKEPKLERARRQVPEWTVYDEEIAALENRVRLETVQDEVPVSASGTGATWDKDEL

SEQ ID NO: 4490 - protein, 1472 aa, Phialophora attae
MHRSHLPWRLSVAAAFVVTFLVAGGAAAGHSVNVALQTSWNSAPFLVELLETAAAENPSSYFPLLDRIAQGTFADVSTERELYNKFVSVLDQDGLLPDAEALSSFKFALSLHEAAPRIQAHLQHYNTSVQPNMMAAQDAVCPVWVHFDGQQYCSPTLDRAQQPVDLAYGDDTLPFDRVLGPADAPSSIIYADITHPLFADFHSVVSQTAREGKTSYRVRYRATDQATSPVTLSGYGAELNLKRTDYIVIDDREASTKGNGDAADVKEPELDDELEIKSLTTTELWNLGLNAASWIAKHADPMQALLQVSTDFPRYSSFLAAQNASDDFVSEHRHNRELLLPAGYNALWINGLQIDPREINAYSLLDHLRRERKLIARVKDIGLTATEAVSILANDAIANSARNAVDQRFNWRDSDEGGEVIIFLNDLEKDSRYAAWPTSLMTLFQPQYQRGLPNVARDIHNLVVPIEVEKLSEIELVVTTLQMLVKRKLPLRVGLVPVGKSPISDTYSRLMYHLLDTYGLSTLLNFYGAIVKSGKVIPSPDKQFASAIKDRKLRAGKTAATYAEVTADDELTQRLTSRDAYADRLELNGPMPPFMLNGAVSPRTESWFETINSQIYMDTQMVMQSLYVGTLTDESVVRDFFLTDAAAKRNGLVIPHDEKDIRVVDVAAMTTEHAAVFDSLPRLPGAESALITDRAHLMVVADLDSNQGKSLLGAAMDLQEQVPEVDVLMVQNPGSESTATVSSLLYRWQSQTGPALDAEKKTKLRAFLAATGVTGSSAEDLRRDSSIYWSTAEPLIADLGLKPGDSALLLDYERTSRIAPATAAITALKLEEKFQNALDIAKITATVARSQKSELPEGMRGTAPMLRLDRYNLWDDTHTVVRAGTSKDPTIQVVAVLDPVAEASQPWISIVKTLSELEGVSVKIFLNPKEQLSELPSKRFYRQVVQSAPTFDDAGSLAAPEANFNKLPEDVLFNLGLTVPPSWLVSPKQSVADLDNIKFGVSDSDVGAVYELEHILIEGHARDSNVSSPPRGVQLLLGTEQDAHFTDTIIMANLGYFQFKANPGHWSISLMPGRSSKIYNLDSAGAEGYLPVPGDDNSAVTLMSFQGVTLYPRLSRREGQETADVLETSTLGSATDYLSKGASWASSALSSLGLKPSGGQAEINIFSVASGHLYERMLNIMMVSVMKHTKHTVKFWFIEQFLSPSFKATLPALAAHYNFDYEMVTYKWPHWLRGQKEKQREIWGYKILFLDVLFPLQLSKVIFVDADQIVRTDMMELNKVDLQGAPYGFTPMCDSRTEMEGFRFWKKGYWESYLAGKPYHISALYVVDLKKFRELAAGDRLRQQYHSLSADPESLSNLDQDLPNHMQHNLPIFSLPQEWLWCETWCSDESLGQAKTIDLCNNPLTKEPKLDRARRQVPEWNEYDEEIRGVIAKARGDLPDSAPSDKAEAAKERLEDFLEQEEGQKSLKKDEL

SEQ ID NO: 4491 - protein, 1743 aa, Microbotryum intermedium
MSSAHGPTSSPSRRRTRRTSVVLIPVLVVVGLLSVVPTCLASSCSSSCSTSCSTSNGARSVQARIKTPWAASSWVVQYLESLASEDEQLLHPFLAHLIRSNESTLLTTASNTARAQDRRREWTTLSHQLQRFLSQTGLGDDAAHSQAMVESLGLAMGLKEASVSLQAMQVVAERAWASTTFPPVLTAAATGVGRDVALECDNWVDLRGYRVCSVHDFWRVVGEEHNEGKGALQLPNTGNSSTRPKLYPFDHLSPRSPSSTLSSPPLVIFYASPSSPAFVEWYQLLTRLAGEEPPRLEYAMRWKASAASVQEPLLLSGYGAGLDIKKSDYLAIDDRLAVGAAGEQDATSLTTPDETTETIKMDPIKKKDIPLLGVRSTAYILSDPSPLTAFTRLTSSFPLLASKLSSLVPNISADLLQEIEANSFVPAGVQASFKLNGLLIPEAQVDPFVLLRLMRKERKFVTQLQRLATNDEDGGHALVDISPLQARKILMNQAISKAMKVGGKVVTEPSGRVSSHVLGHLFDASDREEEGGVVFWWNDLEKDRKYQSWGKDLKKLLQPTYPGQMNNVALNLNQAVFILDLTQPSALQLITRQVQTFVSRGLPIRFGLVPKLPSRGEEEEEEEEEADSAEESLAKVFWYLTEANGRAGTMRFLGQLLATLPTERVTTPHLRKTYEAFMLESTHISGGPLAPFAQVLELEVGSERANKARAYTKRLGVGGGDEASSVGAFLINGAFFDFDEEWTQHLQQTLSAHVQYEQQEVYFDKLTSQTDIANFFYDLPTTHKRRNRLVFTSETNPLKVVNLVEATRGVKREFVERTWIEAAAVVLKGEKGSEVEVGVDLDQVVSVHVVADLDSSEGRQLVTTALEYVQAHPEARVSLLHYPMLKEEQELPSRWAVSNLIYLLHTDDALGETLPKELVRFVRLNLNQTNVNDVIQLLLGGWDDDNPIKKHVKLGASRKVSLLAQEWWKSAALMAQRFGFERGQSGIVINGRVIGPLRRHEWTIGDLEALVAYEREERIDAVVEALRNVDLDLRLIDRSGWAQMVALATSVIAEAYEADPSNGLSGRETIERSRDYLDLQADHSSIVGPNEDQGLFEIAVVVDPATELAQRWAPILETLSHLDSIHLRVYLNPSLRIQDLPIKRFYAFTFAPSPQFDRSTGGERIPQVHFTDVPEDVLFTFAMDTPKAWLAFPKKSVHDLDNIRLKDLPAWARKQGVDADFELESLVVEGHAREVPRGTPPRGLQLELVNEGKGEEEQHRVDTIVMANLGYFQFKASPGPWRLSIREGKSSQVYSIETTGVEGWNSRGVEETGDEILVTTFEGVTLFPKFKRNKGHETTQLLDDSNKGVMKKGAQESVVDRVKNMYVRDSDGTFFLGVASKTYTSHSRLPFLRKSDLAIKKKAEINVFTVASGLLYERMAFLMVVSVMRHTQSTVKFWFIQNFLSPSFRAFIPHLAQEYGFEYELVTYKWPHWLRAQTEKQRTIWGYKILFLDVLFPLELERVIFVDSDQIVRTDLKQLVDLDLQGAPYAYTPMGDDRPEMDRFRFWKTGYWSNHLRGKPYHISALYVVDLDRFRAIAAGDRLRQQYQALSADPNSLANLDQDLPNNMQDQIPIYTLDRSWLWCETWCSDASLAQAKTIDLCNNPLTHEPKLRRAKRLIPEWTVYDDEIAALAKRVAGEQKGGLEKNDIGVFGGKADELGQAKGQKDELEAFVKEKNDEGEKVELRPVEEQSQDTAVPLKDEL

SEQ ID NO: 4492 - protein, 512 aa, Ostreococcus lucimarinus
MTNLQDLPLKSYYRYVAPPSSMTESPRAFITNVPTHKTLTMHVDFPEAWMVTTHRAAYDLDNLILKDIKEKTVHAEYLLESLLVTGHASDHNTGQPARGTQFVLEDKSVAVNPGTIVMSNLGYFQLPASPGMHKLSLRAGRSSDIFAFLQVKDLLDSEARDLTLSHDESTVDVLVDSFRGRQLDVSLARRKGKEDLDVLDEVSTSDNSGWLSSVFKRTKEADRIHIFSVASGHLYERFLKIMMASVKRSTKNPVKFWFIKNWLSPSFKDFLPYMAKEYDFEYELVSYKWPTWLNKQTEKQRIIWAYKILFLDVLFPLELNKVIFVDADQIVRADMSELWTMDLHGAPYGYTPMCDNNKEMEGFRFWKQGFWRDHLRGRPYHISALYVVDLDRFRAMAAGDRLRVMYDQLSRDPGSLANLDQDLPNYAQHDVPIFSLPQPWLWCESWCGNETKSAAKTIDLCNNPLTKEPKLEGARRIVQEWPGLDAEVRAFTERVEERMRVGDKTEDVKDEL

SEQ ID NO: 4493 - protein, 1488 aa, Acremonium chrysogenum
MIRLLQLPWSLAAVLVAALGATAAPAVNVGMKAAFPAGPYLLELLETAAAENSSSYFPLLDQIASGYFASASTEAQLYTSFLNLLREGGHITSPEALSTFNLALSLRTAAPRIEAHYQYYTTSVNSSPEATEGCQDWVLLDGDRHCSPSLDNPAKDLPATRDVEDLPFDRAVGVGKDAVLYADPASESFGAFHQALSRAAHNGELRYRLRYRRDQTMPANPLHVTGYGVELALKRTDYIVIDDRDAARDASQQPLTEVDFDEEEEVADLKPLSTSELAELGLKAASFIMHSDEPLETLVKLTQDLPKFSTSIASQKISDDFLSEHKQNRRHMAPPGINYLWMNGVQLIERQIEPFNLVDMVRRERDFLGGVLGLGFSGKQAISLLGHKGVSTAKANHEKPRFDWTDRTEDGRVIIWLNDLENDERYATYPSSLKSLLQRTYPGQLPPIGQNVFNLVLPLDLADPEDLTVVPQVFSLIKRGIPVRFGVVPLTPNDDAATQARMAYHLVEDYGVEALAAYLSAFLEDTKIEAVESLLATTVKSFELQDDATAKLFSEVIEAENYSQQIEFARQWSSRLEANAASRSVFANGAAIPRDRNWMQSVSVQLVEDLQRLQMAIFQARIDEEAWAPGFFLEGASLKRNTYILPEENSALRILDVNKIYNQHYDLFDKIPVIESYADSTKENWAVLTLLADITAASGKELLVEALKFKRDNPGVRLDIVHNPESAESAFKTNAALMANKKQLGDVEAVSEISQILQAQDGAEADDGFTAALDRFLTSSKIQPGTETLLLNGRVVGPISQADSFKADEFQQLLEFEQRNRILPVYTAIDDLGLGEKLNGPISAAKVTSLTALSTISDLPEGIFESAPTLRTNLYDEWESKYTAIETGNPDTASVHIAGLLNPLSEQGQRWAPILKVLSELDGVYLKLFLNPKEKIEELPVKRFFRYVLESKPSFDEETGKLKTLNATFRGLPSEALLTVGMNVPPAWLVAPSVSVHDLDNIKLGTIKSDVEALYELEHILIEGHSRETRGNPPRGAQLVLATDSNPHVTDTIVMANLGYFQFKANPGFYSIKLKEGRSADIYSIESVGAQGWEAVPGDEGTDVSVMDFKGTTLYPRLRRNPGMEQVDILGEEEEEDENLVAKGLKFAGSIFGGSSKDAAIPAKQQHADINIFSVASGHLYERMLNIMIVSVMRHTKHTVKFWFIEQFLSPSFKDFIPYMAEEYGFEYEMVTYKWPHWLRQQKEKQREIWGYKILFLDVLFPLSLDKVIFVDADQIVRTDMMDLVNHDLQGAPYGFTPMCDSRTEMDGFRFWKQGYWASHLRGLPYHISALYVVDLRRFRKLAAGDRLRQQYHSLSADPNSLSNLDQDLPNNMQFQIPIHSLPQEWLWCETWCSDEALATARTIDLCNNPETKEPKLDRARRQVPEWTVYDDEIAALDRRRRRGVEPVVVSAEEIGGAEEKAGEGGVSGVNTKSRRFEEEPVHTRDEL

SEQ ID NO: 4494 - protein, 1494 aa, Phialophora americana
MRTSNLPWRCALLSLARLCSVVTSAHISPSINVDLQASFSAGPFLVELLETAALENSSSYFPLLDRIADGVFTDLHTEQELYTRFLDVLQNEGHMSTAESLSSFKFALALHAAAPRVEAHFQYYNTSVQPHLMAAQDAVCPVWVYLDGQQFCSPALDRAQQAVTAPDVDDDLPFDRVLGTSPEGPASILYADITHPLFGQFHGVVSQTARQGKSTYRVRYRPSSLESDKPVYVSGYGVELVLKRTDYIVIDDRDAQKPEDVTSDQLSLEDVKDDNLKDLKPLTTSEVINLGLNAANFIAASSDPLDTLLQVTSDFPRYSSLLASANASKEFVLEHRGNRERFLPSGYNVFWINGVQIEPRQINAYSLLDHLRRERRIIGELKDLGLTSSEAISLLSSEVIAEAQANELPQRFDWRDDTEGHKVLMWLNDLEQDKRYATWSKSLRGLFQRTYPGQLPQIARDIHNLVVPIDMGNIKDIELVATSIQSLVRRSVPIRIALIPTGRSETADIYAKVAYHILDTYGLTALMNFFSDVVASKKLVSNPEKSFHNAIKGRTVRQERNPQPYQAILHDEDLRLQLQARDDYLKRLALDDSDPAFLINGVVLPRMDNWFELMSARLYADLQIIQQAVLQEAIFEESWIPNFFLFQAVKSRNELVFPNDPKDVIIVDIGLLTRQFADVFARLPRLVGSEATLLSDRAHLLVIADIEAKRGRALISEALLFHQRNPEIEILVLHNPNGEAQNSKYANALHALVQNGVRDLTVAQLEQLLGEDLTESADVSGESSAGFWTSQATLARALGLSEGQNGLWLNGRLLGPIEQPLTSADLESLLEVERRERIAPVTTAITGLALEDRFSDTLDLAKVTSLVALSLKSDLPEGLRESAPLIRMDRFKVWNTTHTSINLSNSADPTIQIVAVVDPASEIVQQWVPILQTLSQLSGVGVRIFLNPKDRLTELPVKRFFRQVISAEPSFNADGSLVNPKASFSGIPRDTLFNLGMIVPPSWLVAPKRSIHDLDNIKLSSVAEDDNIDATYELEHILIEGHARDVTNGPPPRGVQLLLGTEQEPHFTDTIVMANLGYFQFKANPGYWQISLKPGRSSKIFNIESVGPYGYSAEPGDETTSVALLSFQGLTLFPRLSRKPGMEEEDVLEASGSGGAMDYLSKGASFASSALSSLGFKKASTNADINIFSVASGHLYERMLNIMMVSVMKHTKHSVKFWFIEQFLSPSFKTTLPALAEHYGFEYEMVTYKWPYWLRGQKEKQREIWGYKILFLDVLFPLDLDKVIFVDADQIVRTDMMELNKVDLKGAPYGFTPMCDSRTEMEGFRFWKQGYWETYLRGKPYHISALYVVDLKRFRQLAAGDRLRQQYQALSADPASLSNLDQDLPNHMQHNLPIHSLPQEWLWCETWCSDESLAKAKTIDLCNNPQTKEPKLDRARRQVPEWTVYDEEIAAVIRAAKEKQGAEGIEAVPGAGDLNDADEGSQKVVSGERVRDEL

SEQ ID NO: 4495 - protein, 1547 aa, Urocitellus parryii
MELLIALTGLWLFSSVKADSKAITTSLTTKWFSTPLLLEASEFLAEDSQEKFWNFVEATQNIGSSDHHGTDYSYYHSILEAAFQFLSPLQQNLLKFCLSLRSYSATIQAFQQIAANEPPPEGCDSFFSVHGKKTCDFHTLETLLLTASERPKPLLFKGDHRYPSSNPESPVVIFYSEIGYENFSNFHHQLISKSNLGKINYVFRHYLSNPRREPVHLSGYGVELAIKSTEYKAKDDTQVKGTEVNTTVIGENDPIDEVQGFLFGKLRDLHPDLKEQLKELRKHLVESTNEMAPLKVWQLQDLSFQAAARILSAPVELALVVMKDLSQNFPTKARAITKTAVSSELRTEVEENQKYFKGTLGLQPGDSALFINGLHIDLDTQDIFSLFDVLRNEARVMEGLHRLGIEGIALHNILKLNIQPSEADYAVDIRSSAISWVNNLEADSRYNSWPSSLQELLRPTFPGVIRQIRKNLHNMVIIVDPAHEATAELINTAEMFLSNHIPLRIGFVFVVNDSEDVDGMQDAGVAVLRAYNYVVQEVDDYHAFQTLTHIYNKVRTGEKVKVEHVVSVLEKKYPYVEVNSILGIDSAYDQNRKEGRGYYEQTGVGPLPVVLFNGMPFEKEQLDPDELETITMHKILETTTFFQRAVYLGELSHDQDVVEYIMNQPNVVPRINSRILTAEREYLDLTANIPRTMLNRSGESDYQDNFFVDDYARFSALDSQGKTAALANSMNYLTKKGMSSKEIYDDSFIRPVTFWIVGDFDTPSGRQLLYDAIKHQKSSNNVRISMINNPSEEINYENTQISRAIWAALQTQTSNSAKNFITKMAKEETAEALAIGADIGEFSVGGMDFSLFKEVFESSKMDFILSHAVYCRDVLKLKKGQRAVISNGRIIGPLEDNELFNQDDFHLLENIILKTSGQKIKSHIQQLRVEEDVASDLVMKVDALLSAQPKGDARIEYRFFEDRHSAIKLRPKEGETYFDVMAVVDPVTREAQRLAPLLLVLTQLINMNLRIFMNCQSKLSDMPLKSFYRYVLEPEISFTSDNSFAKGPIAKFLDMPQSPLFTLNLNTPESWMVESVRTPYDLDNIYLEEVDSIVAAEYELEYLLLEGHCYDITTGQPPRGLQFTLGTSADPVIVDTIVMANLGYFQLKANPGAWLLRLRKGRSEDIYRIYSHDGTDSPPDADEVVVVLNNFKSKIIKVKVQKKADMVNEDLLSDGTNENESGFWDSFKWGFSGGQKAEEVKQDKDDIINIFSVASGHLYERFLRIMMLSVLKNTKTPVKFWFLKNYLSPTFKEFIPYMANEYNFQYELVQYKWPRWLHQQTEKQRIIWGYKILFLDVLFPLVVDKFLFVDADQIVRTDLKELRDFNLDGAPYGYTPFCDSRREMDGYRFWKSGYWASHLAGRKYHISALYVVDLKKFRKIAAGDRLRGQYQGLSQDPNSLSNLDQDLPNNMIHQVPIKSLPQEWLWCETWCDDASKKRAKTIDLCNNPMTKEPKLEAAVRIVPEWQDYDQEIKQLQNRFQKEKEIGILYKGKTKNQSQEEYQKHEEL

SEQ ID NO: 4496 - protein, 1566 aa, Mixia osmundae
MRLTAAVSLVPALLAWHGSATRSPPIKIDLQASWAAAPLVVQILESISLQSNDAFFDLLSDFTTSAQALIESPLAAHLSAKDVYDRSLALIAASPHFKQDGQIQLLKLSLAMREASPAIEALYNVSAGVVANARCASWVQYNDQTACTSKELLTLMASEAAHGASPKLHPFDHVKAQSSTVPTAILYTSLDSDAVYDLHRELLSRAQSGKLQYVVRWIRRRDENARKLRLSGWGASLDIKKSDYLAIDDRLQADNVESNQTNDGSASSDTKDYDKFGNPDESTDELAPLKARQVAHLGLRALQMIKKSQHPLDTSVRLSQDFPKLAYQLATEWEDELDDKLARELSNAQARQIEGGRNAVWINGLLLEETEMDPFRLLKILRRERDTNSRFAARGLTPLQTMSLLAHPALASASAAGSGPAASGLVEASALGAIFDASDRQEDASVILWWNDLEKDRRYRTWGKSLRELLRPTYPGQMNQVARNLINVIFSLDLSLPASHALLSQQIAVYINRGLPVRFGLVPFIPDESSSRRGVALAASQAFWHLVERAGRARALAFHQELAKSSKLTLEVKDLREAYRAAIAGLQASADRPAPVTFDQLDSAGDVPDRLQEQLSVTEKWQTRLGLSDFLPTGSQYGQVFINGGYHLVDEDWRTRFQTAMNIQMQYLQQQVYMRVLDDSADVSVFFYDLDTSYGRRNKYIFPSEERPLRLLEPSQIDALFERAYTRDAFLTRSQNASAASVWVFGDLASKQGEAQAREAIKLIWARRHARICLVHTGQSTPADAELVHRLKLQWNLRVHGKGYDEMLIVELHNEPDKDEVDPNFLPSTSPDSRAFDAASPFAPGELGVVINGRVVGPFEDVGLLSEDLASLIEFEHKTRIQPVVKAIDAIAPGLLTGDSKTIAQTVAALSAYAAHALQPDSEQSMFGPSSKLRSTDYMVLNGSLTSTSSGNPSTAWLHLGAAIDPLSEVGQRWSAIVRELALMPGVSTHVFFNPSRTLAELPLKRFYRFCMSRELAFDSNGAELEPRAEFRGVPSSVLLTFGADVNPAWLAFPKKTVYDLDNIRLSDLPASAKQSGLEATLELESILVQGHARESPGNSAPRGLQLVLGTQGQQATVDTIVMANLGYFQLKANPGAWQLAIRPGSLGEQVYTMETAGNLGWKSPANRDSTISVYTFEGNTVFPRFVYKTGKEGTDLLSDVSAPPPKAKGDGMLGRLKQAVMGGHDAKQSVLAVTETDPTINIFTVASGLLYERMAMLMVISVLRHTKSKCKFWFIQNFLSPSFKAFIPHLAREYGFDYELVTYKWPHWLRAQKEKQRTIWGYKILFLDVLFPLDLHRVIFVDSDQIVRHDLQDLIDMDLKGAPYAYAPMGDDRKEMEGFRFWKSGYWQNHLAGRPYHISALYVVDLDRFRQVAAGDRLRQQYQGLSADPGSLANLDQDLPNNMIHVIPIHTLDQSWLWCETWCSDESLKDAKTIDLCNNPMTHEPKLARARRLIPEWNVYDAEVAALAKRVAATADPAEAQAFAVDAGGLEQAKLQQKEYVDEGTAGDAPVDGATTPDEHRKDEL

SEQ ID NO: 4497 - protein, 1664 aa, Trypanosoma brucei
MSCCTLRSNEIRQLIVFIFVASIHCHVLTVEGKGVYVKVVAPWTETPLLQEGCEAVASLTVPVGTQTHDDAPSGFYKCLEDVWLRAEATNRSGGARTMTQKEQYDVLMDIMQSNKHPPHHVAFLTTKLAVRMHSPTVEAHRQLAGRAINRTGGCAAEGRPFALIGNKAFCDEHKLAKELELKGPNGSDATGGKADGETELNADNAMSVIANLDHVHPHLNGPNLVIMYGIVGEGQTMRLLQAVKRHKQTTKLVFRHLPVSGNQWNDMLAVQGYGVSVDIKSTEYRAVDDRIAGESTANLQHKPGRRDVLGAMGSGEEHLLGGFNISLLQRRYPDQSLQLSHFEDAVGKNIEQGVKVDLHSWEKAHIGIAAAQYVMDPSRKPLHALLDVLTNFPNYASLLSRMSFVAAARKDPKFVRELDAIGRSMYHGASHVFLNGCAVTTENINLFYMMEKIEEYERLLDTLSTILVSRSELHSSDDATRNGNTDMTDVVNGLARIQFQGESLSGGSGDTTARVWLPQDAVTWFNDVENNAYLYRLPTTLRSMLRNGAAAPTLPRRNVLHVVCIADPTTYEGMGTIFEVARRAQQPIRFGVVFVDKNWSPEVTLVGKKFDKVAVSDASKATLLVAATVWELMQGEADPAAVSDFLMAMTREMMAKQTITELSVKMITQSVLMQARKRAVDDVVLDPAFITHYEKTQKMVRTLGFSKFPVVLLNGRVHTDISIVLQHGIWEEFAHLQKLVEMGALSDDDDNLYESVLELSGARTRYVAALFENKTFADWSHNSVLSFLHKYPFIYPSTSGMNEVSLVSGVLTLHVPVTAQSLQATLNAVRSLLLCKGADETCGRTRLTFAVCGTSLKTNSRTVVDDLHLLLQHCGVADKSECLNLLQEFLLSTFEHSHPGWQLDDPKKYEHVLKGVKFSDQLQALFRASAEGSTRDQAGKPNQLFLLASEFCREMTGSVSAVHEITPGSVHYYVNGRLFVYDNFTEEDFEVATLEGGHTPKKVWNVLEEATFVGMDPGLEIPGSDQNFYASRIAAVVAALRRDAANNDRREEQKTRLPVSPGPLSFVVGATEKRVPRHRLTVVVDPVARASQQLVSLCNYISQLSIGAVCTVYLNPSLTVGNTIRNYYKFVGELQLRFDAEGRVVAPKAVFSHLPDKHLLTLGIEEAEYWTVFPMEAEYDLDNIILSRLPPSSKYLYATYRINSILISGSAEDDSTGGPSSGLPLQIRSSLYNHTSGSYTNTTRDTIVMTIKGYFQLQSTPGLWYLGVQPGAIARAFYISHHNDVPVLDVAIGSVGRHFNYTAGQSIPVVVSSFTGSFIRLGISRTAGFEEASIESIAAATVVASNAEWPPKGPRSERPKFPTLNIFTVASGHLYERFLRIMMHTVMRTSSDVHGANTTRIKFWLIENFLSPQFKELVPLLAEHYGFDVGFVTYRWPWWLNKQTEKQRTIWAYKILFLDVLFPLNVDRVIFVDADQIVQADLHELYNMNIGAAAMAYTPFCREYPNDATTNFRFWDQGFWLSHLRGKPYHISALYLVNVQRLRAALGGDKYRATYARLSEDPGSLANLDQDLPNFMQDEMPIFSLPEEWLWCETWCAGESKARAKTIDLCNNPLTKIPKLENVRRIVDGWDEMDRELEDLSKQLLEKRNAELRDGAEKKKDKES

SEQ ID NO: 4498 - protein, 1508 aa, Leptosphaeria maculans
MRAAASLLSARTFLALSTYAHIAASERQSINVALRAAFNPAPYLVELLETAAEENATAYYPILDRVSQGYFDDKNTEQDLYTAFVDLLRNDGHITEPEALASFNFALSVRSAAPRIEAHYQFYKTSVEPSLAAEQTTDCELWVSFHGKQYCSPTLEEPLGGIKSERTYELPFDRILGNSSALPAILYADITAPRFKKWHETLSETARQGKTSYRIRHKPSSKAPQSPLIVNGYGVELQLKRTDYIVIDDRPKAEGDNVADQKPLGTVLDEQEEITDLKPLSKEEVADLGPKAASFVMQSEEPMDTLLRLVQDFPKYSTIIASRNASENFLKEHFNNRELLLPTGYNIIWVNGVQIPARDVNPHSLLAHLRRERKLINGIRNQGLSGPDTISLLSHQAIAETQTEDEPQRYDFRDAAEGGNVIIYMNNIEKDSRYESWPTELRALLQRTYPGQLPSVRRDIHNAIMPVDLTSAGEVSIILDTMLSLIKRGIPVRWGFVPQTTTPGSLDQAKVIYYLQNSYGLSTVIKYLTASVNAKKLAAPNKTIFDTTVKGAKLRNEREALELADVLTSEAIQARIDASKQYLHRLAADKSNAPMFVNGVPIPLTEDWLSILSQRIGLDLRQIQKGVFESVISENSWVPQHFLFQAATKRNPLIIPEDEKNIQLINMAEFEELYGKALSSMPRVAATDLSSKSEWVHITLVADFDSKSGLALLKSVADFRDTKPNAEIVLIHNPQPGSMQSSASETLLDVYGNLGGEVTSEALWAVANEPADTRATREESRTLWKTVEPIYEALGLAPGQHGILVNGRFIGPIPEDQVFSLGDVETLVTYEMAKRIQPLSKAIEDLGLAQKLKTPFEVAKIQSLVALSTVSDVPEGIFETVSTLRISTFNNWASEHTAITKGDQDKAVFQIVASIDPASELAQKWVPILNTLSDMDGVQLKLFLNPRQSMQELPVKRFYRYILGARPHFNADGSVGHLKAQFSGIPKDALLNLGMDVSPSWLVAPEESIHDLDNIKLSSLPARTNIDAIYGLESILIEGHSRDTTNGGEPPRGAEVVLSTEKDPHFADTIIMANLGYFQFKANPGFYNIQLKSGRSREIFNLDSAGTKSYAAQPGDETTEIVLMSFQGATIFPRLSRKPGQETADILASEESLTSELVGKGTHKVNKLLGKIGLNFNSEKVLQKGAELLSGGKSGKKGTQADINIFSVASGHLYERMLNIMMLSVMKHTKHTVKFWFIEQFLSPSFKSFLPHMASTYGFEYEMVTYKWPHWLRGQTEKQREIWGYKILFLDVLFPLDLEKVIFVDADQIVRTDMYELITHDLEGAPYGFTPMGDSRTEMEGFRFWKTGYWANFLRGKPYHISALYVVDLVRFRQLAAGDRLRQQYHQLSADPNSLSNLDQDLPNNMQFQLPIHSLPKEWLWCETWCSDEDLATAKTIDLCNNPQTKEPKLDRARRQVPEWTVYDEEIAALAKKVKGEAGVKAVEVDIQEEEQRREKREKDEERKRDEL

SEQ ID NO: 4499 - protein, 1485 aa, Amorphotheca resinae
MGVFSLPWSLTGALLASTYLPSLFACASPSINVGLQASFSSAPYLLELLETAADENATSYFPLLDRIADGYFSKASTDKELYDQFIQVLKDDGHMSDPETLSVYQFALSMRSSAPRIEAHYQYYHTAVEPSLKVEQDTTCPEWVLFDDKQYCSPALDAPHQDVSDNSQIEELPFDRVFGNPSAPVSILYADISSPTFGQFHKILVKRAREGKASYRVRYKKAISPESKPLIIPGYGVELALKRTDYIVIDDRKDNEAKPSEAVSETEVKFEDEEFADLKPLSSSELLDLSVKTSSFIMQSEKPFDTLIKLSQDFPKYSSAVASHNATAEFLAEHSYNRGRIVPAGFNVWWMNGARLTDRQIGALSLLHLLRKERKLVKGVTDLGFTGKEAIELLTDQAIAAVNADDEPQRFDWRDEIEGGNAIIWLNDLEKDKRYADWPTALPAMLQRTYPGQLPPVRRDCFTLVLPVDLTSMQDVYVIADTLISFVRRKLAIHIGIVPITKTARAEDQAAVLYHLLDTYGLTALSEYLEASYNSRSVESASKSVFESTIKKKKPRANKATQSFEDVLESEEYRSQVQASKKWIRRLAADSTIPPMFVDGVALPRGENFLQTMSSRVMADLQSIQAAIYEEYFKADAWLPSYFLAQAAKKRNALVVPEDESSLRIFDVNNLLGGNDEFVKTLPRVEADPSSAKDDWGHMIVIADLDSEAGKKLLSTAILFHKTNPSVELTVVHNPASDTTNFAVSNLLFSHVRDHSYQAFQDADDLAAILTADVSKEKNVAQQEADEYWQGAKFLVKSISFRPGQNGLLLNGRLVGPVTATSELDLEDFEQLLSYERSNRISPVYAAVKTLGRADSLVDPLSAAKISSIVATSMLPGTPDGIVEKDSTARMSLHGLWNSSHTAIEVGDISTATIQMTLLVDPASEQGQKWIPIIKALSELEGVYVKLFLNPKERLQEIPVKRFYRYVLGSKPTFDDSGALQSLGASFTGVPQDALLTVGMDVPPAWLVAPKVSVHDLDNIKLSSIKTDVNAVYELEHILIEGHSREVPTGGAPRGAQLVLGTKRDPYFADTIIMANLGYFQFKANPGFYKIQLQEGRSSEIYNIESIGSRGWLPVPGDESTDIILMSFQGVTLFPRLSRKPGMEGKDVLEEKADSTLDIVSRGLSFAQGILGGKGKDAEKETHAEINIFSVASGHLYERMLNIMMVSVMKHTKHTVKFWFIEQFLSPSFKDFIPYLAAEYGFKYEMVTYKWPHWLRHQTEKQREIWGYKILFLDVLFPLSLDKVIFVDADQIVRTDMIDLVNHDLKGAPYGFTPMCDSRTEMEGFRFWKQGYWEKFLRGLPYHISALYVVDLKRFRQMAAGDRLRQQYHSLSSDPNSLSNLDQDLPNHMQTILPIHSLPQEWLWCETWCSDESLKDARTIDLCNNPLTKEPKLDRARRQVPEWTVYDDEIAAVDRKRKGLDGNGEKKAQSGTVEVKTEKRTRDEL

SEQ ID NO: 4500 - protein, 1476 aa, Penicillium antarcticum
MKMGSRISWRWYAAIGALAGCIANANASPAVNVALQASFDSAPYLVELLESAADENSTAYFPLLDRIADGTFEDLTTEEELYNRFLTVVQEGGHLRTPESLSSFKLSLSVRSSAPRIEAHYQFYNTSVQQSLGAAQDAVCPVWVHLEGKQYCSSALERAQQDVLDAQDPRELPFDRVLGDISLPPAVLYADISAPMFKDFHETLSDMAKQGQISYRVRYRPPRHWVSRPLFVSGYGVELALKKTDYIVIDDRAAEKLDTETNADRETKKDAPDDLRPLSASEVARLGINSAKYVMDSPDPLEALIKLSQNFPKYSSTVAAHNATGEMLQEIRHNRAKMLPGGYNVMWINGVQIDTRQIDAFSLLEHLRRERKLIEKFRSLGLSASDAVKILSHQILTEAQAGGEEQRYDYRDDSEENQVIIWLNDLEKDSRYEGWSSELEAYIAGGYPGQLPPVRRDLHNVVVPVDLSDPESMMLIAGNLHAFIKRGIPVRFGLVPLSSSPESAAQLKVAHYLFDAYGLDSLVKYLEAYATKGKRGSPDKSCFVAATKEHQLIGDHPALSLDQVLKSEKYNALVSHTAAYQRRLSLTGDEPHFLVNGIPVSREGNWMQGMSMQISRDLKLVQQGIVEDLFEGDAWLPEFFLAGAFKRRNTFLMPEDPKSVRIVDLANVLGSDENVLNRIPHITSEKSALESVHMIVVGDFEAEGVALLTEALNLRKEHTDVEVFLLHNAASDDVALPKNLVMVYRSLAKGESIDQVLAKLSASDDDAEVPEIVVEELSAVQELHQRLAKELGFEPGTEGLVVNGRAVGPVEKDYPLTVDELSQLIAYERLKRLDPVALAVAQLGFQTKISSPLDFAKLTSLVALSMISDVPEGIFENTPDFRMDVSDKWRTVYSVITVSNSDDPAINVAVVLDPASEVAQRWLPIIKVLSELSGVQLKIFLNPKEDLKELPVKRFYRYVLESEPSFTENGALARPQASFTGVPVEALLTLGMDVPSSWLVAPKESIHDLDNIKLSSLKAGTDVDAIYALEHILIEGHSRDLTTKTPPRGVQLTLGTEKNHYFADTIIMANLGYFQFKAQPGLWQINLKPGRSEKLFNIDSVGGLGYRPQPGDESNEVALLTFQGRTLFPRLSRKPGHEEEDVLETGIQPGSTKDYFAKGLNFASGVLSSVGVNTKTNDQQADINIFSVASGHLYERMLNIMMVSVMRHTKHTVKFWFIEQFLSPSFRAFLPSLAKEYNFSYEMVTYKWPHWLRSQKEKQREIWGYKMLFLDVLFPLSLDKVIFVDADQIVRTDMHDLVTHDLQDAPYGFTPMGDSRSEMEGFRFWKSGYWSNFLRGKPYHISALYVVDLNRFRALAAGDRLRGQYQMLSSDPNSLSNLDQDLPNHMQHHIPIHSLPQEWLWCETWCADEDLGAAKTIDLCNNPLTKEPKLERARRQVPEWTVYDDEIAALAKRVAGVEDAAGVEFVQSGEEKKDEL

SEQ ID NO: 4501 - protein, 1323 aa, Torulaspora delbrueckii
MFLCSFIANVIFWLRLTSALDLNGAGIGVKEQAKVWSILGFLIQGEQRSILVDLYPFVTGLEDYESDIECEDCDLPTIVSGILSTEYGMKDIAALLPIYSNLYPMGMLKDDHDTSNESRFVLNGKQYVKSDDVFYLKSKELQKQAEFSDLEVTQPNEVIIGNNKEAPIVILYGCPDEAGEFEEFNRNLYNEATTSGKLRYIWRSSCPLERSHITGVPVSFTLRNQSSPAALPIESLDVPEEFTNRLPSFETPTAEELSGIDLKVAKLVADHYFKYRDFHSTLSYAKGIINNLPLLLQQLAKLDTNTSEISKSNERLSDLGISYDMLGIYVNGQNMRLSEVDRYNLLSAVVSEYLRLSHLGAALQTADKNCTLATAKQLLQEFSRLSLPNLEELQPIKVDLHRIPGFSESVIYFNDIEQDGQYDELGTEIQKFFGKSKFGEIPEYRQNWNEVIFVIDFGRLDDQEAKYALDGLNRALKAVAQGYPQRVGLLPLNTGSAEGIINDIYRLKDKDLNELMEFLETIPTPDFSSKSYDKAPNYSRILNELQIHETSIIVNGEIYPFKKNSWHYLIAKVMKKDKAFLKKELLKFGSKKELTDIDVRGLLHLRSSNTRHGKYAPDYFVDSSYTSLDNSVLQLFGGRVLEYTKGKDYLALHTVTLFDDFSCSQALERYKHILETSFVGVRVRIIHRGSLKDHTWNKLKIILSNELDMAQIDSLIKTSKTSYSVPEVSKDDISRWLVDFSDESLSDGAFLVVNGRFIILDNEEVPSKNQFEAIIKREAKRTLDTLKALEIVCPSTLEGEISPDFTEMVSATLTKLFYHGAQLYNNGIDYTPEGFLPRINVNLEFNNFTVFESHSDEKPVDVSLFLDPTEERSQTLLSLVTFLEPIPFVNLRIVLLPTEDLKITPVNRIYLDDSSDVVIEEESKKEYQVELDVPSDFYVTNTSQLDGVIVEVHAFKKGELISESKIDGVGGVCLELVDPQNNVVANCITMTTFGYGQLRAKSLGTGFSIRSCDPRFRVTSFASNGRSDYVRSTTFPLLSLNKAKVHVEVEEISGAKMVVDSDSDEMHIFTILKDNGEDEEKTQKMIISVLLNAKNRKVKFWILDQAFLTKSFKEFCQRITQSTDFEGSVEFIKYKWPLWLRPQRFSDRRMDLYKVLFVDVIFPQNVSQILYMEPDSSPIDPTELYDEEVSLPFSLLEASGPGYWDSGYWAKTLQERRAKFHTTDPAFLINLQNLRKLEMGDKLRIHYQRLSADRNSLINAAQDLLNDLQVEVPINTLSPLTKSRLKVDDEEVALWLDGGSFEEELNEELAAEELRGDLIHDEL

SEQ ID NO: 4502 - protein, 1360 aa, Myotis brandtii
MAQAWLRYAPHPPFMNQASNEFMAEESNEKFWQFLDTVKELAIYKKRESGYSYYNLILKKAGQFLDNLHINLLKFAFSIRAYSPTIQMFQQIAADEPPPDGCDAFVVIHKKHTCKINEIKKLLKKATSRPRPYLFEGDHKFPTNKENLPVIILYAEMGTRSFSKFHTVLSEKAQNGEILYVLRHYIQKPTSRKMYLSGYGVELAIKSTEYKTLDDTQVKTVTNTTVEGEIETNEVQGFFFGKLKERYSDLRDNLTAFQKYLIESSKEMMPLKVWELQDLSFQAASQIMATPVYDALKLMKDISQNFPIKARSLTRISINQHMKKEIQKNQQDLHNRFEIQPGDARLYINGLPVDMDALDPFRIGFVFIVNTDDEVDGTNDAGVALWRTFNYIAKEHDVLQAFISVTHMYQKVKNQNILTVDNVKSVLQDKFPHANILDILGIDSRYDNKRKAGASFYKMTGLGPLPQALYNGESFNHEELNIQKLERALLQKMMDMTIYLQREVFMGTLNDRTNAIDFLMDKNNVVPRINPLILYSEGQYLNLISTSVTTDVEDFSTFFFLDSQDKSAVIAENMYYLTHEDEDVISSITLWIIADFDKPSGRKLLLNALKHMKKSFHSRLGVIYNPTSKINEENTAISRGILAAFLTQKNSFLRNFLRKLAREETATAIYSGDKIKTFLTEEMDKNAFEKKYNTIGVNIFRTHQLFCQDVLKLGPGEMGIVSNGKYLGPLNEDFCAEDFSLLEKITFTNLSEKIKGIVENMAINSKKKSDLVMKVDALVSSLPTRESRHNVKFLKENHSIIKINPQENDMFFDVIAIVDPLTREGQMMAQLLIVLGKIINMKLKLFMNCRDKLSEAPLKSFYRFVLEPELTLVTNDLIEPVAKFLDIPESPLLTLNMITPEGWLVETVHSNCDLDNIHLKDIERTVIAEYELEYLLLEGHCFDRTTEQPPRGLQFTLGTKSQPVAVDTIVMANLGYFQLKANPGAWILKLRQGKSEDIYQIVGHEGTDSQSDLGDVIVVLNSFKSKILEIQVQKKPDKIKEDILTDEEKTGMWDSIKSFTRSLHKEKDKKETDVLNIFSVASGHLYERFLRIMMLSVLRNTKTPVKFWFLKNYLSPTFKEVIPYMAKEYGFQYELVQYKWPRWLHQQTEKQRIIWGYKILFLDVLFPLAVDKIIFVDADQIVRHDLKELRDFDLGGAPYGYTPFCDSRTDMDGYRFWKKGYWASHLLRRKYHISALYVVDLKRFRRIAAGDRLRGQYQALSQDPNSLSNLDQDLPNNMIYQVAIKSLPQDWLWCETWCDDESKQRAKTIDLCNNPKTKEPKLKAAARIVPEWVEYDTEIRQLLDHLENKKENAILTHDEL

SEQ ID NO: 4503 - protein, 1794 aa, Chlorella sorokiniana
MAAPRRAAAARRAAAAPPLLALALLLAMVGSTAAAQLEPKGAKIALRAKWPGTPLLHEAAEFLADEDSALFWRFVEGWQASAAAQLGAAPSPEQCWAGIRSAAAPHLSAGMARLLDASLAARQYSPRLEMFRQLAEASRGEAAPGGSEAAAAPRCCWALLGGKAFTAAAPLAAAVEAALAAAPGSNHEVEEDGAGAVYSFDHIYAPPGNAAPPLNITAPGTIPVELFAPVGARCAGELHAVLAAAAARSEAAAAAAAGGKPAPPRLAYAWRPVLGDSGSACAAAGEVHPCTRLGTEGPLVLPGFGVELALKNMEYNAQDDSKKPAGGGEEKATEEEAGDEEAAAQAEGEGGGEGDKGGAPAPASEDGVMKVKLKALGLQAAQRVLNAATVGGSGIAALDALQEAAQDFPRLVEQLSGLKYSKTLRMAVEGLQRFIPPGSQFFLLNGLVYNTREFNLYAFLDALRREVRLCDALRGAGLPPAQLREAMLLRGTVAGSNEPPRLRLPSNEFVLWVNDLERDEKYASWPHELQSLLMPMYPGRLPTIARNVLTAVFLFDPATPAALEIGAVAYQLEQQGWPVRIGLVPVVPSRVARLRGSAGPKSHDPPSTSERMARLLSAVAQAHGAAAVTQLFYEVRSTMPPDQDEAEDFEQRLWGQVSMVVHARWSDWSEEEEEEDGAAQALEAATAADGGEALAAIDPAAAKLLDGAAELAFSAGLAGPSRAGVLVFNGAVTVNDGSGWQSATVGALQMQMQIVQEDIYMQRLTDGVKDVHEEILRLHGAIPRYNPRIMPLDGGGPGFLRISGESEEYPARQLALSGPLLGLNATAAPSGDGASSEGGLWARYFGPQPSLVDEDDEEPQGSQQQLAAVTHWVAADVTSRQGLRLVAAALQYRSSSGRLAVLVNSAAATAAAAAAGGSSKGQGLAPIERLLVAVSCGLLQTDLTDLADALDGVLQQAEAPGILSLEQLDELGQFGGRLAADLDALSDKLPAAAASQARFVRSALGLAPGACAVVTNGRLLELPPPPPAKAEASTHEEEHSLEAHDFELLELYAAQHQYSAQVAALVRAAQQAGALAGADASAVAAVVSSALAAATPEEVDQRSGRVADLVQRQSQQRNALALPRPSASSGTQGTDTEQGSPSDENEVAPPPVVVHAVLNPLSKAAQRLAPLIGFLQELLDAEALVLLNPKREYDDMPLKTFYRYVLPHLPPAGTSASGQASAAPAPAAAEFSGLPPNKVLTLGMDEPEPWLVEPVEAAHDLDNLRLQELGDAPTMEATYELEALMLTGMCLDLASLAARIRDQIHPRGVQLELAALNAPAAAPPLVDTLVMSNLGYFQLKSRPGLWKLRLAPGRSQELYTIASSTGASSSGQKAEAAVAGADAHQVPVALSSFSGKHMHLFLRKDAARLTEDVLTGNATDGGSKGSLWDRVSAWRGGGSGKGGAPAHLDAEAGDEGERETIHVFTVASGHMYERLQKIMILSATKRTPARVKFWFIKNYMSPQMKAFVPYMARKYDFDYEFVTYKWPSWLHKQTEKQRIIWAYKILFLDVLFPLGLKKVIFCDSDQVVRADLRELWHMDLQGAPYGYTPFCDNNRDMEGFRFWKQGFWRDHLQGKPYHISALYVVDLERFRQIAAGDRLRVMYDGLSKDPNSLSNLDQDLPNYAQHTVPIFSLPQEWLWCETWCGSETRPQAKTIDLCNNPLTKEPKLQSARRIIAEWPDLNREAEEFTAAVERVQRGELSEAALMADQSLFHVKLTPMAEGVAWSSGEAGQQAQQAQQAGSGSGGDGSGHEEL

SEQ ID NO: 4504 - protein, 1524 aa, Rhizophagus irregularis
MVLKKLKYNTLLLVSYLFCIIFIVSKAETPPVQTWLKTSWDAPHLLLEIIESVSVENSTAYYPLINEFINLGLFSSELTYHEMYNTALDVIESKQYLSTPTSISILEFSLSLHTTAPAIQAYYHYYNTTVVPSKHEPDINFNPECDVWVDWYGHQACNVEIFKELTGISSTGKFDKLLNSSDQHPKLLSFDHILSSNAETTKPLIILYADVISPSFVPFHQFITDLVDNEEVEYVLRYKPPRGSRNSLHLAGYGVELALKKTDYIVIDDREVETGRGLIEKLSEHLFDENISEIKPLTASAIRELGLKATQFIISSQNPLLTLTHLSQNLPKYSYHIAQLNLNSSLKQEIKINQNYFGLDSNSFWLNGLTVDPSSVDPFSLLKLLRRERQNVLSLMSLNMTSQQAVEFLASPIILESKSSQELTKGIFDVRDKSEKQNIIIWFNDIEKDKRYSNWPPRIFDILHPIYPGHMRYIRKNLFNTLFVIDLSSVKSLEVINEINLFIERNIPIRFGLIPLVVKEKNESIIMAKIFYYLIDQYTMPLIMQFSSQVLNELKNSPSANIVKIAEKQFNNVINDQTPKDNTSVKSFDDIIKSDTESSLEEQILGATEFINKFRIDADGKGKGALFINGKYFDLDDNYQRDMIQTITEHTGFIQQKVYVGEISDHTNVFEYFMTLPRVPSRRNPHVFVSDSQPLNVINLVKNDEKLSSIRYIYSTKQDGNEVPVSLLLITNFDSEYGAKQGLEALKYLDESSNARVAFIHNPSTQPSIREDISLSSLIYLILHKSQEIPISNYESTNPARSFGWQFADKVKSQTYWKEWNSFTRKTLKLNENDTAIIVNGRVVGPFIKEDLFVVDDFNLLVELEFSERIEPVINAAKAANLTIHLDRSNYPDFVNKATSIITASMTSDVPVGLFGGQELKRDLSFKKLKSENSKIVVGDIEAAIYKISVLIDPLSETAQKWSTILEILSQIDGVAIELYFNPKMNLAEIPIKRFYRYVLEPKLKFNTTTGNLIAPSAHFSNLPEDPLLTLGMDVIQAWLVTPKVSIHDLDNIRLANLDSRLRIKGVESVFELNNILIEGHARDMTLQAPPSGLQIVLGTKNNPVMVDTIVMANLGYLQLKANPGIWTFSLREGRSSEIFDIQSAGSEGWYSRNVEEIGNEIVLNNFEGLIIYPRFTRKPGKENEDVLKLEEKDGIWNYFMDKFSKNVSKQNKAEINIFSVASGHLYERFLSIMILSVLKHTKSRVKFWFIENFLSPSFKDFIPHMAEEYNFEYELVTYKWPHWLRAQKEKQRTIWGYKILFLDVLFPLDLDKVIFVDADQIVRADLKELVDMDLQGAPYGYTPFCDNRPEMDGFRFWKHGYWKDHLKGKPYHISALYVVDLQRFRHMAAGDQIRGQYQSLSVDPNSLANLDQDLPNNIQHIVPIFSLPLEWLWCETWCSDESLAGARTIDLCNNPMTKEPKLDRARRQVPEWESYDKEIATFAAKISQSQKSFITESNIQSKSTIEVSSESKIPVKTEKHEEL

SEQ ID NO: 4505 - protein, 1604 aa, Sorghum bicolor
MAPARGVRSGGSAAAAALVSVLLVGCLVAGGEGAEIRRQKNVQTALRAKWAGTPLLLEASELLSKEWKDLFWDFIDHWKELEKGSECLTAKCCVQKIVEDARTLLNEPLSSIFEFSLTLRSASPRLVLYRQLAKESLSSFPIDDSPEQISGHGTGKTFDGAVDPNSSGGTCCWVDTGNVLLFNSADLHEWLGGLGKLAMDSTEQPELFDFDHIYPRTNITAPVAIFYGAVGTNCFKEMHVQLAEASKQGKVRYALRPVLPSGCGTTSTFCGSVGTVDAVTLSGYGVELALKNMEYKAMDDTAIKKSVPLEDPKTEDLSQEVRGFIFSKILERKPELNAEIMAFRDYLLSSTVSDTLEVWELKDLGHQTAQRIVQASDPLQSMQEINQNFPSIVSSLSRMKLDDSIKDEIIANQRMVPPGKSLMALNGALINIEDLDLYLLMDMVHGELSLADQFVRLKLPQSAAHKILSAPPPAESNSFRVDFRSSHVHCLNNLEEDDMYRRWRSNIQEMRYIRKNLFHSVYVLDPASACGAETIDMILSLYQDGVPIRFGIIMYSSRFINVIEESDGTPTNNGEDTSILITRLFLYIKETYSTQLAFQFLSNIHKSRNGEDDYNEELVEAHQVEGAFVESLLSNAKSHPQDVLLKLQKENVYKQEAEESSRFVHKLGLYKLQCCLLMNGFVHEASEEATMNAMNDELPRIQEQVYYGHIQSHTDVLEKFLSENSYKRYNPSITGNSAEKKFVSLFASYHQDSSVFNDMKYLQSPGTTDDAKPITHLLAIDLSSKVGTKLLSEAIRYLMDGSDRARVGLLLYVHTGGSSPILLLKDIFDRTIYSFSYKEKVLVFLHGLLKFYEAQPLPASSVADDWTRNMMEKVYTLAAETALPVDDYKAWFKSFSADTVLKGIDKLSDFLFGQLGLVFGSNAVITNGRVFIMNEGESFLANDLGLLESIEYDLRTKYIFEIIEEVEFAGVDPDDLTSQFYSDIAMLISSSMSVRERTSERARFEILHAEHSAIKLNNANSSIHIDAVIDPLSPIGQKLAPLLRILWKQIQPSMRIVLNPISSLADLPLKNFYRFVLPSMDDFSSTDHSVHGPKAFFANMPLSKTLTMNIDVPEPWLVEPVIAIHDLDNILLENLGDVRTLQAVFELEALLLTGHCIEKDRDPPRGLQFILGTKQRPHLVDTLVMANLGYWQMKVSPGVWYLQLAPGRSADLYELPPKLIAIDSLRGKLMHIEVQKKKGKEHEELLNAADDYHFQEKTDNKGWNNNLLKWASSLISGDASSKNKADKITDRKDARQGETINIFSVASGHLYERFLKIMILSVLKETQRPVKFWFIKNYLSPQFKDVIPHMAREYGFEYELITYKWPTWLHKQKEKQRIIWAYKILFLDVIFPLSLRKVIFVDADQIVRADMGELYDMNLKGRPLAYTPFCDNNKDMDGYRFWKQGFWKDHLRGRPYHISALYVVDLAKFRQTASGDTLRVFYEQLSKDPNSLSNLDQDLPNYAQHTVPIFSLPQEWLWCESWCGNATKARAKTIDLCNNPMTKEPKLQGARRIVPEWTGLDSEARQFTARILGDDVESAEATPPPSETPKPEDKDTDQEVKDEL

SEQ ID NO: 4506 - protein, 1595 aa, Plicaturopsis crispa
MLAAAGLVAISLALRQVIATGPPVKVSVRSSWPAPPLLLEVVESVAFERPDAFFPLLESVTNPENIPPQPHTPKVLYEHALRTALSTGYLGAPGALSSVELNLALHAATPKIEAFYQYYVDRYGEENGEEKCGGGSWVDWYGEAVCDIQGLEDAITKSEQEAEELVLSRPKVLPFDHIYPAPSETLSPPSRTAIFYASPDSARFWELHSFMLNLARSPGSDFEYIFRHMPPRDRDEGARNYLSGYGVSLDLKKMDYLALDDRHASSTENDSVDTGAAFQASTDTILALLDALPETAGEENTAPLTEDELLEIGLQATQLISTSPDPLTTLSHLAENFPAYAPRIARRVVVNSSLEEEVHANQLRAPAGVNIMWLNGAVVKEADISPFGLLRTLRKERGLITGLTTLGLTGAQAVEFISHPAVAAAQSQGAVVDGMFDASDRPEGGDVLVWWNDLTKDTRYKHGRWQTSIFALQRQMYPGQFHQIRLNIFNVVVSVDLSQTSSLHFVAGTVSNIINRSFPFRWGIVPNVETTAGRQMARLFYWLIDHYGRAKTMQFFKQIAQLQVPPQLLPPQVEWALVKKEFQTLVSENPLKKEDDEEEIVVDFGAIVGTGDEQDERIDKARAYGVRLGTDLASSPQGHAFVNGKHFDIDDTFLRYMQGELAQQLQFLQERLYEGSITEDTEPDIDTYFYDLSTTATRRNRYIYPSTGTLRVYNLFDLFSQAKFDASPSRFVNPPDSTQIPLSIYVVADLDSDEGVALMKEALQSMEPESKTRISFIHNPVNSSATVTDRPHMSWFLSHLISASLLPQTSPSHLLRALGLESIVDTHNNPQVVLAKDEGSLDKLTGGVGLNDIDAAEYASYEKSCRLVARELGLAPGEQALIVNGRIVGPFPAGEFLAEDLQTLETYELQRRAQPVLGALQTVLSPDAIFDRDTFANLVSIASSIVWSAQLPDPSENGLFDTPMRLRTRSYKLLEGNHTALEFGDEKTAICHISVILDPVSEAAQKWSTMIEWLASLPDVFVELHLNPARYKEIPLKRFYRYNLASRLSFDDDGKEIPAQTVFNGLPVEPIYTLGVEVLQSWLVRPREALYDLDNIQLGSLAPEHRRGGVEAIFDLDYLVVEGHARDTYTGSPPRGVQLELTDGKGKPIDDTQVVATLGYLQFKARPGVFQLGIREGRGREIYKMESVGNEGWHSPSVEEAGDEVTVTSFEGLTLYPRLARQSGMEDADVLADLDDADSEPQSLIKDVVSKVLSFFKFKQEEPKDIVVSDSDQADINIFTVASGLLYERFVSIMILSVMRNTNSTVKFWFIENFLSPSFLEFIPHLASAYNFKYELVTYKWPSFIRPQKEKQRIIWAYKILFLDVLFPMDLKKVIFVDADQIVRADLKELVDLDLHGAPYGYTPMGDDNEEMEGFRFWKTGYWKDFLRGRPYHISALYVIDLVRFRQIAAGDILRQQYQQLSADPNSLANLDQDLPNNLQREVPIFSLPEDWLWCETWCSKDRLHRAKTIDLCQNPLTKEPKLARARQIPEWEEYDSEIARFARKLADEGLIRSQAAAADANVLANVGNVAVPHEAGAETGEGDDSVDSVQRDEL

SEQ ID NO: 4507 - protein, 1519 aa, Malassezia vespertilionis
MRLAAWLVYLAWLAAAVCAQQCVRVRVQHPWYNSSAARSAPMLEMLESARAVWTDDYFSLLSMLWSENGIHTQLHVAYDDAPPAALYTAIEALLVYHTRSTDVFAEAHLDEWRANIALHSQAAMVAAQYQLYESMRLAAHAPGCRSWVHWQKKAYCSAAQLRAAVLHDLAHGAWAASNVYPDDAVYAPRIFSEHAPVVVLYADPYAPENGAMHAALMQLAKDAPLRYVLRWKPSYGRTGELAHAYIGGYGIALHLKKVDYLVIDDRAVGAAAEPMFDAASEASVRNAQRTFTSVQDELYAGSAQRASVAEAVAAQADIPQEYVAILGFAVSHLVLTSTDPLETLEELTRNFPAHAAGLVHYVDRMPVPNPILDTLAGEQAQAGMCAVWINGKEVDTHAFTPLGILPQLHAERSLLRMFAGPELGISPSDASALLTDKHLTRAFLGHEAALFDASDRVESRDAPLVAWINDLEAYADVWYTNLNVLLQPRFPGQPLMLASNFFNLLVLPDLGLPTAFRVLAGLVHAQADPLGLHIGVMPLVQTQRDETLAAVLWAAIERLPAPALGTLLDEYAERTAPLDPSEARAALREMLEVYSVALDEEDHAFFRHGTLPAATAHRIAMARAYMARLHIIPQGLGAAFMNGQAIPLDRRVLQTALGLQVEQTRLAAEAIMRGEISKEQAPTYFYDLPTTRKSRSKLVSAMEEDAHTYINLPHVFSALRNQDAADTSSQDTELNALRDFVYSGAAAPNVTVRVVADFDAPQGTALLQRVLAAAVHASVPFRVGTVHIPTKPVHSASLSHFLYCAQSQRALQKMPAHELLHALERAGGLDALIESYGIAKTPAAHADVFWQRAAKQFVQNGVDVRQGPSLVINGLALNNLDPASLDAAALNAGIAWEATQHAAPVVQAAPIECDAHSQNVELLASLLGTAFATPEAAHGNFAQAPPARINLTGIQSQNPAAFSIGDAGATVHVTLLLDPLADDAPGLVSTAQMLASLHDTLVTIVLNPAHTASLPLQKFSQFTAQPRPAFDSHGALVPTGIDMHNLPPSAVLTMELLAPRSLVAMPDAAVYDLDNLRLADLSTDRVEVVYGVKSILVEGYTSSGIARVPRGLALVLHAEDGQALDTIVMENLGYFQFRAQPGVWRMDIHAGRSKDVYTMTSTGTHSSEQGLSVAHLLGKTLYPTFAKRAGMENADLVTSLDVENSGAWTAFLQRIKHAATSAWQRTLPATTPHASINIFTLASGHLYERMTYIMILSVLRHTKSTVKFWFVENFLSPSFKRFIPHLAAAYHFEYQLITYAWPEWLNKQTEKQRIIWAYKILFLDVLFPLDLDRVIFVDADQIVRTDLQALVDMDLQGAPYAYPPMGEDSEDMDGFRFWRQGYWKNFLRGRPYHISALYVVDLKRFRAVAAGDILRKKYQMLSMDKNNLANLDQDLPNNLQTVLPIHTLDKTWLWCETWCSNDWLPLAKTIDLCSNPKTKEPKLDRARRQIPEWNALDEEVAALAKSVAEGGQALVHDEL

SEQ ID NO: 4508 - protein, 1538 aa, Quercus suber
MGSGTRLWLGAGLLSFICRIDAVPAVNVALRTSFGAPPYLVELLETAAEENATTYFHLLDRIADGYFDDSTTDHELYTTFRGLLQEEGHISRAEDLSSFDFALSIRSTAPRIESHYQYYNTSTLQSSGEDCETWLHVPSKGQKYCSPELSEAHAHSMGRPSSSKLHLLPFDRVLGDASSQRPSVLYSDITSTSFRAFYKRLSRSARNGKSALVLRYKPPKAVVKQPLTVSGYGVELALKRTDYIVIDDRQAEQEPKGVSGSAETNLSEDEMSDLRPLSSSELRGLGMKAASFVQGSDSPFDTLHRLLQDFPKHSAVIAGTNISKDIVQEHLANRQVLLPSGHNMLWINGVQVMPRDVDAYSLLECLRRERKLIRGVRELGLSAHEAIDLLAHEAITASQTSQEAQRYDWRDETEGSNVIMWLNNIEKDKRYAEWPASVNALLQRTYPGQLPSVRRDLHNLVIPIDFASFADVELIVDGIQNYVKRKVPIRFGLVPTGTSSASVGQTKLVYYLLDRYGLGAALSYLEQSLVGAGRKYSAPQEKYFAKAIEDRQIRNNRSVLSFEDVLSDASVANRLNKCADYLSRLGHKPSSPSIFINGVPIAKTDDWLQAMSQRISQDIRVLQEAVYQKTVTDDDYLPDLFLTKASLRRNALISPEEDSELKHLDLGTLPEIADIPSMPFSEDTIERELVHVTLVDDFDTLEGFSHLMEALLFKRLHDNVELGVLYAQSDAATLRRKVQDYESMQSTELMQTLLYKYDASAKLALESAQVTDPGELGLLDRRTIIHTIFDSFPEVSAESTSIWPTFAEAVKSIGSKAVLINGRVVGPIPFGAEFTLDDFESLLSYERKKRLLSAALAIEGMKISAKAATPYAFARISNLIALSQVNDVPAGIFEAPSTARTSMFKSWVAEHTAIKLGNADTANIQIFASIDPASETAQRWLPVINTLSKLDGVYVCLFLNPKERLEELPIKRFYRHVLEPKPTFTSEGALEGLSARFSGLPADALLNMGMDLPPSWLVAPRDSVHDLDNIKLSATKTGHDIEAVYELEHILIEGHSRDGTSGPPPRGAQLVLGTQLDPHSADTIIMANLGYFQFKANPGIYNLAMQSGRSEEIFQIDSAGSKYTAKVDDDTTEIALTSFRGVTLYPRLSRKPGMEEEDVLEASKSGLETFAEGADKLLAQAGIHNSEASRLINQAAKFGSSLFSGSVAKSATTHHHADINIFSVASGHLYERMLNIMMLSVMKHTKHTVKFWFIEQFLSPSFKDFLPAMAEEYGFQYEMVTYKWPHWLRGQKEKQREIWGYKILFLDVLFPLDLDKVIFVDADQIVRTDMYELVQHDLEGAPYGFTPMCDSRTEMEGFRFWKQGYWKNFLRGLPYHISALYVVDLKKFRQIAAGDRLRQQYHQLSADPASLSNLDQDLPNHMQMALPIHSLPQEWLWCETWCSDEALEDAKTIDLCNNPQTKEPKLDRARRQVPEWTVYDDEIAAVAKRHNSKMAEGKPVAADAGSAGVQGQEEESVQEKLQREDAEREKKARVRDEL

SEQ ID NO: 4509 - protein, 1478 aa, Colletotrichum spinosum
MVRPYQLPMGIALTLLAASNVAAVPSVTVDMKAAFPSGPYLLELLESAAGENATSFFPLLDRIASGHFSDSKTDKEVYDKFLQVLHDDGHITAPEALSTFKMALSLRTAAPRIEAHYQYYQTAVVPKLESDAQDDCEVWAELGGKQYCTPSLDAGKDTKLSEAKALPFDRTLGSGNEAVLYADPTSSSFGAFHSALAQKARHGEFEYRLRYTKPANSYKEPLPVSGYGVELALKRTDYIVIDDREAHSDDSQKTVTSEGVLDAEEEVADLKPLSKSELEQLGLKAASFIMQSQNPFEALVRLSQDFPKFSTSIAAHDVSENFLTEHQQNRQQLVPSGMNVLWMNGVQLIERQIEAFTLIDILRRERKLIDGVRDLGFSGGQAVSLLGHPKVADSKADDEPPRFDWTDDLEEGKVIIFLNDLEKDERYAEFPTNLMSLLQRVYPGQLPPIRRDIFNLVVPLDPSNADDLNVLSQLNMFVKRKLPIRFGIVPLTPTKEATAITQILYYLLDSYGFDAFFEYLDTVVSESKTDKPSKAAFEKAIKDKELLAEATAVAFDDVMQSEGAQQVTKLAQHWAKRLNANTAVPPVFINGVPVPREGNWLQAMSVKAANDLQSMQRAVYLNMVDEEMWLPDFFIEKAVKRRNTYIYPEDDKSLRILDVNKIYTDHEGLFKNIPVVDALAESTKENWAVLTVVADVTSEEGANLLLGALAFRRNNPGVRLDFLHNPSDVSAASAVNAALKASDKLAEAKSVADIKSTIEAAGSDTDALYAAALTNFLSFAAIKPGSSVLILNGRVVGPFTEEEPFQPDDFQYLLDFEQKSRILPVYAAVDELGLTDKISGPLAAAKITSVTALSTISDLPEGIFESAPSMRVSAYDTWNSTHTAIEIGNPETSSIHLVGLLNPASEQAQRWAPILKVVSELEGVYMKLFLNPKDKIDELPVKRFFRYVLESEPTFDEAGNVRALEASFEGLPSEALLNAGMDVPPSWLVAPKVSVHDPDNIKLSSIKTNVHASYELESILIEGHSREGKTSSPPRGAQLVLGTEKEPHFADTIVMANLGYFQFKANPGFYNIQLKQGRSSDIYTIDSIGAKGWTPVLGDEGTEVVLMDFQGTTLYPRLSRKPGQEDTEVLAETNEDNSIVGRGLKFAGGMLGKKTKSVSDEEHAEINIFSVASGHLYERMLNIMMVSVMKNTKHTVKFWFIEQFLSPSFKDFIPHLAEEYGFKYEMVTFKWPHWLRQQKEKQREIWGYKILFLDVLFPLSLDKVIFVDADQIVRTDMISLVNHDLEGKPYGFTPMCDSRTEMEGFRFWKQGYWANYLRGQPYHISALYVVDLRRFRELAAGDRLRQTYHSLSADPNSLANLDQDLPNHMQFQIPIHSLPQEWLWCETWCSDESQKDAKTIDLCNNPQTKEPKLDRARRQVPEWTVYDDEIAALDRKRKGGLPAEEAKKEEPVVEEKNTKSRNWEEPPAKETHVIDELY

SEQ ID NO: 4510 - protein, 785 aa, Trichinella patagoniensis
MILIQLTFLLEILKKYSVDMRIALIHNPKSEAQATKGTASLVQACIQFLPLYQSKAVIGKIFANKIATLEDLINVSPSGISWPEFKKAYNSMSDIWMQLHVHYAKFVLNLDPGVGAIVANGKVLAPLSASDFNSLKDFNFIERYLLTSGCNDIAQHLKIIPYLDKSPKALSDLVMRLYAFLRRYNANEKRHWPIIENYHHSCVQIEASDPTAAQFDIVAIVDPLSPAAQKMSHLLVILSSVLNVHMKVCMNCKSKLSEIPLKNFFRMVLPRELEFADDGSLKTQPSARFSALPQKQLFTLNIIAPQSWMVESVEAVYDLDNIKMEEVKGDVVAKFQLEYILLEGRCFDERSGSPPRGLQFTLGTFHEPFMFDTIVMANLGYFQLKANPGAWILALREGKSAEIYEVKSVDGVVQNQTTSVVILDGFSGRMIHVKVAKKNDQLENELLAESEDAESESLWQSISKTFQSGEKYDVINIFSLASGHLYERFLRIMMLSVLKHTKTSVKFWLLKNYLSPGFKEFLPYMAGHYNFSYELVQYKWPRWLHQQTEKQRIMWGYKILFLDVLFPLDVKKIIFVDADQVVRTDMLNLMELDLEGAPYAYTPFCDSRKEMDGYRFWKQGYWENHLAGRKYHISALYVVDLKKFRQVAAGDRLRGQYHFLSRDPNSLSNLDQDLPNNMIHQVKIKSLPQEWLWCETWCDDKSKKFAKTIDLEPKLQSAMRIIEEWKDYDSEIKDLLDQRTKDKWNITEQKIVDIGFQFTAYFLVFLEESWNRAMNKENQVQDNQS

SEQ ID NO: 4511 - protein, 1247 aa, Kluyveromyces lactis
MVLFRLRIVFLLLTVLHITQAFNEGIGKRWLSASLVDYDALSTDQWMQLYRKITLSDEEEDEEDEDDDEGIEESISSASAEKVQQVEGLSGAISKYVQIAPIDDEFKETCFVLNGKIYSKSDDSFYFKTSELDAQALVPDFDVLKDREIAIGTNASAPIVVLYGCETDLEFADFNRNLYNEAKFGKIRMTWRPTCIIGDTPEYALSATLSDKNWDQKANVHLVIDDSDLKIKDPVKLKYLDQKELEDLDMKFTALLLEKFNEDHDFDSFFEYFKSLSYNFPAVAPVIASKDNIDTTPAKNIVKDFNKRKISHELLGLYINGQQWRLSELDETTLPAILAKEWSRVNDLKEKLSKFPGAELENFLKYFTVGYSYTAYFDKNRYDFYRTPGFSEAVVFFNNFEKDELYKDLPEDNMAFLEPSDFEPIPSIKQNWNELIFFINFDDMTQFKDDGAVGSLLQAIDQMETGYPIRLGLIPFSSSGSNSVVDMIYKLKSESDKPLQSIIDYLRTLIGHSEKIQPQTKHKGSAYDEYLERFKIADTCIAMNGVLLPFQAKAWKIHTSRILSADIEYLKSELQALGDSSNLSVRQLLHHRSLTLKNPVYIPNRMLDETFTRVNNRALHVLGSRTIIFSDPNQKTSPIHTITLVDDFNSYSAVQKIRALLRNNHKSVSFRLVHVGDLSKSWDNFKMEFSTGKLSGKIASKTTVNFIVDPFLNVLSSWLPDISIKALRKPFAVINGKFFNTDDDLYSVELWHNILVHHSSRTLDVLKTLHHIGALDENIMNPSAIEELTAAVIKYVHHGYLVLNNGIPYTTESSMPRVSLSELEEYTITSRSDQSVINVTLLLDPVEERTQRLLYLSSLLKDLPFVKTEVALVPTANLTLNPVHRFYNASTGISDNGFLSEFDYPHNINPDDKSIIIEAHVFDEGDDVSIDIIDGLAGVCLQLMDNAGNVIDKGLSMKSFGYVQLSLPSLQKGLKLENCDSSYEITALSTMAEANYIEVESFDVDNSLPTQIHVKVRKTTAEIMNEKDDRVNVMVVVHDGQESVAVKRIERVKKEIGDKAKFYILAQRPKLIVREMPASVDYHLLTYTWPLWLRPQRFSAKELEAKSILLLDTMVPKNVDYLVVLSLTDDSSDTIPWNDIASFSDAVFYLKPAKTKEGSYWNFGYWKKYLQKYDLPFYDLSSSYIINMKKWREIDAGTSLRLHYHLLSKSFISLNNFRADLVNSIQLKVPIAPLEEHTDELFEQDEL

SEQ ID NO: 4512 - protein, 669 aa, Rhizopus microsporus
MLYQYENAKRIMHVEKAIVGSEKNLKNNTPDAVMKLTAIIENDKAQATQDVIESREPVHRRRQYQKIPRTQYTQFTAGSYSDDTFLEIGLIIDPLSEAAQKIAPIVHTFSEIEGVSVVTYLNPVSTLQELPLKRFYRYVFDKEPHFDTNTGEKQVPTAYFANLPVKPLYTLGVETTNAWHVTVKEANMDLDNILLTSIPDNQHGISAVYELQSILVEGHCLDSINKSPPRGLEFELISPSGLDKKDTLVMANLGYFQLKASPGIWKLALREGRSSSVYSIQDVGANGKWNWNTEFNGSKGIDDTLALISFEGLTITPLVHKNPGMEDEDVLEPAQPKPKENTGGLWSSINQKIFGTKETEITSPSVNKATNAEINIFSVASGKLYERFLSIMMASVMKHTKSTVKFWFIENFLSPEFKDFVPHMAKEYGFDYEMVTYKWPAWLRAQHEKQRTIWGYKILFLDVLFPLSLDKVIFVDADQIVRSDLKELIDMDLHGAPYGYTPFCSDRTEMDGFRFWKEGYWKNHLRGKPYHISALYVVDLVRFRQLAAGDRLRAQYQQLSADPNSLANLDQDLPNNMQHIVPIYSLPQEWLWCETWCSDESLKKAKTIDLCNNPLTKEPKLDRARRQVPEWETYDKEIDELRKRIMAGGSSSLPKQDEPSIKKHLKDEL

SEQ ID NO: 4513 - protein, 846 aa, Odocoileus virginianus
MDNFFVDDYARFTVLDSQGKTAAIANSMNYLTKKGMSSKEIYDDSFIRPVTFWIVGDFDSPSGRQLLYDAIKHQKSSNNVRVSMINNPSEDISYEKTRISRAIWAALQTQTSNSAKNFITKMAKEETAEALAAGTDIREFSVGGMDFSLFKEVFESSKMDFILSHAMYCRDVLKLKKGQRAVISNGRIIGPLEDSEFFNQDDFHLLENIILKTSGQKIKSHIQQLRVEEDVASDLVMKVDALLSAQPKGDARIEYQFFEDRHSAIKLKPKEGETYFDVVAVIDPVTREAQRLAPLLLVLTQLINMNLRVFMNCQSKLSDMPLKSFYRYVLEPEISFTSDNSFTKGPIAKFLDMPQSPLFTLNLNTPESWMVESVKTPYDLDNIYLEEVDSIVAAEYELEYLLLEGHCYDITTGQPPRGLQFTLGTSAKPVIVDTIVMANLGYFQLKANPGAWILRLRKGRSEDIYRIYSHDGTDSPPDADEVVVVLNNFKSKIIKVKVQKKADMVNEDLLSDGTNENESGFWDSFKWGFTGGQKTEEVKQDKDDIINIFSVASGHLYERFLRIMMLSVLKNTKTPVKFWFLKNYLSPTFKEFIPYMADKYNFQYELVQYKWPRWLHQQTEKQRIIWGYKILFLDVLFPLVVDKFLFVDADQIVRTDLKELRDFNLDGAPYGYTPFCDSRREMDGYRFWKSGYWASHLAGRKYHISALYVVDLKKFRKIAAGDRLRGQYQGLSQDPNSLSNLDQDLPNNMIHQVPIKSLPQEWLWCETWCDDASKKRAKTIDLCNNPMTKEPKLEAAVRIVPEWQDYDQEIKQLQHRFQEEKEMGVLYGDKTAKEARREGPQTHEEL

SEQ ID NO: 4514 - protein, 1714 aa, Fomitiporia mediterranea
MRSLKSRGKAWARCACLGLASSCVASIAAGASPPVRVSLHTSWPAVPLLLEAIESVSTEEPGAFFPLLDALVNSDSLPSLDTLSPEAIHQATLKTATLLGYLQDPESYASVELQIALHAAAPKVQAFYQFYVDQKYPTLGEECGSWVEWYGERVCDLDTLVRFAGHEMIDADEQITNTTYIRPKLLPFDHILPDPSRSLEPPPRTAIFYASPTSRNFRELHSYLYKLASTPKPRVEYVFRHIPTLPDGDESIGKSYLSGYGVALDLKKTDYLAVDDRRSASRDPLDGDASTEVQDEEIDLIKTLLDQYPESSVTDASSSLSEEELRIISIKATQLVANSSDPLTTLKHLSQNFPKYASGLSQRIILNNSLVAEVLDNRMKAAGGVNMMWLNGITVQETDLTPLGLLRILRKERGVVQSLTSLGLSSGQAVDLLTHKAIGLAQSESAEVLDALFDASDRPEGGDAIVWWNDLTKDSRYAKWNPSLTGLLRQLYPGQFHNVRQNLINVVLVADLSQMSSLNFIAGPVSNIISRNFPIRFGVVPSAETEEGKKMARLFYYLINSFGRAKTMGFLSRVGQINVPPQFLNPEVDWDLVRREFAELQRENALLEDEEKRVPVVDFDSILDGSYEEPKSEDESESESRAEAETEAQIEITKPTIGEQIERAHLYAQRLDATPASCPSGHAFVNGKHFDLDDTFLKQLQNEMSMQIQFLQEKVYMAEISDENADTIDTYFYDLPSTDLRRNRYIFPSTSSKPGPLGSVSGLRIVNVPEMFEKSGFAPGSGAYLYPESEEVLETTFIVADLDSEGGIALMREALRSLESSGTVTRLSFVHNPSLDTTTTHNPQRHISPIISHLIAHDLLSKISLKEFDVLLSPETSSFSSGNSGSSTDQLVLSENSVVYQLLRDVGVSMDGLSDAEAHERYTVASGLLVRELGIGLGELSIVVNGRIIGPVEPFDFTAADFTTLENYELRKRTKPVIEALTNLTITSEGRNRIEYGHLVSMASSVISAVQLSDPSEQGLFNGNLRPRQRNYRHLAGNYTSFSFGDPETAAYQFGVLVDPLSEAAQKWSVFLEWLSAIPSVYIQVYLNPGVYNEVPLKRFYRFNLPSRLSFDENGAEVEAETVMDNLPIEPLYTLAMDVPPAWLVRPREAFYDLDNIQLSTLSPEDREHGLSAIFELDYIVIEGHAREGLTVMPPRGLQMQLTSLDGSPVADTQVVLNMGYLQFKAKPGVFQLDIREGRGRDVYELESAGNEGWNSPNVSVAGNEITLTSFEGLTLYPRVRRRPGMENADVLDEFVMGEEGGKGLFSDIASRVVSFFRPKGPIVETIAPTQADINIFTVASGLLYERFASIMILSVLRNTQSTVKFWFIENFLSPSFLEFLPHFAEAYNFQYELVTYKWPSWLRQQKEKQRIIWAYKILFLDVLFPMDLKKVIFVDADQIVRADLKELVDLDLHGAPYGYTPMGDDNVEMEGFRFWKTGYWKDFLQGRPYHISALYVVDLARFRQIAAGDILRGQYQQLSQDPNSLANLDQDLPNNLQREVPIFSLHEDWLWCETWCSKDRLHRAKTIDLCQNPLTKEPKLSRARQIPEWEEYDAEIARFARSLADAGKIRSHIAAADSNVLASSIGANGGTTNANANSDDNGGEDREGDGVGEGDGTWIVRLPTSMFEHKHLDHLNLQHHDQNPVYNPIDISTNYTEYANPHQKAYGNFSKCI

SEQ ID NO: 4515 - protein, 1577 aa, Trichomalopsis sarcophagae
DEDVHHVNADVSEREPVDVSGRSSLFYRYVPLDDGELCFVNGGELAPSKKSRNVDKNHVWVDCMWIFLLLCPLLVNVNSAYAEKKINKYVTTLIDAKWKDTPLVLEVAEYLNDENPNLFWRFVDEVSGRSSDFEKSAKAKDHYDLVISIAEKFLSAAEIAVMKLGLSLRIYSARVEMFSQMAENKEISNLECHNFIDAGGKFTCSVDEIQELMNQEDLVPIDTYSVDHFYLGKQHTDKTLVLYGQMGTDGFTLLHDKLKSLAETNKLNYILRHYVKERPDRRLRLSGYGVELQMKSTEYKATDDSDIKDNEERAEEDTDESDEIDGINFATLKKLYPDEHKKLNDLQTYLLENSHEIGALKVWQFQELSHQAAERIMNSPASEAINVLTDISQNFPMQAKSLIKTKVSNDMKKEMKMNQEIFSGSLNIQPTETALFINGLFFDLEAIDVLTLLESLRTELRVMESLHKIGFGSKKMGKLLALDLSNSVDSRDFAIDIRDSAVIWVNDIENDFRYNRWSPSLTELLRPTFPGMLRNVRRNLYNLVIIIDPLSEESAPLVALAESLYAHSAPLRIGFVFLTNFNMTETGTTDPSIAINNAYHYLNDAKSSKEAMLFLSSLSNYIGPDGLEVNDVKKALKAKDPKANVNYVLGEESEYDVGRHLASDFIKRTGFKKFPQVLLNGVPLPSNQLNADSFEEAVLSTIMSQTPMIQKAVYRGEVTEGDDVVDFLMNQPNVMPRLNERVLKAEKNNWLNLIGSLPTDTDYKKWSSQDISTWLMENLKYLYIPRKTVTNHLYTLWIAADLELPAGRKLMKEALDYLESNTDARGSLIINSESTSKPESNINKIALAAISALPVEKSFDYIRNLINNETFELIQNGEFVIEDEKVKEQLKQQELLISVQQHYAKHILSLSSNGRIVVFNGRILGPFDDDEEFTSEDFALLERFSQSTYGDKLFKYLMKSQLFDDDEYEKSDVTDDMIMKITSLLVPRPQTRSRFDVPFHGDEHSAIKIPAANPDDVAFSLIAVVDPVSRGAQKLGPILNVLRHSLNCDIKVFLNCVDKNSDMPLKSFYRFVLEPELQFTSNGDIVGATAKFTKLPTSSLLTQYIHAPENWLVEVVRSVYDLDNIKLDNVAIGVHSEFELEYLLLEGHCFEALIGNPPRGLQITLGTEKQPVMVDTIVMANLGYFQLKANPGEWLLKLRQGRSAEIYDITSVDGLDVIHKGNNVKVLISSLRSNVLKLKVTKKPDKAGVDLLADDEKGSGIWDSISRTFTNSEEGDEQDEKINIFSLASGHLYERFLKIMMLSVIKHTKSPVKFWFLKNYLSPTLKDFLPHMAKEYGFEYELIQYKWPRWLHQQTEKQRTIWGYKILFLDVLFPLDVKKIIFVDADQVVRADLKELATMDLGGAPYAYTPFCDSRREMDGFRFWKQGYWRNHLQGRSYHISALYVVDLKRFRRVAAGDRLRGQYQALSQDPNSLSNLDQDLPNNMIHQVAIKTLPQEWLWCETWCDDNSKKYAKTIDLCNNPMTKEAKLQAAMRILPEWVGYDEEIKALQQKIENENRQTEKEEEHNGPDSDKHEEL

SEQ ID NO: 4516 - protein, 1487 aa, Trichoderma asperellum
MTRHRWRPWNLIVGSMLALQAHSAPSVNVGMNAAFPAGPYLLELLETAAAENSSSYFPLLDRIATGYFASASTDAALYEKFLQVLQEDGCLSSAEGLSTFKLALSLRSAAPRVEAHYQYYSTVVSPTLGEGPESECFNWVLLDGKQYCKPELEEVIKDGLLSLQNKHLPFDRVLGAGREAILYADITSETFGEYHKALSKAAAEGSLSYRIRYHRTQTTPRATLHMSGYGVELALKKTDYIVIDDRLQDEESHHQNIGAGAGLDDSEDVADIKPLTASDLSSLGLKATSFILQSDDPLETLVKLTQDLPKFLTSIVAHNVSTRFEKEFKLNSLKGVPGGLNLLWLNGVQLIERQIEPFALIERLRQERKLIDGFRALGLNGKQAVSILGHQDVSTAKEGGEALRYDWTDRLEDGRVIIWLNDIESDDVYEDYPKSLTSLLQPSYPGQLPPIGKNIFTLIAPVDFSNPEDVSYIMQLISFISRGISIRFGLVPLISTPEAIVKAKIVYHLFENYGINGLFTYLGQLEDATKLTNEELFARITGDHAPLVDSDKMSLAEVLEADTYEQQLGFAQQWIKRLKVDTPIRPVFLNGLPIIRDENWIQELGMQIGEDLRVVQKGVFLGMLTDDDWAPGIFLNKALSRRNDYITPDDEGKGLTVLNINKIYIEHADLFSNIPVLEFASESLKEDWSAATVIADLTTTSGKGLVLSALEFKRRNSGARIEIVHNPVSSDGAASINAALMANLGSLGDIQDISELSDLMQTPIEDKNKDGYFEALQRFLGASKVPLGAQMIMLNGRMIGPISEDSEFDVDDFQQFLEVEQARRILPILKAVEELGLVDKLSTPLDAAKITSIAALSTISDLPEGIFESATSARTSLYDKWPSTHTIEKGDPEAASVHIVGLINPVSEQGQRWAPILKVLSELEGVHLKLFINPPEKIEELPVKRFFRYVLKSQPTFNDEGEVKGLQATFNGLPSEALLTTAVDVPPAWLVAPLDSIHDLDNIKLSAVKTDVHATYELKHILIEGHSREGKASAPRGAQLILATEKEPLITDTIVMANIGFFQFKANPGVYSIRLKEGRSSEIYEIESIGAQGWNPVPGDNGTELALIDFQGVTLYPRLRRRSGMEAEDILQEKDTQDNNIISKGIKLAESLFGGKSKTKSLSEREHAEINIFSVASGHLYERMLNIMIVSVMRHTNHTVKFWFIEQFLSPSFKEFIPHMAEKYGFKYEMISYKWPHWLRQQKEKQREIWGYKILFLDVLFPLSLDKVIFVDADQVVRTDMINLMNLDLEGAPYGFTPMCDSRVEMEGFRFWKQGYWANYLRGRPYHISALYVVDLRRFRELAAGDRLRQQYHSLSADPNSLANLDQDLPNHMQFNIPIHSLPQEWLWCETWCSDESLVEARTIDLCNNPLTKEPKLDRARRQIPEWVAYDEEIAALHQIYKGEAAVTPGKERLSEGGEETAEVGAEDKNTKSRRLESDGTHTKDEL

SEQ ID NO: 4517 - protein, 1406 aa, Chaetomium globosum
MTWPSELRLQGSARASDEGGLEAPRLLAGLFSHAPRETAASENATVYFSILDRIAKGHFVEAKTDKALYEKFIQVLRDDGHMDREALSTFKLALSMRTAAPRVEAHYQYYATAVEPSLSEDQDGCGQWFYVDGKQYCTPAIGDVHRAVTENNQGRPLPFDRKFGTGARDVILYADITASDFGTYHETAMKIAQSGEGAYRVRYRRSPAHPSEALSVNGYGVELTLKRTDYIVIDDRNTGAAKASGNEAQKPIGSSEVVLDDEEVTDIKPLEKSELASLGMKAASFIMQSESPFETLLKLTQDFPKYSTSLGAHNVSAEFRAEHEDNRKVLVPEGMNVLWMNGVQLIERQIQPFGLVDLLTRERRLINGVLDLGLTGQQAISLLGHTDVAHAKSGGEEPRRFDWRDEIEDGRVIVWLNNLEKDKRYQDFAPSIWALMQHFGQGLPQYSRRLVPIRFGLVPLTPTGEAIEQAKIVYYLLETHGLSAAVSYLEKSLEHQKTAKPDESIFNEAIKDRPLRPESTVLSFNDIFTSESHEKQIHLAKHWVERLRAGGEVPSVFMDGFAIPRDENWLRAMNQKLMGDLQALQQAAYFGQVNDGTWIPGRFLENAITRRNTLIFPEDAKDLKVLNVNKVYTEHHNVFDKVPVIEADDQSTKEDWAALTVIADLDSLEGQKLLLFALQFRSEHSGVRVDIVHNPKDVARPASQLTQRIKARESDLAAAIQLLDLETILESGKAETDAAYDTALASFIADFSLKEGDNALILNGRVAGPIVSAEEFKKEDFVQFLEAERASRILPVYKAVEDLGLGDKILGPLDAAKLTSVTALSGISDLPQGIFDQASSARTAAFNELKGAHTSFQVGDSSTATIFFVAVINPASEVGQKWAAVLKVLSELEGVHLQVFLNPADELGELPIKRFYRYVLESSPSFDDHGKVSVDDLDNLRIKDIKAKRGTDHIEAVYQLENILIEGHSRELPAGQPPRGVQLVLGTEKDSQFADTIIMANLGFFQFKANPGVYNLRLKEGRSSDIFTMESLGAEGWTPVPGDDSDEIALMDFQGTTLYPRLRRKPGMEEEDVLEEANTDTATGAAGAAMDFVSKGLKFAEGLLGRGKPTAETTNSLATTQHAEINIFSVASGHLYERMLNIMMVSVMRHTNHTVKFWFIEQFLSPSFKDFIPHLAAEYNFSYEMVTYKWPHWLRQQKEKQREIWGYKILFLDVLFPLSLDKVIFVDADQIVRTDMHELATLDLEGAPYGFTPMCDSRTEMEGFRFWKTGYWANYLKGHPYHISALYAVDLRRFRELAAGDRLRQQYHALSADPNSLANLDQDLPNHMQFQIPIHSLPQSGCGARRGAATTLSRRPAPSTCAITRRPRSPSWTGRGGRCSSGPSTTRRSLRWRGGEEEQRGQVERL

SEQ ID NO: 4518 - protein, 1517 aa, Postia placenta
MHGRKAQSGTRPSLIIFGSHALSPPVQVELRSSWPVSDSLLELLETIYIEESEAFFPLLNSLTNPETLPNPPPLTPEDVHRHALEAILADGYLSVPGVLAAVEMDLALHAATPKLEAFYQYYADRHASRLNETRQDCESWVDWYGEVVCDAETLAQLAGVETIDPPDLGDVERTYSRPKLLPFDHIQPHPDRTLDTPPRTAVLYASLSSRNFRELHEYLYAASTVASPHVEYVFRPIPSGNRDPAERVYLSGYGVALDMKKMDYLALDDRWQGIGLKATQLIHDSDEPLSTLIHLSQNFPRHATSLSRRVTVSEDVEAEVQNNHAKVAPGGNMAWLNGMLLQEKDMNPFGLLRLLRRERTTMLSLTSLGLSPGQAVELLTHDAIVRAQGQSSVLDGIFDASDRPEEGELLRPMYPGQFPNIRANVFNVVLAVDLSQSSSIHFLAVTVSNIINRNFPFRWGLAPIVETEEGAQMARLVSYLIEHFGNVQAMEFLRFISQADKPIEALAPTVDWALVRSTFSALMAQSEIPEGLATDLDKILAGAVDAPTINTDKARAYAQRLGVTLSSAPHGHVFVNGKHFDLDDAFLRAMQIEFGGQMAFLQEKIATGKLTDEELPNISTYFYDQPTSAKRRNAYIYPSGKTDDLQIFSLLDLVGKNGFPRQSESFVYPPESERVSLTTYIVADFDTKEGISLVKEVLTAVTSSYPSRVSFIHNPANLTKAPSTVETASSSLLAQLICQGILHHVPPSRLVETLGLEDASADEQSSQVVLPAAGSLDDILHEGTLSNKEYDDYVRSSRLIVRDLKLEPGEQALIVNGRVVGPFEPEEFVAEDLGALATYEMRTRVQPVIDALESIYEGLNDLDRASYTDIVTLASSIVSSIQLPDASGVGLFNAPEKPRQRRYQLLDGEYTAHIFGDNTTAMYHFGIVLDPLSEAAQKWSSLIQWLLHIPGVYTELHINPAVYGELPLKRFYRYNLLPRPTFHENGEEVHAKTKFIGLPVEPIYTLAMDVPQSWLARPREALHDLDNILLGALSAHERDRGVHAVFDLDYLVIEGHAREPLTHVPPRGVQLQLVTHAGTAIADTQVVANLGYLQFRTKPGVFHLEIRPGSGREIFEMESVGNEGWDSSPVDEVGNEITLTSFEGLTLYPRLRRRPGMDRADVLADAVEGSSAPKGLLTELTSRLSSIFAGHKNTDLASSGSGQADINIFTVASGLLYERFASIMILSVLRNTNTQSTVKFWFIENFLSPSFLEFIPHFAKEYGFQYELVTYKWPSWLRAQKEKQRIIWAYKILFLDVLFPMDLKKVIFVDADQIVRTDLKELVDLDLHGAPYGYTPMGDDNVEMEGFRFWKTGYWKEFLHGMAYHISALYVVDLVRFRQIAAGDKLRGHYQQLSADPNSLANLDQDLPNNLQREVPIFSLPEDWLWVCSKDRLHRAKTIDLCQNPLTKEPKLARARQIPEWEEYDGEIANFARRLAEDGRMRSEIVAADVNVLADVGAARVAPGSPIETQEHSRDEL

SEQ ID NO: 4519 - protein, 1614 aa, Hypholoma sublateritium
MKSALRLLVAAFSALQVAGSSSPPVKVELRSSWPAPPFLSEILETVSLENPDEFFTYVDLLTGPDGLVSSNTLSPEAILQTALEIGIDNGIIRDISVLNTIQMNLAMHAATPKLEAFYSYYDGTQGELGAESKYDKGKACGSWVDWYGKVVCDVETLAHLAGVEAIDPPKVSNTDAPQARPKLLTFDHIFPPPAAILERPPRTAILYASLTSSNFRELHTYLMKLTNRLDPHVEYVFRHVPPAAPSEARNFLSGYGVALDLKKMDYLALDDRNTNTEGGSRSTSKSDSEQEEEPVDPVLSLIFSHPENTSAPDASVPLTAEEFANLGAQTAQIITSSSSPLNTLTQLSQNFPKYMTTVARRVVVNESLEDGLHENSLRVQQGLNAMWLNGLQVEPKVVHPFGLLKLLKKEKGVIENLVAQGLDSTQAFEVLTHSAISEAQRGGAAMDAVFDASDRPEGGDVIVWWNDMEKDKRYARWSPSLLALLRPMYPGALPNIKANLFNVILVVDLSKISTLNFLAGAVSSIINRDIPLRFGMVPVSDSDDGRKMAKLFYHLITNHGRRKTLEFLSALAQLQLPPHMRTETVQWEAVRTIYDRLHQSEGEEKPEELIPTLASIFDDQPEETVPFEKIGLYADRLGATLSKSAGGHAFFNGKHFDFNDDLLRNLQAEVAVQIAFLQEKVYTGALADGNYGETMANWFYDLPTTNLRRNSYIYPSSTGGNLRIFNLPDVFGKTRFRASPATYLYSSAEFEAISESLYIVADLDSEAGRSLIKEAITSLTAESKTRIAFIHNPISPNASEKDIRPPTSWMLAHLHIRQLLSKATPASLLSALDLDGPVVPSESTQIPIGQRDAFKSLSGGISLSGILPEEYVEYVKTSRLVARTIQLVPGEAALVVNGRVVGPIAPDDFQKPDFAALEEYESRKRAEPVVKALSAVAPQLIEDKYLHADIVSMVASVVASTHQPDPSESGLFDAPPQPRQTSYKLLESNYTKFEFGDNATAIHHIAVVLDPLSETGQKWSGLITWLSSLPDIHVEIHLNPGRYNDVPLKRFYRYNLLQALSFDSNGQIVHPQTVFEDMPIDPIYTLAMDVPTAWLVRPSEALYDLDNIQLGKLFPGDNVVEAIFQLDYIVIEGHARESSTQTPPRGLQVQLVTGDGAQIDDTQVVANLGYFQFKATPGVFQLEIRPGRGRAVFKLDSAGNEGWESPTVEEAGNEITVTSFEGLTLYPRFSRLPGQEIADVLAEAEEEGSKGLFDDLSNKVFSMFKGKEDVVSTDVVTVKQQADINIFTVASGLLYERFVGIMILSVLRNTNSTVKFWFIENFLSPSFLEFIPHMAKEYNFDYELVTYKWPSWLRAQTEKQRIIWAYKILFLDVLFPMDLKKVIFVDADQIVRADLKELVDLDLQGAPYGYTPMGDDNTDMEGFRFWKTGYWREFLRGKSYHISALYVIDLVRFRQLAAGDILRGQYQQLSADPNSLANLDQDLPNNIQDQVPIFSLDEDWLWCETWCSKDRLHRAKTIDLCQNPLTKEPKLARARQIPEWDEYDTEIAQLTRRLAEEGKIHSRMATADANVLADAGAATAGSVKPPADVDPEHDPLGVAEGDAAASEGPSHDEL

SEQ ID NO: 4520 - protein, 1576 aa, Serendipita vermifera
MAPSTGIFAFLTACSSITLVTASVPVTVGLRSSWPAHNLLLEILETAAIDQPSRFFPLVDILTSPDAFPSPLARLSPEAIHQASLEIAQKQGYLADDSALRAFELALALHVSSPKLEAFYQYYEDRNLDRLPPPTGYLVEECASWVDWYGSRLCSSDDLRGVLSREGLEDGKNTTILPKRTKLLPFDHVFPEPESTLFTPPRTAIMYADVSSPNFRDLHEYLMASATTLPPKIQYVFRHVPPPKVTQGSPKREYLTGYGVGLDLKKTDYLALDDRRASTGGTTGDLIEASAEEAPRVDIIRDLLDALPLPENYDALNSTAPLTKDEFKYLGVQAAQLIVGSPNPIDTLMQLSEDFPRYATELARKLDMDGNMQLEMMKISRAIPRGASMAWINGKVIENVDEFNPFNVLNLLRAERSNVDALTSLGLTPGQAIEVMTGRPVYESFSQGNVLDGIFDVTDREEGGDVIFWLNDLEKDKRYGGWPTAIEAISTQIYPGSFHSLAINLWNVVMAVDLSNRESLIWIFQHVSNIINRSFPFHWGIVPLLDTPEAEKAARVFYYVYRHYGPKETMDFIRSLIAAQPEGESVDFLITNAFFNNLGINVLPLLKIELDQSVSHDYDTVIAGQEPHSIEQLEKARKWAKRIDVQAKKDQLGHAFFNGKHYPLDINFLGQLQQVCGAQTAYLQGEVQTGRLSSQSGVDMSTYFYDLPTTPKRRNRYLFPDADSSPLRVQRLDTLFRGAGFEYPYRDFIYPVAAETSAPLTVTTWIVGDMDHPSTTDLVNEALLALSQQKDFRLGFIHAPKVLPMSDATNTPRQSTILQQLSGHFDPISAEEMIDILKNGAQDPVKSREYLQFCMSGQLLAREIGLKPGEKAIIVNGRIIGPVTADVFKAEDFVPLIAYERQRRVDPLTKALDDAGFSASSLDRAKYADLTATAASIVAAIHIPDPTEEGLLQMPMRPRQRGYRLLDTKHAKTTHGTEATSTYHIAAIFDPVSETAQKWSSLLKWLSTLDSVYMEIYLVSDQTKEELPLKRFYRSSLRDRLAFDEAGEEVPAMVRFDRLPEEPIYTLAMEVPSSWLVRPRESEHDLDNIHLASLSPSERAVGVKAIFDLDFLVIEGHAREPASRSSPRGLQLQLVNHEFTPVADTLVVENLGYFQFKAKPGVFQLEIMKGRGEDIFMIESVGNAGWDSPPVNSDAGAQVTLTSFEGLTLYPRFKRHQGQTDSDVLRPRREGFISNAVQRVVSALSTWIQPPPVAQQADINIFTVASGHLYERFASIMILSVMKNTNSTVKFWFIENFLSPAFLEFIPHLAEQYKFQYELVTYKWPSWLRSQREKQRVIWGYKILFLDVLFPMDLKKVIFVDADQIVRADLQELVDLDLQGAPYGYTPMGDDNTDMEGFRFWKTGYWKDFLRGRPYHISALYVIDLVKFRQLAAGDRLRGHYQQLSADPHSLANLDQDLPNNMQAEVPIFSLDKDWLWCETWCSKDRLDKAKTIDLCQNPLTKEPKLSRARQIPEWSQYDAEIAKFARQLMIDGKIGSNALGAEVDALAGEKATPSAEGSAADEKVEEKPVTPHDEL

SEQ ID NO: 4521 - protein, 1551 aa, Sphaerulina musiva
MAKQRPWIAAAALVSLLAPTNAVPSVNVAVRSAFGAPPFLLELLETAAEENSTSYFPLLDRIADGYFDASTTDQQLYTTFRALLASEGHLGPEDLSSFDYALAIHSAAPRIEAHYQYYNTSVVPTLSKERDGYAGCETWVYVPFSGQKYCSPDLDEKSAERLGQPGSASVKHLPFDRVLGDVTSDKASVLYADVGSESFRKFHGTLSKTAREGKTSYRVRYRAFEGVESRPLTVSGYGVELALKRTDYIVIDDRQGDGEEGKEKDDGKNAVETTLSEEEVSDLRPLSQSELRRLGVRAASFVMASEDPFKTLLKLSQDFPKHSTSIAATDVSKDFVDEHTANRNILLPSGYNVMWINGVQIMSRDVEAYALLEHLRRERRMIRSVQEIGLSAVEAVELLSHEAITEAQVHQESPRYDWRDDAEGGNVIIWMNDIEKDKRYMDWPESVTSLLQRAFPGQLPSVKKDIHNLVVPVDFAEYNDVYLVVEQLRSFVQRKVPIRFGLAPWVRSEASGEQAAIVIYLTENYGLGAALSYLEESIAAAGRKFGKPSEKIFESVKAAGKLRPNKKDLGFSEIPNESTLVARLSRAKDYISRLASTDPVPPVLINGVPIARTEDWMQTMSQQITIDLRSLQQAVYEGTLGDEDYLPTMFLDKASLRRNPLVVPEDEKSLRYINLGEHPELAALPGIPADAQTIERELVHLTVVADLDSKRGLEQLMEVLLYQRDHDNVEVAILHIPHEGETHKIVASDLTKAGGDASLKALLQQYDDIRGETSIPEGSSDLETRRNVLYDILYQKVSRETSPEIDEQVRSAWAPFRDLTTAVGVTSGKKALIVNGRIVGPVEDDVSLGISDIETLLAFERKRRFLPAALAIEALGIQEKASTPLAFARITNLIALSLVSDVPEGIFEAAPTVRSDVFKNFNASHTAIHIGDPKTATIQINAAVDPASEAAQKWIPIIKVLSEFDGVYVRLFLNPRDRLEEIPIKRFYRHVLSSKPAFETDGSLAPTGAQFRGLPADALLNMGMDLPPAWLVAPEVTVHDLDNIKLSAVKSDVSAVYELEHILIEGHTTDVTVGPPPRGAQLVLSTDADPHFADTIIMANLGYFQFKANPGIYNLGMQKGRSEDIFHIDSTGATGLNEQATDNTTEIALMSFKGVTLFPRISRNKGMEEEDVLEPSKSALESLADGAGDLLAQVGLGNGAQKFLGKAASLLSKSNSVNAAAESKKQHAEINIFSVASGHLYERMLNIMMVSVMKHTTHTVKFWFIEQFLSPSFKDFLPVMAETYGFEYEMVTYKWPHWLRGQKEKQREIWGYKILFLDVLFPLDLDKVIFVDADQIVRTDMYELVTLDLQGAPYGFTPMCDSRTEMEGFRFWKQGYWKKFLNGLPYHISALYVVDLKRFRQMAAGDRLRQNYHQLSADPNSLSNLDQDLPNHMQSLLPIHSLPQEWLWCETWCSDASLKDAKTIDLCNNPQTKEPKLERARRQVPEWVEYDEEIAQVASKYRAAKKVGESLQHDGVLGEESMQERLQREDAEREEAKRKKEEEEKRGRDEL

SEQ ID NO: 4522 - protein, 1567 aa, Patagioenas fasciata
MAAAEASCPEAAGAARAGRERGGRGQLLKTFTLPGSSRIGCFYKMGILITVLGIWFGSSLVKGDSKAVTTSLTTKWSSTPLLLETSEFLSEEGQEKFWNFVEASQNVKISEQDGSDYSSYHEMLKIACQTLSPLQQNLLKFSLSLRSYSATVQAFQQIAADEPPPKGCTLFFAVHGEKTCEFDSLGNLLQTASERPKPFLFKGDHKYPVSNPESPVVILYAEIGSEEFYKHHKSLVSKAEAGEITYVLRHFISNPSKEKVYLSGYGVELAIKSTEYKAKDDTQVKGTDVNATVIEESDPIDEVQGFLFGKLRQLYPDLTEELKELRKHLVESTNEMAPLKVWQLQDLSFQTAARILAAPPVDALMVMKDLSQNFPTKARAITKTVVSSELRAEIEENQKYFKGTLGLQPGDSALFINGLLIDLDTQDIFSLIDVLRNEARVMEGLHRLGIEGLSLHNVLKLNIQPSDSDYAVDIRSPAISWINNLEVDSRYNSWPSNVQDLLRPTFPGVIRQIRKNFHNFVLIVDPTHETTAELLNVAEMFFSNHIPLRIGLVFVVNDSEDVDGLQDAGVALLRAYNYVAQEMDNNYAFQTVMSIYNKVKTGDQLKVQHVVSVLEKQYPYVEVNSILGIDSAYDQNRKAARGYYEQTGVGPLPVVLFNGMPFQKDQLDPDDLETVTMHKILETTSIFQRAVYLGELSNDQDVVEYIMNQPNVVPRINSRILMSDREYLDLTGMNNFYVDDFARFTTLDTKDKTAAVANSMTYLTKKDDSFVRPVTFWIVGDFDKPLGRQLLYDAVKHLKSSNNVRISMINNPSEDPNSKNTLVAKAIWAALQTQTSNNAKNFITKMAKEENAKALEAGADILEFAVGGMNTNIFKEAFESPKVDFILSHAIYCRDVLKLKKGQRAVISNGRIIGPLEDGEMFNQDDFHLLENIILKTSGQKIKSQIQQLGFEEDLASDLVMKVDALLSAQPKGEARIEYHFFEERYSAVKLRPKEGETYFDVVAIVDPVTRDAQRLAPLLLVLNQLINMNLRVFMNCQSKLSDMPLKSFYRYVLEPEILFTADNNFALGPIAKFLDMPQSPLFTLNLNTPESWMVESVRTPYDLDNIYLEEVDNVVAAEYELEYLLLEGHCYDITTGQPPRGLQFTLGTSTNPVIVDTIVMANLGYFQLKANPGAWTLRLRKGRSEDIYRIYSHDGTDSPPEASEVIVVLNNFKSKIIKVKVQKKLDMMNEDLLSDGTSENESGFWESLKWGFTGGQKNEDVKQDKDDVLNIFSVASGHLYERFLRIMMLSVLKHTKTPLKFWFLKNYLSPTFKEFIPYMAEKYNFQYELVQYKWPRWLHQQTEKQRIIWGYKILFLDVLFPLAVDKILFVDADQIVRTDLKELRDFNLDGAPYGYTPFCDSRREMDGYRFWKSGYWASHLAGRKYHISALYVVDLKKFRKIAAGDRLRGQYQGLSQDPNSLSNLDQDLPNNMIHQVPIKSLPQEWLWCETWCDDSSKKRAKTIDLCNNPMTKEPKLQAAMRIVPEWQEYDQEIKLLYSLFQKEKETGTPAEMPGQHTHDPAAHVEL

SEQ ID NO: 4523 - protein, 1603 aa, Morus notabilis
METRFRSGFCVLIVLVFVGLCGVRSVCAENRRPKNVQISVQAKWSGTPLLLEAGELLSNEWKDFFWDFIEVWLHSENDDADSYSAKDCLKKILRHGRSLLSEPLASIFEFTLTLRSASPRLVLYRQLAEESLSSFPLTDETTQNSLGEGISETNEQLQTKKSDPLSVGVNPKSPNGKCCWVDNGGTLFFDVADLRSWLQSSSDPAVDSFQQPELFEFDHIHVHSSAGSPVAILYGALGTDCFREFHFTLVEAAKEGKVRYAVRPVLPSGCEAKIGHCGGVGTRNSLNLGGYGVELALKNMEYKAMDDSTVKKGITLEDPHTEDLSQEVRGFIFSKILERKPELTSEIMAFRDHLLSTTISDMLDVWELKDLGHQAAQRIVQASDPLRSMEEINQNFPNIVSSLSRMKLNDSVKDEITANQRMIPPGKSLMALNGALINIDDVDLYSLVDLVHQDLSLADQFLKLKLYGFASERLYNKRVSEFVQILMPVFPGQLRYIRKNLFHAVYVIDPATICGLEASLRLLSIDMITSLYENSFPMRFGVILYSSNLIKQIEKSGGEINTSVDDNGLNEEDLSSLIIRLFLYVKENHGIQTAFQFMSNVNKLRIESDGPDDDAMERQHVEGAFVETILPKAKSLPQDLLLNLQREKTFKELSEESTMLVFKLGLAKLKCCLLMNGLVFDTNEESLMNAMNDELPRIQEQVYYGHINSHTDVLDKFLSESGISRYNPQIIADVKPRFISLSAFILGDEVVLNNVNYLHSPGTVDDLKPVTHLLAVDVTSGKGMKLLHEGLRYLMKGSKVARLGVLFNCNHDADASSLLFMKAFEITTSSFSHKKNVIDFLDQLSSFYENNFLPMSSEASGSTPTFIDKVAEIAVANGLSSKTYITALSDFSAENLRKHYNKVTQLLYRKFGLESGGSAVITNGRVMYPSDGSTFLSHDLHLLESVEFKQRIKLIVEIIDEVNWQDVDPDTLTSKFISDIVMLVSSSMAMRDRSSESARFEVLHAQHSAVILGNENSSIHIDAVIDPLSQTGQKVSSLLRVLWKYVQPSMRIVLNPMSSLVDLPLKNYYRYVVPSMPKKKKKSSSLDDFSSIDQTIDGPKAFFTNMPLSKTLTMNLDVPEPWLVEPVIAVHDMDNILLENVGDTRTLQAVFELEALVLTGHCSEKDHDPPRGLQLILGTKTTPHLVDTLVMANLGYWQMKVSPGVWYLQLAPGRSSELYDFKESGDGNQQKPLSKRITMDDLRGKVVHLEVVKKKGKEHEKLLVSDDDDSSQDDKKGNSWNSNLLKWASGIIGGSEQSKKSKSTLVEQGKRGRHGKTINIFSIASGHLYERFLKIMILSVLKNTNRPVKFWFIKNYLSPQFKDVIPHMAQEYGFEYELVTYKWPTWLHKQKEKQRIIWAYKILFLDVIFPLSLEKVIFVDADQVVRADMGELYDMDIKGRPLAYTPFCDNNKDMDGYRFWRQGFWKEHLRGRPYHISALYVVDLKKVRQTAAGDNLRDLPNYAQHTVPIFSLPQEWLWCESWCGNSTKSKAKTIDLCNNPMTKEPKLQGARRIVSEWVDLDLEARQFTAKILGDQIDEATPPQSQDPITADQSPEDLESKAEL

SEQ ID NO: 4524 - protein, 1442 aa, Rhizopus stolonifer
MTAPRILQAILGLVTVGLCTLKTEAQTPTVDLTMVAPWAVPNFLVEVAETVATQNETAYFSFIHDFIALEKKSSSWTPSQLYSEVVSVISFLGNDNTNFFKAALAIHEAAPRIESYHQYYRESVTPTLSQYDDQCGTWIQIGKQQFCSIESFKEYKGSYLPIEVLAFDHVVRPKNELKKVPVLVLYTDRFSAEFSDFYRHLTTSPLYLSAYGVELALKKTDYLVIDDRSSEAASKDSIKEKLSKMGRKIGQSLFHTNQKAKIDPLTPAEIQKLGLKAAQYVAKSTNPLETLTQLSQDFPKYAKSVSEVELDVAFEKEVIENQHSLLRAGLNAIWLNGKGLEYSQINPFYLIRALRSERKLIKSFERLGLTPKQAIQVISNPALTAADRASSEGNSEIYDVRDTPENPFIVWWNDIEKDKKYSGWTDDMEEYLRPSYPGQLHPVKKNIFNLIMVEDLANIDALARIVNEIQMMIRRLVPIRFGIVPFVKQDDNMSTIMAQALNYIIQEHGKGDGMNFLTQALETLRLEGKRHPSLSDIQQSFEKTIAKANNSKSKKSFREALETQQRMSIQQVGIDNNVMFMNGKLIEFTEERANQKEAHIANLWIFANLNTISGLKLASEALSFTESNSKIRIALIHSSTTETQSKDYITIPVTDDNTKPLFSDVLGNLIFNGDGMSVTQAKEIIDLAIKNHLEQAKEDLDNSKVEAIFPGSPIIDMEAKAISEKWSLLNNHLEKHGLERGFFGIVLNGRIVGPFDGDVEFSKENFGALFNLEHTKRIAPIEQSIRESGYINTDHHPIADILAKATALIETDKANTAKGATEDNEPVYRHRVYNLISSTQHTRIVVGDLDNSFLEIGVIIDPLSEDTQKWAPILQTLSEIEGISVVIHLNPISQLDELPIRRFYRYVFDKEPHFDSNTGQKTIPTAYFADLPIDPLYTLGVETNNAWHVTVREANMDLDNILLSSLKEGTSGVSAVYELESILLEGHCIDSNSKSAPRGLEFEISTPSGSSKKDTLVMANLGYFQLKALPGVWKLGLREGRSSVIYSVEDIGTEGKWNWDAVEKKTDTLALTSFEGLTVMPLVHKNPGMEMEDVLGSSTNIKKQKDDKSSGLWSSLSEKLFGKKQDDQEKENNAAIKPKQADINIFSVASGKLYERFLSIMMVSVMKHTDSTVKFWFIENFLSPEFKNFVPYMAKEYGFEYEMITYKWPSWLRAQQEKQRTIWGYKILFLDVLFPLSLDKVIFVDADQIVRTDLKELIDMDLQGAPYGYTPFCSDRTEMDGFRFWTEGYWKNHLRGRPYHISALYVVDLVRFRQLAAGDRLRAQYQQLSADPNSLANLDQDLPNNMQHAVPIFSLPQEWLWCETWCSDESLKKAKTIDLCNNPLTKEPKLDRARRQVPEWEAYDNEIDKLRQKTATEAMHKEKHGDQIVISAGKDQHVKDEL

SEQ ID NO: 4525 - protein, 1644 aa, Jatropha curcas
MDIRFRSGFCVFIILICVSFSGFVSVSGENRRPKNVQVAVRAKWEGTPVLLEAAELLSKEWKDLYWEFIEVWLRAEEIEADSHSAKDCLKRILNHGKSLLSDQVASLFEFSLILRSASPRLVLYRQLAEESLSSFPLCDDSISSNDSEEIAETSEKNESKRSETLLVGVNPKSPCGKCCWVDTGGALFFDVAELRLWLNSPVNHAGDSFHQPELFDFDHVHFGSHTRSPVAILYGALGTDCFKEFHVTLVESAKQGRVKYVVRPVLPAGCEGKVGHCGAIGAKDSLNLGGYGVELALKNMEYKAMDDSAIKKGVTLEDPRTEDLSQEVRGFIFSKILERKPELTSEIMAFRDYLLSSTISDTLDVWELKDLGHQTAQRIVHASDPLQSMQEISQNFPSVVSSLSRMKLNSSIKDEITANQRMIPPGKSLLALNGALINIEDIDLYLLVDMVQQELLLADQFSKLKVPHSTIRKLLSTMSPPESNMFRIDFRSTHVHYLNNLEEDAMYKRWRSNINEILMPVFPGQVRYIRKNLFHAVYVLDPATSCGLESIDVIISLYENNFPMRFGLLLYSSKFIKKIEVGDADLHLSSVENDSQTQEDMSSLIIRLFIYIKENYGIRTAFQFLSNVNRLRKESAESIDDSLEMHHVEGAFVETVLPKATSPPQDILLKLEKEKTYNELSQESSMFVFKLGLYRLQCCLLMNGLVIDSSEEALMNAMNDELPRIQEQVYYGHINSRTDILEKFMSESSIGRYNPQIIAEGKAKPRFISLSSSVFEGQSMINDICYLHSPDTVDDLKPVTQLLVVDITSLRGIKLLHEGILYLIRGSKVARLGVIFSANQDADLPGLFFVKVFEITASSFSHKKNVLNFLEHLCTFYEQKYILGSSSATESAAFINKVYELANANELSLKAYESALVDFSTDMMRNHLNKVAQFLYRQLGLEAGVNAVVTNGRVTVLDDEGTFLSHDLNLLESLEFKQRIKHIVEIIEEVHWQDIDPDMLTSKFVSDVVMSVSSAMALRDRSSESARFEILNAEYSAVIIENENSGVHIDAVVDPLSPIGQKVASLLRVLRQYTQPSMRIVLNPMSSLVDLPLKNFYRYVVPTMDDFSSTDYTVNGPKAFFANMPLSKTLTMNLDVPEPWLVEPVIAVHDLDNILLENLGDTRTLQAVFELEALVLTGHCSEKDQDPPRGLQLILGTKSTPHLVDTIVMANLGYWQMKVSPGVWYLQLAPGRSFDLYVLKEDGSRDLDKLLSKRITINDLRGKVVHLEVAKKKGMEHENLLVSSDDDNHSQRKNKGSNNNWNSNIFKWASGLIGGQGKKDENTSTEHGKCTRRGKPINIFSIASGHLYERFLKIMILSVLKNTNRPVKFWFIKNYLSPQFKDVIPYMAQEYGFEYELITYKWPSWLHKQKEKQRIIWAYKILFLDVIFPLSLEKVIFVDADQVVRADMGELYDMDIKGRPLAYTPFCDNNKDMDGYRFWRQGFWKEHLRGKSYHISALYVVDLVKFRETAAGDNLRVFYETLSKDPNSLANLDQDLPNYAQHTVPIFSLPQEWLWCESWCGNSTKAKAKTIDLCNNPMTKEPKLQGARRIVSEWVDLDSEARQFTAKILGDEIDSKEHVAAPNKPKDPATGSSAEEHTEDKSEL

SEQ ID NO: 4526 - protein, 1488 aa, Diplocarpon rosae
MELFTMPWSLTRALLVTTYLHSLSVSASPSINVGMKASFSSAPYLLELLETAGNENGTSYFPLLDRIADGHFSQASTDKELFEAFAKTLKEDGHMVEPETLSSWKFAVSMRASAPRIEAHYQYYHTAAEPSLKSEHDTSCQVWVLFNGKQYCSPELDADSGHIVGESQLQELQFDRILGSSSSPPSILYADITSPTFAKFHKILVQTAREGKTSYRIRHRRSLAVEEKPLIIPGYGVELALKRTDYIVIDDREESEGKAASATPKKEVRFEDEEFADLKPLSSSELSSLGLKASSFIMQSENPLESLVKLSQDFPKYSSAIASHNVSSEFIAEHQFNRDQMVPAGKNIMWMNGVQLMDRQIEALDLLDIFRKERKLVNSLRDLGLTRSQAIKLLSHFEVSMVNAESDAPRFDWRDEIEGGKVIIWMNDIEKDKRYASWPTTVHAFLKRVYPGQLPTVRRDCFNVILPVDLTNPQDILVVADTVLSFVKRKLALRFGLVPLTSTPDSVSHAKVVYHLLDSYGIQAAMAYLEAAYTSQKLSAPTVKSFQTAIEGRTVRNDKTALTLEEVLESESYQGRIEASKKWVKRLAADSKIPLMFIDGAAIPREENWLQLMSQTVTNDLQAIQQAIFSETFDEETWLPSHFLLGASTRRNTLIVPEDEKTLKLLDVSKLVKENKDILSILPRIEADASSEKASWAHVILVADLESKAGEKLLATAAVFREANPSIELVIVHSPSSINTESGISTDFYKHMLGTGHKAFSHINDLTAVLTAELAAPGEEIQQQSVQYWRGADAVVKSLGLLPGQNALLLNGRLVGPIPADSDFDQGDFEQLLSYERSKRITPAYAALESLGLLESISTPLAAAKISSIVATSTISDTPDGMFEQASTLRMSRFDIWNSTYTAIEIGDIVTASIQITVTLDPASQLGQKWVPILKVLSELEGVFTKIFLNPRELLQELPVKRFYRYVLNSQPTFDDAGALRPLSATFTGVPQEALLNLGMDIPPAWLVAPKVSVYDLDNIKLSSIKTDVEALYELENILIEGHSREIPGGAAPRGVQLALGTERNAHTADTIIMSNLGYFQFKANPGYYKIGLLEGRSAEIFNIDSVGSKGWGPIAGDENTEVVLMSFKGATLYPRISRKPGMATEDVLESKPESKMDFVSRGINFAQGILGKGKGISEKEVQAEINIFSVASGHLYERMLNIMMVSVMKHTKHTVKFWFIEQFLSPSFKDFIPSLSAEYGFKYEMVTYKWPHWLRAQTEKQREIWGYKILFLDVLFPLSLDKVIFVDADQIVRTDMIELVNHDLHGAPYGFTPMCDSRVEMEGFRFWKQGYWERFLGGLPYHISALYIVDLHRFRQIAAGDRLRQQYHQLSADPNSLSNLDQDLPNHMQSVLPIHSLPQEWLWCETWCSDESLKDAKTIDLCNNPQTKEPKLDRARRQVPEWTVYDDEIAAVDRRRKGLPVNSTAEKNARSRALAAEAVTSSKKDEL

SEQ ID NO: 4527 - protein, 1565 aa, Macrostomum lignano
AAQFVSLFGAGCSLPLLLLALISIAPPCVLARSKFVSVNMFAKWQSTSLLAEASEFLHQQNSELFWQYLDNLAQRNDLSSMTDSAEYQLALSESSRLAPGSRSDLLRLWLSLRAASPALEMNAQLGLNDADRCLKSLDSSGGFAVLPGGGIACTADQLDAELAAANASAPLQLYRTDKVRLESAGVDEQQLPPTVLLYARLASGGFPAWHVAMTTLAKAGKLRYAFRHAPPAELNSLQRRQQRTRLSGYGVELAIKSTEYKAMDDSKVEDSKEDSHRRHDEEDEVQGFLFSKLRALHPNLSQELNQFKQHLLDSSTEIAPLKAWQLQDLSYQAAQRVLTVTVDDSLHVLRDLSQNYPVRAKALSQIAVLPSLRAQLEANQRLFQQQLGLPQGASLLLVNGRPVDLEFYDVFTMLQSLTEEASLMDAATQLGLPASHVASVVLRSLAASSASASDEKFALDFRDPAVVYLNDLEQSQVYAQWPRSVHDLLKPAFPGTMRRIARNLFNLVVFIDPAVKESADLIRYCEAFVQHTVPIRIGLVWAPKDEVGRALVRSFNFVKNDKGSTRSAVSYLTDIYSVTFEQGYSLNLEFAHQYFKGLYPDVDSKDALGDKSSDYEDQLAAGQAFLARSGLASAPAVLLNGGLLDTNAAVTNFEETVLTEIMRQTSELQREVAAGQLKDSQNVVDFINERPNVVKRLNQRLLQGGKTLTQAQLNAVGKLSYFVKNDDSATRAASLWLACDLATAGCRSHAYEALRLVKASAQLRLALLHTGEPGLLLAKALQSAASTVATKSAKHAVNLASKLCKPENWPAVSGINEAAVGNKALKELAVHGMDWDAFAAAADSDQTRRELDKLSKFASTELGTPAAASTAEPPSLALVSNGRLVGPLPQPEVDPADLRLLERLALSRAGRAVAESLDKLSNTELASVGNDRSELSMRLSALLNSHPAAVGSGSGSTSSSGGSTSGSSATRRIAMPDGLQPGGLLKLEPMEPNSARPSLEVTAIVDPLSRDAQKMSHILLVLRQALNARITVAFNCREKLSEPPLKTFYRYLLTAAPVFAKDGSLSSAGSTVNFDGMPSQPILTLGIDTPHNWMAEVVNSPYDLDNIQLAAVSGSGVHAEYELEYLLVEGHCVDSASNQIPRGLQFTLGTVQRPLLRDTIVMYNLGYFQLKAAPNAWQLRLRAGKSADIYDIAAHENTDGETAAGDPVAVLDSFRSKVITVRVAKKPDRLDDSLLGDEPAQQSIWGSISNAFTASPTVSSEDRDQTLNIFSVASGHLYERFLRIMMLSVLKNTKSKVKFWFLKNFLSPSFIKFIPYYAEKYNFEYALVQYKWPRWLNRQTEKQRIIWAYKILFLDVLFPLDVKRIIFVDADQIVRTDMQQLADMDIRGAPYAYTPFCDSRRDMEGFRFWKTGYWANHLGNRPYHISALYLVDLVRFRRLAAGDRLRGQYQGLSQDPNSLANLDQDLPNYMIHQVAIYSLPQEWLYCETWCDPATKKSAKTIDLCNNPKTKEPKLEAAQRIVPEWRDYDKELRAIWDEFHAGKSAANGQQQQQPKVPDSSSGHTEL

SEQ ID NO: 4528 - protein, 1543 aa, Crassostrea virginica
MTCRQRLQPLPKVPPHHYRDYNMAAPINMWWLLVYAFITVALAKQKPVTVSVDAKWPSTPLLLEASEYIAGESNDKFWEFVDGVSALAPDQVQSDTAQSNYHLIQKYAGKVLSPLHVRLMRFSLSLRSFSPAIENFQQMSNEEQAPEECDMFVSINGEKTCDVNKIEDVIGTAADKPKTAIYKFDHVYPGTGNKEVVATLYGELGKPGFNDMHEKLKSLSKQKKVTYVLRHYVKTPSETNTRLSGYGVELAIKSTEYKAKDDTKIEVKGDGTNTEEEDQLDDDVEGFDFAKLKELYPEQKADLKKLRNHLISSSSELAALKVWELQDLSYQAAQKVLNAEPDDQIKVLQDLSQNFPSRTRSLVKVQLKSEVKNEMNQNKKVFESALSLGAGESAMLLNGIPVEMEVYDVYTLLDLMKSEARLMEGLFSLGFKGAELEKFMRLDLGGDKKEFALDIRHTAIQFLNDLENDKKYKNWPNSVQDILRPTFPGMLRHVAKNIFHLVYFVDPTRKTDIELIKMAEAFLVHSAPIRLSLVFVVNFDLGVDPHEDASVALSRAFDYIRQEHTFPKALSFVTDIYEKAKGEEITPEMVMKELKKKYSDADMSEVFGKESDEYDILRIAAKDYIEKSGLADFPQVLLNGIPLKKNYLTEETFEEGVVSQIMAQTPDIQRAVYQGNLHDYMNILEYLMEKENVLPRLNSRVLSPPKQTLDFSTVIDDSLTLDSLYQKTAGEITAITARDMKYLQRKDEETLIPVTLWVVCDVETPEGRELLYSAIRQLKHSHEMRLGVVFNHNSVLDSDLLISKAVYTALQTLDNNHAKSLVTKLVKEENVQALKSGDKKIEDLEVHGMDMAAFKKALEKQTTDFLTHHASFIRNALGWDETDRGVVANGKVCGPLDENEKFTTEDVDLLTKVEYQNVARSIKTQIMLMGVEGNRGSELIMKISSLLSSKTSTTERKELSGLKDEHSAIKLPANPDAPAYQIEVVLDPVSQEAQKIAPMIKVLRDVVNVDVKIYMNCRDKLSEMPVKNYYRYVLEPDLTFKPDGSLTSGPVARFTDLPEKSILTMGVNPPESWLVESVKAAHDLDNILLEEVESGVNAQFALEYILIEGHCSDVSTGQPPRGLQFTLGMNVSKPLVDTIVMANLGYFQLKANPGVWFLNLREGRSRDIYSISGHELTDTPQGSEDIVVSINSFKSKILRIKVEKKKDKMTEQLLKDEDDDKSIWDSISSSFKPKEETEEKVLNIFSLASGHMYERLMRIMMLSVLKHTESKVKFWFLKNYLSPSFKDFIPKMAKEYGFEYELVQYKWPRWLNQQKEKQRVMWGYKILFLDVLFPLDVKKIIFVDADQVVRTDLQELNDLDLEGAPYGYTPFCSSRKEMDGFRFWNSGYWNSHLAGREYHISALYVVDLKKFRRIAAGDRLRGQYQGLSQDPNSLSNLDQDLPNNMIHQVAIKSLPQDWLWCETWCSDESKKTAKTIDLCNNPLTKEPKLKAALRILPEWKEYDYEVKVLWDKVYNTSTRLQVEYEPPSIDENKIGSKLEHDEL

SEQ ID NO: 4529 - protein, 1639 aa, Tilletiopsis washingtonensis
MRLTAPLQAAALLLSGSLAAAASSSSSPPVSVSLVSPWAAPPLVLELLEAAHTQDPDGFWTLLTHLTGPWAFNDSRGSTATAPRSAQAYHTAATRLLDQHGLLGAPGEREMWNLALALHTEAPKIAAFWQLYEHSGPARQWATAAVGREAQCASWVAWGDEVLCTEQELVRALTAGVAPSSPHTVAFDHIFSHPDAAESSTLDEQPTAVLYADVTSANFWSLHTTLLEHVLGSRVVAEGGADVPPLRYVLRWRPSAQGTEGPKATMAGYGATLDLKKVDYLVIDDRKLQEDSSAVRDVREDGAVSSDDQLSDRAWLDAQIGAQPEDAEQALSSLTKEELADLDVLATQVIATSSDPLRALEQLVKDFPLHAVALARRAPKPDAALLSELAELQSQTMDPGSSDIWLNGKALTEKEITPLGIIPALRADHAHVASLTSPLLNMSNEAALDLLSYAPIGVAQDLTAAGSLLFDASDRIERAAAGAQAGAPGVLSWFNDLEKDSHYESWSPSLQALIRPLWPGAFPHIARNLFNVVLVMDLGQPGTCRFLAESVIPTIPRIGLRWGLVPGGLEGKDETSLQLARMFWYLSENWGVEVVAKWLRRLARSRIEGGRISLDTAREELQAQLHNAVPAEDFPALFEALSSGEYPGLASRERMTRSYVRRLHLELDESMRGGHVMLNGESIPLTNNLINAMHAAVTAQSRVLAPLVYYRKIDSENTPDVSHFFYDLPTTFKTRSALVFADTGAAPAGNKPRAVDLVRLSAKATFKAPLETFVYPEAGARVNATLWVVGDLDSVAGAHLVYEAAKGLSKASYRLGLIHVPQTRGQGGPLSAFLAQLLASGQADAVSGPQLAEGVKAVAGAKLRAKADEQSPEPSTVPHWLSERGWATPGADSANGFWSEAPALARALGVKSGQIGLVVNGRVLTDFDPNATFAEDITTLVAFESVRRINAVVEGLEEAGVEVAKMEPAAHATTVMLATSVMSHAYFVDESAEGIFTPPQTGRNSVIDSVFAARATFEVGKRSTARTRLSVVLDPLSERTQSWAPVLRMLAELPDTHIRVLLNPRPKLRELPLKRFYRFAAPAQPAFDLTGQQTGATLEFHGLPEAAVLTLGLDTPPSWLCMSDEAVYDLDNIRLADIPAHARTAGVRAQYALKHILLEAHVRDADQAGQSGIPRGLELILESPDGAVELDTIVMANLGYAQFLPPSPGLYRLRIRDGRSKELYEMRSVGNLGWESPSVEVTGTDITLTSLHGLTIYPQVRRREGQENESLIEDLDLGAVPEPEAERGAAGYLRIAKNFFGGLKQQAERVKPVRPASDGANADINIFTVASGHLYERMASIMVLSVLKHTQSSVKFWFIENELSPSFKAFLPHLAAEYGFRYELITYAWPHWLRSQREKQRRIWGYKILFLDVLFPLDLKKVIFVDADQIVRVDLQELVDTNLQGAPYGYPPMGDDRPEVEGFRFWKQGYWKTFLRGKPYHISALYVVDLARFRRVAAGDQLRGQYQQLSSDPGSLANLDQDLPNNMQFQLPIHTLDKSWLWCETWCSDASLAAAKTIDLCQNPAVKSTKLERARKIPEWTAYDDEVARLAQRLASQQLLADNIAASNETVALPVPESELQPEPEPALDAEPAPRHDEL

SEQ ID NO: 4530 - protein, 1647 aa, Branchiostoma floridae
MILQILLILLYSKFPLLTTLARSEIARFRHPRWQPPVLDTGDRIGFKQLIRQPANHSSTRVCHVVLLTSGLASPSPKKFKVTKLGYHSMLLFMVTVLAGVILTAEAKSKSIVATLDAKWRDTPLLLEASEFLAQESNDAFWSFANKVADADPEKITSQSDHSYHHYIQKLTHGVLSEAQVKVLRFTLALRAHSPTVEMFAHLVDDLPSIPDCPAFVDVHNQMTCDPSRVKGMVDTASGRQRPYLYKVDHQYPGTSPDVPVVILYAELGTQAFKDFHTVLRDMADKGDINYVLRHYIKVRPDRKVRLSGYGVELAIKSTEYKAVDDSKVQGDAPGVEVEVEGEDEVEGFIFKKLRQLYPDLKEKLKTFRSYLIESTNEMAPLKVWQIQDLSFQAAQRIVSSSPQDALRVMRDVSQNFPTQARSLVRTQVQDEVRKEIQDNQKVFSETLDMGAGESALLINGLHVDLDIVDPFLLLDTIKNEVKLMEGLWSLGIREDDLKSLLYLPVDSEVDNYAIDIRDHAVHWINDLEKDYQYKSWPSNLQELLRPMFPGMLRHIRKNMYHMVFFLDPLKKEAGELVKLADLFYRNQAPVRIGLVFVVNDEKDVEGQDDVGVALIRAYNFIQQDQGSDKAFLWLNSVYSLARNKDSLLEMDHIKEKFRRKYPGDDIADVIAADTDYDDKRRAGRQFYQRTGLGPLPQVLMNGVPFTEEEISPENFEESVVSKILGITPELQRAVYMGELTNSMNLMEWLMDRPNVMPRLNPRVLSTKKRTLDLTTQPGKSPLADSAAFSRLSSNQMAATLANNMKYLTKKDESVTRPVTMWVVCDMESTEGRQLLYDAIKHMKSSNTVRIGVLHNPASTPEDGSQTFARAVQAALDTQTMTMAKNFITKLAKEENIPLVQGGKLAELYVNGMDTAKFEAALKKDQKKQTGVLTSHWTFVKNTLKVRPGQRAIVANGMIVGPLDPSETFDPDDFGLLEKFVKSLAADNVAQKIKDMELNLKNDGLNDLVMKASGLLIANQRSDSRREVTYSSDQHSAVKIPGDPNEAAFDIVAVVDPTTRDAQRLAPILMSLTITDASLTISDASLTLTGVNYDAIADVLQQVVNANLKVFMNSRDKLSEMPLKSFYRYVLEPEVGFMVNTSFSPGPSAKFVDMPDSTLFTLNMKPPESWLIESVRTPYDLDNIRLEDVVPGTTINAEYELEYLLLEGHCYDAMSGQPPRGLQFTLGTHNTPVMVDTIVMANLGYFQLKANPGAWLLRMRAGRSEEIYQITSHDGTDTPAGSEDVTVIMDSFKSKIIKIKVNKKPDKLQEDLLSDEGESGGGIWDSISSFTGGGKKSGDDADEEDVINIFSVASGHLYERLLRIMMLSVLKHTKTPVKFWFLKNYLSPAVMDFLPHMAKEYGFQYELVQYKWPRWLHQQTEKQRIIWGYKILFLDVLFPLSVKKIIFVDADQIVRTDIKELRDLDLGGAPYGYTPFCDSRKEMNGFRFWKSGYWASHLGGRKYHISALYVVDLKKFRRIAAGDRLRGQYQGLSQDPNSLSNLDQDLPNNMIHQVAIKSLPQEWLWCETWCDDASKATAKTIDLCNNPLTKEPKLEAAVRIVPEWTDYDNEIKALQQRLTNGEKSASSKTGGETLQPEESQRHHHDDEL

SEQ ID NO: 4531 - protein, 1368 aa, Callipepla squamata
MVNFCQKKVKKNSGILSKPVKILGHLNTMIAADEPPPEGCTLFFAVHGEKTCEYDSLGALLKAASGRPKPFLFKGDHTYPASNPDSPVVILYAEIGTEGFYRVHKLLVKKAEAGEITYVLRHFIANPSEEKVYLSGYGVELAIKSTEYKAKDDTQVKGTDVNATVIDEDDPIDEVQGFLFGKLRQLYPDLNEELKELRKHLVESTNEMAPLKVWQLQDLSFQTAARILAAPSVDALMVMKDLSQNFPTKASLFDVLRNEARVMEGLHSLGIEGFSLHNILKLNIQPSDSDYAVDIRSPAISVLIVDPAHETTAELLNVAEMFLSNHIPLRIGLVFVVNDGDDVDGLQDPGVALLRVYNYVAQEMDNNYAFQTVMSIYNKVKTGDQLKVEHVVSVLEKEYPYVEVNSVLGIDSAYDQNRKAARSYYEQTGVGPLPVVLFNGMPFQKDQLDPDDLETVTMHKILETTSIFQRAVYLGELSNDQDVVEYIMNQPNVVPRINSRILMSDREYLDLTAMNNFYVDDFARFSTLDSREKTAAVANSMTYLTKRDDSFVRPVTFWIVGDFDKPSGRQLLYDAIKHQKSSNNVRISMINNPSEDPNSSNTVVAKAIWAALQTQTSNNAKNFITKMAKEEVAKALEAGADILEFAVGGMDTNIFKEAFESPKVDFILSHAIYCRDVLKLKKGQRAVISNGRIIGPLEDGEMFNQDDFHLLENIILKTSGQKIKSQIQQLGFEEDLASDLVMKVDALLSAQPKGEARIEYHFFEERHSAVKLRPKEGETYFDVVAIVDPVTRDAQRLAPLLLVLNQLINMNLRVFMNCQSKLSDMPLKSFYRYVLEPEISFTAENSFASGPIAKFLDMPQSPLFTLNLNTPESWMVESVRTPYDLDNIYLEEVDNIVAAEYELEYLLLEGHCYDITTGQPPRGLQFTLGTSTNPVIVDTIVMANLGYFQLKANPGAWTLRLRKGRSEDIYRIYSHDGTDSPPEANEVVVVLNNFKSKIIKVKVQKKLDMMNEDLLSDGTSENESGFWESLKWGFTGGQKKEDVKQDKEDVLNIFSVASGHLYERFLRIMMLSVLKHTKTPLKFWFLKNYLSPTFKDFIPYMAKKYNFQYELVQYKWPRWLHQQTEKQRIIWGYKILFLDVLFPLAVDKILFVDADQIVRTDLKELRDFNLDGAPYGYTPFCDSRREMDGYRFWKSGYWASHLAGRKYHISALYVVDLKKFRKIAAGDRLRGQYQGLSQDPNSLSNLDQDLPNNMIHQVPIKSLPQEWLWCETWCDDSSKKRAKTIDLCNNPMTKEPKLQAAMRIVPEWQDYDQEIKQLHNLFQKEKETGTPAQMSGQHTQERPKDCIAMFNAAIKPKPRSPLSHTSLT

SEQ ID NO: 4532 - protein, 1673 aa, Unknown
  Description of Unknown: Oryza sativa Indica Group sequence
MEAARGARSRVPVAAVVAVVLVAGLAAGGSAAEIRRQKNVQVALRAKWAGTPLLLEASELLSKEWKDLFWDFIDHWKELDKASECLTAKCCVQKIVEDARSFLSEPLASIFEFSLTLRSASPRLVLYRQLAEESLSSIPVKDGTLEQTSGPSTGENFHEAVKGTCCWVDTGSALLFNSADLRKWLDGLGKLAVDSTQQPELFEFDHIYPQSNITAPIAIFYGAFGTKCFKELHVHLAEASKQGKVRYALRHVLPSGCQATSSFCGSVGAIDAVTLSGYGVELALKNMEYKAMDDTAIKKGVALEDPKTEDLSQEVRGFIFSKILERKPALNAEIMSFRDYLLSSTVSDTLEVWELKDLGHQTAQRILHASDPLQSMQEINQNFPSIVSSLSRMKLDDSIKDEIIANQRMVPPGKSLMALNGALINIEDLDLYLLMDMVHEELSLADQFVKLKIPGSAVHKILSAAPPTESNSFRVDFRSSHVHYLNNLEEDALYKRWRSNINELLMPVFPGQMRYIRKNLFHAVYVFDPASTIDMVLSLYQDSVPIRFGIILYSSRLISVIEENDGNLPVNNGSKTEEDISILIIRLFLYIKETYSTQLAYQFLSNIHKSQNSGDDYNEESVEAHHVEGAFVDSLLSSAKSHPQDVLLKLQKENMHKQEAEESSRFVHKLGLYKLQCCLLMNGLVHESSEDATMNAMNDELPRIQEQVYYGHIQSHTDVLEKFLSESSYKRYNPSITGKSTENKRFVSLVGPYHQGDSTLHDITYLHSHGTTDDAKPVTHLVAVDISSKIGIKLLHEAIRYLMAGSNRARVGLLIYVRNDNPSPILHMKDIFDRTISSFSYKEKVLDFLHELCKFYEGQHVPSSGVGDKISTMREKVYSIAAETGLPVDNYKAWFTSYSHDAVLRGMNKLSDFLFGKLGLEFGSNAVITNGRVFVVNEGDSFLTDDLGLLESMEYELRTKHIYEIIEEIEWTGVDPDDLTSKFYSDVAMLISSSMSIRERPSERAHFEILHAEHSAIKLNGMSSGVHIDAVIDPLSPAGQKLAPLLRILWRQIQPSMRIVLNPISSLADLPLKNYYRFVLPSMDDFSSTDYSVHGPKAFFANMPLSKTLTMNIDVPEPWLVEPVIAIHDLDNILLENLGDVRTLQAVFELEALLLTGHCKEKDRDPPRGLQFILGTKRRPHLVDTLVMANLGYWQMKVSPGVWYLQLAPGRSADLYELPSKLIAIDSLRGKLMHIEVQKRGGKEHEDLLNADDDNHFQEKMDNKGWNNNLLKWASSFISGDSSSKKKDEKISLLGQAIDKEFMKSVGAGVTPKAALRCNRLQNGLYIGAHPQKHKHLIEIEDEMVSLNFEYCINLNACLMMDLKAARQGETINIFSVASGHLYERFLKIMILSVLKQTQRPVKFWFIKNYLSPQFKDVIPHMAQEYGFEYELVTYKWPTWLHKQKEKQRIIWAYKILFLDVIFPLSLRKVIFVDADQIVRADMGELYDMNLKGRPLAYTPFCDNNKEMDGYRFWKQGFWKDHLRGRPYHISALYVVDLAKFRQTASGDTLRVFYETLSKDPNSLSNLDQDLPNYAQHTVPIFSLPQEWLWCESWCGNATKARAKTIDLCNNPMTKEPKLQGAKRIVPEWVDLDSEARQFTARILGDNPESPGTTSPPSDTPKSDDKGAKHDEL

SEQ ID NO: 4533 - protein, 1510 aa, Pseudomyrmex gracilis
MRGLIYFCILLLCSTQLGADKKIKYVTTLIDAKWNETPLVLEAAEYLSDENPRYFWKFIDAYSQKISNLVIGTEKENYDIILELIKRYLSTSEIAVFKLGLSLRIYSARVEMFSQMAVNKNVSSHGCNNIVDIGGTFTCSLEDIDRLLEQDVWKTTDTYDVDHKYLSTTESDKAIILYGQIGTPTFIEFHEKLKNIAETKGINYILRHYVKDRMDKKLRLSGYGVELQMKSTEYKATDDSDIKDTEKSSEVTSDGMEEIEGINFMTLKQLYPDLQAELDKIQTHLLDTSHEIGAFKVWQFQELSHQAAERIMKSSADALNVLTDISQNFPMQAKSLIRTKVNSDMKAEMKLNQEIFMASLNIQPTDTALFVNGLFFDLEAIDVLTLLESLRSELRVMEALHRIGFSNKKMSKLLALDLSGSTDSQTFAMDIRDSAINWINDIENDPRYSKWSPSLTELLRPTFPGMIRNIRRNMYNLVLIIDPLSSESASLLSLAQSFYAHSVPLRIGFVFVTNYNTSVTGLMDSSVAVNNAYHYFADSKSSKEALNFLIQLGHFVGPNGAEIDDIKRVIQSIDSSADTDYILGEESEYDVGRHLAHDFIKRCGFKKFPQALLNGVPLMPVQANFESYEEAVLSNIMLQTPILQKAVYRGEITEGDDVVDFLMNQPNVMPRLNERVLKVDKNKWLNLIGSIPEDEDYTKWNSPQDLSTYIMKNMRYFFVSRRSTTHHFYSFWIVTDLKSLAGRQLLREALEYVEINTDARVGVIINAENDANVKSDINKIVLAALSALSPENAILYVRKVLKEANADLIADDKFEIEDESVAALLENQNPILSLHRHYVANVLNVEIGDRAILCNGRIIGPLDSDEEFTSDDFSLLERFSQSSYGDKLFIKLMKDEIFNDDEYEKGEITNDMIMKITSLLVPRPQTRSRYDVPFHGDDHSVIKIPANNPDEVAFNFIAIVDPVSRGAQKLGSILKTLQQALNCNIKVFLNCLDKNSDMPLKSFYRFVLEPELQFTAEGDISGSIAKFTKLPTSSLLTQYIHAPENWLVEVVRSVYDLDNIKLDNVAMGVHSEFELEYLLLEGHCFEAIVGNPPRGLQFTLGTEKRPVMVDTIVMANLGYFQLKANPGEWMLRLRQGRSAEIYDFTSVEGQDVIQNGNDVKVLISSLRSHVLKVKVSKKPDKVGVDLLSDDEKDAGLWNSISRTFTSDEGEDQDEKLNIFSLASGHLYERFLKIMMLSVIKHTKSPVKFWFLKNYLSPTLKDFLPHMAKEYGFEYELVQYKWPRWLHQQTEKQRTIWGYKILFLDVLFPLNLKKIIFVDADQVVRADLKELATMDLRGAPYAYTPFCDSRTEMDGFRFWKQGYWRNHLQGRAYHISALYVVDLKRFRRIAAGDRLRGQYQALSQDPNSLSNLDQDLPNNMIHQVAIKTLPQEWLWCETWCDDASKKYAKTIDLCNNPMTKEAKLQAAMRILPEWVGYDEEIKALQQKVENANRQTEKESETVDDVSKHEEL

SEQ ID NO: 4534 - protein, 1533 aa, Tuber borchii
MRLPNFGGRLSVGLLLLSPCVRLVSCGPAVNVALKASWNGAPFLLELLETAAEEVGASYFPLLDRIAAGDFADIGSDKALYDAFLRVAREEGFLVGQEELASFNFALSIHAAAPRIEAHYHYYVNSLEPIMGRLYDATCGVWLQWSHKQVCDTGGDFEDMLNSWERYRNDRRRLQFDRVLETQEDKPAAILYADIEAPNFKRFHQVLRDYAKQGILTYRVRYKPQTHRKGRPVILSGYGVELALKKTDYIAMDDRDVSGEGDLKKGKDTQTPIKELDDQEIQDIKPLHPEDMSLLGMKAASFVMDSEDPLTTLLKLLQDFPKHASSVAAVGINPDVTDVLQGNWDSFLGPGQNALWINGVQLENSDTNAFALLEHLRRERRFVNSFKTLGVNSSEAIQLLSHQVLANSKRDEVPQRFDYRDNIEGGKAIVWLNDLEKDSRYREWSAAVNTLLRRVYPGQLHPLRRNVHHLVVPVNLASKDDLALVTEQLRLFVDRKIALRFGVVPLAGTPEAVAQAKVFYYLNEAYGLPVALGYLELALGSGQSLKPDAKVLEQAIKEAELIEGRTALPLEEVLSSEAIGEHIKASKSWAGRMGANSLIPPVFINGLSLAKDEQWMQIMSARLQADVQFTQRAVYEEIANDETDFVALLLGNAATHRNAYIFPEGEESVKTINVGRLLQEYAGVFEKLPTIFSDKPDKLVESTIWVIGDFDEKDGYELLQGASELQKLAPGVNLVFINNPQLVSEKPALSTLLHQLHQVGFFKGPEQLQQLLEEVSPFKEHVDIPKVETLLQMQIPDVKPASWQFPNHIESGNFWKESQKMLKAAGFKPGQRGVIINGRVVGPVPVDEEFGAEDFRQLLEYEHSRRILPALEAANEIGVLEKLKGPQSSACLTNLIALSSIPEVPTSMFQGPSLARTDAFDKLWKQEHVAIESGDKDKATFQVVASIDPASELAQKWVPILKVLSEMRGVYIKIYLNPQKMIAELPVKRFYRHVLNSAPVFDENGNLIDPQARFENIPELPLLSLSMDVPPSWLVTPKESPYDLDNLKIQSLKDRLKGGDIEALYELRSILIEGHSTDIINGGPPKGVQLVLGTEKEPHFADTIVMANLGYFQFKANPGHYRMELKEGRSKEIFHIDSTGTKGIQRGNHEAAGEDSEIALLSFQGATLFPRLSRNPGMEVEDVLEQSTSVPKNVGDFATRLLRKVEDVLVNVGFLAPAADLKPQAEINIFSVASGHLYERFLNIMMLSVMKHTDKSVKFWFIENFLSPSFKDFIPTMAEEYGFEYELVTYKWPHWLRGQKEKQREIWGYKILFLDVLFPLDLDKVIFVDADQIVRTDMKELVDLDLQGAPYGFTPMCDSREEIEGFRFWKQGYWKNFLRGLPYHISALYVVDLKRFRQIAAGDRLRQQYHQLSADPNSLSNLDQDLPNHMQSMLPIHSLPQEWLWCETWCSDESLKTAKTIDLCNNPMTKEPKLDRARRQVPEWTAYDEEIAALARRNLKKEGEESETTKQLEKGETVEALKESEEPTIKQEL

SEQ ID NO: 4535 - protein, 1554 aa, Botryobasidium botryosum
MKVHSEISLACLFLPLVLGASPPVKVQLRSSWPAPELLLEIIESAAAERAQSFFPVFDLLTAPPSFTKKHAKRTQQEIFSTALETLDSLGYLSDPTDLASFHLSLSLHSATPKIEAFYQYYNDVANSSSVEWLGDKLDCISWVDWHGKRVCDLAALKELYEDPASQPKLLSFDHVLPDPSKYIQAPLPTAILYVSFESISFRVLHKYLYDLSNRPEPRVQYIIRYVPPQKPSPDPRRNTLSGYGVIMDLKKMDYLALDDRRGGAPGESTADKSEAHAAAEDPVQAILEKLPELDTNSSALPADEFIDIGLKATQLIVNSSDPLATLQDLSQSFPKYASTIVRRVEVHENVSQEISQKNTQVQAGMNAIWLNGRVIPTEDLNPFGLMRTLRKERQIMTSLTGLGLTPSQAVDVITNEAIADALSKPSILDERFDASDRPEGGKALVWWNDIEADSRYERWPTALTGLMQQLFPGQFHRVRRNLNNIVMVVDLTSGSVLDILNGPITNIIGRALPFRFGVVPAVETESGIKAARLFYYLIENYGPETTLGFFSAFATAEHTPLDFDQAKAAFEKLVEGEAPRVEEASKDFDAIVSGLYEDRIEAARSYSERLGASLAASAGGHAFVNGKHLDVDENFFRGLQSETNTVTNYLQEQIYYGKLSDSEDGPVDMATYFYDMPTTSTRRNKHIYPSGGPNGLQIHNLQELFASSNVIVKTKITSKSFVYSRPDDLSQQVPLSIWVVGDLNAPSTLSLLKEALKAILTLVSASELLAFIERIEADPVAALSPDNGSGSQSHLTAESRLLEIVNAHTFERLDHVAYDGYCHATKLMAHLLKLNKNENSLIINGRIVGPIKPNEMISADISALAAYELRKRVAPVVEALQPIFSNTERNTFAHIVSTASSIINSASLGSADQKVVARKRQYLSFTRDYTSFEIGEKPYALFQIAALIDPVSESAQKWAPLLKWLSSIEEEVHVHVTLNPAMGHTELPLKRFYQYNLRPQLTFDMKGREQDTFVKFKGLPIDPIYTLGMDTHPAWLVRPFESEHDLDNIHLSSLTASEIKSGVKAIFDLDYIILEGHAREGETPNPPRGVQLQLTTSDSTPVADTLIVANLGYFQFKATPGVYQLSIREGRGREVWEMQSVGNNGYHSPSIKETGSGVSLTDFEGVTIYPRLVKRPGMGSADVLDTEPPIVHQGVLGSLFSNIVTRFGSFVNPKKEQGLAQRQADINIFTVASGLLYERFASIMILSVMRNTNSTVKFWFIENFLSPSFLEFIPHLAKAYNFEYELVTYKWPSWLRGQKEKQRVIWGYKILFLDVLFPMDLKKVIFVDADQIVRTDLKELVALDLHGAPYGYTPMGDDNTDMEGFRFWKTGYWKDYLRGKPYHISALYVIDLVRFRELAAGDRLRSQYQMLSSDPNSLANLDQDLPNHLQHEVPIYSLDKSWLWCETWCTKDRLDQAKTIDLCQNPLTKEPKLSRARQIPEWEEYDSEIARFARQLADDGKIKSRAIAADSDVLATVGNTRQNDSPESDIGPEASQGEIVEDKVDGDGHSHDEL

SEQ ID NO: 4536 - protein, 1597 aa, Sparassis crispa
MKAPLSFASLITLLFVYKSYALNPPVKVELRSSWPAPPVLLECIEAIATENDEAFFPLLDTLTNPEVPIPSPHTPEVVHRSAFEAAISEGFLSRPGEYASVQMDLALHTATPKIEAVYQYYTDRHAARTASVHNDDCGSWVDWYGQVACDVQTLVHLAGVETIDPAVPSTVNASFPRPKLLPFDHVQPSPARVLARPPRTAIFYASLSSSNFRELHSYLYATSSAPNPHIEYVFRAIPPENRDLSLRTYLSGYGVALDLKKMDYLALDDRRQGSSGQTAESDGAVESISDVDSVMVLVQQYPANTDVNASTPLTDDELLNIGLQATQLIYDADEPLPALKQLSQNFPKYAAPLARRITVDPALLDEVEENQVKVPGGANIAWLNGVNIGEKDMNPFALLRLLRKERGTMLSLTSLGLSPEQAIRLLTHPSISAAQSEPDAVSELFDASDRPEEGGVIVWWNDLEKDSRYARWSRSLRILLRPMYPGQFPNVKANLFNVVLAVDLSQSSSLHFISTSVSNIISRSFPARFGIVPIVETEEGARMARLFYYLIENFGRAKTMSFLKSLSQIDIPIQRLTPTVNWGLVRSEFGNLLTESKQPGEGVITNLDTILHGGTESPGFGLDKARAYAARLGVTLTSASQGHAFVNGKHLVLNDDFLRQLQLELGQQLQYLQEQIATGHLRDNDIETISTYFYDLPTTAKRRNTYIHTGKSGMNMINLPDLLSRVKYPSGSFVYPSDLEQIPLSAYIVADFDTDGGRTLMKEALISTKVGSASRVSFIHNPATPWSASTRRPPTSSLLAHLITKDTLHRVSPSRLLKVLGLSEPSVPIHSPQVVISPEGSLDDILGGTLLEDAGQETYEDFVQASRLLVRELGLAAGEQAVIVNGRVVGPLLPGGFVAEDFETLMTYELRKRVEPVVEALENIFGSLESFDRGSYAEMVALTSSVVSAIQVPDPSEVGLFNAPYKPRKLSYQLLSGKYTSFMFGENSTALFHFGIVVDPLSESAQKWSSLIEWLLNIPEVFVELHINPARYRELPLRRFYRYNLQPRLLYDDNGEEIRAETEFSGLAVEPIYTLAMDVPQSWLVRPREALHDLDNIQLSTLSARDRAHGVHAIFELDYLVIEGHARDVLTSAPPRGVQLQLATSQGVPIADTLVVANLGYLQFRTKPGVFKLEIRPGRGREIFKMESVGNEGWDSPHVDVDGDEITLTNFEGLTLYPRLARLPGMDRADVLAEAPPKAPTAKEVLEDIVSWVSSLFSSSKGSENNTLSSPSDQADINIFTVASGLLYERFVSIMVLSVLRNTNSTVKFWFIENFLSPSFLEFIPHLAEAYGFKYELVTYKWPSWLRAQKEKQRIIWAYKILFLDVLFPMDLKKVIFVDADQIVRADLKELVDLDLHGAPYGYTPMGDDNEEMEGFRFWKTGYWKEFLRGLPYHISALYVVDLVRFRQIAAGDILRGHYQQLSADPNSLANLDQDLPNNLQREVPIFSLPEDWLWCETWCSKDRLNRAKTIDLCQNPLTKEPKLARARHIPEWEEYDSEIARFARRLAEEGCIRSEIVAADSNVLADAGAEHRTHGTAVDKQSEGVEGKAEYVRDEL

SEQ ID NO: 4537 - protein, 845 aa, Caenorhabditis nigoni
MKIPPTYGNEFLSKTGLGNGPQALLNGYPLDLTSSSESLDVVLFENIQKQTLRLQFALYQRLITDSVKIDEFWLKEETNPDLKIRVNIRIVKAFNEKRFVNSDSDFSENSENSENPTLTIIANFENSKNRLSIAKWLKSLNLSLKIALISNPTTSSDSEESSCPSDSEDLESAILRLENQDSCIGARKFSNFLRKNEIPAGEMTVIFNGLVIGPFEENEKEEFLEIEDFEFLENLWEERGAKKTSAFLSQHFPNQYDVTIRFFSILSKIYQKDVPRIAFDNFKDPENRNLIIFPPKNPESPFSTITWILNPVSREAQHLVSIVKLMSNVLNAKVEIIFNPPNELHEMPIKRFYRFVASEFLEFDENGKIKDQSAIFSNLPQKQLSTMSVETNDGWMIEVKKADDDLDNILLENTSGDVESEFSLEHILVEGQSQKSGTGDASNGLELELKSENTKYDTIVMRNLGYFQLKAEPGIWNLRIRNGTSSENFRIQKVDSKEVHGEITVVVDSFTRKWTQLVVKEIEDKKEQKEGSAMGRLMEKAKNFFSTPPPSETINVFSLASGHLYERFMRIMIASVMKNTQSRKVKFWLLKNYLSPKFKESIPILADFYGFEYELVEYKWPKWLHQQTEKQRVMWGYKILFLDVLFPLNVDKIIFVDADQVVRADLLELMDFDLKGAPYGYVPFCESRKEMDGFRFWKTGYWNTHLMGRRYHISALYVVDLKAFRKFAAGDRLRGRYDNLSADPNSLSNLDQDLPNNMIHEVPIKSLPQDWLWCETWCDDRSKKTAKTIDLCNNPLTKEPKLSSAQRIIGEWKTLDKEISNVIEKRIRKNSEEEREETEESREEL

SEQ ID NO: 4538 - protein, 1617 aa, Cajanus cajan
MAMGFRSPSPLLIFIFILILAAIAPTFSRPPSPKNVQTALRAKWSATPLLLEAGELLSKEDQRLFWNFIHVWLNADHHAAQSHSAKSCVNRILEHSRPLLREPLASLFEFSLILRSASPALVLYRQLAHDSLTRSSNAQITELDPLRAGESLKSPGGKCCWVDTGHNLFFEVSELLSWLETDDKLVAGSIQRPQLFDFDHVHFDSSVGSPVAVLYGALGTSCFKEFHAALVGAAKQGKVNYVLRPVLPAGCETDFGHCGSVGASGSVNLGGYGVELAFKNMEYKAMDDTTIKKGVTLEDPRTEDLSQEVRGFIFSKILERKPELTSDIMTFRDYLLSSTVSDTLDVWELKDLGHQTVQRIVRASDPLQSMHDINQNFPNIVSSLSRMKLDDSVRDEIMANQRMIPPGKSLMAINGALVNVEDIDLYLLIDLVHQDLLLADQFSKMKIPPSTVRKLLSTSPPSESSMFRVDFRATRVHYLNNLEEDAKYKRWRSNLNEILMPVFPGQLRHIRKNLFHAVFVLDPATICGLESIDLITSLYENDFPVRFGIMLYSSKYITQLDNHSAKEEGDNFEEDISDMIIRLFSYIQENHGIQLAFEFLSNVNKLRVESDEHVEDAHLEMHHVEEAFVETILPKVKSPPQETLIKLKAEPEWKELSQESSMLVFKLGLSKIHCSLLMNGLVIDPTEDALLNALNDETQRIQEQVYFGQIKSHTDVLAKFLSEAGIQRYNPRIISDNKPRFISLSTFIFGEASILKDIDYLHSPGTMDDLKPVTHLLAVDITSGSGLKLLRQGLNYLREGSKDARIGLLFSANQSTDSFSLLFVKVFEITSSSYSHKKNVLDFLDQLCSLYQQKYFHKSAVEVDSTQAFIDKVCELAEANGLPSEGYRSALPEFSTGEVRRHLSKVGNFLHRVIGSESGVNAVFTNGRVTYPIDESTFLSADLLLLESIEFKQRTKHILEIIEEVNWQDVDPDMLTSKFISDIVMAISSSMAMRERSSESARFEILNDQHSAIILHNENSSIHIDACLDPLSPTSQKLSGILRVLWKYIQPSMRIVLNPLSSLADLPLKNYYRYVVPSMDDFSSADSSINGPKAFFANMPLSKTLTMNLDVPEPWLVEPVIAIHDLDNILLENLGDTRTLQSVFELEALVLTGHCSEKDHDPPRGLQLILGTKTTPHLVDTIVMANLGYWQMKVSPGVWFLQLAPGRSSELYILKEGADGIQNKESSKLITINDLRGKVVHMDVVKRKGKEHEKLLISDDDEEDPQDTKKGSSWNSNILKWASGFISSNEQPKNAESNSLEKERGGRHGKTINIFSIASGHLYERFLKIMILSVLKNTHRPVKFWFIKNYLSPPFKDLIPHMAQEYGFECELITYKWPTWLHKQKEKQRIIWAYKILFLDVIFPLSLEKVIFVDADQIVRADMGELYDMDIKGKPLAYTPFCDNNKEMDGYRFWRQGFWKDHLRGKPYHISALYVVDLKKFRETASGDNLRVFYETLSKDPNSLSNLDQDLPNYAQHIVPIFSLPQEWLWCESWCGNATKLKAKTIDLCNNPMTKEPKLQGARRIVSEWPDLDLEASRFTSRILGDDVVEPMQTPNQSKDLASEDSLKEDLESKAEL

SEQ ID NO: 4539 - protein, 1693 aa, Rhodotorula toruloides
MWLSGLQSLLLAGLAASAAAHRSPPVAARVEAWPAPDLVTQFLETIALEAPNEFFHFLSFLSSNPHSHHFLRAGTLLPPSLRAANNLAKQGVNPIFAPEGTLQLNETYALLDAAAGRSLLFRSKGLRESLQTSLANREASVIIEGMRGLWEEREAVVPVREGSDSQGEEACESWIDVAGARACSEEEFWEIVGNEEKGGKKPIKLPSSTNSTRPQRYSFDHVSPHGDESHLPRFVFWANPTSPSFQRLFTFLHSLSAPKAIPVSNPKSLTSQSPPAAHAAPHPPRLQFVVRWKPSSAAHRAQKKLVMSGYGAALDIKKSDYLAIDDRVTGQSTAGGKDADGEVSKEPVLEIEGDLPPKMEPVKKGDVAELAIRTAQFILASDQPFKAFVDLTSAFPRLASHLPTLVPDPDPHLISEVSTNQMSSVLTTRSSFFLNGVPLTEAEVDPFAFLRLMRKERKHIVDLLSLSIHMTGKEARDILIGGSPRSPSSSRDRIGVDALGELYDSTDRDEGGQVILWWNDLEKDRRYKSWSKSVRELLRPVYPGSMNLVARNLNNVVFVLDLTRPGALSLVVEHIKQFVGRGIPVRFGVVPVVGASSEDNSLQTLMAQVIWYLTDALGRAPTMQFLATLLKASPESTISEDLLKRAYLQLAATASHVDGGPLARFSELRHYGIGRRAGGSHSRLTKTREYLKRLGVPLAAAAETKKSLGAFFMNGAYFPIDDDFTQNLQRTLGLHTQYLAQEVYLRSLTDDMDASSFFADLPTTYKRRNPYISPSPETNPLKIVNLVEALDGVHRGWLHSFYIEGTSGLTNETTGLDIEDPPAVATIYVITDLNDPAGADLAVAALKLAEKTTQVRISFVHNPADPFAELHPWTLSRTLFALQKDHQLAEILPDELTEYIDLNLDKGGPAKGDGHDWPEDNPLRAILADGVKDKSGGDADLFWDEVQWFRYKLGFKEGESGIVINGRVIGPLPAGSFGAADFKTLLAYEMEKRIKPVVSAIDLTAVLKKNFDRLKRSHIYNVATSIVGAAHLPDPAAGIFGNGPVERRRDYLGLAANHSAIVGARETGALFEVAVVIDPATELAQRWAPIVETLSQLNSTHVRLYLNPSLHVTEVPIKRFYQYTFNSTLTFDDTTGQEVQPAIRFNDIPEDVLLTFGIDAQQSWLAFPKHSVHDLDNIRLADLPAWSKSSGVEAVLELESLLVEGHARDMPSSRPPRGLQLELRRGGHNASEQQQRVDTTVMANLGYLQFKASPGAWQLGIRAGRSSEVFELESIGADGWKSGTVNKTGTTFVVSTLEGLTLYPRFTRKPGHELTELLDESADVVASARTAAAGLFERVKSMIPFLAPKAGQELVSTGKKAEINVFTVASGLLYERMALLMVVSVLRHTKSSVKFWFIQNFLSPSFKAFIPHMAREFGFDYELVTYKWPHWLRAQKEKQRTIWGYKILFLDVLFPLELDRVIFVDSDQIVRADLKELVDLDLHGAPYAFAPMGDDRAEMEGFRFWKTGYWKNHLKGNPYHISALYVVDLDRFRQIAAGDRLRQQYQALSADPHSLANLDQDLPNNMQGTIPIYTLGREWLWCETWCSDESLAQAKTIDLCNNPLTHEPKLQRAKRLIPEWLEYDAEVSAFAQRVAAGQEGGETAASVFRNRADELEQAVQQAKEREEFVEEQQQARSGSGEGDLREQRVKDEL

SEQ ID NO: 4540 - protein, 1529 aa, Xenopus tropicalis
MMETAMILLGLCLCISSVSADSKAVTTSLTAKWASTPLLLEASEFLAEEAPDKFWAFVDEVQQVKDQGSDSINYELMVNKASRQLTPQQENLLKFALSLRTYSATVQTFQQMAADEPPPAGCTSFIVVHGAKTCVLENLPSLLKTASQRPKPFLFKGDHRYPYGAPESPVVILYAEIGSKDFARFHQLLSLKAQEDGINYILRHFVSNPRSEKVFLSGYGVELSMKSTEYKAKDDTQVKGNDVNATVVGDNDPVDEVQGFLFGKLRQLYPELKEQLKELRKHLIDSTNEMAPLKVWELQDLSYQSAAHILSAPPAEALMVMKDLSQNFPTKARALTRTVVDSALRKEVEENQKYFKSNLGVHPGDSALFINGLHVDLDSQDIFSLFDTLRNEARVMEGLFRLGIDGTALQNVLKLNIQPSTADYAVDIRHPAITWVNNLEMDSRYNSWPSTLQELLRPTFPGVIRQIRRNFHNFVIIFDPVHDSTSELINLAEMFLSNHIPVRVGLVFVVDDSEDVDGFQDAGVALLRAFNYVSDEVNEYHAFQTIVSIYNKVPAGKRLTVKHVTAVLEQRYPYIELSSILGKDSAYDQSRKEGKEYFLQTGLSPLPVVLFNGIPFSKEQLQPDELETATMQKIMETTTFFQKAVYLGELTNDQDVVDHIMNQPNVVPRINLRILEAERRYLDLTTLNNYFIDDYKRFSSLNSNSKSAAIVNSMTYLTKKGMSSREIYDDSFVRPVTFWIVGDFDQPSGRQLLYDAIKHQKSSNNVRIGILSNPSQDPSAESTRIARAIWAALQTQNSNNAKNFITKIVKEENARQIEAGKDPVEFAVGGMDTSLFREMFESPKVDFILSHTLYCREVLKLKKGERAIISNGRIIGPLRDDEIFNQDDFHLLENLVLKTSAQNIKSHIKLLQVEEDHASDLVMKVDSLLSSQPKGEGRVNYQIPEDAHSAIKLRPTEGMIYFDVVAVVDPVTKAAQRLAPLLLVLKQVLNMNLRVFMNCQSKLSEMPLKSFYRYVLEPEVMFTSQKNIAPGPIAKFLDMPQSPLFTLSLDTPDSWMVESVRTPYDLDNIYLEEVDSVVAAEFELEYLLLEGHCFDVSTGQPPRGLQFTLGTSTNPVVVDTIVMANLGYFQLKANPGAWMLRLRKGRSEDIYTIYSHEGTDSDPEASDVVVVLHDFKSKIIKVKVQKKPDKMNEDLLSDGNSENESGFWDSITWGLAGSQKQDDVKAEKEDVLNIFSVASGHLYERFLRIMMLSVLKNTQTPVKFWFLKNYLSPTFKNFIPYMAKKYNFQYELVQYKWPRWLHQQTEKQRIIWGYKILFLDVLFPLAVDKFIFVDADQIVRTDLKELREFNLDGAPYGYTPFCESRREMDGYRFWKSGYWASHLAGRKYHISALYVVDLKKFRKIAAGDRLRGQYQGLSQDPNSLSNLDQDLPNNMIHQVPIKSLPQEWLWCETWCDDTSKKKAKTIDLCNNPMTKEPKLQAAVRIVPEWQEYDQEIKKLYSHFQDESSNGSLHQPDTSTKPDKENHMEL

SEQ ID NO: 4541 - protein, 472 aa, Porphyra umbilicalis
MGNLGYFQLKAAAPGAWRLSLAPAGGGGNTSAYAITSIEGAGAGVGTVTADGDVAVVVDSLDGARGTLLRVRHRAEAGGDAAAVGDGGGGGGGVRDKLSSLFRRGAPSPTASATAAAGASVDGAADGAPAHDPRIHVFSVASGHLYERLLKIMMLSVVRHAGAPVKFWLLQNTLSPAFKALLPGFAAAHGFEVGLVTFRWPTWLRAQTDAQRTIWAYKILFLDVLFPLTLRRVIFVDSDQVVRADLAELMALPLDGAPYGYVPFCESRRDVDGFRFWKGGYWAGILAGRPYHISALYVVDLDVFRSTRAGDTLRAVYQSLSADPASLSNLDQDLPNYAAVTPGGGAPGGHPLVRIFSLPQEWLWCDSWCDQASKPAAKTIDLCNNPLTKVPKLVAAKTIIPEWEEYDRMAAATTAEVYARLAQAVASGGGGLGGEGGVPPPPPDEPLAVPEPAVADGGAAAGVGDGVSRDEL

SEQ ID NO: 4542 - protein, 1530 aa, Blattella germanica
MKFVVLGLLVHLLCSGAGGASKQKTKSVTTLIEAKWEVTPLVLEISEYLADENAEYLWEYVDAISALKPSLADLESDRYRYEQAVDVAGLLITPAQTSVLKLALSLHIYSPKVEMYSQMALERGLSALSCPVAADVGGKLTCCTEEMKKLISQKLGDDSSRVETFGLDHHYPGSQNNSLTVILYGEMGTPEFAEFHQILKTYAVKGDIDYVLRHYIKERPNKRVRLSGYGVELQIKSTEYKVQDDTQVKGDKAEDSNEQDDEDDEIEGFNFSRLKQLYPDMKDNLDKLRLHLLESSNEMAPLKVWQVQELSLQAAERIMSSPKEEALKVLTNIAQNFPLQARSLVRTIVKDELKQEIKRNQELFASSLNLQPTDTALFVNGMFFDLDVVDVISLLEVVRQELRVMEGLHKIGISDSYMSSLLALDFSSGSSSSSTPEYAIDIRDSAVMWVNDIEHDKQYRRWSESLMELLRPTFPGMLRSVRRNLYNLVILANPARKEAKPLLKLAESFYVHTAPLRIGLVFAVNPDQSVSGQEDAGVALLNAFNYVSDVKDAYHGLSFITDVYATIKDDRDVTVEDVTSLLRTKYRSADIDEIFGEDSEYETGRRLARDFVERSGFRRMPQALLNGIPLTEKHLNAEDFEEAVLSEIMNQTPLYQKAVYKGEFTEGDNALDFIMNQPNVMPRLNDRILNQDKNQYLDVTGTPLAEEIPLTLKAFSSLSPRDKTATIIDRGVEYYMKKHADQTPHIITHWIRSSGSIRVGVLLNPSDGQFGVVDKLVLAAPKVLQPNHAREYINAILSDDSLVEAINSGKKAAEDVSVPNVDPSGLSEAIKKDMSELLKGQQLYSQQVLNIPAGGKAIVTNGRILGPLEENEKFTLDDFSLLERYSMNSYGDKILQTIKKNNANDEDDDSDALQNSNVMMQAVSLLVSRPQSRSRFEIPVHTDIHSVVKIPPHNTSEPAFDLAVIVDPVSRGAQRVGPILSVLQEVLNCHIKVYLNCVEKNSDMPLKSFYRFVLEPEVHFTSDGRQTSGPMARFANMPTSPLLTQNMQVPENWLVESVRSPYDLDNIRLEDVESVVHSEFELEYLLLEGHCFEATMGNPPRGLQITLGTETQPVVVDTIVMANLGYFQLKANPGAWLLRLRQGRSAEIFDIVSHDGSDTPANSSDIKVLISSFRSHVLKLKVAKKPDKMHMDLLSDDNDPNSGLWNSITSTFGGSKPSEEDGDERLNIFSLASGHLYERFLRIMMLSVLKNTKTPVKFWFLKNYLSPTFKDFLPHMAKEYGFEYELVQYKWPRWLHQQTEKQRIIWGYKILFLDVLFPLDVKKIIFVDADQRIYDELYASQVVRADMKELRDYDLGGAPYGYTPFCDSRTEMDGFRFWKQGYWRNHLQGRRYHISALYVVDLRRFRRIAAGDRLRGQYQALSQDPNSLSNLDQDLPNNMIHQVAIKSLPQEWLWCETWCDDSSKQYAKTIDLCNNPLTKEAKLTAAMRIVSEWKSYDIEIKRLQTRIDGNKTEGILDSKPDISSSRKAGE

SEQ ID NO: 4543 - protein, 1548 aa, Baudoinia panamericana
MGERNSRAVFAGIFCLFLSAIAVPSVNVGLQAAFDAPPLLVELLETAAEENATAYFPLLDRIAEGYFHTARTDKELYTIFRTLLEEDGHLSKADDLSSFDFALSIHSTAPRIAAHYHYYDTAVKPSLGPDEDEGCETWAYAAFNGQKFCSPDMAESGAQVPGLPSEHLHQLPFDRVLGAADSNRPSVLYADVLSESFRAFHRTMSKTAADGKTSYRVRYKPSRSLVSTPLTVNGYGVELALKRTDYIVIDDRQADGEPKPATAAAADATLSEEDVSDLRPLSSSELLRLGLKASSFVMASDAQLDTLLRLTQDFPKHSSAIALFNVSDDFMKEHRDNRDLLLPAGFNVLWINGVQIMARDLDAFSLLEHLRRERKMINGVRELGLSGAEAIELLSHEAITASAVNQEVQRYDWRDESEGGNVIMWLNDIEKDKRYADWSGSIMALLQRTYPGQLPAVKRDIHNLVVPIDFSSHADVMTVVENLQGFVQRKVPIRFGLVPHLKTPTSTDQTKIVYYLIETYGLSAALDYLAKSVSTAGRKFGPPQEKLFTQTTEGRKVRQDRSILAFADVLASTEFDERLKGAQAYIKRLGAGQASPPILINGAPIPHTDEWLQTMSQRLGLDARTVQQAVYEGTVNEDSYLPHVFLSQASLRRNPIVTPEDDKDVRHVSLGELPQMAGLPSLPASESTIERELVHVTVAADFSSLEGMQQLMEALLFKDLHDNVELAFLHLPGDGSAHPTSNAEAETEDVIGHVQSLQQTYEASMQRPKGEEAEVPDYDGRQAIYKLLYRTLRDQSSAHSSLRASAASRKLAQAVNILPGQHALLINGRVVGPMPASTILELDDLEAVMAYERKKRLLPAALAIEGLGLQAKASTPSAFARISNLIALSQVSSLPEGIFEAAPTVRSGAFKAWNSSYTAIKVGDVEAANVQITASIDPASEVGQRWLPIIKTLSELDGTATTLYLNPRERLEEIPIKRFYRHVLQSKPTFDADGALEGLTARFGGLPADALLNMGMDLPPSWLVAPKDSIHDLDNIKLSAIKSGADIEATYELEHILIEGHSRDVTLGPPPRGAQLVLGTERDPHFADTIIMANLGYFQFKANPGVYNLTLQEGRSQEIFHIDSAGTLGYEPQPGDNTTEIALMSFRGSTLFPRLARQPGMEDEDVLEAPKTALDNFTEGAETLLAQVGLSSSQTRKYLSKAARWGVALISGKGKPTDVSAEAHADINIFSVASGHLYERMLNIMMVSVMKHTNHTVKFWFIEQFLSPSFKSFVPSLAKEYGFKYEMVTYKWPHWLRGQKEKQREIWGYKILFLDVLFPLDLDKVIFVDADQIVRTDMYELVQHDLHGAPYGFTPMCDSRTEMEGFRFWKQGYWKNFLRGLPYHISALYVVDLKKFRQIAAGDRLRQQYHQLSADPASLSNLDQDLPNHMQMVLPIHSLPQDWLWCETWCSDEALKTAKTIDLCNNPMTKEPKLDRARRQVPEWTVYDDEIAAVAKRYKESQAAGRPVAGSAGDAGVQGEEEESIQERLQREDAEKERKKQEHVKDEL

SEQ ID NO: 4544 - protein, 1751 aa, Chlamydomonas eustigma
MIILSVLLFSISTLYTQAQQKGVSVSLRARWNGTPYVSETAEFLADEDPSLLWKYLEVFGSAHEPSDMEQCWSHIMSHASALVPQGVAQVLPLVVASRQYTARLEMFQQLRKQAHPDDVSCCLVDVEGRAAHSAHEVQELITAALVTGATFNGTISLVEGDHVHPSSAEGSTAPSITAVLYGPLGAACTSELHSELRKVTGLKYAFRPVLVGECEVGACMRLGSEERTALPGFGVEAVLKNMEYSALDDKKTSSTIDESGAVTEEVVSGTVKGFDFDTLVSRNPHLKQELASLKDHLLSSDDEEAVKVWDLADLGLQATQRIMAASDPLSVLAEISQNFPALVSSLSRQKVNESLRSAVAFNQQILSPGTNYMLINGITFDINTLDFFGLLDRLRQEARLQRSLSSVLGLPSKAVQQLLAMRADASGDGGLSDARLELGKMTPHVIFQNNLEKDFMYTSRFSPSLMDLLQTFPGRLRPLARNVFTLVLIADPTDPATLQLSKILYKMYSDYYPVRFGLALSVPSVIQRLESQRRTGSSVHAPAWNNMISSEQVSRALLTMRTAFGGQAAFSLLATIANAVGLEWGAMDSLVRGSFISNWEQAAKTATGAKARLAAKKTGEEAWEGVITGSGYASEVGMELSDSTQWLMSKGLTRSSHPIAWLNGVLIPCPEVTPATEQELMYKILMEQQKLQEAIYFGRLVDEEDVLEQVMEEHTTVTRYNPNIMGAADAEGGEGVVQQIISLSEVLRHPARPHLPGLSFYHQPAKTVVGSPPRINAVTYYVASDLSTAEGRSLAIQALRYMSEMPSSSKTARVIIIPNPVDPLAPPSLLELLILSASDIRYEPRQEVASFLYKLIKDQTLNEVLSSAAQAPNPAQTEAMKAKAVEAHMDAESYIAALEKRLKPDAGAVQLREELSSLCRSALKLQPGDSAVVANGRLMLIHSPSTGRTEEFVAEDFQLLQLLMGKYMMGTALASEVQKLVSEATAAGTSLYNGGSTEAQSNVMDDIVAVTASEFLSGNNGDNKISPGASKQLMQVTGRLKGKAVELSSSSYNEETGETTQDEGGSSPHITVILNPLTRSAQRISQVLQLIRATLGCSVALYLNPQRDLTDLPLKAFYRYALPEFEGHPSNTQPAPPVATLMKLPQKRVLTINMDVPEPWLVEPVKAPFDLDNLRLADSTTRTALVEYDLEAIMLTGSCIDVTQGRGTPPRGLQLHLGSPFQPHIVDTLVMSNLAYFQLKTSPGRWLLSLAPGRTRQLYTLDKDKAVGSDLAVSKRSTDVASAVDDVDDDQDGDDKAISSQIIISSLSGKHILFKVHKRPGMEKEDVLLADKEEAETAASEYDEDEGIWDMMFGGGKRKKKKNKETKQQAALTAAGDKQLSGEMPGAITSGSQQQGQQVALRGGEVINVFTVASGHMYERLQKIMFLSVVKNTKSRVKFWIIKNYMSPQHKATLPELAKNFGFEYEFVTYKWPHWLHKQTDKQRIIWAYKILFLDVLFPLNVERVIFVDSDQVIRTDLAELYHMDIKGAPYAYTPFCDNNKEMDEFRFWKGGFWKDHLQGKPYHISALYLVDLKRFRALAAGDNLRIVYDQLSKDPNSLANLDQDLPNYAQHSIPIFSLPQEWLWCESWCGNETKHKAKTIDLCNNPKTKEPKLSAARRILPEWEGLDHDQATATTRAEELLLINPGSCAAGMCNGFAEGGPADDNAAAEVGFAANSNRARTERGPDVYETKAEKEGKEQQPVLNGDHEEL

SEQ ID NO: 4545 - protein, 1605 aa, Panaeolus cyanescens
MNRALLLLGAVISVLQAAASPPVEVALRSSWSAPPLLAEILETVALENPSVFFEYLDQLTNPEVIPTLVGLSPEATHQAALQVAIDNFLLHEPSALSLVQLNLGLHAATPKLEAYYNYYNEHHQNSAGTSCGSWVDWYGTVICDVEALAALVKTEAIDAPNSSIPTRPQLLTFDHIFPPPDRILERPPRTAILYGSLTSPNFRELYVYLLKLTNTLDPHVEFVFRHIPPSQPSVTRNYLSGYGVALDLKKMDYLALDDRNSNVGSSSNTGSTATDSDIGKEKADLVLPLILSHPENASAPDASVPISEDERRVIGSRSMQIVLDSEDQLNTLIQLSQNFPKYATQLARRVALNESVAEEIKANSIIVPQGHNFFWLNGAPIDAKDVSPFGLIKAFKKERSIMSSLTNGDQITRQQAFELMTDPAVEVAHKTNAVAEAIFDASDRPEGGDIIFWWNDMEKDSRYSRWPESLYTLLRSMYPGQLPLVRRNLFNCILILDLSDRGALNFVANPMANVIERDFPLRFGLVPTPETENGAKMAKLFHYLTTEFGKKPTLSFIQSLSRAVVPDPMQRNVEWSAVSDLYDQLVNARKEQKPDFVPVSLEDIFKGKLERSAPIEKMNDYVERLGAVLGPTAPMGHAFFNGKHLPFDDDFLRNLQSELSAQTQFLAGKVYEMELTDENAGETMSNYFYDLPTTSKRRNKYIFPTGSTAAVNRIANIPEIFNQLKMESSSWTYVYPTKKNAISQSLLIIADLDSDHGLSLIKNALLSLDENSRTRVSFIHNPSTLPVVNSDDRPTASWLLAHLYMRGQLSKASPSTLLSALGLADSATKFEQDGAQAPLSVDNAVKALTGGQGIAGIAKEEYHDFVRNGRLLARRLKVAPGESVLSVNGRIVGPIGSDGFQSADFKALEEFEWKKRTEPIVKAFETVIPYLSDDKYRFADVVSSSSSVVAASQQLDPSEIGLFDAPPRPRQRNYKLLAANYTAIRIGDEESALYRVAVILDPISETSQKWSSLIKWLVNIPDVWVEIHLNSKGYYDDLPIKRFYRYNLAPTLRFNDNGEEVAAVARFEGIPVDPIYTLAMDVPTSWLVRPNVALYDLDNIQLNKLFPGDTSVEAIFQLDHIVIEGHARDVKLGSAPRGVQLELTSSEGVPIDDTLVVYNLGYFQFKAGPGVFQLKIRPGRSQEIFKLESAGNEGWDSPSVEEAGDTITVTSFEGITLYPRLARLPGKEKEDVLAEADEEESKSVFEEFTDRFKSLFGSAKKDSKDLVPVKQQADINIFTVASGLLYERFVGIMILSVLKNTNSSVKFWFIENFLSPSFLEFIPHMAEKYNFEYELVTYKWPSWLRAQTEKQRIIWAYKILFLDVLFPLDLKKVIFVDADQIVRADLQELVDLDLEGAPYGYTPMGDDNTDMEGFRFWKTGYWKEFLQGKPYHISALYVIDLVRFRQLAAGDILRGQYQQLSADPNSLANLDQDLPNNLQQQVPIFSLDEDWLWCETWCSKDRLHRAKTIDLCQNPLTKEPKLARARQIPEWEEYDAEIARLARDLAAEGKIHTRMATADANVLAGGGPPNTDKSDGVEDETNVQTPPNEASTRHVENKQSTHDEL

SEQ ID NO: 4546 - protein, 1562 aa, Lodderomyces elongisporus
MVLWLTFFLPFFITFAASLHNDLPKVGGEVLLHVEAPWNDTDFKALLIESIAGFNESLYLPALELIYGLGDSEEVDLANDKEVYESVITGLSIEQSDIDFINFNLVYKRFAPRVIAHYNHYEQVLLKQNFNKQLLVHCEKDLFGEIVEKKNGEIPAWVSYNNEIYCSVSDLFALKTIRGGGSNNRNSDSDRDINISISNDRKGHTLFDRVIGINKGAPLVQFYGDPSAESTQRFLSLLHQEAIAGKLQFVWRYVPLGSPKKRNFLAGYSCELVKLDTIGSEPNSSTLSLQKNFAEIANSSTCVESTAITTTITTTTTTTAKKTKSETKTNLDTLNEIGYKLTSFVLFNKYSMAKVDVLRTIVNNFPKFLYFLDKFPENYHVRKVKTKAIENENMGLLRDSIGLYINGSPIHHLELDVFKLVEKIQQEQSIVENLVELGFDSKQAKLLIQKFALLSSVKQSQFDSGNTIMGNNDNRFMVFKSLFRKSNALKGGVVFFNNIEKDQNYQDYQDNPYAAYLGPDSQTLKPNQIPPLRENVHDIIFAINLADKQQLKIMFAMSKLILDSGIPQQIGVLPLSGSSMDLDIANRFYHILKVLNPQEALAFLYKYLDDSDNFEKVFEKVDLEKNFNVNLNTIPEKYSIFKPSVIVNGVIYDLSLPTWQMSMSKQIAQDISSLKANLKQAPSSRGLKNILYNNAKARRNARISQNPRDSLYKLIGDDLLEISHLFKKKELGQMNQIAATMWFVSDFSHEDSLKQFINLLKLIELGASIQVRVLNLGNTSIFKELMKNLQQQQQQQQQQQQRYGNNVVDFSALTDSSLGQLYDVIRNGQLSTQRNETIVKAVEHMQLPTQHSYMLLNSRYLRMDIVYSVNDLEELLEFEWKQRLNMIEDVVSAYPEAFHNFDLIDFAHEMSKLGHKSINDWFDLLSSVVTKSFHVDDKTFVVDVNRFDFDSVDMSNSIEILPYTEKKTVDVLLIIDPMDESFSQKAINMIAAIESFSFVNIRILLQPGIIGNGGVMGSETLPYKRFYRGIYPSSIPIFGTNGQWLLDTKPSAVYENLPFANYLLKTEYPEKWVVEGNGYFPTNMDPDCFNPSLSNVYFNFKMTGLLVDGYARDIHTGRTPEQLQLELSSDNSKTDTLVMSALNYFQMKAPPGVSQSLSASSDHVLLSASRNKYDSNVAIEELQTFDVPVFDLSGTQLHVRVDDTLSKAFLKRKQENDKLQVQNQKRKSKTRFDSNLNIFTTICKKLDESLVGKLIASVRKYNPSADVTFWVLSNYASSTFKAMKLQLETEYNVTIEFVTYKWPNFVRRQLLKQKICQGYKVLFLDVLFPQELENVVYMSPNLICRADLSTLVNLELYNAPYAFPSMCEDKENGDVDMFWKHGYWHEILGKNGLNYHSSEMFVANLTRIRDLGIGNVLRSHYQKLSSDSQSLHILDQDLVNNLQGRIKIETLSNVWGWTDKWCPKSTLQGAKIITYEENESDDERGSKGLVVSQEIPELKAYEKKIKMLYQNAQNIIEISQRLDPKLGGTAGADEEEQAGDFVEEASDGEEGGWDDTDYHDEL

SEQ ID NO: 4547 - protein, 1520 aa, Basidiobolus meristosporus
MVSFKFSALLSVVYLSSAAVADTPPVKTWLQTSWGAPDVALEILEYVSKQNGTAFFPLLDAITKSDISEKSQAVKYNSILSLIEKQELLSPPFTGPLLKLSLAVHDTAPAVQAYYHYYNVSVIPEHMERDSSFDVTCSVWADWYGEQICDVEKLRSRVSKYSASTVNPTSKLLVFDHIQNPDGVDLKETPMVILYANPLSEKFKEFHDYLYELSEQALLSYVLRYKPTDKKVDPLYLSGYGVELALKNTEYMVVDDRKVDHDEKDDAQARSTILHGEEGSSNAEVDKLDEEIPEIKALRSGQIKSLGIKTMQYILQSQQPLRILRQISQNFPKYAHILAQQPTNTTFEREMNNPSGVSPGTNLININGLPVDTTQINPFSLVKLLRTEASIIAALESFSINPRQAIELLSSAHLSASGDNAVFQDIFDVRASDQAITWWNDLEKDRRYSNWPKGMFSLLSPVYPGQMRYIRKNIFSALFALDLSVKEHLNLVVNDISEFIRQEVPVRFGIVPIVDQSDSNASLMAKSFEYFLTEYGRIPAMTFLKTVYEKLGQPSGEFNRVIQDSFESTVASSKIKNPEAPTTFEAFLHDQKYDEILAEIRDFSTRFNFTPGKNAGMFLNGKYFDVEQGYQRNLIETYRIHVEYLQMAVYRREITDETNVYEHFLTLPSAYPRRNPILFVSDKQPLDMIGLDSLTQHTDQLFDTILYVSDAQPQPVSLWLISDFTTEEGAKLGLEALKSYGESPDFRVAFIHKGSGHAQGDASLILYNALANGGENQIAELKSLFENIVAHEPLDSRIQALEELKPVAAAHWDQYKRFLNNAIKPHQGVGSIIINGRIINSIPSVKQLSADDIAFLVKYERRERVDPLLAALKELNLVTITDSPDSIMKICFVVNQSPMLHASQDGFENKPAVRSRLNFDHQSPEKLITVGDQDKAIFDIQGVLDPLSEDAQKWTSVLEALAELDIVRIQILLNPVRNLEKLPIKRFYRYVFQHEPRFDPETGNLIAPLARFNGLPSDPLLTLGMDTISPWLVTPIASIHDLDNIRLADLDDRNKRGVEATFQLKHILVEGHCRDMTTNAPPRGLQLVLGTTSFPSLVDTIVMANLGYLQLKANPGVWKLSLRDGRSKELYHLESSGSQGWYSGTVEEIGNEVVLNNFEGVVIFPRVRKNSGMENQELDQESAKENEKAGFWASLKSKIFKEKSNEAPEASKEIQKRQAEINVFSVASGHLYERFLSIMILSVLKNTESTVKFWFIENFLSPSFKDFLPHMAKEHNFDYELVTYKWPHWLRGQTEKQRTIWGYKILFLDVLFPLDLNKVIFVDADQVVRADLKELVDMDLHGAPYGYTPFCDDRPEIDGFRFWKHGYWQNHLQGKPYHISALYVIDLNRFRQMAAGDRLRGQYHALSADPNSLANLDQDLPNNMQHEVPIHSLPVEWLWCETWCSDGSLKKAKTIDLCNNPMTKEPKLERAKRLLPEWEGYDEEVHQLVKRLNSDKRSAKESATVIQSATVAAPEIKDEL

SEQ ID NO: 4548 - protein, 1651 aa, Trypanosoma conorhini
MARQTDWGESRRRLAATLTVLLLLGGSSVLVGTPTVEGKGVKVTVTAPWTETPLLQEGCEMVAARGALLGGFYHCLQEAWHRVQAVNSTGGAQSLTQKAQYDVLLEMMAKANWPPVQMELAKMKLAARFYSPAVQAHWQLARTARELAGGCSTEGGRPFVLVAGKVVCSEYFLEEILSGPASADEAHEGKEEEAFSLFAGLDHVHPGSAGGRVVILYGIVGEEQTMRLFQVAERHLRTLRLAFRHLPVVGRMWENALHVQGYGVTVDLKNVEYKVINEKNTDGTQTDAGVAEATKGPESLGAVGGFNLDMLAQRYPQLRPQLTTFAGHLADAIDRDEVRVDFQVWETQYMGIAAAQRVMDAENEKRLGVLMNILTNFPLHASKLSKMGASVNNNMSKVMHKELLDFAGVLRPGAPQVFLNGRHVSNADLNLFSLLEKLEADEELFQGLRRVLTSYRVPTANDDGFALVHKDVLNQAMKSVTESARRRLASHGLEKGDSTPRVWMPQRGIFWLNNLEADVRFAYMPSALRAILTTRPNGVPVIPRKNLVHAVSVVDPTTLEGVQDIGVILKLDQSNQPIRFGIVFADREWSPEISVSTEVDDIRLKPSLSSVTAIITATVWELLNGEERLQEVLEFLSEVVYTLEALGGLSEDGVVGFSANVLTLSGKRDVREVLADPLFVEYYQTTQAKLRQLMLGKFPLTLINGNVFQENVLQALRQGFMIELMHVRGLVVRGDLTDDDKVDFYESILRLSGARERYNAALYKDEAYMDWTPKPILDFLHHRPFLHPTKRTEGTPLVTSVLAIQSPMGATALGALLKATGNLLQCVNATEKCIHVRLTYAICGAATEVNYHTLAGDLERLLLRRKEGEDGNQQRLQLVHEFLLKIAAQNKTRELDDPKVYESWFASMKFSPELQSLLDASDAGLDAQLQTQRGLLRGFCAQVGAESSFAELSLADAAAARERQKNEGSVYYYVNGRRLVYNDDLSAEDLKDADQQELSLAEAVSEALSEVSFTRLSDELQQGELDSRFYASKVAALTELWRRDAARGSPMEEERHLPSTSGLASFVVQPVNAGAEPHHTLTMVVDPVARHSQLLVSLCDYVTRLPLGVSCIVHMGTPQQLAKPMRNFYLFVSELEMRFDAVGGVLPPAAVFHRLPSRHLLTLGIEEPESWTVFPLDAKYDLDNLILDQLPSSSQYAHATYGINSILLTGSAREAGRPVPASGLPLMIRSTRTNPAAALTRDTIVMAILGYFQLQSSPGVWYLTVQPGGFAETFYISQVNHIPLNDAGNKKRISGFNYTAGQNIPVVISSFIGKALTLDISKTPGRERMTMSDIEAAYPERADWPPAGPRTTKPRSPTLNIFSVASGHLYERFLRMMIHSVMRTSSDVHGANTTRIKFWLIENFLSPQFKALIPLLASHYGFDVALVTYRWPWWLHKQTEKQRTIWAYKVLFLDVLFPLDVERVIFVDADQTVQADLHELYNMNIGGAPTAYTPFCRKYPNLATKNFRFWDQGFWAQHLRGRPYHISAIYLVDLRRLRAMAGGDKYRMMYSQLSPDPNSLANLDQDLPNFMQDEVPIYSLPEEWLWCETWCGAESKARAKTIDLCNNPLTKMPKLDNAKLIIPGWEETDAELEALSDKLLKKQQQQQQSEN

SEQ ID NO: 4549 - protein, 1564 aa, Galleria mellonella
MQVTGFRILFFIWAIVFVALTNGTGQPNRDEKKAKSVTTFVSAKWEVTPIVLELAEYLSSENTDLFWSFVDGINSLKSSLEVLDTDKQVYDACVGVASTLLVPAQLRMAKLALSMHLTSPTVRMFDQIATQNGAKDVACDTFVHIASRKVCDNDVLRDILKSYDQYNAEEHKLETYLLDHTYPSSDNKSLTAILYGELGMIEFATKHKILSTYADKGVINYVVRWNVKPRGKPKVRLSGYGVELQLKSTEYKSQDDTTPKESEDGEAPTPSEEEDENDPQNQIDGFNFGRLKNLFPALRSPLERFRRHLSESSEELEPLKVWQMQALSMQAAAAVVDAHDAGGDEALKVLSSIAQNFPMQTKSLIHVNVPRSFRDEVLYNQDIWASSLGLRAAEPLLLVSGAQYDAEDIDLLGLLAALREDIGPMNTLHALGLSKKTINTLMSLELGESYTWEEYGLDIRDTAITWLNDLETDERYRRWPSSYMELLRPTYPGMLRNLRRNIYNYVIVIDPTSYASGPPLKLGETLLRHATPVRVGLVLAPSSGPLETAVRSAFNYIAQEKNSNKEAFFFLSQLLNNQEESLNIEQVKKQLKKYVSSGTNIDAIISEDDYNFGRQLAEEFVSKLGSNKYPQVLINGVPLSEEGGAGSSSVEVLEETLVTSLSRHTARLQRAVFRGDLADTDDALDYLMKQPHVMPRLNRRVLGADSSQYLDLSGVPSSSELFTEDKVHRLMHLTGRDALATALPLLKYFTKAGKNDKITQTIWVAGDLNDKLCRELLKNALTFMTESGGVRVAFIPNVDGSPSVDQSLNKVVIAALATLEPAKATKYVMQLLEDEGCHEKQNCDILPELVAALQQHAWTLRAARVLCARALRLRSGARALVHNARLIGPFADDEQFTLDDFLLLERFSNRVYADKISEVLDKKKTSKNDVLDDDDSEERAPLTADERVRATAVLAARSPRARTPLPSGLRTEHSLVDLPPLIPDEAAIEIVAVLDPASVAAQHVAPLLLVLRRVVNCRIKLFLNPQDKNSDMPLKSFYRYVLEPELQFTSTGAATGGAGARFGRLPHAPLLSLELRTPPNWLVECVKSVYDLDNIRLADVDTLVHSEFELEYLLLEGHAWDVGVGTPPRGLQLVLGTRDRPDMVDTIVMANLGYFQLKANPGAWMLRLRPGRSDDIYEIVGHENTDTPAGSADIQVLMSSFRSHVIKLRVNKKPDRQHLDLLVENDDNNSGGIWNSIASSFGGGEEQEVQDETINVFSVASGHLYERFLRIMMLSVLKNTKSPVKFWFLKNYLSPSLKDSLPYMAQEYGFEYELVQYQWPRWLQRQRDRQRTIWGYKILFLDVLFPLHVKKIIFVDADQIVRADLKELVDLDLGGAPYGYTPFCDSRKEMEGFRFWKQGYWRNHLQGRSYHISALYVVDLKRFRRIAAGDRLRGQYQALSQDPNSLSNLDQDLPNNMIHQVAIKSLPQEWLWCETWCDDKSKKYAKTIDLCNNPMTKEAKLSAAMRIVPEWREYDEEIKALQARVRRGLYQAADHEQEIENVPHDENLPTGNHIKKEHGQHTEL

SEQ ID NO: 4550 - protein, 807 aa, Emiliania huxleyi
MQTLSAEVRTVQRLVRTGKLTDEHQDVYATIANATATFPRYNEALLQPIDKVVMAGLKPSAHLGAIKWLATPPAPPSPPSEAAPPVAAPPPAEEDMYAYAGARACRWGAAQRSRVGFAAWEKLLQTTHDFGAARRLLALLHAAALAGEALTPELLASAVPEAFSAAETANLIAGVKSVVAPHHAALCRSLGVSAAPAIVVNGRLVDAATAGKLDAAPGATLVRELVGEDAAEEAADAGGAPSAEEFGQRSDLLMLAALELTAVLDPLSKEAQRAVPILMALHESLGLSVTLHLNPSLQIDKFPLESFYRYVVSLEPSFDNAGRSLSPQLDRALFSSLRTPQVLTLHVDAPEAWLLECTEAAYDMDNLRLAELGDRRTVSAVYELASLLITGSCEDVGSRHPPNGLQLLLGTTAQPHATDTLVMSNLGYFQLKAAPGVWDLSLAPGPSSEVFTLRTAPALLAAGHSTRAFRGGMQRIDPATLNDAAAVRVTMADFTGANILLLAQKRPGLESWWSGGEKGDASETVHVFSLAHLYERFLKIMLQSVLQRTKRHVKFWFLKNFLSPAFIGSLPAMAAALGIERGRGHALGFEYGLVQYQWPSWLHKQTDKQRIIWGYKILFLDVMFPLSVVNADVGELWDMKLPGRAAVAMTPFCQADANPDTTGFRFFAQGYWRDHLQGRPYHISALFVVDLHKFRRRAYGDQYRVFYDSLSKDPNSLSNLDQDLPNYAQHVVPIHSLPEEWLWCETWCGNTSKPRAKTIDLCNNPLTKEPKLSQATRVIGERWSALDAVAKGIEEAESPAQPSRDEL

SEQ ID NO: 4551 - protein, 1530 aa, Carassius auratus
MIMRVVFVVLVLLRVHHVHSASKGVVASLQAKWSMTPLLLETSEFIREDGEEKFWQFVDTVKELTVYKNGESVRSYYNLIIKKAGQFLTDLQVNLLKLSLSLRAYSPAVHAFQQIASDEPPPDGCTAFVVVHGQNACSTKDMKKLLKTAAGRPRPYLYKSDHQYPGGNGTDLPVAVLYAEIGTKEFNTFHKVLSERAQEGKLVYVLRHFVFEPKNEKMLLSGYGVELAIKSTEYKAVDDTQVKESKSVTADNEDENEEVQGFLFGKLKKSHPELQEELGELRKHLLESTNDMTPLKVWELQDLSFQAASRIMTVPKFDSLKLMQDLSQNFPSRARSLTRVAVNQDMRKEIEDNQKRLSESMGIQPGDASLFINGIHVDLDIHNAFSILDILRTEAKILEGLHNLGIRGSSVSKFLHLPSSTTVEDSYALDIRHSSVMWVNDIEKDSMYRHWPSSVQELLRATFPGVIRQIRRNFYNLVLFLDPIQEESIELVKLAELFYKHNIPLRIGFVLVVSTDDKVDGYSDAGVALFRLLNYISEEYDEAQAFTSMVSIYNRVEVGEILSVNTVTAYLKKKFPKANAARILGVDSSYDDNRKAGGGFYKKSGLGALPVGLFNGIPLSSDEMDPEELETVLLQKIMETTNFFQRAVFMGQITESVDVVDFLMEQANVVPRINPLILSSERRYLDFTSSPVADDWDDTTMFSYLDSKDKTAVVSKRMKYFIREEEEVLYGVTMWIVADIEQPSGRQLLRNALKHMKSSSSNCRVGVINNPSGKPTEDNSALYRAVWASLLTQSSKNMLDFTLKLLKEENVELLKQGTKIKHLLKQGMDHDAFEKKFNTMEVDFLHSQQKYCKDVLKLKAGQRAVVSNGRVLSLLDDEEEFSAEDFHLLEKITLRTSAEKIKSKIKQMSLNAQKASDLIMKVDALLTASPKGEARKDVKLLKDKHSVLQLAQREDEVFYDVVAIVDPLTRDAQKLAPLLVVLGQVVNMKVQVFMNCRAKLSEMPLKSFYQYVLEPDVSFFGNNSLSPGPVARFTEIPESPLLTLNMITPESWMVEPVRSPYDLDNIHLQEVSGVVNADYELEYLLLEGHCFDLSTGQPPRGLQFTLGMRQEPLMHDTIVMANLGYFQLKANPGAWILRMREGRSEDIYQIQAHDGTDSPDDAGDVIVVLNSFHSKIIKVRVQKKPDKLNEDLLSEGTESKGLWDSLTSVWSSLEKSFAGGPSVDGDDKKKDVLNIFSVASGHLYERFLRIMMLSVLQHTKTPVKFWFLKNYLSPSFKDTISHMAKAYGFQYELVQYKWPRWLHQQTEKQRIIWGYKILFLDVLFPLAVDKIIFVDADQIVRADLKELRDLDLEGAPYGYTPFCDSRKEMEGYRFWKTGYWASHLAHRKYHISALYVVDLKKFRKIAAGDRLRGQYQALSQDPNSLSNLDQDLPNNMIHQVAIKSLPQEWMWCETWCDDNSKTTAKTIDLCNNPKTKEPKLSAAVRIVPEWSKYDNEIKQFLKQVKEQEEITEDRSSSSSSQHTGTRRDEL

SEQ ID NO: 4552 - protein, 1610 aa, Nelumbo nucifera
  MOD_RES (1158)..(1158): Any amino acid
MELRFRSRSLGTCFLILLFLIFVSSAVLAENRRPKNVQVSLRAKWSGTPLLLEAGELLSTGWKDLFWEFIEVWLHEEDNIDYYTAKDCVHKIIKHVRPLISEPLASLLEFSLPLRSASPRLVLYRQLAEDSLSSFPPSDVTITNGFTSNVSESVANAGSKKIGELLVGKNPISPGGKCCWVDIGSSLIFDISELLLWLSHSGLSGDALQQPELFEFDHVHFGSSVSGPIAVLYGALGTDCFKEFHVALVEASIKGKVKYVVRPVLPSGCEAASGQCGAIGTGDSPNLGGYGVELALKNMEYKAMDDSTIKKGVTLEDPHTDDLSQEVRGFIFSRILERNPELTTEIMAFRDYLLSSTISDTLDIWELKDLGHQTAQRIVHASDPLQAMQEINQNFPSVVSSLSRMKLNHSIKDEILSNQRMVPPGKSLVALNGALINIEDIDLYLLMDIVQQELSLADQFSKFKIPQSTIRKLLSTLPPSESNAVRVDFRSVHVHYLNNLEVDAMYKRWRSNLNDLLMPVFPGQLRYIRKNLFHAVYVLDPASVCGLESIDMILSLYENNYPIRFGIIFYSSKFIKKIEDHNGEIPLFSDGVIDSHSPDDISSLIIRLFVHVKDTYGAQTAFQFLSNVNRLSRTSDDSSEDSLEVHHVEGAFVEAILSKAKSPPQDVLLKLEKELTFKEQAEESSLFVYKLGLSKLQCCLLMNGLVHEPTEDALINAINDELPRIQEQVYFGHINSHTDVLDKFLSESGYHRYNPQIIGQGKGQKRFISLSASTLGSELLLNDINYLHSAGTADDLKPVTHLLAVNLTSREGIKLLHEGIRYLMGGSKRGRVGFLFTAKGNPHSLSFYFLKAFQFTASSLGDKESVLKFLDKLCSFYEQEFTHASLTDATDTMAFINRVCDLAIESGLPSEGYKAALSDFSMEMLVKHLDKVSHFLYGQLGLEFGATAVITNGRVTLLGRSTFLCHDLGLLESMEFEQRIKHIMGIIEEMEWHDIDSDLVTSKYISDIIMLVSSSLSLRERNSDSARFEILNAKYSAIVLNNENSSVHIDAVVDPLSPLGQKLSPLLHILWKCIKPSMRIVLNPLSSLVDLPLKNYYRYVVPTMDDFSGVDKSVNGPKAFFANMPLSKTLTMNLDVPEPWLVEPIIAVHDLDNILLEXLGETRTLQAVYELEALILTGHCSEKDHDPPRGLQLILGTKNRPHLVDTIVMANLGYWQMKVSPGVWYLQLAPGRSSDLYILKENGDRSQHSSLLKQITINDLRGKLVHLEVVKKMGKEHEQLLDSSAESSHLQERKEHKSGGRHGKTINIFSIASGHLYERFLKIMILSVLRNTQRPVKFWFIKNYLSPQFKDLIPHMAQEYEFQYELITYKWPTWLHKQKEKQRIIWAYKILFLDVIFPISLEKVIFVDADQVVRADMGELYDMDIKGRPLAYTPFCDNNKDMDGYRFWRQGFWKEHLRGKPYHISALYVVDLVKFRQTAAGDNLRVFYETLSKDPNSLANLDQDLPNYAQHTVPIFSLPQEWLWCESWCGNATKSKAKTIDLCNNPMTKEPKLQGAKRIISEWTDIDSEARRFTAGLLGENKKQESIPPGQTGNSVDVRSDEDMESKSEL

SEQ ID NO: 4553 - protein, 1489 aa, Hypoxylon sp.
MIRLFQLPCGLAATFLAALCLGPSHVVAGPSVNVAMQAAFPAPPYLVELLETAAGENATSYFALLDRIADGTFTNSKTDKQLYEKFLEVLKEDGHMASSEALSTFKLALSMRSAAPRIEAHYQYYDTAVAPSLGEARDDCAEWILLSGKQYCSASLAHAEGHISGDSQLRSLPFDRALGAGSEAILYADITKPEFGAFHKSLADMARKGEVSYRLRYRIDRAEKREPLPVSGYGVELQLKRTDYIVIDDRDAGTETDSAAKPAPTDVVLDGEEEVTDLKPLSSSELSSLGLKAGSFIMQSEDPFQTLIKLTQDFPKFSGSIAAHNASDAFVKEHRQNRALGVPAGMNVFWMNGVQLIERQIDPFTLVDSIRRERKLIEGVTDLGLTGKEAVSLLGNREVTIAKSDDEPRRFDWRDEIEEGRVIIWLNNIEKDKRYADYPKSLMALMQRTYPGQIPPIRKDIFNLIVPVDLTKSEDLSLVVEQLQGYIRRLLPVRFGLVPLTRTKEAEERAKVAYHLLENYGLATLMSYLELCKKGGSDQANFGKAVKDRTPKAESTPLPFKEVLESEDHIKQVELAKHWVERLNADTEVPPLFLNGIAIPREDTWLQMMTMRMSTDLQLVQQGVFMGQVDDETWIPGLFLEGAPTRRNPYIFMEGDNTLTVLNVNKLYTEHKDLFDLVPVIEANEDTSKETWATLTVVADLSSQQGLRLLLSALAFRRNNPGVRLDIVHNPSRSSNAHEINALLKKDIAKLLEIENLETLEVLLSGPVDVRDDGYNTALSRFLTAAAITPGSQLLILNGRVVGPLAPNSEFKEADFDLLLEFEQATRILPVYKAIDSLGLTDKVSGPLAAAKLTSVTALSTISDLPEGIFESAPTLRTTMYDQWNSSYTMIDTGDAATANIHFVAMINPASEVGQKWAPILKVLSQLDGVYMRIFLNPKEKLEELPVKRFYRYVLDSAPSFDEAGKVKPLGATFKGLPSEALLNLGMDVPPAWLVAAKYSVHDLDNLKLSSIKTDVDAVYELEHILIEGHSRETTSSPPRGVQLLLGTERDPHVDDTIIMANLGYFQFKANPGYYNITLKEGRSSEIFNIISVGAKGYNAVPGDEGTEVALMGFQGTTLYPRLERKPGMELEDVLEESSSDSSGDIISRGLKFAEGILGGSKPKPKSVSDEVHAEINIFSVASGHLYERMLNIMMVSVMKNTNHTVKFWFIEQFLSPSFKDFIPHLAKEYGFKYEMVTYKWPHWLRQQKEKQREIWGYKILFLDVLFPLSLDKVIFVDADQIVRTDMIDLVNLDLEGAPYGFTPMCDSRTEMEGFRFWKQGYWKNYLRGSPYHISALYVVDLKRFRQLAAGDRLRQHYHQLSADPASLSNLDQDLPNHMQFVIPIHSLPQEWLWCETWCSDESLKEARTIDLCNNPQTKEPKLDRARRQVPEWTVYDEEIAALDRRRKGLATTLDDTQKVLSGSAEEKNTKSRRFEKESQPKTRTKDEL

SEQ ID NO: 4554 - protein, 486 aa, Laodelphax striatellus
MISDSSLFVLLPVSSTSQPPSPAHSSADPKWQAPAFDITVIVDPVSRGAQKIGPILSVLRQVVNCDIRIFLNCVEKNSDMPLKSFYRYVLEPEVQFTADGHLAAGPYAKFTNMPGAPLLTQNMHVPENWLVESIVSPYDLDNIRLEEVQSVVHSQFELEHLLLEGHCFEATMGNPPRGLQITLGTESEPVVVDTIVMANLGYFQLKANPGAWILRLRQGRSSEIFDITSHEGSDTPVNSTDIKVLISSFRSHVLKLRVTKKPDKIGMDLLGEDDDSQPGLWNSITSTFGSSKEEQVEAETINIFSVASGHLYERFLRIMMLSVLKNTKSPVKFWFLKNYLSPTFKDFLPRMAKEYGFQYELVQYKWPRWLHQQTEKQRIIWGYKILFLDVLFPLDVKKIIFVDADQVVRADMKELVDLDLGGAPYGYTPFCESRTTMDGFRFWKHGYWRNHLQGRRYHISALYVVDLRRLEAWLLAKSLARQTLPY

SEQ ID NO: 4555 - protein, 1795 aa, Leptomonas pyrrhocoris
MNTPPCNSRALLRLAVLLAFSALLCTTQHTNAKGIHVTVEASWNETSFLQEGCEWAGRTFGPTAFYSCVNALWDYHLRRGNDPVDGNSAASHEAVSARYSTQEVQYTAIWELARTLTETQMADTALFAVEMSSRVYSPAVEAHYATATQTLSAISASEQGDIAAASASPPRSTGPCGEPFGVLYTPALSASGQMQAQPVHSAVELKALLTALEQHQGTADSSSPSSRVPVVSVRDVSLTRLDYRYPSRAPQSEVSAVLVLYGLLGSSATKELHEAAVEWMEKGEGTVRPTSDAATTPTLAYFFRHLPVSRTRLCGPTAAEQVHESKDHAALVEEQWDTPLVVQGYGVTVDFKNMEYKVLDEKATAQQRAKAEAEGNDAAASSPAETLLAPADQADRVVAGFHMRRLTERYPHLALSLKELATLVEDEMGGRDLKVDFDVWELQNIGLAATQYIREVENSSRRLHVLKDVVNRFPLYAAALSRIAAQPNRLEVVQKALAGVRQRLSPGVSALFVEGWRVEAKDLSLFGVLDALKSNEAVSHHIKRALTTRLVPPGEEENNAVAARNVATVKVAPTLLEKVSNYVKRAAWRAAEEHGAGATSDAAFAIPDQYVTWLNDVEAEERFEGMPRQLKTFFTQASGVTPFPRRNLLHFVFIWNALRRSHLQRISMIYNLNRQGLLARYGLLLLDPEWSPEVASETTTATGAAGQAAGFAGQSSLSPEVLAISALAYHLAQAGQPQALIEVIVQLLQAHAAEDAISEDLISSNTVQQVCRGVADAVFGSSLEELMSNVDFVNHYHETQAMLRRFPMAEYPAALINGVVLDSYGGALPAALHKEVLQLREWVANGDLTDDMEDLYTQILQLRGAADHLQPALLRPPQTMPWTSTQAVVAFIEDAPYLYSAAYAFDVPSLTQILTLPCHATESTLHQLQTVLSALQSCADVTSERDAHYAVCRSLRVSIVSCPAAIATTTAADISPSSSDVSRYIAALLRQTVQRDVAEAKRLITIQRYVSHLRKALAMSPTVGGTQRRAGVLDRATVTAALAHDPLPDDLQVKETGTPADVLQRVSGSRDFWAALGAAMPARDVNVTLVTNGRLIAMDDTFTAWDVLEAARQMLPMTKAIEEAVVKVNFAEMTSVDADGAQFTSDEMDNAFYGGKIACLTSVFEHEKMAHEAVKSASPLVREEHLFASAEDRKRLRAVLFSVNNTPNGAASTGDGEELHRITAVVDPSSRDAQLIVSLVSYLMESPLRLRLTVLLNPSLDVKFPIRDFYEYVASARVNFDASSGRVMAPAATFTQLPARALLTLGVEEPPTWTVFSQAAEEDLDNILLSQLSPGTPFVFAVYRMHSILVTGDATDVLVGRPPDGLPLSLTTANARSTDTQVMANQNGYYQLQAGPGLWYLSVKPGPVAAAYCIEAIGPHPIPACAEGRGEINFTQGQHIPVVLDSFSGRYLSLRVRHTPTSSLPTSATGDGSGRDLHAILQKMASDVTHTWPPPWRARVARPHPPAKPTLHVFSVASGHLYERFLRMMFYSVHRTSSDKYGANTTRIKFWVIENFLSPQFKRYIPLLAAELGFEVGFVTYRWPWWLPRQTEKQRKIWAYKILFLDVIFPLDVDRVIFVDADQTAQADLHELYNMDIGNSPVAMTPFCQKYRNEATVPFRFWEHGFWVDHLRGKPYHISAIFLVDLRRFRAMLAGDSYRSTYANLALDPNSLANLDQDLPNYLQANIPIFSLPEQWLWCETWCSAKSKSKAKTIDLCNNPLTKMPKLDNAKMVIPGWEELDNKLQNMSDSLLGLH

SEQ ID NO: 4556 - protein, 1189 aa, Aphanomyces astaci
MSLMWMGVATVVAAACSSVAESRQVQVNLTTSFLASPLHPVLETSEYLSQDNPALFFTYVAAVDVRYNAIKDKNNVNYTKVALEAAADVLPADSSVSRLLPFVLQTRAHSPSIELFNQTCAASGQHDFQLPVDHEYPSSNTAAATAPHVIVYGALTSPSFRAFHSTFVPLAVTGKVHYIVRHAPTDNTLPVLVHGYGVTLHVKNMEYKSFDDSKATSSHNSTATEDDIDADQDEFVVSVLMKKNDEVAQALREYLDGFEGAHGTDDDEDAKDVTTPAPWQLTQLGYLATQYIMAAEDPLKRLQLLSQNFPKYASSLVLASKPVPQQTIDDINHARSQVATQRLYNRIVVNGLPVDFNEYGFNAFDFLKSLNGELRLADTLAKLDPTGSIKAAMGSLSSAPSDVRISLRGPVDGDAPLYLNSIETDEETAEWPTDLGSLRGPSWSLIYLRKTIVEDKDVATVFHVSKMFLAARANGKSARDKYLREVLSLNDLTVKEVLQIYSQAVGERYTNDDWLQTAKAILTDGDNDGVWAMTNLVAEKNLPINSQVFNGVVRKHVNVQEDIMTHFARDQPLYQTLVRANQITDDSDMLSELLGNDETYAVFCPWFDPEYKPPTTVVQLDWNDPVRCFLPDQHVIYVNGRPLELVAPVTPSLFDGLVTYESATRSKAVSKAYVSQFKHNVLTAEDAADKTLQLNVVLSMVDSYLKTPRVAAVLPDDVQRPTYSYVTPSGSSSLDVVAYLDPLSDTAQRASGILRMLHSVLHAKITLVLVPPPSYDEFPLKRFYRFLWGGTSSSLVEFDRLPRHPVLTLNIETPELWNVQMVQSDVDIDNIQQNASATFTIKDVLVYGQCVDKTNAQYPTLPNGLQLVLERSVAKLHSHKDTVVMKNLGYFQLQAAPVPVIVYDFLSKTLQLEVKKQPGQEGVRLLDDGPEAPKAPAQPEETSVWTSLVQWGAGSSKLEARKGDTIHVFSLATGRHLYERMLKLMMLSVLKRTNNPVTFWLLENFLSPDFKNSVAALQAEFGMDIRLVTYKWPNWLRRQTDKQRIIWGYKILYWKDHLRGKPYHISALYVVDLVKFKRMAAGDSLRAIYDQLSADPNSLSNLDQDLPNYAQHQIPIFSLPQEWLWCESWCSDESKAEAKTIDLCNNPKHKEPKLDMAKRVISGDLFPESWLQLDAEVKAAEAAYELASN

SEQ ID NO: 4557 - protein, 270 aa, Teladorsagia circumcincta
MMVSVVKNTEKPVKFWLLKNYLSPQFKESLPLLSAKYGFDYALVEYKWPRWLHQQKEKHRVMWGYKILFLDVLFPLDVQKIIFVDADQVVRADLMELMEFDLGGAPYGYVPFCDSRKEMDGFRFWKQGYWSNHLAGRRYHISALYVVDLQKFRQVAAGDRLRGQYQGLSNDPNSLSNLDQDLPNNMIHQVKIKSLPQEWLWCETWCDDASKQSAKTIDLCNNPLTKEPKLDSAIRIIPEWRDYDSEIRGVLKNDRKHQKEAAEDHEHSEL

SEQ ID NO: 4558 - protein, 713 aa, Aphanomyces invadans
MSKKPEADVLTHARLFLQLHLDAAPNDKILTKLNEWLTSTPSFSHPFSFKVDPHDHVIYVNGRPLDLAASPLSAEHFDVLVVHEASTRSKAVSKAYVAQFKHDNLSVEDAADKSLAFNLVMNAIDEYLKVRRVPSVLPEVNPLYSYETPTSQPSGLDVVAYLDPLSETAQRASGILRMLASVLHAKITLVLLPSPSYEEFPLKRFYRFLWGGSESSSVDFVRLPRKPVLTLNIEPPELWNVQMIQSDVDVDNIQDDASATFYIKDVLVYGQCVDRTIVHYPSLPNGLQLTLERSAGTVHSHKDTVVMKNLGYFQLQAAPGVWELGLAKGRHSKLYELVIQEDRATTVPVIVYDFLSSTLQLVVKKQHGQESVRLLDEDEPAHKTTGEAVEEKSYWRSLVQWGSDPPSSKRDARSGDTIHVFSLATGAGHLYERMLKLMMLSVMKRTKNPVTFWLLENFLSPGTKCTVVWLLTTSLASADFKNSVGALQAEFGMDIRFITYKWPNWLRRQTEKQRIIWGYKILFLDVLFPLGVEKIIYVDADQVVRADLNELWTMDLQGRPYGYTPFCDSRNVGYWKDHLRGKPYHISALYVVDLVKFKRMAAGDSLRAIYDQLSADPHSLSNLDQDLPNYAQHQIPIFSLPQEWLWCESWCSDESKRLAKTIDLCNNPKHKEPKLDMAKRVISGDLFPESWLELDAEVKAAEAAYAEGPHLDV

SEQ ID NO: 4559 - protein, 1227 aa, Musa balbisiana
MELRWRSWVLGALFISLLFGGFGGSGCLGFAVNRRPKNVQVSLRAKWAGTSLLLESGSLGYLEQPELFEFDHVYLASSIISPVAILYGAIGTECFKDFHIILAEASKQGKIKYVVRPVLPPRCQAVSSYCSAVGSSDAVNLGGYGVELALKNMEYKAMDDTMIKEDLGHQTVQRIVHASDPLQSMQEINQNFPSIVSSLSRMKLNDSIKDEILANQRMVPPGKSLVALNGALINIEDIDLYLLMDLVQQELSFADHFSKLKLPLSAIQKLLSAAPPSESNAFRIDFRSGHVHYLNNLEEDAMYKRWRSNINEILMPVFPGQLRYIRKNLFHAVYTIDMILSLHQSSIPMRFGIILYSSKLVKMIEENGGHLPSSAVQDDKKRTEDVSSLIIRLFLYVKENYDTQLAFQFLGNVNKLWNSGDDFGEENLEAHHVEGAFVDSLLSKAKSPPHDTLLKLEKELTYKEEADGSSLFVFKLGLSRLECCLLMNGLVYEANQEASINAMNEELPRIQEQVYYGHINSKTDVLEKFLSENGYRRYNPQIGGSKRARVAMLLYSTVGASSTASHFVKAFDTAVSGFLHGQLGLEYGSNAVITNGRIFILKDGSPFLSDDLSLLESVEYELRIKYIYEIIDQVEWVDVDPDDLTSAVNLNTGNSSIHIDAVIDPLSPSGQKLSPLLRILWKCIRPSMRIVLNPVSSLADLPLKNYYRFVVPSLDDFSNVDYSVNGPKAFFSNMPLSKTLTMNLDVPEPWLVEPVVAIHDLDNILLENLGDLRTLQAVFELEALLLTGHCAEKDHDPPRGLQLILGTKRGPHLVDTLVMANLGYWQMKVSPGVWYLQLAPGRSADLYALKEGGAGSPGNRSAKLITINDLRGKLVHLEVAKKRGKEHEELLNASDDQLLEKRKEGQNSWNTNILKWASGMIGSGGLSRKGETRLVRYERFLKIMILSVLKNTQRPVKFWFIKNYLSPQFKDVIPHMAQEYGFQYELITYKWPTWLHKQKEKQRIIWAYKILFLDVIFPLSLRKVIFVDADQIVRADMGDLYDMDLKGRSLAYTPFCDNNKEMDGYRFWRQGFWKDHLQGKPYHISALYVVDLMKFRQTAAGDTLRVYYETLSKDPNSLSNLDQDLPNYAQHTVPIFSLPQEWLWCESWCGNATKAKAKTIDLCNNPMTKEPKLQGARRIVPEWVDLDAEARQLTARILGEEVDSNEPVTSTLPLPDGPQNNHKKDEL

SEQ ID NO: 4560 - protein, 1524 aa, Aplysia californica
MARLFLQGIAILLMIKCYVDAKQKPVNIALSGKWNSTPLLLEASEFLAKESAESFWTFVGRIADQDPDSIQTAADDIKYKLVQKFASELLSPLQLSFLKFSLALRAYSPAVNMYQQIVEQIEIKKDCSSFIDVNGKYTCDTNEMSELLTTAITRSPSPLYQFDHIYPNSGKRKAVVILYAEIGTKGFLEFHPALSKLASGGEITYVLRHFIKNQSPDKVRLSGYGVELSIKSTEYKAKDDTKVEGGGDSDASDDEDDGEEVDGIVFSKLKELHPDLKAELKEFRNHLMDSATELTPFKVWQLQDLSYQASQRIVSAPPNDALQFLQDISQNFPTLARSLVRTAVSTEFKREVKKNKEKFEFQNVGAGESLLYLNGLSVDMEIYDVFTLLDVMVSEARLVEGLHALGFKGNNLQKFLQLDLKEGGDDMSYAVDIRHSAIQYLNDLGQDKKYRTWPNSIQDLLRPTFPGMLRHIAKNIFHLVFVVDPLDSTSKSLLKMAEAFYVHKAPLRLGIAFVVNSDPKADGFTDAGIALVRAYTFVSMDKGAPAKGLSFITDVYEKAGTAELTADAVIAEFALQYPGEDKDLVFGKSDDYDDVRKAGNDFVSRSGLSGMPQVLINGVPLDQSQLGDNFEESVVIEVLKQTQVIQSAVYKGEVNDRTDIMEWWMERDNVLPRLNSRVLAPPAFRVDLTGSAGEDRVSAPALAAELSAKDLTSAISDGLVYLTKREEESVRPVTMWVVADLETSHGRELMYNAIKHVKVSNDLRLSVVFNSLTTKIDNNSINRAVWVALRTLPMPLAKSLVTKLVKEDNAKALLAGTKTLQDLEVHGMDIDKYIADLSAQNTDFLKVHGQFASRVLSLRPGEKAIVTNGAVLGPIGREEELSVEDVNLMERLAYQQAGKKVAEAVSALPDKKEGGSDLVMKVCGLLTSKDKREKRHKIDYYGDKYSVVKIPADSSIPAFTVEAILDPVSREAQKMTPILMVLQQIANVDIRIYLNPREKLSEMPLKNFYRFVLEPEITFDGQGSLSKGPSARFLDLPQKSLLTLSMDTPESWMVGAVTSPYDLDNILLEEVEKSVSADFELEYILMEGHCSDATTMQPPRGLQFVLGTDNAPSVVDTIVMANLGYFQLKANPGLWTLNLRDGRSKEIYNIESHENTDSPLNSSQVFVAINSFKSKIIRVKVAKKPDKMDKSLLSDDGDEGAGLWDSISSTLTGSGNKEEEKDTTLNIFSVASGHLYERFLRIMMLSVLKNTQSKVKFWFLKNYLSPSFKDFIPYMAQEYGFEYELVQYKWPRWLNQQKEKQRIIWGYKILFLDVLFPLDVKKIIFVDADQIVRADLQELHDLDLGGAPYGYTPFCDSRKEMDGFRFWRSGYWKSHLAGRKYHISALYVVDLKRFRRIAAGDRLRGQYQGLSQDPNSLANLDQDLPNNMIHQVAIKSLPQEWLYCETWCDVSEKPKAKTIDLCNNPLTKEPKLAAAMRIVPEWKDYDYEVKVLWDDIYHTNTKEQIEYEPPQLNKKSDTKRKEEL

SEQ ID NO: 4561 - protein, 1472 aa, Cordyceps militaris
MSRHLSSRLIVAVLAASQVAASPSVNVRMQAAFTSGPYLLELLETATAENSSAYFPLLDRIASGRFAKLSTEAELYEEFTSVVRADGHITSPEAQSTFNLDLSLRSSIPRVEANYQYYDTVVALSDIDTSCEAWVLLGGNQYCTPELDTAAKIGVFDSKLSALPFDRSIGVGKGAVLYADPTSPNFGKFHELLQRAAKAGELNYRVRYRRPLNVRNKPLLVSGFGVELALKRTDYIVIDDRASQHEGGAQKPLNTEAIFEEQESTDIRPLSTSELETLGMKSSSFIQSSKSPFETLVKLMQDFPKFSASISAHNVSTSFSEEYQRGYLQRVPRGVNALWMNGLQLIERQIEPFSLVEMLRRERKLLDIVRNLGLDGVDAISLLGHEKVAASKSDTGEAIRYEWTDKLEDGRAIVWLNDLEKDTRYAQYPDELSSLLQRTFPGQIPAIARNVFNVVSALDLSDADDLTVLSQLAVLITRGIPIHFGVVPLTSNTEALKQAKVIRHLIDRYGFNGLQTYIDGLGEDPDPQLTESSFSQVVDSQIAAADTQAHEYAKVLETEEFDTHFKMAREWITRLKAADKTAPVFFVNGALMPRTANWLQSMSMQISEDLQTVQKGVYHGVIGDDAWVPGIFLERALKRRNEYLSIDDAHPLRILDVSKLYEDHQYLFSTIPVQKCDPQAAKEEWAAVTVITDATSLRGVELILSALEFKQSNPGVQIDFIHNPVSTEGASDVNEALKVATSSSSFGTSGEIEKLVREAKTGSSNGDYAISLKRFLSYAELQPGSSSVLLNGRLIGPIAPEDSFLEDDFTQLLGLERKSRILPVLEALDDLGLGDKVYDPISAAKLTSITALSTIPNLPEGIFESSSSIRSTVYEKWDANHTTIEVGDAESASIHLVALLNPLSEQAQRWVPLLRVLSELDGVYLKLFLNPKEKLEELPIKRFFRYVLESKPSFDESGAIRGGQATFNGLPSEALLTLAMDVPPAWLVAAKDSIHDLDNIKLSSTNSDVDATYELEHILIQGHSREGKSSPPRGAQLVLGTAKEPHLTDTIVMANLGFFQFKANPGIYSIHLKEGRSADIFKIESVGAQGWTAVPGDEGTSLALLDFQGTTLYPRLSRKPGMEEIDVLEEGDGRAEGIVSKGFKLAEGLLGNALGRKSSSDLEHAEINIFSVASGHLYERMLNIMMVSVMRHTKHTVKFWFIEQFLSPSFKEFIPHLAEEYGFKYEMVTYKWPHWLRKQKEKQREIWGYKILFLDVLFPLSVDKVIFVDADQIVRTDMMDLVKLDLEGAPYGFTPMCDSRTEMEGFRFWKQGYWANYLRGRPYHISALYVVDLRRFREIAAGDRLRQQYQALSADPNSLANLDQDLPNHMQFQLPIHSLPQEWLWCETWCSDESQSEARTIDLCNNPETKEPKLDRARRQVPEWTEYDDEIAALAKRVKTTDSRDGNGKKANPERNSKSRNFEEPVHTKDEL

SEQ ID NO: 4562 - protein, 1510 aa, Delphinapterus leucas
MAKAGDVVRLLLGSTALWLSLLGARTASASKAVTANLAAKWPETPLLLEASEFMAEESNEKFWQFLETVQELAIYKQTESDYSYYNLILRKAGQFLDNLHINLLKFAFSIRAYSPTIQMFQQIAADEPPPDGCVAFVVIHEKHTCKVNEIKKLLKKATSRPRPYLYKGDHKFPANKENLPVIILYAEMGTRAFRKFHTVLSEKAQNGEILYVLRHYVQKPASQKMYLSGYGVELAIKSTEYKVLDDTQGKTVTNTSIEDITETNEVQGFLFGKLKERYSDLRDNLTTFQKYLIESNNEMMPLKVWELQDLSFQAASQIMSTPVYDAIKLMKDISQNFPIKARSLTRTAVNQRMREEIQENQKHLQDRFEIQPGDAGLYINGLHVDMDSYDPFNLLDMLKLEGKVMNGLRNLGIKEEHMSKFLKLSSPDWDDTYALDIRHSSIMWINDLETDDLYVMWPSSCQELLKPVSPGSIPFIRRNFHNLVLFIDPAQEYTVDFIKLAELFFYHKIPLRIGFVFIVNTDDEVDGKNDAGVALWRAFNYIAEEHDVSQAFISIVHMYQKVENHNILTVDNVKGVLQNEFPHANIWDILGIYSKYDGERKAGASYYRMTGLGPLPQALYNGESFHHEELNIRELETAVLHRMMDETAYLQKEVFMGTLNDRTNAIDFLMDRNNVVPRINPLILYNKWQYLNLISTSVTADVEDSSTFFFLDSQDKSAVIAENMYYVTQEDDVISSVTFWIIADFDKPSGRKLLFNALNHLEISVHGRLGVIYNPTSKIDEDNTAISRGILAAFLTLENSFLRNFLRKLAEEETATAIYSGDKIKRFLTEGMNKNAFEKKYNTIGVNIFRTHQLFCQDVLKLRPGEIGVVSNGKFLGPLDEDFCAEDFYLLEKITLTHLVEKIEDIVENTEVNSKNLSDLVMKIDALLSSLPKHASRYDVTFLEENHSIIKINSQENDMSFDVIAIVDPLTREAQKMAQLLIVLGKIINMKIKLFMNCRGKLSEAPLKSFYRFVLEPELTLPPNDVTGPVAKFLDIPESPLLTLNMITPESWLVETVHSNCDLDNIHLKDIEKTVTAEYELEYLLLEGHCFDIITEEPPWGLQFTLGTKNKPVVVDTIVMANLGYFQLKANPGAWILKLRQGKSEDIYQIVGHEETDSQPDLGEVVVVLNSFKSKILEVQVQKKPDKIQEDILSDKDEKKGVWDSIKSFTRSLHKKEDNKETDVLNIFSVASGHLYERFLRIMMLSVLRNTKTPVKFWFLKNYLSPTFKEVIPHMAEEYGFQYELVQYRWPRWLHQQTEKQRIIWGYKILFLDVLFPLAVDKIIFVDADQVVRHDLKELRDFDLDGAPYGYTPFCDSRTEMDGYRFWKTGYWASHLLRRKYHISALYVVDLKKFRRIAAGDRLRGQYQTLSQDPNSLSNLDQDLPNNMIYQVAIKSLPQDWLWCETWCDDESKQRAKTIDLCNNPKTKEPKLKAAARIVPEWVEYDTEIRQLLDHLENKKKNAILTHDEL

SEQ ID NO: 4563 - protein, 1515 aa, Centruroides sculpturatus
MLQKIWLVYLCYIIINIGTSVFCQKSVSVVLDSKWKYTPLHLETSEFLAEENNELFWRFISEVCKLGPGYLQNLSQQEQYEVILNITSKILSPARLALLKFSLSLRIHSPAVEMFHQIAYDKNLPTSCESVVEINKQFACNVEDLEKLLISVERDDVDIYKVDHHFKTLTSNSLIVILYGEIGTSSFNKFHQYLKNKAENQEVDYVMRHFVLNRSSEKVRLSGYGVELAIKSTEYKAQDDTKVKEDETTQTEEGNKQDEIEGFVFSKLKELYGDQKDKLEELRSHLVESTKEIATLKVWELQELSLQTAQRILSSSIEESLRIMGDVAQNFPIQARSLIHIGVSSDLKKEVEKNQQMFIQYHNIAPSDTALFINGMYFDMEVTDIFTLLQVLKQETRVIEGLHSVSVPESKVSKLLKMDFIEDKQEYAIDIRDSAVQYINDIETDRHYKNWPGSVQDLLRPTYPGMLRNVRKNIYHLIIIADPSQSDAKDIFKLAESFYVHKAPVRIGIIFAANPDTSLNGFENAGVALLNAFNFIAQDKTPYDGLSFITEVYATSEGKEFTPEIVKNHFHSKYPNEDLELIFGDDSDYDTGRRLAWDFINRTGIGNPPQVLINGVALKQSQLNVDMFEDAILTEVMRQTPFIQKSVYKGDLSDFHNVLDYLMSQKNVMPRLNQKILTPGKNFIDLTGVVVEGINQADLPYMSQKDFATTFAAHMNYLTKREEVVFRPLTWWIVGDLETPEGRELLNAALVHLKTSNEIRIGIVHNPLNPDSFKERIITKAVYVSTKVLNRNHAKLFITKLIKTTNAIQLLEGTRKPIDFALSDMNSDEYQATLEKEDDQFLAFHSAFARIVLGLAPGARAVVANGKIIGPFESGEEFLDDDFNLLEKFSMNVYGEKLSKELKGESETAEADSNIMMKATSVLLAQTNSRTRHDIKFYADKHSVLKIPASDPDEPAHELIAIVDPVSRGAQKLSAILLVLQRVINSHLKIFFNCIDKHSSMPLKSFFRFVLEPELHFTSSKQTVLGPMARFNKLPTTSLLTLGMITPENWMVESVRSPYDLDNIHLEQVESGIYAEFELEHLLIEGHCFEQTSGNPPRGLQFTLGTKTSPVMVDTIVMANLGYFQLKANPGTWLLRLRQGRSSDIYNVVSHEGTDSPSGSTEVVVIISNFRSHIIKIRVNKKPGKQYEELLYDDDEDSRSGIWNTITSSFSGDSKNKDEEDDDKINIFSLASGHLYERLLRIMMLSVLKNTQTPVKFWFLKNYLSPTFKDFLPLMAQKYNFEYELVQYKWPRWLNQQTEKQRLIWGYKILFLDVLFPLDIKKIIFVDADQVVRGDMKELRDLDLGGAPYGYTPFCDSRTDMDGYRFWKSGYWASHLAGRKYHISALYVVDLKKFRRIAAGDRLRGQYQGLSQDPNSLANLDQDLPNNMIHQVNIKSLPQEWLWCETWCDDKSKQYAKTIDLCNNPKTKEPKLVSAMRIIPEWKDYDTEIKQLFEQYKEGKVSTKLQTDHDKHEEL

SEQ ID NO: 4564 - protein, 1545 aa, Chrysochloris asiatica
MAAAMALSAVRLLLGAVWLSLLGAGTVAASKAVTAHLAAKWPETPWLLEASEFIAEESNEKFWQFLETVQELAIYKQTESDYSYYNLILKKAGQFLDNLHINLLKFAFSIRAYSPTIQMFQQIAAEEPPPDGCSAFVVVHKEHTCKPSEIQKLLRKAASRPKPYLFQSDHKFPTKKEKLPVVILYAEIGTSAFVKFHKLLSGKAHTGEILYVLRHYIQRPSSWKMYLSGYGVELAIKSTEYKALDDTQIKTANDTVVEDENEASEVQGFLFGKLKEIHSDLRDNLTAFQKYLIESNKEMVPLKVWELQDLSFQAASQIVSAPAYDALKLMKDISQNYPLRARSLTRVAVNQQMRKEIQENQKDLQDRFDIQPGDTRLYINGLRVDTDGYDPFSILDMLKLEGKMMNGLQNLGINGEDISKFLKLNSHTWEYNYALDIRHSSIKWINDLEHDDLYITWSPSCRELLKPAFPGNIPSIRRNFHNLVLFIDPAEEYTLDFIELAELFYSHKIPLRIGFVFILNTDDEVDVTNDAGVALWRAFNYITKEHSVSQAFVHMVQMYEEVSQNILTVDIVKSVLQKKFPQVNVWDVLGMNSKYDEERKAGANFYKMSGLGPLPQALYNGEPFKLEDMTLKDLEMAVLHRMVDTCVYLQREVFMGTLNDRTNVINYLMDKNTVVPRINNLILHSKPQYLNLIPTSVTADLEDFTTFFFLDSQDKSAVIAKNMYYLTPEDDTISAVTLWIIADFDKPSGRKLLFNALKHMRKSVHSRLGVIYNPTSKITEENTAVSRGILTAFLTQKNRNLKYLLRKLTKEEIATAIYFGDKIKTFLTEEIDLNTFEKKYNTIGVNIFRTHQLFCQDVLKLGPGEMGIVSNGKFFGPLDETFYAEDFYLLEKITFNSLVMNIKDIIKNMEISSKNTMSDLVMKVDVLVSSLPERVSRSDVTFLKEHHSIVKINPQEKNLFFDVLAIVDPLTRETQKLSQLLIVLNKIINMKVRLFMNCRGKLSEAPLKSFYRFVLEPELMLGANDLHSPGPVAKFLDIPESPLLTLNLITPEGWLVETVHSNCDLDNIHLKDIERTVTAEYELEYLLLEGHCFDIMTEEPPRGLQFTLGTKNQAVVFDTVVMANLGYFQLKANPGAWILKLRRGKSEDIYQIVGHEGTDSQKDVGNVIVVLNSFKSKILEVQVQKTPGKIEEDILTDKDDKKKGMWDSLKSFTIRLHKEDKRETDVINIFSVASGHLYERFLRIMMLSVLRHTKTPVKFWFLKNYLSPTFKEVIPHMAKEYGFQYELVQYKWPRWLHQQTEKQRIIWGYKILFLDVLFPLAVNKIIFVDADQVVRHDLKELRDLDLGGAPYGYTPFCDSRTEMDGYRFWKTGYWATHLLRRKYHISALYVVDLKKFRKIAAGDRLRGQYQALSQDPNSLSNLDQDLPNNMIYQVAIKSLPQDWLWCETWCDDESKQRAKTIDLCNNPKTKEPKLKAAARIIPEWVEYDAEIRQLLEHIKTKKSNSRFFYRTFDSHAQYWSWTPSSSSGLMVEEIVVRGVLIHDEL

SEQ ID NO: 4565 - protein, 1382 aa, Lepisosteus oculatus
MSDIQPKPYLFKFDHTFPANNGSDLPVVILYAEIGTNKFNTFHKLLSERARDGKIIYVLRHFVVNTKMEKMHLSGYSVELAIKSTEYKAVDDTQVKDANSTVSEAEDESDDVQGFIFATLKKAHPELKEQLSEFRKHLIESSNDMAPLKVWELQDLSFQAAAQITSVPKYDALKMMRDISQNFPIKARSVTRTVVNQEMRREIEENQKYLSEKLGIQPGEGGLFINGLHIDLDMHTPFSILDIIRREGKVMEGLHNLGIKDDDLSKLLRLNVHPLEDTFALDIRHPAIMWVNDIEKDHIYRTWPSSCQELLRATFPGVIRQIRRNFFNLVLFIDPSQEDTVELVKLAELFYQHKIPLRIGFVFVVNTDDKVDGYLDAGVALFRVLNYIVEKYDFSQAFMSMVSIYNKVDSGENLTVDIVVEYLKKKFPSADVPGILGIESVYDDKRKAGGVFYRKSGLSALPQALFNGIPFRREEMDPDDLETNLLQRIMDTTTFFQRAVFMVQLSDDADVVEFLMDQSNVVPRINPLILSTARSYLDLTSRPAVQDWQDTVTFSYLDSRDKSAVISENMKYITKNEEDVHIYGVTIWIVADFDKPPGRRLLSNALKHMKSSPNTRIGVINNPTVKPTEENSLVARAIWATLLTQKQQETFPFITKLIKEENIQLLAQGTKLKDLFLQGMDKDSLEKRHNTIGVDFIRTQQLFCKDVLKLLPGQMAVVSNGRVLGPFEEKEELHPEDFQLLEKITLSTSAEKVKVKIKQMNWKGKQASDFVMKVDALLTSAHKGESRKDIRFIKDELSVVQIPPREDEVFYHVVAIVDPVSREAQKMSSLLIVLSQVINMKLQVFMNCKSKLSEMPLKGFYRFVLEPDVSFLSNNSLSPGPVAKFVEMPESPLFTLNMITPESWLVESVRSFYDLDNIHLQELNGFVTAEYELEYLLLEGHCFDITTGQPPRGLQFTLGTKTDLLMQDTIVMANLGYFQLKANPGAWTLRLRKSRSEDIYQILAHDGTDSPAESDDVIVVLNSFHSKIIKVQVQKKADKVNEDLLSDGTEDRGVWESLTSLWKSLEKSITGGSKSEDAENKKEDVLNIFSLASGHLYERFLRIMMLSVLRHTKTPVKFWFLKNYLSPMFKESIPLMAKAYGFQYELVQYKWPRWLHQQTEKQRIIWGYKILFLDVLFPLAVDKIIFVDADQIVRTNLKELRDLDLEGAPYGYTPFCDSRKDMDGYRFWKSGYWASHLGNRKYHISALYVVDLKKFRKIAAGDRLRGQYQALSQDPNSLSNLDQDLPNNMIHQVAIKSLPQEWLWCETWCDDNSKSAAKTIDLCNNPKTKEPKLKAAMRIVPEWMEYDTEIKQLLKHAKDKNLKDTSQSARTKNKRDPERDEL

SEQ ID NO: 4566 - protein, 1552 aa, Glycine soja
MGDLIELSERVRVYVMGYRSACLVLILFLILGIGTGIASSETPRPKNVQASLGAKWSGTPLLLEAGELLSKEDPRLFWDFIDIWLNAAADDQSHSAKACVIEILHHARPLLRQPLASLFEFSLILRSASPALVLYRQLAHDSLASFPLQDARAHAEITKLDPLRLGISLKSPGGKCCWVHTSQNLFFDVSQLLSWLQTQTPVGDSSQRPQLFDFDHVHFDSSAGGPVAILYGALGTGCFKDFHAALAEAAKQGKVNYVLRPVLPAGCETNFGHCGSVGASDSVNLGGYGVELAFKNMEYKAMDDSAIKKGVTLEDPRTEDLSQEVRGFIFSKILERKPELASEIMTFRDYLLSSTVSDTLDVWELKDLGHQTVQRIVRASDPLQSMHDINQNFPNIVSSLSRMKLDDSVQDEIMANQRMIPPGKSLMAINGALVNVEDIDLYLLIDLVHQDLLLADQFSKLKIPHSTVRKLLSTSPPSESSMFRVDFRTTHVHYLNNLEEDAKYKRWRSNLNEILMPVFPGQLRHIRKNLFHAVFVLDPATILKSLIFGTLQSIDTIISLYENNFPVRFGIVLYSSKSITRLENHSAKEDGDKFEEDISDMIIRLFSYIKGNHGIQLAFEFLSNVNKLRIESDDHIDDAHLELHHVEGAFVETILPKVKSPPQEILLKLQKEPELKELSQESSMLVFKLGLSKIHCSLLMNGLVIDPTEPVTHLLAVDITSGSGLHLLRQGLNYLREGSKEARIGFLFSANQSTDSFSLLFVKVFEITSSSYSHKKNVLDFLEQLCSLYQQKYLLSSAVEADSIQAFIDKVCELAEANGLPSDGYRSALPEFSADEVRRHLSKVENFFHRVLGSESSANAVFTNGRVTYPIDESTFLSPDLLLLESIEFKQRTKHILEIIEEVKWQDVDPDMLTSKFISDIVMTVSSSMATRERSSESARFEMLNDQHSAIILHNENSSIHIDACLDPLSPTSQKLSGILRVLWKYIQPSMRIVLNPLSSLADLPLKNYYRYVVPSMDDFSSADSSINGPKAFFANMPLSKTLTMNLDVPEPWLVEPVIAVHDLDNILLENLGDTRTLQAIFELEALVLTGHCSEKDHDPPRGLQLILGTKTTPHLVDTIVMANLGYWQMKVSPGVWFLQLAPGRSSELYILKEGVDGIQIKQSSKFIIINDLRGKVVHMDVVKRKGKEHEKLLISDDDAPQDKKKESSWNSNLLKWASGFISSNEQPKNAETNSPEKGRGGRHGKTINIFSIASGHLYERFLKIMILSVLKNTHRPVKFWFIKNYLSPPFKDLIPHMAQEYGFECELITYKWPTWLHKQKEKQRIIWAYKILFLDVIFPLSLEKVIFVDADQIVRTDMGELYDMDIKGKPLAYTPFCDNNREMDGYRFWRQGFWKDHLRGKPYHISALYVVDLKKFRETASGDNLRVFYETLSKDPNSLANLDQDLPNYAQHIVPIFSLPQEWLWCESWCGNATKSKAKTIDLCNNPMTKEPKLQGARRIVSEWPDLDLEASKFTARILGDDLEPLQSPNQSKDLTSEGALKEDLESKAEL

SEQ ID NO: 4567 - protein, 1281 aa, Entamoeba histolytica
MKILILILFTTALGTIQVSLKSNWKDTPLLYETLSYLNEYNNELLLPFFEGIIEKDVFNLRGEKAYNTFIELLPENNRKLIELALSLRSQSPFVAASNSINISCNGIIRGNKCSLNGKEEKGRFEYERYLLYLTKQTNTTGILIIPQENIKEKFNLLKQLMKEKVISSMALFLKPSLSEGIKDGIITPLDTMNLTGYDIEIMHRNFKREFGIIKEKEDYIYLKEWNNEELRIGMMDYLLNDKEKSISNKLMNITQEFPLSIINLLKRKNESLKIISENLREVNSQMMLINGISFNLQQQSIYDFIDILQKEDNKLHELQKYELPKNLFISSLVSKENKETIRFLIPSEHIIKLNSLDSYLYERFPKQLESFFQYNPYRLFRYTSQDLYTFIATLDFNDLSQTLNSLKVIQTFMFRYMAPLQFGIIPINIPTNEIGKILLSSIIDINNKWGTDGLMKFIEKVDELQINSVSQITDFFRKFYRLRVSTFEYNINNYLNNTKILNTINYMNNHGFKFNAFYLNGVFINPEKMVSEFSKIYSSDIPILQELIRTKQLHDGNIYKQLQNKFQWIKYIDNDLMTIKQNSIANWKEPFNISKPEDINHIITLCGDGDEVKMNQIIEKLYELHSKEKWKIIGGMKNITENQIIENKFKTKEFKEIIKILKEGNKKEICENANIIFDSIKIKGNEHLEEQIKLVLHGIKHLSENLKRDIGINKLGIAMNLILLDSLTTNRVYDNNQSPLTVKQVVNDVNSIQYNIKLLIDPIMREAQKVSKMLQILEELYPNQINIEMILIKTSGKGGDFPCEYYYSNIPFKPIFNNNQRKDQDLIIQSLPKNIMFQLKIITAQNIDTLLTNTTVDIDNFKNNGTIMIEYSLTNLVIEATSQSKVYIGNEYRYNIINVTGDNGFINQGVLSKDGYFQTLVPPGIYSTYSNPSMYYKFITLNQPFEVLNFKFTVHELSFQSVLLSLEEKNKIMNELNTNKPSTSNSFISNLFGNKKDEPPIEIFTIAGGKDYERTVKILIYSVKKNTKSPLKFWLIEDFLSPEGRIKLKEYGKALGVTIEYCRFHWPYFMFKQVSKTRIIWANKILFLDMMFPQTVDKIIFMDSDQVTRADAKELWNFDIQGNAIAMTPFCDGEWLNKETVNYRFWYHDSWQHALQNRPYHISALFIADLKTFRMNNVGEQYRSMYNNLAFDPNNLANLDQDLPNYIQNYVPIFSLPQEWLWCESWCNQKVKSKAKTIDLCSNPIKPLGKIESALKYIEEWKSYDEIVHGMEEKINNKKEL

SEQ ID NO: 4568 - protein, 1547 aa, Pisolithus microcarpus
MDASALASVRARLALHAASPRLAASAEHYDLRLSNVPDDARLFSAECASWVDWYGRVVCDADRLLQLVNESTGNAMPRPARFPFDHVHSVQHLQDEPHYTAVHYADPTAPSFASLHSALLGLEPKVEYVLRWARGAGEKNTNELSSYLSGYGVALDLKKMDYLVIDDRHWSAGVSDSSGSSASPSSHANTKDKNFSEEALSCVFESLPYVDELAEARAKAGEPLSMQEITDLGVKAAQFLTSVSSQPYIGSVHAHRCWDHPPSVEVFLRTLSTSFPLYATSLARKITVSGELKDEVHENWARSAPGANMVWVNGRALNEDQGASGNIFGILRTVRRERRLVKSLVALGMTREQAIELLMHPVHSSAQSTGSHLGSRRRPVVEEDEERKRTFTISPKFAEFVEGLVDASDRREGGDVIIWLNDLEKDPRNSRISPSLIGLLRVHTMSLFSPALHIRYNLVNVVFVLDMSQLRSFSILSTIHDNFVMRGYPVRWGFVPETRGEGLKIARLLYYIERIYGKDTMMNFIQRLLAMHSQRRLTAFSWDVVNELFVTFNAVDDLGTVTGGVVPLLDEPAADNLLFRAQKYAKRVGVAAQGTAGKGHVFVNGRYSSLNDNVMRQIASEATVQLQILQEMVYIGEITDADAPSLSTFFYDLPSTVTRRNPYISVDVKAGQNSDSRGLEIFDLTELFWSTGFAPEEGFFVLPTNDHVVPMTMYIIADLDTPQGIKLATEALKFIETAADTRITFVHNPEVATSGGQASSLLITLIQARALSHFSSTDLVAALAGDNQDSTYEFLRNERLASNAAAEAEVSRLKQAMRAVARHLGLRPGERAILVNGRLVGPFDSNSEFLEEDFETLEVFEKKKRVGQIMDALDDVFHGIGNLEPSKRSDLIAVASSIIYADQQPDPGEVGPFDTAPRPRTQNYRLLSGNYTKFTFGDKSTALTQVALLLDPLSDAAQKWSSILEYHARLFPEIFIELYLNPSQLSEIPLKRFYRYNVMPSLQYDENGQEIPCRAMFTALPEEPIYTLAMDVPHSWLVRPRSALYDLDNIQLGLLQGEERARGVQALYALDYLVVEGHVYELQTNNPPRGVQLQLIDITDQSVVDDTQVVANLGYTQFKARPGTFRLEIRQGRGRTLYSLDSVGAEGWNSPSVAEAGDEFTVMDFDRLTLYPRLARRPGMEGMDVLDDLERVEDEPGVVDNLLSKLLSLFKPTSDEDKALAKMPGENAEINIFTVASGLLYERFASIMILSVLRNTKSTVKFWFIENFLSPSFLEFIPHMAKEYGFQYELVTYKWPSWLRPQKEKQRIIWAYKILFLDVLFPMDLKKVIFVDADQIVRADLKELVELDLHGAPYAYVPMGDDNHEMEGFRFWKTGYWRDFLRGRPYHISALYVVDLSRFRQMAAGDILRGQYQLLSADPNSLANLDQDLPNNLQREVPIYSLHEDWLWCETWCSKDRLHRAKTIDLCQNPLTKEPKLSRARQIPEWEQYDAEIARFVRRLAAEGKIRGGASTADSKILAGVGASAPVPVKSSEQTDIGDQPRTRDEL

SEQ ID NO: 4569 - protein, 1479 aa, Malassezia restricta
MMEAAGQVWPHAFFSLVSRIWSHPSAGGELKDMSYERLYHHMEGVLRSLAVDVHDAYPESHLEEWRTLVAQHAQAAKVESYYQMFEAGSNLRSLNVPCDTFVHVNGHAYCSLPAARQAIQALNTSSPLLAHDHVHPSHTAPGPSLVLYADPYSTSIHEFHDMLHALSSTSHVKYVFRWRPSVASVKSRPMSRYFSGFGTTMHLKKVDYLVLDDRHIDKSHHAELPMSHEPDRVRIFSDQLQNKLHRLLGTKRPSVQDAVTRHSNLTISELAQLDVAATHAILSSDDPMSTWESIVLDFPIHSGTLSDYMDTIPDDDTILDTLNNVEKRLISPGITQLWINGLPVPVTELQPLSFIKRMHDELDLIEAFGASELGISPDGAEMIMANPSVNAAFAPIQAAPQFYDASDALESSSELGMPVIAWVNDLTNSMYADWPKTLKDMMRYRWMSGLPLIQQNFFQLVVLLDMRDPRALLLLGMYLDATLMDYAIRWGIVPLLEDEDCHVLAQLLWLGMEQLAALEIPLFLQKLAATPLTPEGRVDPKQARAVLRSMLPASAQEDNELMAFLNGGERISGYKRLLELAKSYLGRLHTMKRPGSSGVAYFNGQEVSLDEHLISQVFAATKYQLQMAWDDIRDGYIDSQDRYTRYFYDLRDTKSRRSALVTMVEDAQSFVRPSVYVRLPDVTRELGEHARPIRDFLYSPGDTSVSIRLLGDLNDRATLDILLRALEAMETTPFRLSFVHTGTSDGLLSEWLLQAMHAGALSNMSHNDLYHALESNNLAASLENLRQKYHIPTTKYSWSQISLAFSQALELKHVGPIILLNGQSLDHIQGVSQFDIESVVAWEDEVHVQALLNALDVPDETRESRAQVIEFAVSVVGWNFAKNSDQEGPMESAPQKRDPSGMYLHNSDLMLRMGQDSAPIHITGLLDPLCTNAPQLVSLLRMMSTFSCVRISLMLNPRIRVPSLPFNQFTRFDYRTQPRFDEHGQEDMPSLSFESLPESSVLTMQIHAPRSLVAMADEAVYDLDNIRLADVHGRLDTVYSVNSILVEGHARAEHGPIPEGLQLVLSSDDQRSQLDTIVMENLGYFQFRAQPGRWTLRIREGRSQDLYEMTSVGALGWSSPPVSHTGAAITLDTLEGVTIFPTFRKHKGKEMEELISSVDMAESLTTSKFSSLLHQAVSYVGQLLRPMRSKGKHAEINVFTLASGHLYERMTYIMILSVLRHTKSSVKFWFVENFLSPSFKSFIPHLAQAYHFDYELITYAWPEWLREQTEKQRMIWAYKILFLDVLFPLDLDRVIFVDADQIVRTDLKQLVDMDLHGAPYAYPPMGDDSEDMDGYRFWKQGYWKNVLRGHPYHISALYVVDLKRFRSIAAGNILRVHYQQLTADKNSLANLDQDLPNNLQPLLPIHTLDKTWLWCETWCSHDWLPQAKTIDLCSNPKTKEPKLDRARRQIPEWTELDNEVAAFAESLRSPSYSTPHDEL

SEQ ID NO: 4570 - protein, 535 aa, Brettanomyces bruxellensis
  MOD_RES (3)..(3): Any amino acid
  MOD_RES (177)..(177): Any amino acid
  MOD_RES (193)..(193): Any amino acid
  MOD_RES (229)..(229): Any amino acid
  MOD_RES (394)..(394): Any amino acid
  MOD_RES (398)..(398): Any amino acid
  MOD_RES (474)..(474): Any amino acid
  MOD_RES (518)..(518): Any amino acid
  MOD_RES (525)..(526): Any amino acid
  MOD_RES (531)..(531): Any amino acid
  MOD_RES (535)..(535): Any amino acid
MEXIGINRLYRGMFRPPVKFDDNGTFDENELQIIFDEVPGKPLFSLSVDEPQSWIVGIKEANADLDNIKLDISGPVVGVYEVENIMIEGYSRDVVSPSAKPIGLVLELSSSFNDKMQETSVMANFGYFQLKANPGEWSLRVKPETKGADIYDLVGVSLNSTSLDIGDGKISSFDFGXSNLGGLNSFSQYFQKXLEKENDFIIGDHNIERKNNGGSNSYFSSFLSKLKNXVLSTKKAEEHKNADINIFSIASGHLYERLLEIMTASVMKHTEHSVKFWFIENYMSPKLKAELPLLANHYGFQYEFITYKWPVWLRHQREKQRIVWAYKMLFLDVLFPQSLDKVIFVDADQICRTDMKDLVDLDLEGAPYGFTPMCDSRKEMEGFRFWKKGYWKRXLGDXYKYHISALYVVDLDKFRSLAAGDILRQHYQELSKDPKSLSNLDQDLPNNLQDVLEIHSLPQNWLWCETWCSDESLXDARTIDLCNNPLTKESKLERARRQIPEWNDYDQEVABLVYHKNXSHKEGEXXKSQSXNHEX

SEQ ID NO: 4571 - protein, 1514 aa, Steinernema carpocapsae
MRHFVLTWAFVLLTLGCATVESFSKKPVITSVTSKWGQTSLLAETSEYFASESNERFWQFVLEVVERLNSDEYKTYTPQKVYEAALKLASPVLGDSTNDMLKLSLSLRIHSPAVVMQYQLGNEHDNIDCPAFIDLNGKIACNVSELDEVMKTALEGTPSVLISTDHVCPSTNGHKDVPVLILYGDLGSQSWLTLHIAARALSTSGKVKYVFRHFQKFNTKLTSPVGLSGYGVELAIKNTEYKAVDDSAVKSDDKFEADEDIPELEDVAGLNFNVLKKRNSHLRDNLKKLWMEMNEKQELTLLKQWEVQDLGFQAAQSVVDADPEDAIAHLVDLSQNFPTHARLLTKVSVNKNLRKEVEMNQENAFAPLKLDSGDSALYINGIPVDLDSMDLFQILEVLKKEEALANAFNKMDIGREYLSLLFNEAPTEDAPAYAIDFRDGFPEYINDLDKDKMYRGWGNSVKMMLQPYFPGMIRPIARNFFTLVFVVDPAHPDTRSLLKTAYSFYSHQVAMRIGFIFVANDNRETANGMHDASVALLNFYNFVKTEKSIPKAIYHLSNLLDTIDGQITPEDVHRFFRQEFSDQEVEDIFGSNSDYDNGRSAGAAFFRKSKIGSTPKVLLNGVALDDEGIKGDKFEETVINEVMRQTQKIQMAVMKGRLTDRDNVMKWIMSQPEVLPRLNSRVLSGESKYVPLTGISQCKLNVFSQFVKASTEAKGECVMERMKYLTKSDEDNTRWFNVWVAGDMDSESGRDLLANAMKHLKKSNSMRLGLLQNPAQKSEDVGKVTNLIYNSIRLLPNHITKQMLLKLTKADIAKKVDDGVMKVDDVAVQGMSVDSFKKEVGLMNYDFLRMEADYAQSVVGLKPGQRAVIVNGMVVGPFEDDESFEVEDFALLETVIARKNAESIAKTVDGWDFHKRDGKSSDMLMRVFSAMGAFSQKKTRNWVVFSDDVHSVVTLSKNEEKRPVVDVVAVVDPLSKQAQKLAPLLQLIYNVLNCDMKIAMNPKAKLSELPLKRFYRFVANNELLFDKHGNLINPMAIFNDLPSKQLLTMSVSPPDSWMVQPIYAKYDLDNIKMEQVGKNGVIVRFELATILLEGHCFDEITGGPPRGLQFIIGTEKKRDLSDTIVMANLGYFQLKASPGAWVVSLREGRSKDIYEIKSHTNTEEGGNNESIRVLIDSFSGRTIRVRVAKRPSMQDYNLLDESDSDGSLFSGLSSAFSGGDSNEVINVFSLASGHLYERFMRIMMLSVVKNTKHPVKFWLLNNYLSPQFRESLPKMAKKYNIKYELVEYKWPRWLNQQSEKQRVMWGYKILFLDVLFPLNVKKIIFVDADQIVRADLMELMDLDLGGAPYGFTPFCESRKSMDGFRFWKQGYWANHLAGRKYHISALYVIDLVKFRQLAAGDRLRGQYQGLSADPNSLANLDQDLPNNMIHQVRIKSLPQEWLWCETWCDDDSKSRAKTIDLCNNPLTKEPKLDSAVRIVGEWKDYDDEIKSLLNQKVVEPSSEAKEAENAHSEL

SEQ ID NO: 4572 - protein, 1280 aa, Caenorhabditis briggsae
YNFGISTASSLLDASEYPLLRFSIASRIFSPRIEVHRQISKKFQPNSCKNTFFVYGNQVGCQLSELNFKEYSGNAEIFEFDHIFPMKSKANRTLIIYGVLGTAELKNMILEAKILVETRENLNFALRFLSLSSGTTKVSLSGYGVELALKNTEYKAVDHLTQELPENLHGLNFRILKNRHTDRHNELESLRENLEKLGEIVPLKQWQLKDLGLKTCERIQEDSMELEEIERVLQDFPIHARTISHRSLNESFTKPIQKFQKTLKSAGIGNGENLLALNGRILSKSDSKIDLFELIERKTEKKVMDRLIEIGSVSEDSEIDYSKLLTLFDFSPIAISKNAFDYRKTKPVFLNDLESFLSPYRSLHLLLQPFPSDQIRPIARNIFNLILFIDPFDSEDKLLDLAQKYLKGKVFIRIGLVPFFNENKWGVSVQEGVNSKEISKEARKIWKTNEDILKALKNGNEFLLKTGLGKGPQALLNGYPLDTSSSESFDAALFDNIQKQTLRLQLALYQRLITDSVKIDDFWLKEETNPDLKTRVSMRIFSAKFEFFRIVKAFNERRFVELDSEASENPENPTLAIIANFENTKNRLSITKWLKSLKFPLKIALISNPTTSSDSEDSSCPSDSENLESAILRLENQESCIGARKFSNFLRKNEIKAGEMAVIFNGLVIGPFEENEKEQFLEIEDFEFLENLWKERGAKKTSAFLSQHFPNQDDVTIKFFSVLSKIYKKDVPRVAFDNFKDLENRNLIIFPPKNPESPYSTITWILNPVSREAQHLVSIVKLMSNVLNAKVEIIFNPSSELHEMPIKRFYRFVASEFLEFDENGKIKDQSAIFSNLPQKQLLTMSVETNDGWMIEVKKADDDLDNILLENTSGDVESEFSLEHILVEGQSQKSGTGDASDGLELELKSENTKYDTIVMRNLGYFQLKAEPGIWDLKIRNGTSSENFWIQKIDSKEVNGKITVVVDSFTRKWTQLVVEEIEDKKEQKEGSAMGRLMEKAKNFFSTPPPSETINVFSLASGHLYERFMRIMIVSVMKNTQSGKVKFWLLKNYLSPKFKESIPILADFYGFEYELVEYKWPKWLHQQTEKQRVMWGYKILFLDVLFPLNVDKIIFVDADQVVRADLLELMDFDLKGSPYGYVPFCESRKEMDGFRFWKTGYWNTHLMGRRYHISALYVVDLKAFRKFAAGDRLRGRYDNLSADPNSLSNLDQDLPNNMIHEVPIKSLPQNWLWCETWCDDRSKKTAKTIDLCNNPLTKEPKLSSAQRIIGEWKELDEEISNVI

SEQ ID NO: 4573 - protein, 856 aa, Caenorhabditis remanei
KGSQFLENFGLSKVSHALLNGYLLDVSSPENFDLILQENVQKQTIRLQMMIYHGMINDNVKIDEWWLAKETNPDIVARINQKIVIAFNDRRFLKLDEKAFSDMITSVDYFPKSSLSSLKSSNVSTWIIADFQNPINRFFAANTLKSVARKSENRIAIISNPKLSSHNSESESCSFEYGDLENLIEALESTDNCIKTTVSSKFLFTNGINPGETVIVSNGLIIGPFSDEREYLKVEDFDYLKELWNEKGAGRTSEFFKKQYSVDDVDIKFYSAMARMYRKDVSRISFDEFNNSENIITFPPENSSLPSVTITWISNPVSREAQQIISIVKLMSKVLNAKVEIIFNPAAEILESPIKRFYRFVAKEELEFNDFGAVENHFAVFSNLPQKQLLTMSIETNDGWMIELKEAEYDLDNILLESISEDVESVYSLEHILVEGQSRKSSGEASDGLEIELQSGDTTYDTLVMLNLGYYQLKAEPGVWNLHLREGSSSEKYKFLKVDSKQVEKDIKVVVDSFTGKWIQLVVDEVESKKKPEPSKIEKLMNSAKSFFSTPAPSDTINVFSLASGHLYERFMRIMIVSVMKNTKTQKVKFWFLKNYLSPKFKKSIPLLADFYGFDYELVEYKWPKWLHQQTEKQRVMWGYKILFLDVLFPLNVEKIIFVDADQVVRADLQELMDFNLNGSPYGQSFEPFIFRYVPFCESRKEMEGFRFWKTGYWNNHLMGRRYHISALYVVDLKAFREFSAGDRLRGRYDSLSADPNSLSNLDQDLPNNMIHEVPIKSLPQDWLWCETWCDDNSKKTAKTIDLCNNPLTKEPKLNSAQRIIGEWKDLDEEISNVIRNDNRTKRSKLSESNEDKEEL

SEQ ID NO: 4574 - protein, 1734 aa, Macleaya cordata
MDLQGRSVRYFTSYFLIILIVLSFAGSSVASENRRPKNVQVSLRAKWSGTPLLLEAGELLSKEWKDLFWEFIDIWLREENDSGSSTAKHCVQNIVKYGRSLLTEPLSSIFEFSLTLRSSSPRLVLYRQLAEDSLSSFPPADETNPRDVTGDTLEEPDVIPVSKRADNILIGMNPQGPNGKCCWVDTGGVLFFDVSELLLWLDSHSGSPGDSFEPPEIFDFDHVHFDSSIASPVAILYGALGTNCFKDFHVVLAEASRKGRVKYVVRPVLPSGCEATTGSCGAVGTRDALNLGGYGVELALKNMEYKAMDDSAIKKGVTLEDPRTEDLTQDVRGFIFSKILERKPEMTAEIMAFRDYLLSSTVSDTLDVWELKDLGHQTAQRIVHASDPLQSMQEINQNFPSIVSSLSRMKLNDSIKDEILANQRMIPPGKSLMALNGALINIEDIDLYMLLDMVHQELSLADQFSKLKIPKRTIKKLLSTLPPSEANTIRVDFRSTHVHYLNNLEEDAMYKRWRSNLNDLLMPVFPGQLRYIRKNLFHAVYVLDPASSVDMIISMYENNFPIRFGVILYSSKLITKIEENGGEPPQDGSHSVEDISSLIIRLFIYIEENHGPQMAFQFLSNVNKLRSESEDLAEETLEVHHVEGAFVETLLSKAKSLPQDVLLKLQKELTFKERAEDSSLFVFNLGLFKLKCCLLMNGLVSESTEDAVQNAMNDELPRIQEQVYYGHINSHTDVLDKFLSESGYRRYNLQIIGEGKTQKRFKSLSASILGSDSVLNDISYLHSPGTVDDMKPVTHLLAVNLTSKKGIKLLREGIRYLMGGSKRARLGVLFSTENGAGSPSLLFVKVFRFTATSFSYEQKLLDFSEQLCFLFEREYMLTMDSESTPLFIEKVLELAKANGLPAEDYKVALSDVSTDLLRNHLDKVSHFLYRHMGLEFGASAVITNGRVVLPTQGSTFLRHDLDLLESVEFDQRIKHVMEVIEEVDWEDIDPDILTSKFLSDLIMFVSSSMAMRERSSESARFEILNAKYSAVVLNNDNSSIHIDAVIDPLSPLGQKLSPLLRVLWKYVQPSMRIVLNPLSSLVDLPLKNYYRYVLPTMDDFSSSDFSINGPKAFFANMPLSKTLTMNLDVPEPWLVEPVIAIHDLDNILLENLGDTRTLQAVFELESLVLTGHCSEKDHEPPRGLQLILGTKSKPHLVDTLVMANLGYWQMKVSPGVWYLQLAPGRSSDLYLLKENEDGSEILPLSKRITINDLRGKLVHLEVVKKKGKEHEQLLASSDDDSTLEENKKGNLKSWNTNLLKWASDLIGGSEHTKRKGASVEHREDGRHGKTINIFSIASGHLYERFLKIMILSVLKNTHRPVKFWFIKNYLSPQFKDVIPHMAREYGFEYELITYKWPTWLHKQKEKQRIIWAYKILFLDVIFPLSLEKVIFVDADQIVRADMGELYDMDIKGRPLAYTPFCDNNKDMDGYRFWRQGFWKEHLRGRPYHISALYVVDLVKFRQTAAGDNLRVFYETLSKDPNSLSNLDQASLMDFDLPNYAQHTVPIFSLPQEWLWCESWCGNSTKPKAKTIDLCNNPMTKEPKLQGAKRIVSEWPDLDLEARRFTARISGEEMDNTQETVVTPNQKENEIKPLLFLNTSVHPAYAGMSSPCGEYLGVVLICKMRRSSSSNNQPLPLDYLHTEPTSRSVKAWFKLGAEVPEREPHPYTTILVVADPPNTRRTRHILVDVSSPYNS

SEQ ID NO: 4575 - protein, 1668 aa, Trypanosoma cruzi
MELGPRDCSKSMNQPHHRPRNIAYCTDWGRGRGRFAATLTILLLWSVSLILLEAPTVEGKGVHVTLLAPWTETPLLQEGCEMVAARGAHFVGFYQCMQDVWKRVQAMNSSDGAAKLTQKSQYDILLDMMEQANWPPTQVKLAKMRLAARLYSPVVEAHWQLARKAKQLIGGCSTEGGPFVLTAGKVICSEDLLEETLSAPAPVNETQDGHEDEAFSLFAEIDQLHPNAKGSRVVILYGVVGEEQTMQLLQVLERHLHAVRLAFRHLPISGRMWEHPLHVQGYAVTVDLKNVEYKVIDEKDKNDAGTDANDANTVEETESIGSVGGFNLTLLTQRYPQLKPQLNAFASHLVDMIDRDEVKVDFQMWETQYMGIAAAQYVMDAENEKRLNVLMNLLTKFPLHASKLSKMGATVKAKMNKKMHEELMEFASVVRSGTSPVFLNGRNLAAEKLNLFSFLQKLDEEEQLLEGVQRVFTSYRLPSANDDGFFSAKTDALNQAMVSVRRSVHRYIASNGLEDGEPVPRIWLPQRSVLWLNNIQRDVNYVYMPAALEAILHLNINGVPVIPRKNLIHAVCVVDPTTVAGLQNILTILKLEESKQPVRLGIVFADNKWSPELSVFKRGNDFITDKSLSGVTVIIAATVWELLKGEEHPQDVLEFLSEVVQARSTRGNLEEDEIKVISSNILTLAGKTTLDNILTDASFVEYYQDTQMKLREMKLDASPFTLLNGKMFQGNMLHALRQNFMEELHYVRGLVQSDALTERDDDDFYESILRLSGARERYNEAFYSEKFYADWTSKPVLDFLLHRPFLLPTIRSKKTPLVSSVLTIQSPMGEAALEALVKTIRNLLQCEDETQKCVNVRFTYVVCDVAKESKRRTMAGDLERLIVRRKGGDDGKQQVQWVYDFLQKIAAQNNTRQLMDPDLYEGLVAEVNFSPEVKKLLDASDEGLDAQLQVQRGIVNGFCAQLEADSLSTSSLSANGAAAGREKGNKEGAVYYYVNGRRFVYDDSFLEEDFRTAEEMEMLLAGAVSEALSKVEFTTMSSELEPSDLESHFYASKVAALSEVLRRDAARGSPMQEENHLPSTSGLTSFVVKPANGDTVPRHTLTVVIDPVAQQSQFLISLCDYVTRSPLGISCTVHMGATEHASKLMRNFYQFVSEMELRFDAVGRVVPPAAVFHRLPSKHLLTLGIEEPESWTVFSLDAKYDLDNILLDKLPSSSQYLHAVYRINSILLTGSARDAEQPNPSRGLPLLIRSTKTNPEAGVTRDTLVMAIMGYFQLQSSPGVWYLTVQPGDIAKIFYISQVDDIPVNDGANKNHHGRFNYTAGQNIPVVVSSFTGKFLMLGVSKTPGHEEVSIEDVNEASALHVDWPPKGPIKSKPDRPTLNIFSVASGHLYERFLRMMIHSVMRTSFDVHGANTTRIKFWLIENFLSPQFKTLVPLLAKHYGFDVGFVTYRWPWWLHKQTEKQRTIWAYKVLFLDVLFPLDVDRVIFVDADQTVLADLHELYNMDIGNAPTAYTPFCRKHPNPATKNFRFWDHGYWLEHLHGKPYHISAIYLVDLRRLRAIAGGDKYRLVYSRLSSDPNSLANLDQDLPNFIQDQVPIYSLPEEWLWCETWCGAESKARAKTIDLCNNPLTKMPKLDNARLIIPGWEETDTELEALSEKLLQQQKQQMS

SEQ ID NO: 4576 - protein, 1501 aa, Microsporum canis
MSFTKPWPLRPLNLFLASLVLFPNVSQASSSVNVALSASFHSAPYLMELLETAAEENSTSYFPLLDRIADGRFADATTEKDLYEQFIQVLSEDGHVTDPVALSSFKFALSIRSTAPRIQAHYQYYNSSVENSLMAAQDAVCQVWAHYDGSQYCSPTLEHAQQPLIAGRDESLEKLLPFDRVLAVSNGDEEESQQSLVLYADITSPLFGEFHKAVSKRARDGEISYRVRYRPSTTASGPAKPLFVSGYGVELSLKRTDYIMIDDRTEEKGDSKQSAPDTKPTLAADGLAESPTADLEPLSSSEVSSLGLNAASFVMNSDDPFDTLVKLSDDFPRHSKTIAAFNATSEFLTEYRENRGEGLQPGINSMWINGVQMSPRNIDAFSLLAHLRQERKLMNSLNELGLSAQEAVKLLSNPVISKAQTVQGSQRFDYRDDIEGGGVIIWLNDLEKDPRYEEWSDEVTTLLQPTYPGQFHELRREVHNVVLPLDLANKEDITLFVEEIQAFVLNKVPIRFGLVPLQRSELSREQAKIAYYLQDAYGLEAVFSYFTEIYSAQKFALPSKADFETAIKGRVLNDDRSAILFEDVVKSTELDAVISKSKDYLKRLAADGENPPMFANAIPLERGENWIHFLIDRLFKDVQGMQRRIYEGAYKEDVWLPSFYLEDASPKCNPMIVPEDASDITVKSINDAYTKHTDAFNKIPRIPGKSGSTIEKWAQLALAIDLDNEHGAKQLANAVEFHKANPEVEILILHKPTSPAKKGSLSIGLHSLLDGGRDLKTDSVIALLHKDVESKSTSSNSEKYYSSVQSVLSELGVAENGMHVLLNGRLIGPLNQTTILDVQDLELALQYERSRRITPVVKALGSLQATDKIRDHSAFARLTSMVALSTISDIPQGTFQSGPMIRTGIFNDWASEHSAITISNTETPLIQIVATVDPATEVAQRWIPILKVLSNLSSVSLKIYLTPLESIKELPVKRFYRHILEAAPSFHDDGSLRQPRASFHGVPQEALLNLGMDVPPSWLVAPKDSVHDLDNIKLSSLKEGTNVDAIYELEHILIEGHSRDMSNNKPPRGVQLLLGTEKDPHFTDTIIMANLGYFQFKAQPGHWQITLKPGRSEQIFNLDSVGGMGYTPKPGDDNNEVSLLSFQGKTLFPRLSRKPGHESDDVLEDGGNKPSSAKNFLSQGLNFASGIFSGVAKTQKEKHADINIFSVASGHLYERMLNIMMLSVTKHTKHSVKFWFIEQFLSPSFKSFVPHLAEKYGFSYEMVTYKWPHWLRPQREKQREIWGYKILFLDVLFPLSLDKVIFVDADQIVRTDMYDLVSLDLEGAPYGFTPMCDSRTEIEGFRFWNQGYWKRFLRGKPYHISALYVVDLNRFRTIAAGDRLRGQYQSLSADPASLSNLDQDLPNHMQHSIPIKSLPQDWLWCETWCSDESLKTAKTIDLCNNPQTKEPKLDRARRQVPEWTVYDEEIAQLAKTVGAQDSEADHTSHDETEEPELEATDKDEL

SEQ ID NO: 4577 - protein, 1546 aa, Chrysochromulina tobinii
MAVSALIVTLLGLAAAEDTLTPKNIDISLTARWPETPIAAEAAEFLAVEGSQLFWTFAETYVPPEGGSDEAHLAAVELAAAKLLSPLGLKLLRGYLAAHIFSARVEMFRQLQTREEQEHGMDSADGWVRACGRVQALSASEPAPALVDAVLAGGCSVPESLEERETAEVTPLAVDHVFGSVGGGTAPMVVLYAPLGSAAFRAAHATLTQRAREGAIVYVYRPQVRAAPGARAQSLQGYGVQLAIKNMEYKVLDDKAVQDLGGIEGDDDEAAEGEAEDEADVGGFFFGTLASRRPELAEQLQALQGTLLAQETEASTKLKAWAMQDLGLQAATRVLAASDPLKALRDVCQNFPFASGKLSKLKVSQELSVGVRASQQTYFGPGYNGAFLNGLALPITDNDFYGLMNTIQSELHTIDALSSLELPAATISRLVSLPPPQASLRINPSHEAVLFINDVVKDKKYQQFDPQLRAMTRVNIDEAQRLGLLLTKLFLFLKKKAGTQASLKFLSAVNENRMQMMMGFFGGGGYDELEEHHLAKAFEQAYPRKLGEQLDRLTVYQGIVQGTITDFDELAAGGSRFLRDKGLGAAPAILTNGVLTPVTQNYEQEVMMALNAEHRFVSSLISKRVLTDETTDKAAAIIKAGLAFPRYSKALLLPIDDIEVAPLTPAAALASVAWLASIAAPKDEAAVAEAAPKDGAAVAETDSMAAADDEFGDEQMFGAGEEEGGAGADADAGAIDPALLHSVSHLLVIDLCQPAHLSVLAGTLSALEASPNGRSRLGLLHNPTAASHEACAPAAAAAWTALVRAFDGSTYAPLKALVALLHAASLAPGASSISSALASAVLPAKARGGPAVDLGAHAAYAATLGLGAGAGALITNGRLVLLTGGAPLDAVDVALLEEYELRQRAEGAAHLISQLTVSHDKDASVEGGAARWRSDVLMHAVVQLTSVAKRALARDAGKDRKVQLQPDDLPCGAACVRIPGEGVGAAMELVAILDPLSKAAQRLAPLMMELHVALGCTVTLHLNPDTAITEFPLEDFYRYVVSLTPKFDADGRSLAPTADMARFARLKTPQVLTLHLDAPEAWLVQVNEAAYDMDNLRLAELGERRTLYARYELVSVLITGSCQDFRKHEPPNGLQLLLGTSPAAPHSTDTLVMSNLGYWQLKAMPGAWLLSLAPGPSSEVFSIHSDAKLVAAGHATALLGGRGHIDVAGLQPRRAIRLLVSDFTGLHATLLVSKKWAFGSAGSAADDDVVNVFSLASGHLYERFLKIMMQSVVDRTTRKVKFWLLKNFLSPAFMGFLPHMAKEVGFDYELVQYQWPTWLHKQTNKQRIIWGYKILFLDVMFPLHLKRIIYIDADQVINADVGELWDLKMPPRTAVAMTPFCNRDANPDTTGFRFFAHGYWKDHLRGHPYHILALFVVDLHKFRRRAYGDQYRIFYDSLSKDPNSLANLDQDLPNYAQHVVPIHSLPEEWLWCETWCGNASKPAAKTVDLCNNPLTKEPKLNQAHRIVGKRWSTYDERSNEIERSLSAAARAHDAASDGAAKPRDEL

SEQ ID NO: 4578 - protein, 1493 aa, Orycteropus afer
MGPLIIFTGLWLFSAVKADSKAITTSLTTKWVTTPLLLEASEFLAENSQEKFWNFVEDSQNIGSSEDHGTDYSYYHAILEAAFRFLSPLQQNLLKFCLSLHSYSATIQAFQQIAADEPPPEGCNSFFSVHGEKTCDFDNLETLLRTASERPKPLLFKGDHRYPSSNLESPVVIFYSEIGHKEFSVFHQQLISKSNAGKINYVFRHYISNPGKKPVYLSGYGVELAIKSTEYKAKDDTQVKGTEVNATVIGENDPIDEVQGFFFGKLRDLHPDLKEQLKELRKHLVESTNEMAPLKVWQLQGNKTPEKSLAFILYFKGTLGLQPGDSALFINGLHIDLDTQDIFSLSDVLRNEARVMEGLHRLGIGGLSLHNVLKLNIQPTEADYAVDIRSPAISWINNLEIDSRYDSWPSSLQELLRPTFPGVIRQIRKNLHNMVFIFDPAHDITAELINTAEMFLSNHIPLRIGLIFVVNDSEDVDGMQDAGVAVLRAYNYVAQDLDDYHAFQTLIHIYNKVRTGEKVKIEHVVSVLEKKYPYVEVNSILGIDSTYDQNRKEARAYYEQTGVGPLPVVLFNGMPLEKEQLDPDELETITMHKILESTTFFQRAVYLGELSSDQDVIEYIMNQPNVVPRINSRILTAERKYLDLTSTNNFFVDDYARFSVLDSQGKTAAIANSMNYLTKRGMSSKEIYDDSFIRPITFWIVGDFDRLSGRQLLYDAIKHQKSSNNVRISIINNPSENISYENTQISRAIWAALQMQTSNSAKNFITKMVKEETAEALARGADIGAFSVGGMDFSLFKEVFESSKMDFILSHAMYCRDVLKLKKGQRAVISNGRIIGPLEDSELFNQDDFHLLENIILKTSGQKIKSHIQHLQIEEDVASDLVMKVDALLSTQPKGDARIEHHFFEDRHSAIKLRPKEGETYFDVVAIIDPVTREAQRLAPLLLVMTQLINMNLRVFMNCQSKLSDMPLKSFYRYVLEPEILFTSENSFAKGPIAKFLDMPQSPLFTLNLNTPESWMVESVRTPYDLDNIYLEEVDSIVTAEYELEYLLLEGHCYDITTGQPPRGLQFTLGTSANPVIVDTIVMANLGYFQLKANPGAWILRLRKGRSEDIYRIYSHDGTDSPPDADEVVVVLNNFKSKIIKVKVQKKADKVNEDLLSDGTKNENESGFWDSFKWGFSGGHKTEEVKQDKDDIINIFSVASGHLYERFLRIMMLSVLKNTKTPVKFWFLKNYLSPTFKEFIPYMANEYNFQYELVQYKWPRWLYQQTEKQRIIWGYKILFLDVLFPLIVDKFLFVDADQIVRTDLKELRDFNLDGAPYGYTPFCDSRREMDGYRFWKSGYWASHLAGRKYHISALYVVDLKKFRKIAAGDRLRGQYQGLSQDPNSLSNLDQDLPNNMIHQVPIKSLPQEWLWCETWCDDASKQRAKTIDLCNNPMTKEPKLEAAMRIVPEWQDYDQEIKQLQIRFQKEKEAGPLSKETKTKEPSQEGPQTHEEL

SEQ ID NO: 4579 - protein, 1566 aa, Bicyclus anynana
MNTAGLRIFLFVIAHMFIICAGDNDASTRNEKKSKGVTTFVSAKWEATPLVLELAEYMSAESSDLFWSFFDGIISLKTSLSDLETDKQVYDACIGVASTLLAPAQLRMAKLALSMHLTSPTVRMFDQIATQNGAKELDCDSFVSIASRKVCDNDALRDVLKSLQQYNPEEHKLETYLLDHSFPTSDNKSLTAILYGELGTSDFAGKHKILAGYADKGLINYVVRWNVKSRGKPKLRLSGYGVELQLKSTEYKSQDDSTPKEADGDDAASPSEEEDENDPQNQIDGFNFGKLKNLFPALRTPLERFRRHLSEMSEELAPLKVWQMQGLSMQAAAAVIDAHDSGGDEALKVLTSIAQNFPMQTKSLIHVNVPRSFRDEVLYNQDIWASSLGLRPAEPLLLVSGAQYDAEEVDVMALLAALREDIGPINTLHALGLSKKFINKLMSLEVGESFTWEEYGLDIRDTAITWLNDLEVDERYRRWPSSFMDLLRPTYPGMLRNMRRNIYNYVIIVDPTSPASGPPLKLGETLLKHATPVRVGLVLAPGSNDPLLGAAIRSAFNYIAQDRNSNKEAFYFLNQLHSNQEESVTLESVKKHLKKYTSSNVDLDEIISEDSEYNFGNQLAEEFVAKVGTNKYPLVLINGVPLWDDSASPVTSSVELLEEALVTALARHTGRLQRAVFRGELSDTDDAVDYLMKQAHIMPRLNRRVLASEPSQYLDLSGAPSSMELFTEERVHRLLHLTGRDALATALPILKYFTRPGKPEKITQTIWVAGDLNVKESRDLLRNALTFMRESGGVRVAFIPNVDGTSSLDQSLNKVVLAALTTLESVKATKYVTQLLENEGCHERQDCDIMPELVPALNKYAWVLKASRVLCARSLRLRAGERAVVHNSRIIGPFAQEEGFSLEDFVLLERYSNQVYGDKLSEVFIKKKTSSNEVLDDDDDDTVELSTENYMKVISVLAARSPRVRTPLPAGLRTEHSVIELPPLYEDEAAVEIVAVVDPASTPAQRLAPLLLVLRRVVNCRLQLFLNPQDKNSDMPLKSFYRYVLEPELQFNANGAQTAGAIARFSRLPHAPLLSLELRTPTNWLVECVKSVYDLDNIRLADVDSLVHSEFELEYLLLEGHAWDSTLSTPPRGLQLVLGTRDKPETMDTIVMANLGYFQLKANPGAWIMRLRPGRSDDIYEILGHENTDTPAGSADIQVLMSSFRSHVIKLRVSKKPDQQHLDLLVENDEKNTGGIWNSIASSFGGGEEAEAQDETINVFSVASGHLYERFLRIMMLSVLKHTKSPVKFWFLKNYLSPSLKDILPYMAQEYGFSYELVQYQWPRWLQRQRDRQRTIWGYKILFLDVLFPLHVKKIIFVDADQIVRADLKELVDLDLGGAPYGYTPFCESRKEMEGFRFWKQGYWRNHLQGRSYHISALYVVDLKRFRRIAAGDRLRGQYQALSQDPNSLSNLDQDLPNNMIHQVAIKSLPQEWLWCETWCDDKSKQYAKTIDLCNNPMTKEAKLSAAMRIVPEWQTYDDEIKALQARVRRGLYQHADHEQEIENMDPEDVAVEQSASDKDHEHTEL

SEQ ID NO: 4580 - protein, 1469 aa, Metarhizium album
MRLPCIARLLAGFSLLVPPVSAVSAVKVGMIAAFDAAPYLLELVETAAGENSSSYFPLLDRIASGYFLTASSEAELYRRFLDVIHEDGHITRSDALSTFNLALSLRSAAPRIEAHYQHYSKAMEPLKELRDCDTWVLLDHMQYCTPNLDTGEKNDLASAVAKPLPFDRSLGMGRDAILYADPTSNEFAEYHQSLSKAAHAMNLRYRLRYRRSKSHISRPLPVSGYGVELALKKTDYIVMDDRHSSKNTDQSPMKPVEVLDGTDDVVDLKPLSTSELSSIGMKAASYIKNSDHPFDALVKLTQDFPRFASSIASQNVSQAFAAENKQNRAQKMPGGVNFLWMNGAQLTDREIQPFALANMLRSERKLVDGIRDLGFDGEQAVALLSHKAVSTIHKDDKPLRYDWTDRLEAGGVILWLNDLENDERYISYPKTLTSLLQLTFPGQIPPIGRNVFNLVIPADLSDAEDLQFISEVEAIIDRGVPIRFGLVPLQLSDEAKTQAKIAYFLTENYGIESTISYIKQLAKAQQKMTDSGTLLSTITESRTLLPGGESMSLSMILQASDFTEKLVQAGNWARRLKADTAVRPLFMNGILVPRDQNWMQSLGMKVSGDLQTIQRGIFHGVLDDDTWTIEVFLEGAVSRRNIYISETNEKALRVLNIAKIYDENADMFNAVPIVDSSAESTTENWAVVTVLADMSSRAGLDILLSALEFRRSNPAVRLDFINTQADFKASSQVNRALKANQAKFKEIVTIQELEELLREASDYDASDNFAASVAEFLAETKIPTGSQVVIMNGRVIGPIAAASTFNADDFEQLLEYEQTRRILPVHAAVAELGLSERISDSMAAAKLSSIVALSALSDFPEGIFESSSGVRSTIYTAWNSSHTGVESGDPKKSSIHIVGLLDPVSEKSQKWVYILRVLAELDGVYVKLFLNPKELVEELPVKRFFRYVIESTPKFDENGSVKDLTATFSGLPLNALMTVGMDVPPAWLVAPKSSVHDLDNIQLSAAKSDIEATYELQHILIEGHSRDDQESAPRGAQLVLATENEPHLTDTIVMANLGFFQFKANPGVYNIRLKEGRSAEIFTIESIGAQGWESAPDDKGNELALMDFQGTTLYPRLKRRPGMENQDVLEDTSNSSKGSMVSKSLKFAEGLLSGGKGKSTSDSQHAEINIFSVASGHLYERMLNIMMVSVMRNTKHSVKFWFIEQFLSPSFKEFIPHLANEYGFKYEMITYKWPHWLRQQKEKQREIWGYKILFLDVLFPLSLDKVIFVDADQIVRTDMMDLVNLDLNGAPYGFTPMCDSRTEMEGFRFWKQGYWANYLRGRPYHISALYVVDLRRFRELAAGDRLRQQYHALSADPASLSNLDQDLPNHMQFQIPIHSLSQDWLWCETWCSDESLAKARTIDLCNNPQTKEPKLDRARRQVPEWTMYDQEIAALDLKRKQRVQSEATETDRTRSEDGEAGHHHSRDEL

SEQ ID NO: 4581 - protein, 1535 aa, Rhincodon typus
MAALWVAGFAKNDNAGILATLALVYLFFSVVNADSKAVTTTLTTKWPSTPLLLEASEFLAEESKTKFWDFVDAAQEIHPNQETDISYYKYILQKADEFLTPVQANLLKFALSLRAYSATVQTFQQIAAEEPPPEDCSAFVNVHGEKSCNPDGLEVLLQSALERPKPYLFKGDHIDASLRPELPVVILYGEIGTKEFSKFHKLLRSKSEVGNINYVLRHYVANPSKEKVFLSGYGVELAIKSTEYKAKDDTQVTGSELNATVINENDPVDEVQGFLFGKLKQLYPEIKEQLKELRKHLVESTNEMAPLKVWQLQDLSFQAAARILAAPTDDALMVMRDLSQNFPTKARSITRTVVNSAMRREIEEHQQTFKETFGLHPGDSALFINGLSIDLDVQDIFSVLDLLRNEARLMEGLHDLGIQGDELHELLKLNVQPADSDYGVEIRNPAIYWINNLETDSKYNTWPSNVQELLRPTFLGVIRQIRKNFHNFVLIVDPTDESTPELLKMAEMFYTNDIPLRIGLVFVVDDSDEANGLKDPGVALFRAFNFVADELDNMNAFQTIISIYSKVKEGEKLAIEHIIGVLEKDFSNVEVTSILGPNSAYDRNRKECKDYYKQSGLGPLPIALYNGMPYQREQLDPDELETVTMHKILDNTAFFQKVVYLGELNNDQDVVDFIMNQPSIVPRINSRILSSERDYLDLSAEAKDSVDDYSHFAFLKSEEKSAAVANNMQYLSKRDDKYIRPLTFWIVGDFDDSSGRQLLYESLKHLKSSNNLRIGLINNPTTEPTEENTIIARAIWAALNTQSVNNAKNFITKLAKEETAKALADGADIMEFAVGGMDNDAFKKMFETLKLDFILSHSSFCKDVVKLKGGQRAIISNGRIIGPLEENEIFNQNDFHLLESIAVEAAEKIKVRIRMLMVEEDLASDLVMKVDSLLSSKSKGESRLDLRFFEGEFSAIKLRPKEEQVYFEVMAITDPVTRDAQRLSSFLLVLNQLVNMNLHVLMNCQPKLSEMPLKSIYRFVLEPEITFSADGSFAPGPVAKFLDMPQSPLFTLIINTPESWMVESVHTSYDLDNIYLKEIDGGIAAEYELEYLLLEGHCYDVSTGQPPRGLQFTLGTNANQEIVDTIVMANLGYFQLKANPGAWVLRLRKGRSEDIYKIYSHDGTDSPAGTDEVTVVLNSFKSKIIKVKVQKKPEKMSEELLSDDNSENEGFWESIKRGFTGGPKPEELRSDKEDVINIFSVASGHLYERFLRIMMLSVLKHTETPVKFWFLKNYLSPTFKEFIPHMAKKYGFQYELVQYKWPRWLHQQTEKQRIIWGYKILFLDVLFPLAVDKILFVDADQIVRADLKELRDLDLEGAPYGYTPFCESRKEMDGYRFWKSGYWANHLQGRKYHISALYVVDLKKFRKIAAGDRLRGQYQGLSQDPNSLSNLDQDLPNNMIHQVPIKSLPQHWLWCETWCDEASKKRAKTIDLCNNPMTKEPKLEAAVRIVPEWQDYDQELKQLQKLFQEGKLNGLSHADTDDITSTEGHTPHGEL

SEQ ID NO: 4582 - protein, 1543 aa, Tuber aestivum
MRLPNFGGRLSVGLLLLSPCVRLVSCGPAVSVALKASWNGAPFLLELLETAADEVGPSYFPLLDRIAAGDFADIDSDEALYHAFLRVAREEGFLVGQEELASFDFALSIHAAAPRIEAHYHYYENSLEPMMGRLYDATCQVWLQWSQKQVCGTGGDFKDMLKSWERYQKYGILSFDRRKLQFDRVLETREDKPAAILYADIGAPNFKQFHEVLRDYAKQGVLTYRVRYKPRTNGKGRPVILGGYGVELALKKTDYIVMDDRDVSGEGDVSKGKETQIPVGELDDQEVQDIKPLHPKDMSFLGMKAASFVMESGDPLTMLLKLLQDFPKHASSVAAIDVNPDVADALQENWDSFLGPGQNALWINGVQLENSDVNAFALLEHLRRERRFVNSFKALGVNSSEAVQLLSHQILASSRQDEAPQRFDYRDSIEGGKAIIWLNDLEKDLRYREWSSAVGTLLRRVYPGQLHPLRRNVHHLVVPVNLASKEDLALIAEQLRLFVDRKIALRFGLVPLTGTPEAVAQAKVFYYLNDAYGLPVALGYLELALESGQFSMPNAKVLEQVIKGAEVIEGWTALPLEEVLSSEAVGEHIKASKSWAGRMGANSLIPPVFINGLSVARDEQWMQIMSARLQGDVQLTQRVVYEEIANDETDFAALLLGNAATRRNSYIFPEGEESIRTINVGKLLKEYPHVFDRLPTIISDRPDRLVESTIWVIGDFDEKDGYELLQGASELQKLAPGVNLVSINNPQLVSGNPALSTLLHQLHQVGFFKGPEQLQQLLEEVPPLKEHADIPKAEALLQMQIPDAKPSSWRFPDHIESGNFWRESQMMLEAAGFKPGQRGVIINGRVVGPVPVDEEFGAEDFMQLLEYEHSRRILPALKAANEMGVLEKLKGSQSSACLTNLVALSNVPEAPTSVFQGPSLARTDAFDRLWEQEHVAIESGDKGKAIFQAVASIDPASELAQKWVPILKVLSEMKGVYMKIYLNPQRVVAELPVKRFYRHVLNSAPIFDENGNLADPQARFENIPELPLLSLSMDVPPSWLVTPKESPYDLDNLRIQSLKDRLKGSDIEALYELRSILIEGHSTDIVNGGPPKGAQLVLGTEKEPHFADTIIMANLGYFQFKANPGYYKMELKEGRSKEIFRIDSTGTKGFQQGKRAVTDEDSEIALLSFQGATLFPRLSRNPGMEVEDVLEQSTGAPKNVGDFATKFLKKAEGVLVNFGFLAPAADLKPRADINIFSVASGHLYERFLYIMMLSVMKHTGKSVKFWFIENFLSPSFKDFIPIMAKEYGFEYELVTYKWPHWLRGQKEKQREIWGYKILFLDVLFPLDLDKVIFVDADQIVRTDMSELVDLDLQGAPYGFTPMCDSREEIEGFRFWKQGYWKNFLKGLPYHISALYVVDLKRFRQIAAGDRLRQQYHQLSADPHSLSNLDQDLPNHMQSMLPIHSLPQEWLWCETWCSDESLKTAKTIDLCNNPMTKEPKLDRARRQVPEWTAYDEEIAALARRSLKKEGGEESEAARRAEKEEETMEAPEERESEQPTIKEEL

SEQ ID NO: 4583 - protein, 1246 aa, Apteryx rowi
MFSKHKSGTNDTTEEEEEEEESDVQGFVFGRLKQMHPNLKNNLKEFKKHLIETTNNMEPLKVWELQDLSFQAAARIMSTPVYDALKVMKDIAQNFPIRARSLTRVPVDKQMRNEIEENQKHFYEILGLQPGEARLFLNGLHIDMDFHDPFSILETLKLEGKVMHGLHELGIKEEILSKFMRLHIHSADDSYALDIRHSSIIWVNNIEKDHSYSTWPASYQELLKPAFPGVIQQIRRNLYNLVLFIDPIQEDTNDYMKLTELFSHHNVPLRIGFVFILSTQEEIDGNEDAGVALWRTFNYVAEETDTSQAFTSIINMYHEVKDGNVLTVNHVKNVLRHEFPHADVQSILGVHSEYDEGRKAGATFYKKTGLGPLPQALFNGVPFNREEMDGTELETVILQRIIDATGFFQRAVFMGLLNDHINAIDFLMEQQNVVSRINPIILGAERKYIHFRSTSVPFDVQDFSTFSFLDSQDKSAVISDDMKYLTKKDEDILYAVTMWIIADFNKPAGRRLLSNALKYLKTSRHTRLGILNNPSSKIKEBNTAIARGILTAFLTQNNSSLKSFLSKLTKEETAKSLATGTKIVKFLIPGMDDDTFEKKYNTLGLDIIKTHQMFCQEVLKLLPGQMAVMSNGRILGPLDENEFYAEDFHLLEKKTYSTSAEKIKTIVKEMGISTKSGSDLIMKIDALLSSLPKTEMRQDAELLKEQHSVVKIDPQQNQPFYDVIAIVDPLTREAQKMAHLLIVLKDIINMKLRLFLNCRSNLSEVPLKSFYRFVLEPELTYGINKHLPSEPLAKFLELPESPLLTLNMITPESWLVEAVNSSCDLDNIHLQDIKGTVTAEYELEYILLEGHCFDMTTGQPPRGLQFTLGTKNNPVRVDTIVMANLGYFQLKANPGAWTLRLREGRSKEIYHVFSHEGTDSVADLADVIVVLNNFRSKIIKVQVQKKSDKMNEDLLTDGVTEEKGNWDSVTRIMMLSVLRHTKTPVKFWFLKNYLSPTFKDVIPHMAKKYGFKYELVQYKWPRWLYQQTEKQRIIWGYKILFLDVLFPLAVDKIIFVDADQIVRSDLKELRDLDLNGAPYGYTPFCDSRTEMDGYRFWKSGYWASHLGKRKYHISALYVVDLKKFRKIAAGDRLRGQYQALSQDPNSLSNLDQDLPNNMIHQVAIKSLPQEWLWCETWCDDKSKKKAKTIDLCNNPQTKEPKLQAAARIVPEWIEYDSEIRELITKIEEENKNRTSFFQKGLKHDEL

SEQ ID NO: 4584 - protein, 1528 aa, Debaryomyces fabryi
MQIGCCLAICQFFLLSVIAFQDKDVNPVENKFEVDLEATWKSSPFQLNLLESITGYNESLFISTLSSIIGFSTEENESDEESNEEVESSLLSDSQMYNKVIDALNLDDTSKSFIGFNLVNKVFTPRIQAHYEYYNNVVDPQYSPRLNKECSTDSFGNKILSGESDKHRAWILYNDKLYCSSDEVFALKTNKKAISADDILPFDRVIGSNQDSPLLVLYGDIESEIFKSMFINLYESAKIGKLRFTWRYIPTSNSNQREQLSGYGADLTLKRTDYIVIDDRDVNKVESLNERNTANNNYRLDKDLLKIAKLDELKPISKDNTTDLGLKLTSFVLSNDYSDISNYELLNTILQDFPKFAYYVSHLDPENIESVKENVDANVKLGMSEESNGIYINGSPINKLELDIFKLVDKVRDELKLVNELKALGFTTSQGKKLLYKFALLSAVKESQFRTGNTIMGGNENRFKVYNYQFTPMSRHKKGGIVFFNDLEKDDVYESFPSSRKEAYLGFAAQHLRPGQIPLLRENIHDLIFALNFSDKEQLKVFFTFSKIILDKSLPQQIGLIARGGNEKDKTLAKIFYFIVDTASLKEGLAFLYQYFDAKDEETEREILAAVNIPTTYNFDESIYQDVLDKFSINTPSVICNGVIYELTSTWQVLMGKQLSQDIRLIQNHIQKGNDINKSLKGFLFENAKSERNLRIIPEDASLIKYKGINQELIDNSITFKSKKKENGVSATFWLIGDINSVNILSQFIEILRIMKVERSYSVQLRIMNKSTNGDILDEIQSLFSINLLSNNNIENMISLLSDKLQKSDNYMPDKNVIQLLEDNGLPPNHPILLLNGRYFRLDKKFSFKELQQLLEYEFSQRLNLFSDIISAYPQEFPKSFCEYYSSSHDCFDWFDLVSSYVTKSFHIDDNMFFTDVARFDFSSLNLNNILKVNKDEASSKAVDVLLIIDPIDENSQKLVSIINAIGSFPFVDIKILLQPQIEATEEVKIGRFYRGVYPPPIPQFDRKGRLEVRNKAEFEMVPSQELFTTNIDSPVRWQIVIDDSPPGVDLDNVKLSNYANSLIYGTYVLKNILIEGFAKNVKYGMNLSGLTLDLIKDKSHTDTTVMSNLGYFQLSANPGIWEFKIKPESKSQKYYSLLSASENVFISNTDPLDRVRVAVMNLNGLVLKPRFTTNPRYENKSIFEEDDNTESKEENKIGNFMKSLLKSKAPTKKQADINIFTIASGHLYERFLSIMTASVMAHTNKLVKFWIIENYISSHFKKLLPLLAQEYNFEYELITYKWPNWLRFQREKQRTIWGYKILFLDVLFPQDLKKVIFVDADQVARTDMKELVDIDLEGAPYGFTPMCDSRKDMEGFRFWKQGYWAHVLKDGLKYHISALYVVDLDKFRAISAGDRLRAHYQKLSSDPNSLSNLDQDLPNNMQNKIKIHSLPQEWLWCETWCSASEFNNAKTIDLCNNPLTKENKLERAKRQIPEWTTYDDQIKRLVDQINENENRKISTKESETTSHDSLHYEYDQSQSDDDVHDEL

SEQ ID NO: 4585 - protein, 1543 aa, Morchella conica
MRLTDFRRSLPTGLLLLTPYLRLALCSPTVNVGLKASWNGAPFLIELLETAADENEASYYPLLDRIATGEFSNVSSDKALYESFLRAVQEEGFLKDAVELASFNLALSIHAAAPRIEAHYHYYENQLEPQMGKLYKPGCETWLQWSHKQICSTTGDYKEMLGSWERYPNERRKLQFDRVLESKDDVPAAILYADILSPSFKEHHRILKEFANVGKISYRVRHRPSTTRENRPVMLSGYGVELALKKTDYIVMDDRDMDSSAEERKSDSEAPALDDEEIQHITPIHPKSLPDLGLHAASFIMNSEDPLSTLQKFLQDFPKHSGRIGQIEENLEMLNELRENREAFSAVGTNSLWINGVQLAESQINAFALLEHLRRERKHVGSLTALGLNNSEAVQLVSHHIIADSKLSELPQRFDFRDDIDGGNVIVWLNDLEKDKRYKDWSSSVSVLMRRIYPGQLHPLRKNVHHLVLPVDLTSRDDLVLLSEQLRMFVDRKIAIRFGVVPLGKTDSAIAQAKVFYHLKNTYGLAAALRYAHESLANTDFSKPSAKVFKNVLKDAEPRKEKPVLTLEEILTNEDVEAWHVKAKSWGSRLGVNPSAPPVFINGQSLPRDEAWMQNMASKLQADVQVTQRAVYEELIDDNSDITGLLMTGAVIRRNTHIVPEDDASVKLVNLVELESAHADIMAKLPRISTDKLAPLEAATIWVVGDFDEKDGYQLLQGAVELQKEASGVDLVLINNPQLSASTPSLSTLLHQLQQVDFFTSPERLEQLLEEVKPVQDFVDLPKVEALVGSQADAKASGWTYPTHMESSKFWEGARVLADKSGFKSGERGLVVNGRVIGPIPRTEDFVGDDFKQLLEYELSRRIAPVLNAAQDLGVMEKVKSPAALTNLVALTMASDVPAGLFEAPVTGRTDAFLRLWKGEHTAIESGDKDSAMFQVIANVDPASESAQKLVPILKVLGEMDGVYLKIYLTPQRMISEVPVKRFYRHVLESKPVFDEAGSIIDPKARFENIPGAILLSLSMDVPPSWLVNPEECIYDLDNLMLDSLKDRLQGSDVEALYQLRSILIEGHSRDVSTGGGPPKGAQLVLGTEKEPLFADTIIMANLGYFQFKANPGHWNMGLKEGRTSEIFHIDSAGTTGGYSSMLPRAGEQEQEDSDITLMSFQGATLFPRLSRKPGMLEEDVLDQESISSGSFAKKWIKKAEGIMVDAGLMAAPKRAVQKGQAEINIFSVASGHLYERFLNIMMLSVMKHTDSTVKFWFIENFLSPSFKDFIPVMAKKYGFEYELVTYKWPHWLRAQKEKQREIWGYKILFLDVLFPLDLDKVIFVDADQIVRTDMKELVDLDLHGAPYGFTPMCDSREEIEGFRFWKQGYWAKFLKGLPYHISALYVVDLKRFRQIAAGDRLRQQYHQLSADPASLANLDQDLPNHMQSILPIHSLPQDWLWCETWCSDESLKTAKTIDLCNNPMTKEPKLDRARRQVPEWTAYDDEIAGVERDTRMRRMMEEKEKAGEVEEKVEEEVEAEEGRWKGTKWDKTKKEVEEKDEL

SEQ ID NO: 4586 - protein, 1273 aa, Octopus bimaculoides
LNSEFLFRENEDYFWRFVDDVSQRTSEEIKSSSKETSYNLLLEMAAKYLSSLQLNLLKLTLSLRVHSPDVEMYSQMAQEEKKSLIVSQKKLADNCDVFVNIHGEIACNINDIDALIKSAPKRLKAATYTFDHHYPSPVQADVSVILYAQLGDTSTAEFHRHLKKLAVNKKINYVYRHYIPKPSNEKVYLSGYAVELAIKSTEYKAKDDTKVEDEKAKASEENANWEEELKGFNFKKLSQLYPDLIPKLREFHDYLLDTATELTPMKVWQLQDLSLQAAQKAILTPPKDALNVLQTISQNFPVQARSLVRTSVSSDLRKEILKNQKHFENYHNLSPGECALFLNGISIDVEVYDIYTILDLMRSEAAVMEGLFSLGVREESLNKLVKLDLKNSGDDYVLDFRHPSVVYVNDLEKDVKYRRWPNSIQEMLRPTFPGMLRHIAKNIFHMVFVLDPSKSSSRDLLKIAEAFFVHSAPVRIGLVFAVNASREANGYSDAGVAIARAFQYIKIDQDAASALSFITDLYDKQKDDLTSKFISTEFASRFNDEDLNKVFGDDDDYDDLRKSADDFLSRSGLSDFPQVLLNGIPLKKKYLNADMLEEAVVTEILQGTHEVQRAVYNGELSDSMTILDWMMEKDNVLPRINSRILSAPLMYLDLTESAAKDVFHDADLFGALSNKEMSSQMAKNILYMSRKVTTSRFSSSLRVGIVFNPTDSKAKNAINKAIHVALTTLSGNMLRNFVTKLVKEENIKELNDGTKTLRDLDVSGMDIDQYMATLERQDDTFLKVHHMFVERVLSLPPGSHAIIGNGKVIGPLKDDEVFIQEDFSLFEKHLMQTSAKKIQAHIESANANSDKASDLVMKIASLLSAKTLSESRKDINYHADGHSVIKIPADPNAPSFEVEVIMDPVSRETQKLIPILITLQKVANMNIKIYMNCKDKLSELPLTNFYRYVLDPELKFSVDGNAISVPYAKFESLPQKSLLTLNMHPPESWLVEAVKSPYDLDNIMLEEASNGVSAEFELEYLLLEGHCHDSSSGQPPRGLQFTLGANNSAFLVDTIVMANLGYFQLKAYPGVWLLKLREGRSLDIYEILSHEMTDTPAGSKDLVVAINSFKSKTIRIKVGKKSDKVNEELLKDDEDESMGIWDSISSSFGGGKKEKKEDKDSTLNIFSLASGHLYERFLRIMMLSVLKNTKSKVKFWFLKNYLSPTFKDFIPHMAKEYQFEYELVQYKWPRWLNQQKEKQRIIWGYKILFLDVLFPLNVKKIIFVDADQVSSSD

SEQ ID NO: 4587 - protein, 1442 aa, Candida maltosa
MLWLITLCSFIGITNAIVHNDVSIGLEASWNRIDFLPNLIESVASFNESLYLPTIETIYGLGDGVDEELDEESSDKDIYTSLINTLELDEYSKNFINFNVVYKKYLPRVVSHYAYYESVLAKYGNRLKTECAHDSFGNEVDTKNGELQTWLLYNDKIYCSANDLFALRTDKSVQEPLMFDRVIGSNEDAPLLVLYGNPVEQSTKDFLKILYPDAKAGKIRFVWRYIPSGTKNPVSLPGYGVEMKLNNFSYFDSVNSPQSSKLDLTKDLTQINDSVSIIPLQKQDTFQLGVKFTSFILSNKYKLPKYELLSTILNNFPKFVHYIAKLPKQLNHEKVKTKVTGNEDVGFSAQSYGIYINGSPIHPLEMDIFKLANKLKDELKIIQSLVKLGFDAVQSKLLISKFALLSAVKQTQFRSGNTLMGNNENRFRVYDNAFRKIDPSKGGVVFLNDIEKDVTFSEYTTDRQEAYLGASSYKLKPNQIPLLKENIHDLIFALNFANKQQLRVFFTLSKAILDSGIPQQVGLIPVIGEDPLDEVIARKFYYLAAYSTAPEALALLYQYFESATAEEAEKLLEKVPVPENFQVSFDGILNKFSITEASVICNGVIYESRSPNWQIAMSKQISQDVSLIKRFLRESPSDDKLKHSLYSNAKNKRDLRIIPLEPSEIIYKSIDRELMSNSVVFKKLDKETGVSGTFWLVSDFSDVVMINQLIDLLTVLKKQPIQVRVLNTGNGDFFDNLQGKFKLSALSNSQIEDIIELLSELEPSKGVNQSMKNLLESKHLAVHHSFLLFNSRYFRLDTPLDVSDLQQIIEYEFSQRLNLFNDVISAYPDEFDSKNIGDFNSIISGLDNMDWFDLVSSIVTKSFHTDDKMFVVDVNRFDFSPLDFSNSVDVNKYNNDNLVDVLVIMNPMSELSPKMINIVNSIRDFPFVNIRILLQPRVESDEEVKISSFYRGSYPSSTLKFDSHGKWIQNYDIDIENLPENFKYSTELDSPNKWIVTSNKATTDMANIDINAANTQVKAKYLLKNILVEGYARDIHTGKAPDGLKYFLTCNNDNFHTDTNVMTSIDYFQLKAIPGVCLLSSNPEYGLLSASENKFASNDQPLENVTIPIFSIDGTTVYPRVIPSDGVTVKDKKKHADINIFTIAGGQLYEKLASIMIASVRAHNPNATIKFWILENFLTPQFKKLLNELSDKYGIEYELINYKWPNFLRKQKTKERIIWGYKILFLDVLFPQDLDRVIFIDADQTCRTDLTELTNLDLQGAPYGFTPMCESREEMEGYRFWKQGYWSEVLKDDLKYHISALFVVDLDKFRSIRAGDRLRTHYQKLSSDPNSLSNLDQDLPNNMQRSIKIFSLPQEWLWCETWCSNESLKSAKMIDLCNNPVTKENKLVTAKRLIPEWTDYEKEIDELMNDIGKDVIEEEDNNEEENDNEVESDIEEDYHDEL

SEQ ID NO: 4588 - protein, 1514 aa, Trichogramma pretiosum
MLLFVLLCPFFMNLGPIAAEKKINKFVSTLIDAKWKDTPLVLEVAEYLNDESQDYFWRFVDQVSDASNDFQNVTEKEQYDLTISMASKFLSPSEINIMKLGLSLRIYSARVEMFSQMAENKNASDLDCANFIDVGGKYFCTLDKFNQFIEDDEWNPEGIDTYNLDHFYLGKQQTDKTIVLYGQMGTPSFSELHNELKSLAESKKINYVLRHYIKDRPDRKLRLSGYGVELQMKSTEYKATDDSDIKENQAQSEESVSENEDEVDGINFSALKKLYPDHSKKLEKMQSYLLENSHEVEALKVWQFQELSHQAAERIMNSPAGEAIDVMTDIAQNFPLQTKSLVKTKVSNEMKKEIKLNQEIFSTTLRIQPSETALFINGLFFDLDTVDVLTLLESLRSELRVMESLHKIGLQGQKISNLIALDLSDNVNNQDFAIDIRDSAVIWINDIENDFRYNRWSPSLTELLRPTFPGMLRNIRRNLYNLVIIIDPISEDSAPLITLAESLYAHSAPLRVGFVFKTNFNMTETGLSDPSIAINNAFHYLMESKTSKDAINFLSSLKNYDTSNGLSVDNVRKALKAIDSKANANYIFGEESEYDVGRHLASDFIKRTGFKNVPQVLLNGVPLPSNQLTAELFEEAVLSTIMSQTPVIQKAVYKGEITESDDVIDYLMNQPNVMPRLNERVLKTENNIWLNLIGSIPDNTDYHKWSSQDKSVWLMDNMQYICVSRKNVPSHLYTIWITVNLEEHSGRMLLKETLNYLESNADNRATILINSENSKHSVTNINQIALAAIKVLPVEESFKYLRKLMKEETYTQIRNGEFDIQDEILAEMKQQEFLLQVQSDYCKNVLGINENARTIVYNGRVIGPLENDEEFSSEDFSLLGRFSHSTYGEKLYKFLLKSQFFTDEYSEGNSIPDDTIMRITSLLVPRPQTRSRFEVPFHGDEHSAIKLPAKNLDEPIFNIVAVVDPVSRGAQKLGPILKVLYKSLNSNIKVFLNCIDKNSDMPLKSFYRFVFDSELQFNNDGEIIGSVAKFTKLPTSSLLTQYIHAPENWLVEVVRSVYDLDNIKLDNVAMGVHSEFELEYLLLEGHCFEALIGNPPRGLQITLGTERNTATVDTIVMANLGYFQLKSNPGEWLLKLRAGRSSEIYDITSVDGADVIHKGKTVKVLISSLRSNVLKLKVTKKPDKIGVDLLADDDKESGIWNSISRTFSNSEDSEDADEKLNIFSLASGHLYERFLKIMMLSVMKNTKMPVKFWFLKNYLSPTLKDFLPHMAKEYGFEYELIQYKWPRWLHQQTEKQRTIWGYKILFLDVLFPLDVKKIIFVDADQVVRADLKELATMDLGGAPYAYTPFCDSRKEMDGFRFWKQGYWKNHLQGRSYHISALYVVDLKRFRRIAAGDRLRGQYQALSQDPNSLSNLDQDLPNNMIHQVSIKTLPQEWLWCETWCDDKSKKYAKTIDLCNNPMTKEAKLQAAMRILPEWIGYDEEIRALQVKLENENRQVEKEDDVSEKHAKHQEL

SEQ ID NO: 4589 - protein, 1456 aa, Paralichthys olivaceus
MDAGSSGAGVVFSDTGLRMWLLWFLLPSLLSAVSGGTDSKAVTTTLTTKWADTPLLLEASEFLAEESQDKFWDFVEANENIEGEHDDTDQAYYDLIVKKASALLSSVQVNMLKFALSLRAYSATVHSFQQIASNEPPPPGCSAFFSIHGVKTCETESLEQLLKTASERPKPYLFKGDHKYPGSNPDGPVVILYAKLGEPDFQRLHHFISSKVREGLVTYVFRHYLANPSGKKVYLSGYGVELAIKNQEYKAKDDTQVQGTGVNATVIGENDPVDEVQGFLFGKLKTLYPELKEQLKELRKHLVESTNEMSPLKVWQMQDLSFQTAARILAAPAVEALSVMKDLSQNFPTKARSITKTVVNSEIRKEIGENQKFFKGTLGLQPGDSALFINGLHIDLDTQDIFRFFLVLVIILDPTQENAAELMSVAEMFYANNIPLRIGLVFVVSDEEDIDGMQDAGVALVRAYNYISDEVDSQSAFEAVISMFNHVPIGGQLSVGDVVKVLEKRFPYVEVSSVLGADSSYDSNRKDGRAYYQQTGVGPLPVVMYNGVPYQREQLDPDELETVTMQKILETTSFYQRAVYLGELATDHDVVDFIMNQANVVPRINPRVLSTSRTHLDLSDTNNFFVDDYARFSTLDVKQKSTAVANSLNYMTKKGMTSTNRHDDGYIRPVTFWVVGDFDKPSGRQLLYDAIRHMKTSNNVRLGMINNPSVALSSETSHVARAIWAAMQTQSANNAKNFITKMAKEETATALQRGVDIGEFAVGGMDVSLFKDAYDSPKFDFLLSHAAYCRDVLKLKKGQRAVISNGRIIGPLEEEEVFNQDDFLLLESIILKTSGERIKSKVQQFGIEEDRASDLVMKVDALLSSQPKGEARVEYDFADDRYSAVKIRPKEGDVYFDVVAVVDPVTRDAQKLSPLLLVLKQLVNVNLRVFMNCQSKLSEMPLKSFYRYVLEPDVTFQSDSSFSPGPMAKFLDMPQSPLFTLNLNTPESWMVESVHTRYDLDNIYLEEVDNIVGAEYELEHLLLEGHCFDVSSGQPPRGLQFTLGTASDPVIMDTIVMANLGYFQLKANPGAWILKMRKGRSDEIYKIYSHDGTDSPADSDDIIVVLNNFKSRIIKVKVQKKPDKFNEELLSDGTEENDTGFWESLTRGFTGGGKMEEVKQEKDDVINIFSVASGHLYERFLRIMMLSVLKNTKTPVKFWFLKNYLSPTFKEFIPHMAKEYGFQYELVQYKWPRWLHQQTEKQRIIWGYKILFLDVLFPLAVDKILFVDADQIVRTDLKDLRDFDLEGAPYGYTPFCESRREMDGYRFWKSGYWASHLAGRRYHISALYVVDLKKFRKIAAGDRLRGQYQGLSQDPNSLSNLDQDLPNNMIHQVPIKSLPQEWLWCETWCDDSTKRSAKTIDLCNNPMTKEPKLQAAVRIVAEWTDYDQEIKRLQTKVQEGGTHRAKHQDTDGHTEL

SEQ ID NO: 4590 - protein, 1455 aa, Brettanomyces naardenensis
MLFLFSILPLIAGVLSLAARQTNNSIDLSIVGSWKTTPFKLNVLESVSSEEPTLYEPLVEKLLGLEVTNEDGEIEVGLKDEYCLTDQQYYSYAMSLVQSNITRSFIDVNLANRVDSPRIEAHYKYFRDFIAPKKHCSSGKAFIIQGSEVYCNPTDVFALKTAESSLDLEPMDHLLGDSKNFYVLYGDFSVDSFREMFSYLYQSMLSGKLSFIWRYIPDETVQDYELLGGYGIDLTLKRTDYIVIDDRGFTEEQQKKLKFEGSDKVVTREEVDEEEDFWEEYKPDVPKLKADDLKDLAIRVSKFVLDLDSSDGKKLELLTGLVEDFPKFAANFAGLHYNDSDLRMLALESLQDSQIDIPDGLYINNAVVPAIKSDMFAVLKILKRELKYTEIFREIGINSSSANSILSTFASYEYNFAKMPYRRYDYSDFSSSIVYFNNIEEDYPYSSLVSAREAYSEEPPLGQIPPARENIYETVFIFDLTDPAKLYYSLAMINQVLSKGVPERVGIVPIASSDLGKRAAEEFLKVSATSGSNAALKFLHELNHYVSTDKLDPKALESLEQPDTKDVKHILRSIRSFQNNFKLGLEPRMVVNGVIFPFDENWQLAIRQLSFDVYHLYESFQRDMIPANMPFRDYLLSGSLKQRVPYLIPDNIQSSQTNFLSVPSLQHILLLDNFTNGVATIVNHKCKSATCYRTLSPKTLTLVGGFDDRNFRHQISEAIKYVEGSNNIKLRIVDLGHTKEFEAFKERLASEGITTALQFLSIVESVGIVASGAENVGKIFGISRNSGIHLILNGRSMDITGYPTVTPEQFDILMEFEGRLRLTPLWKMLKRQKSAQSVGKSVFKDKYDWFEYTTWLLSDTQFKSDEEFVYEGLPRYGTDVLNEALSLHIPAKSDPLIYVSLVIDPVSEGAQKYLSMLSLFEEMDFVDIRIHLRPAAEIESVDIKRLYRGMFKSKARFNGTGAIDRDSLKVAFNDVPEKTLFTLNVDDPQSWTVSIKEANADLDNVKLDLTGPVSGVYELQNILVEGYASDITAPGMRPIGLPVELVNELGQASSDTNIMANFGYLQLKANPGRWTFRIKPDSQGSRIYSLIGLENKDSREVAVQGYPLYILSLNGPTMFPKFTKKPGKEDEYLVEVGEQEDEGKKSLFARIKNSVSFGSKKNNQADINIFTVASGHLYERFLGIMTASVMAHTRHTVKFWLIENYMSPQLKRDLPILAEHYGFKYELVTYKWPSWLRHQREKQRVIWGYKILFLDVLFPQDLDKIIFVDSDQIVRTDMKELVDLDLEGAPYGFTPMGDSRDEMEGFRFWKQGYWKKLLGDKYKYHISALYVVDLDKFRRIAAGDILRHHYQQLSNDPESLSNLDQDLPNNLQDVIKIHSLPQNWLWCETWCSDDSLKDARTIDLCNNPLTKEPKLDRARRQIPEWTTYDDEISLLIRQSTENDSVISEATTHDEL

SEQ ID NO: 4591 - protein, 1476 aa, Aspergillus calidoustus
MLQNPGHVASWRLSYAVITALLASVVHSSPSVNVALQASFDSAPYLVELLEVAAEENPTSYFPLLDRLAEGAFDDAVTDKELYDRFLQVAVDDGHLANPESLSSFKLSLSIRSASPRIAAHYQFYNASVQHSLMAAQDAACPVWVHSDGKQYCSSTMERAQQDVLGELDGQELPFDRIMGHGSLPPAILYADVASPMFRDFHQTLSALAKEGEISYRVRYRPPQHWSSRPLFVSGYGVELALKRTDYIVIDDRDAEQRDSSGEATLAETEESPDDLRPLSSSEVARLGYNTVGFVADSADPLDTLVKLSQDFPKYSSTIAAHNASVELLQEIRTNRLEMLPSGANALWINGVQIDPRQIDAFSLVDHLRRERRLIESFRSLGLSAQEAVALLAHETVAESAAQDTPQRYDYRDEIEGGGVIIWLNDLEKDAKYESWPADLAAYLRRTYPGQLPAVRRDLNNIVFPIDLSSPQDVDLVTTTIQVFVKRKIPVKFGVVPTSYSPGSTAQLKVAHYLQETYGLASLMAYLEESARKGKLATPDKATFLAATQGRTTRAEKQALSLDEVLSSEELASLVSRTIHYQDRLGIKSDASVTLVNGIPISRGENWPQEMSAKIDKDLRVIQQGIIEGQFEEETWLPGLFLAQAFARRVPWIIPEDPKDVKLVDLTKVSKLLDGVPRIASQVEPLESVHMIVIGDFDSEAGLKLLTSALDLREKQAKTEILFLHNPDELSEQKASAVVYRALNGKKEVNAEQLLTEVTSAPSEEAPEASDFWTRLQPLVETLGLSPGETGIVVNGRVAKPTQDVTPEDFGQLFLYEDINRIGPVTKAAKDLSLTSKVSDPLSFAKLTSLVALSTVSDVPEGLFETSSDVRVDFYKNWTGSGSIITVAGSDDPAITIAASIDPTSEHAQRWLPILKVLSSLDGVTLKLLMNPRDELRELPIKRFYRYVLDPEPSFGDEGSVLRPTATFSGVPVEALLTLGMDVPPSWLVAPQDSIHDLDNIKLGSVKGSNVDAVYALEHILIEGHSRDLTTKSPPRGVQLVLGTEDNPYFADTIVMANLGYFQFKAQPGLWNINLKPGRSERIFNLDSLGILGYSPQPGDDSNQVALLSFQGKTLFPRLSRKKGQENEDVLETGSKPGSATNFLSKGLNFASGVLSSVGVNSKNLEEHADINIFSVASGHLYERMLNIMMVSVMRNTKHTVKFWFIEQFLSPSFKSFLPHLAAEYGFTYEMVTYKWPHWLRAQKEKQREIWGYKILFLDVLFPLSLDKVIFVDADQIVRTDMHDLVTLDLEGAPYGFTPMCDSREEMEGFRFWKQGYWKNFLRGLPYHISALYVVDLNAFRAMAAGDRLRGQYQMLSADKNSLSNLDQDLPNHMQHHIPIKSLPQEWLWCETWCSDEALGQARTIDLCNNPQTKEPKLERARRQVPEWTEYDREIAELARKVQGAGEEVIEDVPVEEEEEEEEEEETAAEWKKDEL

SEQ ID NO: 4592 - protein, 1610 aa, Fistulifera solaris
MAKHSIIFFNALLCPFLLIVIWVVDGNNDELHTIVSPLVNRELETSVVANHWPSTPQNIFCEAFVYHSQEEKGIDFLDRLAEENLDRVMSDAMAEELVMKVTPLMGAAKQLLQLSLALRAQSPHCELYRGLARETLQQQQAHQLFLDPPEAFAVVDGEIITVDTLSSVLATKPQTAVKTIPNETIIPAFGENAYGILYGNMGTPLFAATYRLLRNSEIPFVVRHMGAVDYEERNQSNATGLPLQGYGVWLDIRNVEYKVFDDRGNDSLHSDDEIMVDLTKDDLDVPPGFLAGVNLTALGLDTEKTLVRKLWSAHHNQNLHSSIIPPVWRRRQLPLQATTAILNSATDPLVTLQQISQNLPSMVSSLVQLEVPDNLRKAVEVLEESGDLRPGLLYINGKPLPIDMASFNLFDILNVIQKEQRNLDEMSEMLKDLPSAALRDVQAAWMNGKRFLEGAAGDNGDRKAQTLRIDVARGWKNAVIYLNDVEKDSLYSRWPTSLHHMRMNMEYGGPPSVRRNLFTLLAVVDPIQDPESVALNLGLQLMQAAYPVRIGLLFVDTEHFQECSTFLSKQGTTTSEPCPIPTLFDTKSKLDISKAKATSQTVHLLILTALRDLRAYPGGIFTYIEYIMSFLRDARSNSESVSIGQLLDFHGKLYQSLNLKSAEQAVSDATTIMKAGDKNDDVMAYGHSIKFAVQRGLKPGMGFVNGRPLPANTADEGINRLFGQEQNHVLSLISHGKITDTSPKSVYAYLLEGDNVYAKIHPLLVDPSSGSVPKFLNLDDSFGEEAMCSPNKMVTDVADQVNATKFVIDGIFDFSTELGMAHAAAFLSVMKSLPDKPERVAYRILPSNAKAASTAICPLFAHASVLESGALQKIMDHKYKSLTTKQLLDKLVGISPEVAEIMLSNDGLCSSQRYLHRKLPADNLIVGNGRIILLHDELVTQSDLEMLLSVQMASSRAVTRMLSPYFPVESPKFLISVARVVALLSEHAESSSRTRLSNTIRDLEATSEEDLKEVLLSWNNGPDDREALKVHLGAVLDPLSEAAQRLSSILLIARDHLRLAIDLVLLPKSVLDNESKIPLTSYYRFVADHRSFSNSENPVASFTNLPETHTLTVRMDVPEPWDVQQSWALQDTDNLLCDVKTRCGDGPILNGEGNTKVVYELKSLLVFGQCFETKGAPPNGLQLTLNRDTELGVQIKQPIVEVGIDGSITESSANQYIPRNRTEVNYSDTVVMKTVGYWQLRANPGIWELAIAEGSKGATMFDMVDGTARGGRLVVDPNSIPQEVRMRIVVQDFSNRGELLVLQRKPGFAETTSLFHGEDNGVDEADDTIHVFSLATGHLYERFLKIMMLSVTKRTTSKVKFWLFENFLSPTFKQSAQAMARKIGCEVEFVTYKWPQWLRSQSEKQRIIWGYKILFLDVLFPQSVKKIIYVDADQVVRGDLKELWDMDLKGAPYGYTPFCSSRKETLGYQFWKEGFWKNHLRGKPYHISALYVVDLEVFRRNLVGDTLRSIYQQLSADPNSLANLDQDLPNYAQHSVPIFSLPQEWLWCESWCSDESKANAKTIDLCNNPMHKEPKVSMAKRVIQGDLFQESWVELDAAVKQYEEEYALTE

SEQ ID NO: 4593 - protein, 1493 aa, Podospora anserina
MLRLSQLPLGLAAILATCLSPAHVGASPSVNVALKAAFPAPPYLVELLETAASDNATAYFALLDRVAKGDFVEATTDKTLYEKFVEVLQDDGHMDAEALSTFKLALSMRTAAPRIEAHYQYYSTAVEPSLAEDQVGCVQWYLLDGKQYCTPSLDKAHADVKQSSQERTLPFDHKFGAGAKDIILYADITSSSFGKFHETAKEIAQKGEGSYRIRYKRSAAHPEETLSVNGYGVALTLKRTDYIVIDDRDTGAAKAQDEAQKPIGASDVVLDDEEEITDIKPLEKSELTPLAMKAASFIMKSDSPFETLLKLTQDFPKYSTSLGAHNVSEEFEEEHRLNRQVLAPEGVNVLWMNGVQLIDRQIQPFGLVDLLTRERKLIHGVLDLGLTGEQAVSLLGHSEIAQAKSADDEPRRFDWRDKIEDGEVIVWLNNIEKDKRYQEFSPSIWTILQSFGGLPQVRKNMFNLVAPVDLTKPEDVTVIVEQLLVFMKRLIPVRFGFVPLTPTGEAIDQAKVVYYLLDTYGLSATVAYLENSLESKKTSKADEGVFKQAIKDRKPKEDATVLAFKDIFTSEHHEKQIHLAKHWVERLRADTEVPPVFFNGFPIPREENWLRAMNQKLGAELQEIQQGVYFGQIGDETNIEAQFAEKAIARRNTFIYPEDARDITILNFNKVYTENAYLFDKMPVVEADKDSTKEDWAALTVITDLSTPDGQKLAYFALKFRKDSPGVRIDIVHNPKDTSQSASALTLHIKKQEDSLATVNTLLDLETVLDNVSAEADRELDAALASFLSSVNLKAGNSALILNGRLVGPIPSAEDFKPEDLETFLETERAQRIVPVHKAIEDLGLGDKISGPLDAAKLTSVTALSGISDLPQGIFDSAPSVRISQFSEFKKEYTSFEVGDASKATIFFTAIINPASEGGQKWAAILKVLSELEGVHLRVFLNPTENVQELPIKRFYRYVLNSAPTFDQDGKVASLSANFAGVPQDTLFVAGMDVPPAWLVTSKVSVDDLDNLRIKDIKAKRGTEHVEAIYELENILIEGHSREMPSGAPPKGAQLVLGTESNPHIADTIIMANLGFFQFKANPGVYNLKLKEGRSSDIFTMVSVGAQGWALAPGDENAEVTLMDFQGTTLYPRLTRNPGMEGEDVLEPTDPEPAPSGSAMDYLNKGLKFAEGILGKSKPATKSLSETEHAEINIFSVASGHLYERMLNIMMVSVMRHTNHTVKFWFIEQFLSPSFKDFIPVLAEQYGFKYEMVTYKWPHWLRQQKEKQREIWGYKILFLDVLFPLSLDKVIFVDADQIVRTDLYDLVQLDLEGKPYGFTPMCDSRTEMEGFRFWKTGYWANYLRGLPYHISALYVVDLKKFREIAAGDRLRQQYHSLSADPNSLANLDQDLPNHMQFQIPIFSLPQEWLWCETWCSDETLGDARTIDLCNNPQTKEPKLERARRQVPEWTEYDEEIAELARRNREGKEKKVKGANTKSRRFEEETKGHVVDEL

SEQ ID NO: 4594 - protein, 2112 aa, Gambusia affinis
MLEMGAGELPVTMAMANVAVVTCSSSAQRTDGPVQEFHPSGFYVFPLSDQSVAGGAFLPPTEDRPQNHDPGKQLVPVSNDGRSPVKSDLQPNSACRRTLTAEHSRTLTNIPPSSAVAARCRHLPLPLLFPHFTSSNTSSFNSDPWRQGRMMIYMDSGSKMKWEEVRQCNRLAGGLSYVTNLPQRDCLQTLGKDEQEDHRIKQQMSPQPDAETIVPANAADSKAITTTLATKWADTPLLLEASEFLAEESQDKFWDFVEANQNIEGEHDDTDQAYYELIVKKASSLLSSVQLNMLKFALSLRAYSATVHSFQQISSTEHPPSGCSAFISVHGEKSCAPESLATLLKTATERPKPYLFKGDHRYPGSNPDTPVIILYAELGTPDFQRFHQVLTSKVNEGSAAYVLRHYVAEPNENKVYLSGYGVELAIKSQEYKAKDDTQVQGAEVNATVIGENDPVDEVQGFLFGKLKTLYPELKEQLKELRKHLVESTNEMAPLKVWQMQDLSFQTAARILAAPAVDALNVMKDLSQNFPTKARSITKTVVKSEIRKEIEENQKPAPLSREVLSPPGFSLQEKYLKTRPAPPVAFFKGTLGLQPGDSALFINGLHIDLDTQDIFSVLDVLRSEARVMEGLRSLLIETPYIHDILKLNVQPSDSDYAVDIRNPAICWINNLETDHRYSSWPYNVQELLRPTFPGVIRQIRKNFHNLVIIVDPTQENAAELLSVAEMFYANNIPLRIGLVFVVSDEDDIDGMQDAGVALVRAYNYITDEVNSHSAFEAVVSMFNRVTIGGKLSVGDVVKVLEKRFPYVEVSSVLGADSSYDNNRKEGKAYYEQTGVGPLPVVMYNGIPYQREQLDPDELETTTMQKILETTTFYQRAVYLGELATDHDIIDFIMNQPNVVPRINSRVLSTSRTYLDLSNTNNYFIDDYARFSTLDSKEKSTAVANSMNYMTKKGMAATNSHDDGYIRPVTFWVVGDFDKPSGRQLLYDAIRHMKTSNNVRLGMVNNPSSDPSAETSRVARAIWSAMQTQSANNAKNFITKMSKEETAEALEKGVDVGEFAVGGMDLSLFKSAYEGPKFDFLLSHAAYCRDVLKLKKGQRAVISNGRIIGPLEESETITTGTSGVLDITYNFRSAVKIRPKEGDVYFDVVAVVDPVTRDAQKLAPLLSVGLDSVIGLDEPSLSVQLTTVLCPAANLFPLYHVSVFHSEGSEAARKRQPEGFHELPVKTVRYASEKTECTVCSFYRYVLEPEVAFQPDASFSPGPMAKFLDMPQSPLFTLNLNTPESWMVESVRTRYDLDNIYLEEVENIVAAEYELEHLLLEGHCFDVSSGQPPRGLQFTLGTAAEPVIVDTIVMANLGYFQLKANPGAWMLKLRKGRSDEIYKVYSHDGTDSPSDSDDIIVVLNNFKSRIIKVKVSSSLRRGAPTCPQSPIRVQKKPDKFNEELLSDGTEENDSGFWKSLARGFTGGGKAEEPKQEKDDVINIFSVASGHLYERFLRIMMLSVLKNTKTPVKFWFLKNYLSPTFKVGLVLPPFVVEEDRLGFVLDAFCFSCSWFKTRAGEFIPHMAKQYGFQYELVQYKWPRWLHQQTEKQRIIWGYKILFLDVLFPLAVDKILFVDADQIVRTDLKELRDFDLEGAPYGYTPFCESRREMDGYRFWKSGYWASHLAGRKYHIRCCFSSTIAHRLRRVLHSALYVVDLKKFRKIAAGDRLRGQYQGLSQDPNSLSNLDQDLPNNMIHQVPIKSLPQEWLWCETWCDDSSKRTAKTIDLVTMLVSNRCNNPMTKEPKLQAAVRIVAEWTDYDQEIKRFQTSRARDGASRSTLPDVQQRVTGNRTSSADELCVRTVDRLRSDDPLLLSSAQRTVRSGGQTDADQMLGKAALSVPDRLTVASDLRSVFSVAALLGDNCRPSGPDSSSSTVSTWASNGAAKPSCRKKKKKRKFLDHPREGERERERERPLPHSIQGLAGRHGDQLQRDLLIGYKVVGGGGLEDERGSVGGDDGVGGGWRGGGGRAALFVLMSLYVLGQSNTWGNQQRALQGLACVCPPVSLKLVAPGEPLPAVHPVANEGPLSAVPAQVSSQVRRFPVDLPAAGDVADVLLLLSHARAPERQRGGGGD

SEQ ID NO: 4595 - protein, 1648 aa, Tilletiaria anomala
MMLWIRSLQRLLPGLLLVALVPSVLCSGSDLTGTPSIRVDLRAPWSAPPPLLEILEAVNSLDSTAFFDAVTQLTVSGIAQNTSAKKASYKEIYETSLEVLQKQGIFKAPGAREILDLSLALHSESPQVEAFWHLYRTTGVEKLYREQVVGEEAQQACRSWALVQGKVICSAPALDEALAAGSPTNQEGMIEVPFDHSLSPTSASSLVPMPTVVLYADLSSPNFAELHGSLYRHAVGKSSLPLRYILRWRPSEEDQRETVYLSGYGAALDLKKVDYLVIDDRKLRDDANVTVTGAAAAAAAADTVASYEQLSAESALSDRRWLQAQIGGKKGSTGAEDIGAKISEENTLKLGYKAAQVIAASSDPLRALRELSQNFPFHAKQLSGVKLKKNFLDEITHNQDVRVEAGSNDVWLNGKSIPHKDVTPLGFLKKMRSESILVHSLTDRSRGVGLSPKAAVDLLSNSTLGKAFIGSASEPIAVDASDRIERGLRMLSGALVNGASTSKPSAITWWNDLEKDDVFAHWPRDFKTLLQPLWPGQFPQIARNVFHVVLALDLSRKESCRFLAESVFPASTRIGLRWGLVPIWGSGDGQTIALTRMFYHIFDSLGPDGSARYLRRVGLSGVPESTTINLEEAKKEFAAALGTVASQNEIQEILKRIDPSDSDFMQDRLNTAVSYAQRVGAKLSKGRLGHAFVNGYHVPFDNGISQSIGQQVQAQLQALAPLIYYNTLSTDADLSNHFYDQEDTLTYRSPLLSADGASNLTTRMINLATLEPELLNEGPLSRYFAARPDSVNVTMYIAGDFDSAGGQEMLAASLGALEAGSFRLGLLHQPSSAQGNRTVSTALYTLLNSHEGTKLQPSSILSVLPARPELTPGEVSEENVAKVHALLAAEDSDAAKRAHDWWGRASPMLEALGCGAKSICLVANGRVLSGFRAADVIPADIQAVAQLEGSKRARKVQASLIELAGRPSGASQDSHRVALAASALAADYAPDEAAEGLFRTPPALRLSAFDRIDIMHSGFEIGNRDKASFRYTAIIDPLTETAQRWSSILEMASQWPNTYIKVILNPTPKLREVPLRQFYRYRAPGKVTFEEDGSIRRDSILFTGMPEDAVLTLGLDTPSVWLAMAEDAVYDLDNIRLSSLPSASRSSGVSATYELKRILIEGHARDGQLNSIPRGLQLLLDTADGQERLDTIVMENLAYFQFRAKPGLWHLKLREGKSNGLYEMLSVGNLGWNSPNVNVTGNVVTLASLEGLTIYPQVRKRPGMEDEQLLEDIDKGPEAQDRAGSRVADAAKSLLGSVFSKIASSTPSLTKPQSPHADINIFTVASGHLYERMTYIMILSVLRNTQHSVKFWFIENFLSPSFKEFIPHLAKEYGFAYELISYAWPHWLRSQKEKQRVIWGNKILFLDVLFPLDLDKVIFVDADQIVRTDMIDLVNVNLEGAPYGYPPMGDDSEDMEGFRFWKQGYWKQFLRGRPYHISALYVVDLVRFRQIAAGDRLRGQYQALSADPNSLANLDQDLPNNLQFSLPIHTLDKEWLWCETWCSYEWLDRAKTIDLCSNPKTKEPKLDRARRQIPEWTKYDDEISAFAARLSDEKRIGTNVVSSKESEQVPSAVQEGGASALILQGGDEPAQNQDALHVDTLKHKHDEL

SEQ ID NO: 4596 - protein, 1479 aa, Exophiala xenobiotica
MRTSTLPWRLATCGLVSVAVLSRLVNASSSINVALETSFSAAPYLVELLETAALENSSSYFPLLDRVADGTFVDLQTEQELYNKFIDVLQHDGHLSNSEALSSFKFALALHAAAPRVEAHFQYYNASVRPHLMAAQDAACPVWVYLDGQQYCSPALDRAQQAISLPGADEVLPFDRVLGSSGEGPSSILYADITHPFFGQFHNIVSQTASDGRSNYRLRYRPSSLSASKPLYVSGYGVELVLKRTDYIVIDDRDALKTEAAGVEQISLQQVENDDITDLKPLTSSEVVNLGLNAASFIASSSDPFESLLQLSSDFPRYSSVLASANASNDFLAEHRRNREQFLPSGYNVFWINGVQIEPRHINAYSLLEHLRRERHIIGDLQKIGLTSSEAISLISSEVIAETQANESPQRFDWRDDDEADNVLMWLNDLEHDKRYASWPSDLRTLFQRVYPGQLPQVARDIHNLIVPIDMADIKDIELVTTALQNLVRRAVPIRIGLVPTGSGEIANLYSRLSYHILDTYGLSTLMSFFTQVVSSKKLQANPEKAFMTVIKGLVPREGKEELSYEDVLKAVHLHQRLKARDNYVERLALGSSNHPFIVNGVVLPRSDNWFEVLSSRVFSDHQLLQQAVYEGAVAEDDWIPRVFLFQAAIRRNELVFPSDPKNVQIVDLSRLTREYANEFASIPRIRGADATLLSDRAHVLVVTDVDTESGRSFLTQALQFQKRHPESDLLILHNPPSKAGSHGLAAALSVLTQDNNDFTLEQVQQLLEAETTSLDQDEAASEFWASYEPLIKDLGMALGETGLWLNGRVIAPVDGFLTVADLESLLDYERRERIAPVTTAITVLGLEDQFGDALDVAKVTSLVARSLKSDLPEGLRESAPLIRMDRFKIWNEAYTSFQVSNSENPTIQVVAVVDPASETVQQWVPILKTLSQLSGVSVKVFLNPKDRMTELPVKRFFRQVISAEPTFGPDGSLQKPTASFQRIPRDTLFNLGMIVPPSWLVAPKECIYDLDNIKLSSLGEEENIEALYELEHILIEGHARDVTAGPPPRGVQLLLGTEQEPHFTDTIIMANLGYFQFKANPGFWHISLKPGRSSKIFHIDSVGPKGYAAQPGDETTSVALLSFQGATLFPRLSRRPGMEEEDVLESSGGALDYLNKGASYASSALSSLGFKKTTSTNADINIFSVASGHLYERMLNIMMVSVMKHTKHSVKFWFIEQFLSPSFKSTLPNLAKHYGFEYEMVTYKWPHWLRGQKEKQREIWGYKILFLDVLFPLDLDKVIFVDADQIVRVDMMELNKVDLKGAPYGFTPMCDSRTEMEGFRFWKQGYWETYLRGKPYHISALYVVDLKQFRQLAAGDRLRQQYQALSSDPNSLSNLDQDLPNHMQHVLPIHSLSQEWLWCETWCSDESLSVAKTIDLCNNPLTKEPKLDRARRQVPEWTEYDEEIATVLKEASSKDNQQPEVEHVAEEVVADERKRDEL

SEQ ID NO: 4597 - protein, 1632 aa, Prosopis alba
  MOD_RES (1244)..(1244): Any amino acid
MGALYRSGFRVLIVLACLGLLGIGPAFADTRGPKNVQVALRAKWSGTPLLLEAGELLSKEQEDLFWDFIEVWLRTEKDAVDSQTAKDCLKKILEYGKPLLSEPLASLLEFSLLLRSASPRLVLYQQLADESLSSFPLGDESYSNNNKVEIGETTKGNETTKSDILHDDVNLKSPVGKCCWVDTGAHLFFDVSELNLWIHRPVEPVSDSFQQPEIFDFDHVHLDSSIGSPVAVLYGAPGTNCFKEFHFALVKAAKEGKVKYVLRPVLPAGCEANSGHCGSVGAGQTLNLGGYGVELALKNMEYKAMDDSTVKKGVTLEDPRTEDLSQDVRGFIFSKILERKPELTSEIMAFRDYLLSSTVSDTLDVWELKDLGHQTAQRIVKASDPLQSMQEINQNFPSIVSSLSRMKLDDSVKDEIMANQRMIPPGKSLMALNGALINVEDVDLYLLIDLVHQDLLLADQFSKLKIPHSTIRKLLSTLPPSESNTFRVDFRSTHVNYLNNLEEDAKYRRWRSNLNEILMPVFPGQLRYIRKNLFHAIYVLDPATPCGLESIDMILSLYENNLPMRFGIVLYSSNYVTKQIENRSSKENGDNSEDDISTKIMRLFFYIKENLGIQMAFQFLSNVNKLRTESDGSEDALEAHHVEGAFVDTILPKVKSPPNEILLKLGKEQKLKEMSQESSMFVFKLGLSKLQCSLLMNGLVIEPTEEALINALNDETPRIQEQVYFGHINSHTDVLDKFLSEAGIQRYNPRIISDSKPRFTSLSMFNFGEGSLANDISYLHSPGTIDDLKPVTHLLAVDITSRSGMKLLRQGLFYLMEGSKNARVGVLFSANQSADLSLRFVKAFGITASSYSHKKNALDFLDQLCSFYEQNYILPSVVAADSTEAFIDKVCELAESNGLPSKAYRPALHEFSTGEVRKHLIKVGTFLYRVLGLESSVNAVITNGRVTYPIDEHTFLSDDLHLLESVELKHRTKHIQEIIEEVKWQDTDPDLITSKLISDVIMILSSSMASRSRSSESARFEILHDQHSAIILNNENSSIHIDAVLDPLSPTSQRLSGVLRVLWKYVQPSMRIVLNPLSSLADLPLKSYYRYVVPTMDDFSKADSAINGPKAFFANMPLSKTLTMNLDVPEPWLVEPVIAVHDLDNILLENLADTRTLQAVFELEALVLTGHCSEKDQDPPRGLQLILGTRSTPHLVDTLVMDNLGYWQMKVSPGVWHLQLAPGRSSELYIVKEDGNESHGKQSXKLITIDDLRGKVVQMEVMKKKGKEHEKLLVPDDEDDMQDKKKGSSWNSNLLKWASGFMASNEQAKNTDSSRPEKGKGGRRGKTINIFSIASGHLYERFLKIMILSVLKNTNRPVKFWFIKNYLSPPFKDLIPPMAREYGFDYELITYKWPTWLHKQKEKQRIIWAYKILFLDVIFPLSLEKVIFVDADQIVRTDMGELYDMDLKGRPLAYTPFCDNNREMDGYRFWRQGFWKDHLRGKPYHISALYVVDLKKFRETAAGDNLRVFYETLSKDPNSLANLDQDLPNYAQHTVPIFSLPQEWLWCESWCGNATKSKAKTIDLCNNPMTKEPKLQGARRIVAEWPDLDAEARRFTAKIVGEDQEPAQAPEQSKDSTSEDLSKDDSESKAEL

SEQ ID NO: 4598 - protein, 1503 aa, Ascochyta rabiei
MRASTPLLSAKTLLALSAFTQIGVIADSSINVALRASFDPAPYLVELLETAAEENATAYFPLLDRISEGYLDELDTERQLYEKFVELLKSDGHITDPETLASFNLALSVRSAAPRIEAHYQFYKTSVEPSLESEQGKNCQLWVSLGSQQYCTPHIDDGEPIGSIKNERTHELPFDRVLGNSSALPTIVYADISAPRFKKFHKTVSKTAKEGKTSYRVRHKPSLKGPQTPLVVNGYGVELQLKRTDYIVIDDRQAAQDEKPADQKPIGTELDEEAADLKPLAKDDVAGLAEKAASFVLQSDQPMDTLLKLVRDFPKYTTTVAAANATADFLTEHYSNRELLLPTGYNVIWINGVQIPARDVNPYALLVHLRREKRLINGIRSQGLSGPDTISLLSHSAIAQGQTGDEPQRYNFRDEAEGGKVIVWVNNIEKDSRYESWPTELRALLQRTYPGQLPNVRRDIHNAILPIDFTSPDHVSNVIETVIGLVRRGIPLRWGLVPQTPTPNAVEQAKVVYYLQHTYGLSSVTKYLLAAMEAKKLAKPDKASFETAIKTATVRKDRETLEFEDILASEALGERVDQAKYYLERLSANGPNAPAFVNGVPVAQGDNWLSELSQRISMDLRQIQKAVYEGNLKEDSWVPQQFLVQAATKRNPFIIPENEKEIKLVNMAEFEEKYGEIFAKYPCVEAAPSASKSEWAHLTVFGDFDTKSGLTLLKSVAQYRQTNPNLEIVMVQNSDADQSGVSEELLDTYVRAGRQLDSDGLLAVLAQEVATSPMPARSTRMRKAAQPLFEELELKAGELAVLLNGRFVGPIPKDKVFSSEDIGTLVSYEMNKRIEPLSNALEDLQLTAKIATPFDAAKIQSLVALSTVSDVPEGIFETVSTLRTSGYKNWTAEHTAIVKGNRETAIFQIVASIDPATEQAQKWIPILNTLSEMDGTHLQLFLNPKQMLQELPVKRFYRYLLGSKPRFNADGSVESFKAHFTGIPKKALLNLGMDVPPSWLVAPEESIHDLDNIKLSTLPADANIDAVYGLESILIEGHSRDTTNGGQPPRGAEVVLSTERDPHFADTIIMANLGYFQFKANPGFYSIQLKKGKSQDIFSLDSAGAKGWAAQPNDESSELVLMSFQGTTLFPRLSRKPGQEEADILAEEESLASELASKGTEKVNKFLSKIGLNLNTEKVFKKGAELLAGAKPVKTQADINIFSVASGHLYERMLNIMMLSVMKHTNHTVKFWFIEQFLSPSFKSFLPAMAAEYGFQYEMVTYKWPHWLRQQSEKQREIWGYKILFLDVLFPLDLDKVIFVDADQIVRTDMYELVTHDLQGAPYGFTPMGDSRTEMEGFRFWKTGYWANFLRGKPYHISALYVVDLNRFRKLAAGDRLRQQYHSLSADPNSLSNLDQDLPNNMQFNLPIHSLPQEWLWCETWCADADLATAKTIDLCNNPQTKEPKLDRARRQVPEWTVYDDEIAALAKRIRGEKEQQAVVDVQAEEQVREKREKDEERKRDEL

SEQ ID NO: 4599 - protein, 763 aa, Verticillium longisporum
  MOD_RES (16)..(16): Any amino acid
MAYGAMSAGRNRRSSXIVHNSASTTTGPLINAALRKGERALTEVETPEQLKAILDAAETGSDGDYTIALASFLSAATIAPGANALILNGRVIGPITADLPFDEDDFQLFLEFEQTARILPVYAALEDLSLGDRLSGPLAAAKLTSITALSTISDVPEGIFESASTVRVNAFEAWDSKYTAIEVGNAETASIHLIGLLNPVSEQGQRWAPILKVLSELDGVYVKLFLNPKEEISELPVKRFFRYVLDSAPSFDESGMVRAPGATFKGLPSEALLTTGMDIPPSWLVAPKVCVHDPDNIKLSSTKGDVNVIYQLENILIEGHSREGKAGQSPRGAQVVLGTEKEPLLADTIIMANLGYFQFKANPGFYNINLKDGKTTEIYTVESIGAQGWAPVPGDEGTEVALMDFQGTTLYPRLKRKPGQEKADVLQEDEGEEDGGIISQGLKFAESLLGGSTKSLSAQEHADINIFSVASGHLYERMLNIMMVSVMKNTKHTVKFWFIEQFLSPSFKDFIPHLAEEYGFKYEMVTFKWPHWLRQQKEKQREIWGYKILFLDVLFPLSLDKVIFVDADQIVRTDMMDLVNHPLEGKPYGFTPMCDSRTEMEGFRFWKQGYWANYLRGQPYHISALYVVDLRRFRDLAAGDRLRQQYHALSADPNSLANLDQDLPNHMQFNIPIHSLPQEWLWCETWCSDESQAEARTIDLCNNPQTKEPKLDRARRQVPEWTVYDDEIAALDRRRRGVPEEVIEKNPKSRTWEEPKSIGKDEL

SEQ ID NO: 4600 - protein, 1487 aa, Aspergillus sclerotialis
MPGIVTSWRFYALVVTTVLARLVYASPSVNVALQASFDSAPYLLELLETAAEENATSYFPLLDRVADGTFDNIPTDKELYDRFLKVVYDDGHLKTPEGLSSFKLSLAIRSAAPRIEAHYQFYNTSVQNSLAAAQDAVCPVWVHSDGKQYCSAEMERAQQDVAGDLDPRELPFDRVLGDTSSTPAVLYADISSPMFKEFHQALSTLAKEGEVSYRVRYRPPQHWSSRPLFVSGYGVELALKRTDYIVIDDRDAENRDQKDPEVDSPSDPEQWKEDSPDDLRPLSSSEVARLGLNTVSYVADSDDTLDTLIKLSQDFPKYSSRIAAHNASSSLLKEIRTNRGRMLPPGVNVMWINGVQVDPREMDAFSLLDQLRRERRLIEKFRDIGLSAQETVNLLSHEFLGEALSSDEPARFNYQDELEGGRVIIWLNNLEKDAKYRSWPSELMAYLQPTFPGQLSPVRRDLHNIVFPVDLASTEDMELVVETIQVFVKRKIPVRFGLVPTASSPGSIGHLKIAHHIQETYGLASLIRYLEQSTSKKKVTSPDKSCFEAATKDQDVRPEKERLSFEEVLKSEDLETLVKRTVNYQNRLGVEPGKPLVFVNGIPIARNDKWVQGMSLQINKDLQSVQRSIMDGIFEEDTWLAGFFLSKAFDRRNSLLIPEDPKDVRIVDIAKVYEARKDVLSSIPHLESGGNVLDSVHMVVVGDFGSEHGKGLLSTALNFHKEHNEADIIFLHNPEKNEGSTSGPTHLYRFLQGDSKMDITKVVTEMAVSNDDNSAVSDAEAKEISQFWAAQKPLVENLGFSPGASGVMVNGRAVGPIPVDTPLTVDDLVQLLAYERTKRISHISKAIVALELDSKLSTPIDLAKLTSLTAISTTSDVPEGVFESTPDIRVNLYDTWNTSRSVITVANSEDPTINVVASIDPTSETAQRWLPILRVLSNLAGVRLKIFMNPREEIQELPIKRFYRYVLDPEPVFSSDGSLSRPKAFFSGVPVEALLTLGMDVPTSWLVAPKDSAYDLDNIKLSSLKGGSDVDAIYALEHILIEGHSRDLSTNSPPRGVQLVLGTDENPHLIDTIIMANLGYFQFKTQPGLWKINLKPGRSERIFNIDSVGSLGYHPQPGDDNNDVALLSFQGKTIFPRLSRKKGYEEEDVLETGPKPGSAMDYVSKGLNFASSILSSASPRGSTAEKHADINIFSVASGHLYERMLNIMMVSVMRNTKHSVKFWFIEQFLSPSFKSFLPHLAKEYGFSYEMVTYKWPHWLRAQREKQREIWGYKMLFLDVLFPLSLDKVIFVDADQIVRTDMYDLVTTDLDGAPYGFTPMGDSREEMEGFRFWKQGYWKNFLRDKPYHISALYVVDLNRFRALAAGDRLRGQYQMLSSDPGSLSNLDQDLPNHMQHTIPIKSLDQDWLWCETWCSDESLATARTIDLCNNPLTKEPKLDRARRQVPEWTEYDREIAALAARVAHEQQEVPLSEVDEEEGSFKWRKDEL

SEQ ID NO: 4601 - protein, 1595 aa, Punctularia strigosozonata
MRTRNRRWKTAICALSILNGRVLASPSVRVALRTSWPATPLLAEILESIDSESPDSFFGVLDAITDPEHRIIFQDMTPEATYQATLQTALDAGYLSESGLASAVRLNLALHASGPKIQAYYQHYEHGPSQLGSVCDGQSWVDWYGVPVCDLETLVRLVGHETVEPAQSNNTSLVPPSRPKTLAFDHIYPSVSPAAERPPHTAILYGSPASDNFRELHSYLLSLASGRDHRIEYVFRHMPVHARSGRTLHKTYLSGYGVTLDLKKMDYLAIDDRRTRGQESGSVDDDSGIKEAEGTLLTKDPILQLLEAYPLNSTADNNSPLTEDELLQIGFQTAQLIADSEEPLATLKQISQNFPRYATSISRRVNVNESVAMEIQANMARAQPGMSMIWINGKTVPETDINPFSLLRLLRKERGFVHSLTSLGLTAEQSIDLMTHSAVGSLQGEKDVLDGIFDASDRLEGGNTIVWWNDLEKDSRYASWPSSLNTLLRPLYPGQFHNVKLNLYNVVLVLDLSKTSSHGFIGNAVWNIINRNFPLRFGVVPMVETEDGEKMAKIFYYLIQTVGRAKTIEFIRMNAQTRMPSDMVTPTVNWNIVRQEFQALINGVELAEGQEPLLTFEEVVNSPSLDKVRAYTQRLQADASSSPTGHAFVNGKHFDIDDEFLRNMQNEISQQMLHLQQRIYTTELSDENAGDMSTYFYDLPTTAQTRNRYIHQTGFEAIRVFNLHELFRDVELGAAYVYPNSAAESQTPLTEVIIADFDSEEGLTLAREALISMDGTARIGFLHNPSAASGLSEDTVHASAFRKLLLKHHTSIPKSDLLRSLGFDVEDAQQVPTPPQNVLGELAGDERSDSEDDQHTTSAEASKTILSRLGLSAGAQAVLINGRLIGPFKAGEFHAADFRTLASYELRKRVGPVLAALADVTPSFLQKDRVSSADILNIASSILSTIAMPEPTESGLYNVPAQPRRRNYNLLDNTYTSFESGDISTALYQIAILVDPLSEAAQKWSSIAEWLSSIPDVFIKIIIHPPGFREVPLKRFYRFQVLPSLVFDVNGDEVPAMVTFDDLPTQPIYTLGMDVPKAWLARPREAFHDLDNIQLNGLSSEEVVEATYELDYLVIEGHARDTLTNSPPRGLQLQLKTDNSSSVGDTQIMANLGYLQFRATPGIYHLEIRPGRGKELFEMESVGNEGWDSPTVQQIGDEITLTDFEGLTVYPRLARIPGKGHYDVLADLTFEDDEPDGLLDSIASRIKSWFRPEPAPSTDLVAVSQQAEINVFTVASGLLYERFLSIMVLSVLRNTNSTVKFWFIENFLSPSFLEFIPHFAAAYNFQYELVTYKWPSWLRAQKEKQRIIWAYKILFLDVLFPMDLKKVIFVDADQIVRADLKELVDLDLHGAPYGYTPMGDDNTDMEGFRFWKTGYWKDFLKGLPYHISALYVVDLDKFRKMAAGDILRGHYQQLSADPNSLANLDQDLPNNLQREVPIFSLHEDWLWCETWCSKDRLHRAKTIDLCQNPLTKEPKLERARKIPEWEEYDAEVARLTRHLTEAGLLRSSSIASDVNALAGEVPPPPSAPSNAEVAGMQGEGDTAADVEGVVTHEEL

SEQ ID NO: 4602 - protein, 1428 aa, Actinidia chinensis
MEAQFRSGFWVLIVFVIFFSLSGDLASVESRRPKNVQVSLQAKWSGTPILLEAGELLSKEWKGLFWEFIEVWHHSEVDDDSHTAKDCVKKIVKNGQSLLREPLASLFEFSLTLRSASPKLVLYRQLAVESLSSFPLSDDINSHSINGGVSEASENMESKKAESLLVGMNPRGIEGKCCWVDTGGALFFDVAELLMWLDNPKEQSGDAFQQPELYEFDHVHVDSSIGSPVSILYGALGTDCFREFHAKLVAAAKEGKVKYVVRPVLPSGCQSITGHCAAVGTSDPVNLGGYGVELALKNMEYKAMDDSAIKKGVTLEDPHTEDLSQEVRGFIFSKILERKPEVTSEVMAFRDYLLSSTISDTLDVWELKDLGHQTAQRIIHASDPLQSMQEINQNFPTVVSSLSRMKLNDSIKEEIIANQRMIPPGKSLMALNGALINIEDVDLYLLADMVHQELSLADQYLRLKIPPSIVRKLLSTLPPPESNAIRVDFRSAHVHYLNNLEVDAMYKQWRSSLNEILMPVFPGQLRYIRKNLFHAVFVLDPGSTFGLESIDMIISLYENNLPMRFGVILFSTKFIKTIEMNGGSATVENDSHIGEDLSSLIIHLFIYIEEHHGTQMAFQFLSNINRLRIESADPTEDAPEIHHVEGAFVETLLPKATSPPQDTLLKLEKEKTFNDLSQESSMFVFKLGLTKVQYCLLMNGLVTDANEDALMNAMNDELPRIQEQVYYGQINSHTDVLDKFLSESGVPRYNPQIIADGKVKPKYVSLSRAILGKDSVLNDVSYLHSPGTVDDLKPVTHLLAIDITSKRGIKLLREGIQYLIEGSKNARLGMLFNVNPSVGIPSLLFVKVSEVTASLYSHKEKVLDFLNQLCTFYEHEYVLASSVVAEINQAFIDKVCDLADANGLPSKSLRIALSEFLVDELRNHLNKVGQLLYSQLGFESGTNAVITNGRVVHVDDNTFLSHDLHLLESVELKSRIKHIVEVIEEVTWEDVDPDILTSKYISDIIMLVSSSIAMRERSSESARFEILNAKYSAVVLNNENSSIHIDAVIDPLSPSGQKLSSLLRVLWKSIQPSMRLVLNPLGNQNGWNSNFLKWASGFIGGSEQSKKIESTSVERGNGVRHGKIINIFSIASGHLYERFLKIMILSVLKNTNRPVKFWFIKNYLSPQFKDVIPHMAQEYGFEYELITYKWPTWLNKQKEKQRIIWAYKILFLDVIFPLSLEKVIFVDADQVVRADMGELYDMDIKGRPLAYTPFCDNNKDMDGYRFWRQGFWSEHLRGRPYHISALYVVDLVKFRETAAGDNLRVFYENLSKDPNSLSNLDQDLPNYAQHTVPIFSLPQEWLWCESWCGNATKSKAKTIDLCNNPMTKEPKLQGARRIVSEWADLDFEARRFTAKILGEDVDPLEQVASPSQTQNSDSTVASEDKAEL

SEQ ID NO: 4603 - protein, 1497 aa, Chaetothyriales sp.
MPASMLTSSLAGLGLLAYTLLLSGSVQAASSVNVALKASFNSAPLLVELLETAAAENESSYFPLLDRIADGAFAESSTDKELYDQFVHVLRDEGHLQSPEALASFNLAFSLHASAPRVQAHFQYYNRTISPHLPAAQDAACPVWVQLDGHQYCSPTLERAQQSLSLDEAEEVLPFDRVLGPEPGEAPSTILYADVANPLFPDFHKAASAAARAGESSYRLRYRRSAGEHTPLYLSGYGAELSLKRTDYIVIDDRDAAQADGANQAALKEPSDAEELEIKPLTSSEVLNLGFNTASYIASNQDPLQALVQVTANFPKFSSFLAGQNASTAFVDEHKANRKLLLPAGYNVLWVNGLQIEPRQVNAYSLLAHLRRERKLIEEMKAIGLAATEAVSLLSSDVIAQAQADEVVQRYDWRDEAEGGNVIIWLNDLEKDKRYSHWPKYLVGLFQRGRPGQLPTLARDIHNLIIPFDVTNPKDLELVVKHLQNLVNGKVPIRIGLIPTGSSPTAETYARLSYYLLDRYGVGTLTAFYQELAKTKKIASNAAKQLSAAIKDAELLEGKQALSYNEILQSEAIGEYASKAQEYLDRLELRADDPHFIVNGVVLPRGETWFELLSGRVFLDLQILQQAVQQDAIEENTWVPHFFLFQAVARRNAWIVPSDSKDIKIVDVPALTSAHPDAFAQLPKSDGEEATLLSDRAHLLLATDLDSPAGRELLASALELKAARGEVELLIAHNGAPGAAAGLSKHFPAFWAAYQQQAKDLTAAEDLRRLIQQYADAPEADDAASSAAATLWEHGKGLIRDLGLESGQTALWLNGRLIGPLPGPFTLPDLLLLLDYERSSRIAPVTTAITSLGLEERFANALDLAKITSTVARSHKSELPEGLRDAAPLIRTERYKSWNDSYTAIAKEPAADPLVQVVAVIDPVSEVGQSWVPILKTLSELDGVNTRIFLNPKPALKELPVKRFYRQVLSSAPTFSQNGSLEAPGAVFTSVPKDTLFNLGLVLPPSWLVSSEEANADPDNIKFNPAGNEADVDVVYRLDHILIEGHARDVTAGPPPRGVQLLLGTTEQAHVTDTIIMANLGYFQFKANPGFWKISLKPGRSSKIFNIDSVGPNGYSAQPGDETSSVAVLSFDGLTLFPRLSRRPGMEGEDVLAEGGGGKGQVAEIVNKGASFLSSLGLTKDISAGRTGKSRTNAEINIFSVASGHLYERMLSIMLVSVMQHTKHTVKFWFIEQFLSPSFKSTLPILAEHYQFEYEMVTYKWPHWLRGQREKQREIWGYKILFLDVLFPLDLDKVIFVDADQIVRTDMIELTRVDLQGAPYGFTPMCDSRTEMEGFRFWKQGYWKNYLRGKPYHISALYVVDLRSFRALAAGDRLRGQYQALSADPASLSNLDQDLPNHLQHNLPIFSLDQSWLWCETWCSDDALASARTIDLCNNPLTKEPKLDRARRQVPEWSVYDDEIAAVVRDARAQQQAQAGGGDGGDGDDNTQSTAWQKKEL

SEQ ID NO: 4604 - protein, 668 aa, Camelus ferus
MPQSYAALGRGRIGFVFIVNTDDEVDGTADAGVALWRAFQYIAEEYDTTQAFISIVNAGANFYKMTGLGPLPQSLYNGEPLQDEDFVKLEVAILQRMVDTTVELQKYVLTGMDKNAFEKKYNTIGLNIFQTHQLFCQDVLKLLPGEIGVVNNGRFLGPLDENFYAEDFYLLEKITLTSLGEEIEDFAQSTKSIDLKVMSDFVMKFDALVSSLPQSASRYDITFLKENHSVIKINSLEDDMVFDVIAIVDPLTREAQKMAQLLIIFTDLLPVQSFYRFVLEPELMLTANGIVGPAAKFLGIPEAPLLTLNMITPEGWLVEIVRSNCDLDNIHLKDVEGAVTAEYELEYLLLEGHCFDVTTEQAPRGLQFTLGTKNRPVMVDTIVMANLEVIPHMAKEYGFQYELVQYRWPRWLHQQTEKQRIIWGYKILFLDVLFPLAVDKIIFVDADQIVRHDLRELRDFDLGGAPYGYTPFCDSRKEMDGYRFWKRGYWASHLLRRKYHISALYVVDLKKFRRIAAGDRLRGQYQTLSKDPHSLSNLDQDLPNYMIYQVAIKSLPQDWLWCETWCDDESKQRAKTIDLCNNPKTKEPKLKAAARIVPEWVEYDAEIRQLLDHLDNKKTSATLLAAAQLQSPLLSDAAAPVPHKLRGQNPSEALLTEGTTSMHPPVLQ

SEQ ID NO: 4605 - protein, 1476 aa, Wallemia hederae
MRGVAISLAALLVTASASTHASAVNVQLQTEWAEPPYCQTALEAAYRLHPDAFESLLERISCSDTPEDIYSRIRAQLPQTKRSLFDMHMALRSTTPAIVASYSIAADEGFAYDPQCPNFINYQGRRVCDANELDTLDQLAWPGSDTTFDTPIDHVISQPTIFPTPRIIHYADPAASDFSVFYRFFKSRKNELEYVIRWAPTSAEASQPLKLAGWGVKMDLKKREYLSHDDRASSDLGAAENDIGDTKWEDEYGSLPEDLQEALGGSLVDVEGSANIKKLSTNLIAQVLDSQNQLQTLTTITQNLPLLAHKLSQSTFDQTEQISNEVHSNQEKYIQSGQNAVWLNGRRLYDSDFEPFTLLRQLEIDNGLVSSITKLGFSKADAIRLLNHRALYATQVARPDAVTEGLVDASDRSEDGGVIRWMNNLEKDKQYKNRIWSPYLRGLLSPLGKVARNYLNGILVVDLSNKQAIEMLSTNVRAFIDRGIPVRWGVVPYTNALNRDSLKAAKLFYSLVDRRGVEACLDFFAEVSVGSATFSERAETAYLNLSAVNGLTPQEDFDSIMDSSDGIALHKAQKFASRLGVSPGEHEADFAGEMFMNGRPVHFGDDMILSLQEHISAQTDALTKAVFSGEVDERDDVSLYFYDKPSTIKRRNKYLQSSQKDNQFIQIPSSLLDGPFITPETSNGLDVTFWLISDFNKPESLELIKHALSGMIISPTFRLGFVHNPSELETPTGSINQMLQLLPDKISPLEFLEALQDRGEIADDVDGMNAAESWIGGTGIEPGESGLIINGRVVGPIPPDGLTEEDYVQLFQYDHAQRVLPVVKAVEETAPHRLQADPDDVATLLAKLGSLLWTNVQNEQPQGIYEPPHTPRARVWNRLDTKHTSIHIGKESTAQYAFDVVLDPLSEQGQKLSKILSVLAETGDAHVRVAFNPDMSAETLPINRFYRYAIDSKPAFDRDGKPADQTARFVQMPSDALFTLELDPPQSWITRPIYAPVDLDNLNLAMTSPGDVNVAFQLDKIVVDGHARDSRTSLPPRGLQVSLKDSNIDTQIVANLGYLQMAVTPGAWSLEIREGYGRQVYALESIGSEGWNSPTVADGVTSFVVDSFEGIKLFPRFAKRQGMEAADVLAEPRETGLIPYVKKSVSSLAKLVGLAKEPEHADINIFTVASGLLYERFASIMILSVLKHTDHSVKFWFIENFLSPSFIELLPHMAKEYGFKYELVTYKWPSWLRPQKERQRMLWAYKILFLDVLFPMSLDKVIFVDADNIVRTDLKKLIDVDLHGRAYGYPPIGMDREEMDGYRFWTKGYWKDYLRGRNYHISALYVVDLKRFRQIAAGDRLRGQYQGLSADPGSLANLDQDLPNNFQTEVPIFTLDKSWLWCQTWNSDESLAHAKTIDLCNNPMTKEPKLERARKIPEWTDYDNDIQHFSDRIAKEHLVNSLIVTETEELAQGPKVAASDGDSADHAEDHHTKDEL

SEQ ID NO: 4606 - protein, 1405 aa, Chrysemys picta
MAAAAALLLLLCAWSLPCGAPASPKAVTTRLAAKWPATSLLLEASEFIAEEGNEKFWQFLETVQELTIYKKRDSEHSYYNLILKKAGQFLSNLQINLLKFALSIRAYSPTVQMFQQIAADEPPPEGCSAFVVIHEKRTCKTNEIKKLLKKAAERPRPYLFKKEHKFPTLNENVPVVILYAEIGTKDFVKFHTVLSEKVQKEEIVYILRHYVQKPSSRKMYLSGYGVELAIKSTEYKAVDDIQIKATNDTTEEEDDEEGEVQGFLFGKLKQMYPDLKDNLKEFRKHLIESTNNLEPLKIWELQDLSFQAASQIISTPVYSALKVMKDIAQNFPIKARSLTRIPVNQQMRNEIEKNQKHFHEILGIQPGEARLFLNGLPIDLDFHDAFSILETLKLEGKMLHGLHDLGIKEKAFSKFMRLQIHPVDDSCSLDIRHSSIIWVNNIEKDHIYKKWPTSFQELFKQTFSGVIQQIRRNLYNLVLFIDPVQEHAADFVKLAELFYHHNIPLRIGFVFILNTNEEIDGNEDAGVALLRAFNYIAEESDTSQAFISMINMYHKMKDGDIFTVNHVRNVLRSEFPHADIQSILGVDSEYDEKRKAGATFYKKTGLGPLPQALFNGVPFNGEEMAAAELDTVILQRITDAMGFFQRAVFMGLLNDHMDAVDFLMDQRNVVSRINPTILDTKRRYINFISMSVPVGVEDFSTFSFLDSQDKSAVISQNMKYLTKRDEDVIYAVTIWIIADFDKPAGRHLLSKALKHLKTSSHTRLGIVNNPMSKITEDNTAVARAILTAFLTQKNSSLKSFLSKIAKEETAKALATGTKIKKLLVPGMDDSTFEKKYNTLGVDIIQTHQMFCQEVLKLLPGQMAVVSNGRVLGDIVNMKLRLFMNSRSKLSEVPLKSFYRFVLEPELTSGANNLFPSGPVAKFLEMPETLLLTLNMIIPESWLVEAVNSSYDLDNIYLQDIEGIVTAEYELEYLLLEGHCFDVTTGQPPRGLQFTLGMKNNPVMFDTTVMANLGYFQLKANPGAWTLRLRKGRSEDIYHIFGHEGADSPVHLEDVIVVLNNFKSKILKVKVQKKPDKIGEDLLTVEVTEEKGSWESITSFSDLQTEEKEKKNDVLNIFSVASGHLYERFLRIMMLSVLRHTKTPVKFWFLKNYLSPTFKEIIPHMAKEYGFQYELVQYKWPRWLHQQTEKQRIIWGYKILFLDVLFPLAVYKIIFVDADQIVRSDLKELRDIDLNGAPYGYVPFCDSRTEMDGYRFWKSGYWASHLGRRKYHISALYVVDLKKFRKIAAGDRLRGQYQALSQDPNSLSNLDQDLPNNMIHQLAIKSLPQEWLWCETWCNDESKKKAKTIDLCNNPKTKEPKLKAALRIVPEWVQYDSEIRKLIKQIEKGKKNLTQSSRKVFKHDEL

SEQ ID NO: 4607 - protein, 1506 aa, Hesseltinella vesiculosa
MTRCISIGLAIGLLCSWTVASQEPSPPVELTMTAPWAAPDALVEIAETLAKVAPQSYWDYVQDLTSIDQDALTPQQQYNRAMTLARHHVADPQLLSLIQLHLGLHAAAPLIEAHHQVYQHSVQPTISSFDASCPVWVQVGNTQACTVDTLLLQELDSRHVNPVQLPSDHVYGRLNRTDTQLPLLHLYTSSFSTPEFAAWYQYLRTRVDLNHDLSFTLRYKPASSAPSPLYLTGYGVELALKNTDYLVIDDRQSQTTPAVLDKDTSKDSFIKNIGKKVNQILFTDETPTIKPMTQDEIKHLSLKATQFILEAKNPLAALAQLAQDFPKYAHKISTVALQDEVIQELTKNQRQHVRAGMSQMWLNGLPVENSEANPFYFARALIREHRIIEDLVSEGLTHQQALDLVSVDVLPDETNDGATQAFDTRDDPSSPSVIWLNDIERDNLYSSWDEDLGQFLRPGYPGQLKAVRKNIFNVLFVENLASTPSLHRIVEEIGSVIQQGTPLRFGLVPVVDDHNGVASLMAKTALDLHENKGLAPTVAFLEKVLALVSANKAEAPTKEIIAEAYSSVTNSDAWTAIETQPIPSGLTHYLQRLGLDEPSEGDVLFLNGQLLEYSNEQPWSRILMNALHMQTQLLTRDIYYGNIKNEDNVYDYFLDQDNVASSRNPYIGITEQRPLTMISNNVHQDIHYVSSDGPNYANLWIVGDMDTPQGLKLALNALEFMNQDTSEHARLSLLHMPSKKDVAHDTVLFSDVLFTHMFFNKPTVDSLKQLVEAQYQHWQNNGQGLAPGSPTVDSDKQDEAIDYWHTVRTHLTLANARPVLTSPDQAAIILNGRVVGPFSASKGFTASDFNTLWQREWHDRISPMHKRLTDLSFSHCSQTAMADVMTRLMVVLQSVKANTVRNVLLTNNKQGSRDRYYHHLAGDKSRLRIGSTDKVYAEVGVLLDPLSEQAQAWSGLLLALSELEGVVLDIRFNAVQSLEKLPLTRFYRSVVDADWHFDAQGQLNVPTAYFDALPLEPLYTLGVHTIEPWQVTVKAANGVDLDNIRLTSLPAKETSVKAGYELEQILIEGHSLDSSNQQPPRGVQFHLAPVHAPAVTGTIVMANLGYLQLKAGPGLWQLSLRPGRSSDVYHLESIGTHGQWNASEAADKPLFLDSFEGLQVFPMVKKNPGMETVDVLEATDSAPQDTGILSSLSQRFFGKKDTTEQDLAATHGPKHAEINIFSVASGHLYERFLAIMTASVMKHTESTVKFWFIENFLSPAFKDFLPELAEAYGFDYELVTYKWPSWLNAQKEKQRTIWGYKILFLDVLFPLDLEKVIFVDADQIVRTDMKELVDLDLKGAPYGYTPFCSDRKEMDGFRFWTQGYWQDHLSGRPYHISALYVVDLVRFRQLAAGDRLRAQYQQLSADPNSLANLDQDLPNNMIHAVPIFSLPQEWLWCETWCSDESLAKAKTIDLCNNPLTKEPKLDRARRQVPEWETYDTEIESIRTRFLQKHVETEASTSFHDEL

SEQ ID NO: 4608 - protein, 1553 aa, Trametes versicolor
MLRLLPLLTWPLLRTLAGSPPVNIELRTSWPAAPILLESIEAVSIEDPDAFFPLLHAVTDASVFPLPSDKSSPAHAHQHVLETALALDFLAEPGAYVSAEMHVALHSASPKLEAFYQYYTDHHATRTEGRTSCGSWVDWYGEVVCDVETLANLVQTASIDAPGAAESHTAPASPRLLAFDHVLPDPARVPSSPPHTAVLYASLESPNFHALHSYLYAAASAPTPRVAYVFRPVPPADRDLAVRSHLSGYGVALDLKKMDYLAVDDRLQGGSGSSSDEGSTTKVQEDEADIIVTRLQQYPADESVDVTAPLTDTELLDIGLQATQLVYDAEEPHARLATLKQLAQNFPRFAGALARRVTVNESLLNEVAENQAKAPGGANAIWLNGAAIEEKDMNPFGLLKAIRKERGTILSLMALGLNSTQAVDLLTHRTIAQAQASGGVLDGLFDASDRAEGGEVIGWLNDIENDERYASWGGNLKILLRQLYPGQFPTVKYNLFNIVLAADLSQASSVDFIGGTVNSLIRRGLPFRWGVAPLVETEDGARMARLFYYLLEVVGADDTLGFLLSISQRGVPMDQVSPSVVWSQVRTNFEDLLAAKENLPEGIETDFDTIIAGGEGDLDAARTYATRLSATLSTAPQGHVFFNGKHFDLDDTFLQALQMEFSPQLQHLQYKIYKNELTEEQAKDMSTYFYDLPTTAKRRNTYIHPTQKAGSLRIYSLPELIERNGLNSTAGVFVYPTDSELVPLTTYVVADFDSEKGREFVKEAIKSVTPGSLSRLSFIHSPSSQTPILSGPSSILARLITADALFKISPERLLSILGLNEATEDAAQQPLIDSADSVLADLPESVDAYEKYVDACRLVVRSLGLKSGELAVIVNGRVVGPIAPGEFIAGDFESLAAYEHHKRVQPVYEALLAVHEPISEATKEDAAEIISIVSSVLSSIQQPDPSEAGLFDAPQKPRLRNYRRLTGEYTAFTIGDEETALFQIGAIINPLGQEAQKWTSLLEWLSGMPGVYIEVHVNPMRHTEIPLKRFYRYNLLPRLAFDEEGNEIHAKTQFTNLPTEPIYTLAMDAPQSWLIRPKEAVYDLDNIQLGLLSPQDRASGLNAVFDLDALVVEGHAREGDTSAPPRGLQMQLVTSDATPIADTLVMANLGYLQFRTKPGVYRLEIRPGRGREIFEMESVGNEGWNSPGIDEAGDVVTVTSFEGVTLYPRLARLPGMEREDVLRTHAVDAGDEHAGVIDHLVNKVSSLFGGKKEEKALVAVDDGQADINIFTVASGHLYERFASIMILSVLRHTKSSVKFWFIDNFLSPSFLEFLPKYAAEYGFQYELVTYKWPTWLRAQTEKQRIIWAYKILFLDVLFPMDLKKVLFVDADQIVRADLQELVDIDLRGRPYGYVPMGNDNPDTEGFRFWKTGYWKDFLRGMPYHISALYVVDLVRFRQLAAGDMLRGHYQALSADPNSLANLDQDLPNNLQREVPIYSLPEDWLWCETWCSKDRLDRAKTIDLCQNPLTKEPKLDRAKQIPEWEVYDAEISAFAKRLTASESDAERPKPHDEL

SEQ ID NO: 4609 - protein, 1317 aa, Fundulus heteroclitus
  MOD_RES (651)..(651): Any amino acid
MTMEKVLLLSLLLLMLHRVPAAPKGVTASLKAKWSMTPYLLETSEFIGEDGNEKFWHFVDTVKELTVYKQGETVRSYYNLIIKVPAQFLTHLQVNLLKFALAMRSYSPAVHASQQIASDEPPPEGCPAFVSVHGQRSCSTKDIKKLMKAAAGRLTPYLYKNDHTYPGLNKTDVPVVILYAEIGTKKFNSFHKVLSEKAEEGTLVYVLRHFVAVNLSFQAAARIMSVPKFDALKVMRDLSQNFPSRARSLTRVAVKQEMRKEIEKNQKHLGETMGIQPGDGELFINGLHIDLDVHNPFSILDILRGEAKVLEGLHNLGIKGEQKAKLLRLPVNTVDDSYALDIRHPAIMWMNDIENDQMYRSWPASVQELLRATFPGVIRQIRRNFFNLVLFLDPLQEETVELVKLAELFYKHKIPLRIGFVFVVNTKDEIDGFSDAGVGFYRLLNYIADEYDLSQSVMSIVSLYNKVDVWEGLSADTISAYLKRQYPKADQERILGADSEYDYKRKDGALFYRKSGLGALPVALFNGVPLNPDEMDPEELETIILQRIMDTTAGFQRAVFMGQLTEGSNVVDYIMEQANVVPRMNPLILSTDRKYLDLTGTPVVNEWEDTTMFSYLESKDKTAVVAKRIKYFTNSDEDGLTAVTISVILLXGMDLDAFEKKFNTLEVDFIRSQQMFCQDVLKLRPGQRAVISNGRILGPLEEQEEFTVEDFHLLEKITLSGSAEKVKAKVKQMGMKPKQASDLVMKVDALLSAAPKGEVRRDVSLKDTQSVLQLSPRENEVFYDVVAIVDPLTREAQKISSLLIVLSQVVNVKLQVFMNCRAKLSELPLKSFYRFVLEPDVAFLANDTASPGPVARFTELPESLLLTLNMITPESWMVQADHSLHDLDNIHLQEVNRVVAAEFELEHLLLEGHCFDLSTGQPPRGLQFTLGMSQEPLMYDTIVMANLGYFQLKANPGAWILRLRKGRSEDIYQIVTHDGTDSPPDAEDVIVVLNSFHSKIIKVRVQKKAEKINEDLLSETSESKGIWDSIVSVWSTFEKSITGGGSKKDEGEKKKEDILNIFSVASGHLYERFLRIMMLSVLRHTHTPVKFWFLKNYLSPSFKETIAHMAKSYGFQYELVQYKWPRWLHQQTEKQRIIWGYKILFLDVLFPLAVDKIIFVDADQCDSIMPCTTQRGELVSFGVSSSALYVVDLKKFRKIAAGDRLRGQYQALSQDPNSLSNLDQDLPNNMIHQVAIKSLPQEWLWCETWCDDASKVTAKTIDLCNNPKTKEPKLMAAARIVPEWVEYDEEIKKLLRQVQEQTPTPSLHKKENRRDEL

SEQ ID NO: 4610 - protein, 2361 aa, Pteropus alecto
MAKKATILVQLLLGSTILWLSLLGSGTASESKSVTARLAAKWPETPLLLEASEFMAEESNEKFWQFLDTVKELAIYKQTESDYSHYNLILKKAGQFLDNLHINLLKFAFSLRAYSPTIQMFQQIAADEPPPDGCDAFVVIHKKHTCKINEIKKLLKKATSRPRPYLFKGDHKFPTNKENLPVIILYAEMGTRAFGKFHRVLSEKAQNGEILYVLRHYIQKPASQKTYLSGYGVELVIKSTEYKALDDTQVKTVSNTTVEGEIETNEVQGFLFGKLKERYSDLRDNLTAFQKYLIESNKEMMPLKVWELQDLSFQAASQIMSTPVYDAIKLMKDISQNFPIKARSLTRIPVNQHLRKEIQENQKDLNNRFEIQPGDAFLYINGLRIDIDAYDPFSILDMLKLEGKMMNGLHNLGINGEYMSKFLKLNSHVWDNTYVLDIRHSSVMWINDLENDELYVMWPTSCQELLKPILPGSIPSIRRNFHNLVLFIDPAQEYTMDFIKLAERLYYHKIPLRIGFVFIINTDDEVSGMNDAGVALWRAFNYIAEEHDVSQAFVSITHMYQKVKKQNTLTVDNVKSVLQNKFPSANVQDILGIHSRYDDERKAGANFYKMIGLGPLPQALYNGESFNREELNIKELEMAVIQKMIDTTIYLQREVFMGTLNDRTNAVDFLMDKNNVIPRINPLILHSKRQYLNLISTSVTADIEDFSTFFFLDSQDKSAVIAKNMYYLTQEDDNAISSITLWIIADFDKPSGRKLLWNALMHMKTSFHSRLGVIYNPTSKINEENTAISRGILAAFLTQKNTFLRNFLRKLAKEETATAVYSGDKIITFLSEGMDKNAFEKKYNTIGVNIFRTHQLFCQDVLKLRPGERSIVSNGKFLGPLDENFYAEDFYLLEKITFTNLVEKIKGIVENMAISSKNMSDLIMKIDALVSSLPKRASRYDVTFLKENHSIITINPQENDVFFDVIGIVDPLTREAQKMAQLLNVLGKIINMKIKLFLNCRGKLSEAPLKSFYRFVLEPELKFLGNDIIGPEAKFLDIPESPLLTLNMITPEGWLVETVHSNCDLDNIHLKDIERTVIADYELEYLLLEGHCFDIMTEQPPRGLQFTLGTKNQPVAVDTIVMANLGYFQLKANPGAWILKLRQGKSEDIYQIVGHEGTDSQPDLGDAVVVLNSFRSKIIEVQVQKKPDKIKEDILNDKGGKKGMWDSIKSFTRSLHKEKDEIETDVLNIFSVASGHLYERFLRIMMLSVLRNTKTPVKFWFLKNYLSPTFKEVIPHMAKEYGFQYELVQYRWPRWLHQQTEKQRIIWGYKILFLDVLFPLAVDKIIFVDADQIVRHDLKELRDFNLDGAPYGYTPFCDSRTEMDGYRFWKTGYWASHLLRRKYHISALYVVDLKKFRRIAAGDRLRGQYQALSQDPNSLSNLDQDLPNNMIYQVAIKSLPQDWLWCETWCDDESKQRAKTIDLCNNPKTKEPKLEAAARIVPEWVEYDNEIRRLLDHLENKKKNAAHPANIPKISKRSTNSKQADRYHLTPVRMATINKSTNNKCSRGCGEKGTLVQCWWAGTLVQPPFQKQVYYSLGSGLEGPDGPAAAAAGAAAMACVPPSAASGHLPFFQFRPRLESVDWRRLSAIDVDKVAGAVDVLTLQENIVNITFCKLEDEKCPHCQSGVDPVLLKLIRLAQLTIEYLLHSQEFLTSQLHNLEERLRLSLADCEQSKNLLTKQAGEIKLLKEECKRRKKMISTQQMMIEAKASYYQCHFCDKAFMNQAFLQSHIQRRHPEDSHFEYKKKAQTDKLQNEIDMLKEQLQLTKSQLEAAQHAHAVRFSKEYEMQKTKEEEFLKLFDRWKEEEKEKLVDEMEKVKEMFMKEFKELTSKNTALEYQLLEIQKSNMQIKSNIGTLKDEHEFKEERPQYPQDFQNVMQLLDSQLLSHIEKLRTSMIDDLNASNVFYKKRIEELGQRLQEQNELIITQRQQIKEFTSKPFNSVIEPKVNVPAPQTLDAKSSLTMAHEQAFSSHILEPIEELSEEEKGRENEQKLNNNKNHLRKALKNNPSLTKEIRTVLEQSLVEKLETLGINADIRGIPSDHLNRVLKTVESARHDRERQIPNIQQIREYLEHEVSCKIEERTLLSSDKYSAAQMDTLSTGEIPKAIQLPPKSRQLIRQRPVFTDRTSVPKTSPFSSEEELDGDDLIQAYTSPDLPPVQSSKSKSSFGKNNVKSDTDWTEGSEIEDSDISPKPTGTSIKTLTEKVEKTVSNHRNVNKPVGGINVAEAFTRRELKEELKYADVDDDDWDISSLEEEKSLGKKTGKEQKEPPPVKNESNATQVPSAWGAPNLKGPKGEGLQDESSTLKSSLVTVTDWSDSSDV

SEQ ID NO: 4611 - protein, 1601 aa, Heterobasidion irregulare
MRASFALSTTFAAALSIVGTKAASPPVTVSLRSSWPSPPFLLEAIETIALEEPDAFFPLLDVLTNPETLSSREPLRPEALHQLALQAALSLNFLSKHGALTSVEMQFALHAATPKIEAFYQHYLDTAASFAESRNRDECESWVDWYGEVVCDMERLVHLAGPETIDPINATSQSSDSFVRPRTLPFDHIYPLPAEILDRPSRTAIFYASIDSSNFRELHLCLLRLSSGPAPRLEYIFRPIPPAAGTKEKTYISGYGVTLDLKKMDYLALDDRHSNSRDTHDDETIEKVESPAVNIDPIVSLLSHHPLNTTLDASEPLTEEELMEIGIQATQLIHESSTPFETLKQLAQDFPRYASSLARRVVVNSDLRDEVSRNSMKAQPGVSAVWFNGATVSENSMNPFGLLKLIRKERDIMSSLSSLGIEPSQALDLITHPAIQAAHGSSGSLLDGVFDASDRLEDGGLIVWWNDIEKDSRYARWPTGIHALMRPTYPGQIPVTRLNLFNVVLVMDLSQSSSLYYIAGTVANIINRAFPVRFGIVPSIESEGGARMAKIFNYLVDNYGRARTMIFIKKVIVLQLPAIPQMTSETVDWDRVRFELADLIKVEEPKEGGVALDFDTVVNDTPQELQAKVDKARAYAKRLGATMASSAQGHAFFNGKHYDLDDTFVQSLQMQFPKYLQYLQERLYEGALDQVVDVSAYFYDLPGSHKSRNRHIFPSSNADSLEIHNMVELTESAGLNTQSTNFVYPPEVDLVPFTTYVVADLDTENGLSIVQAALSYVVSIDGTSRARLSFIHNPKSSDVGEGQRRVSALLSHLVSKEKLWTVQPTRLLKALGLKDVITTNDHEQIVLSPDAVFQDLIGGIALSDLDASEYEDYVRSCRMMVRSLRLRRGETALVVNGRLVGPMGPGEFSTEDFKVLEDYEYVRRVEPVISALGDVLSAEIQYDRHTFAQTISMISPIISSIHIADPSEAGLLNQPVMTRNQNYKLMESQFSGFDFGNTSTALYQFAVVLDPLSEQAQRYTSLFEWLSSFPSVHVAFYINPAQYHELPLKRFYRYNLRQSLTFDESGQEIPSNVQFSGLPIDPIYTLGLDEPSSWLVRPREALYDLDNIQLGALSGDERQRGVEVIYELDYLIVGGHARDTFTNAPPRGVQLQLSTTNLECIPIDDTLVVANLGYLQFKAKPGVYRLEIREGRGRDIFSIESVGNDGWDSPTVEEVGDEITLTSFEGLTLYPRLTRLPGMEQEEVLNVVEEEKEPTNIIDTVISHVHSFFHPKDLTDVKPASPHGDINIFTVASGLLYERFASIMILSVLRNTKHSVKFWFIENFLSPSFLEFIPHFAGEYGFKYELVTYKWPTWLRQQREKQRIIWAYKILFLDVLFPMDLDKVIFVDADQIVRTDLKELVDLDLHGAPYGYTPMGDDNHDMEGFRFWKTGYWENFLRGRPYHISALYVVDLVRFRQMAAGDILRSHYQQLSADPNSLANLDQDLPNNLQMQVPIYSLHEDWLWCETWCSKDRLHRAKTIDLCQNPLTKEPKLSRARQIPEWEEYDTEIAKFARLLAEDGRIHSSAATADVNALARAGSTPAVGDVGLEDETSRIPIRDEL

SEQ ID NO: 4612 - protein, 1413 aa, Wickerhamiella sorbophila
MQYSGFLTNRPMLLSVLLAGLAVAKPVTVQMDTNWHAVPYYAHVLETISVHNSSAYFPLLSVYLSAEESDGRFSSEEEASTFLLDTAVSRDFISASQLPIVKAQLANSHRAAYVEAMCQHFINDIVPTYGAEIAECDNVFVYNGKATCEATDVFALETTSSTAAPMDLIDTDHVIGGASADVPWAILYADFNSEEFPVFHANLLASALQQKVSYVLRYKPSKGYNPVSQIGGYAATVQLKRTDYIVVNDRNAEGEDSPELKIDYEANVVESNAIPQLDQRAAGYILDAEDQLEALVDTSLNFPGRIADIKEHPINEDLTQDIEANDAAGFFTPGTNVILANGRPVFTTERNVYKLLDVINEEQHYINGLEVLGFSTEQAKGLLASGIVVADGNTTVDATMRYNLMSDAILWLNDVENDVRFKKWKRSPRTLLMNTPMGQFPPIRRNINSIVLAVDFSNPSWLQMIGQLLQILARGAPVQVGVVPITTAPAAKQFVKLAGETGSLIARQIYIAGLLKGLTPNEAFSEALETPFPDSEASLIDPNDVWTSVAEWANKFEIYQPAVFSNGVLVPLSQSWLIDATNQFGIDLDLARSWVEDGELEEDDLTTSLRDKLFGLGISRRSEIVDPINPAAVVYVDPSGVLADAPGAAVQWAVGNTSQTIWLVAEFNTQEAYTQLAELLEVAGTTKRFSVGVLPITSTEVDDRYGRAYAALQKLGNLPALAAINSVEALRAWHHADGPAPKIVEEEGSGALVTFASQAAQTHLFKEVIPRRLNLVVDGRLVVLTKKIDGEIIEQLVERERPRALRLSKAAADLGIENASAFTARLTKAWYGSETSRLITEQWFGLERGIKKNVENAKVDIMAIVDPASEIGQELVALLKLVSDLNVACINVLLSPRLLKDADVPSRFYKPVFPLAPNFDSHGHLVTPAAEFEGLGDDTLYIAGVDTPSAWVSMAKECEYDLDNILLNSVSGDRLEAIYELKHLLLEGHASDITNRQSPRGVQLVIGNTATPHLSDTMVMANLGYFQLQTDPGFFTVSLADGPSSDIYQFNGEGMSSNSIALWITEMDGTTIMPHLVRRPGKETADVLEPPKKKKSWFGGKPKTEGADINIFTVASGHLYERFLSIMTLSVMRHTKHTVKFWLIENFLSPSFKKFLPTLAEEYGFEYEFVTYKWPNWLRGQSEKQREIWGYKILFLDVLFPQNLSKVIFVDSDQIVRTDMIELVNEDLEGAPYGYTPMGDDREEMEGFRFWKQGYWKDHLQGAPYHISALYVVDLDRFRELGAGDILRQHYQQLSADPRSLSNLDQDLPNNLQGLVKIHSLDKSWLWCETWCSDESLANAKTIDLCNNPLTKEPKLDRARRQIPEWIEYDDAVSALRKKAAQAAKSRVQAAKEAVEAAMGVAIGHENDDHDEL

SEQ ID NO: 4613 - protein, 1415 aa, Hondaea fermentalgiana
MSARAAAVTLRSLAFAAVTSLVLAAHGAQNALEVRLEVPWPTHKLWPLLETSEALGEDNVVFWGFVDQACKTTWEGTEVSTTLSQAVDLASRISQTASNDSTDSAATVDEFTRDLLRLSLELREFAPAIEQQRQLGLALRALTNAGADFPDDGRAWVALTVRGSGQGTIVTDFDKLPAAITSLMEDLANPAVQERCKANDNNEESRPGPLDIFNQDHVHPQSSTSSGAGTSAIAILHGILGRADFVAAHQKLSEAVEYHKDLVYVVRHMPGADAAQDPLAMNRTALQGFGVALDIKNMEYLTVDDDGGNKASEEKRDTSSEREADLSSPVAGIHFDKMIDRLPESKDALVDLHTELEGEALEAASKSGELAQIKVWDMVNLGLQATAKVLADADPLNRWEDLSQNFPSRARALINMRVPDGLLEEVERAARSLEVPDGTVLVNGVSVDAKSESFNIFSLMESIRAEIRARETANAIVSGGGALIEPLAVRMSNAGASDSSGKTNEADAMIRASGTRVDVRADAKGAVIFLNNIEKDKAWTLNGLFYEGSADFQSQLVQEAFREQRILMYQVHLRRITSSTNVLKYMLEHGQAIPRYNRAVFQETAESAFLTIPADLVGENTVIHYMLDSKTADVTVFLALDEASMITSQGRSLLRSLVAFTESKPSRTRIAVLPVGLSEGDAPSQLAALLHALRIDDLDAVDALLSDDTEAAEPARVTEAWMATLSAQVASWKGLQPLNVVFNGRVIAAASPSVTMTVEDFDLAVSHERKIRADFVRSALGSTRATPDAIMQLSPLVAGQASSPRRKLPMINMRKHFPGLCYSSTTGSTNNAQTLTVQAVIDPLSEAAPRVSAVVRLLRDKLGAHVDLVFTPKSSVSAFPLSSYFRFLASNNEPDPALGGIYPADEQPAVRFYGMPQEQLLTLKVYTPEPWIVYPTYTAGLDTDNIRLSRAESRRSTVTFALSKLLVTGHCVDEQVGSPPAGLQIELQPLYPRDAVASDTLVMQNLGYMQLQAGPGLWELGLAKGPSRDIFSLHQEHDTRQGSTWVALRSFTSAPLSLQAARRPGHETDSLLASMETLDGEMGPTGATRAAQALGLGQNPLSWLFDAARRLLGMETSPTPVAPIDGTAIGTKSGGTNETIHVFSLASGALYERFLRIMMVSVTKATQNPVKFWLIENFLSPDFKAGLGALQNEYGFEVALVTYKWPHWLRRQTEKQRIIWGYKILFLDVLFPLDVPKVIYVDADQVVRADLKELWDMDLEGKPYGYTPFCTSREETLGFQFWRSGYWKDHLRGNPYHISALYVVDLQRFRHMMVGDRLRAVYDQLSRDPNSLSNLDQDLPNYAQHMVPIFSLPQEWLWCESWCSDESKRTAKTIDLCNNPLHKEPKLDMAKRVISGELFPQSWVELDAEIKNVLV

SEQ ID NO: 4614 - protein, 1570 aa, Salmo salar
MAAASITGRMRNILLLLSLLLLNVQYVQSASKGVSASLKAKWSMTPFLLETSEFIAEDGNEKFWDFVDTVKELTVYKNGESVRSYYNLVIKKAGQFLTALQVNLLKFALSLRSYSPAVHASQQIGSDESPPEACLAFVSVHGQHGCSTKDLKKLLKAAAGRPKPYLYKNEHRYPGLNKTDVPVVILYAEIGTKKFGSFHKVLAEKAAEGKLIYVLRHFVAEPRPQKMLLSGYGVELAIKSTEYKAVDDTQVKDKGTVNTDEDDIDEVQGFLFGKLKNSHPDLQEQLEELRKHLLESTNDMAPLKVWELQDLSFQAAARIMSVPTFDALKLMRDLSQNFPSKARSLTRVSVNQEMRREIEENQKRLSETMGIHPGDGGLFINGLHIDLDVHNPFSILDTIRGEAKILEGLHNLGIKEENLSKLLRLPMNPVEENYALDIRHPAITWINDIETDSMYRSWPSGVQELLRATFPGVIRQIRRNFFNLVLLLDPVQEESIELVKLAELFYKHKIPLRIGFVFVVNTDDEVDGSTDAGVAFFRLLNYIADEYDLSQALMSMVSMYNKVEIGEALSVDTVSAYLKKKFPKASAARIFGEDSEYDDKRKAGAEFYKKSGLGPLPLALFNGVPLNAEEMDPDELETVILQRIMDTTNFFQRAVYMGQLTEGTDVVDHLMDQANMVPRINPLILSTDRTYLDLTASPVVDDWDDATMFSYLDSKDKTAVIAKRMNYFTKNDEDGINGVTVWIVGDFEKASGRRLLLNALKHLRASAGVRVGVIDNPSGGVPSEDSTVLYRAVWAALLTQKNKAAVEFVQKILKEETVQLLQQGTKMKNLLVKGMNADAFEKKFNTMEVDFIRSQQLFCRDVLKLHTGQRAVVSNGRILGPFEDEEEFNVEDFHLLEKITLSTTAEKVKARIKQMGIKGKQASDLVMKVDALLAAAPKGEGRRDFRFVKDEHSVLHFAPREDEVFYDVVAIVDPVTRDAQKMSPLLIVLSQVVNVKLQVFMNCRAKLSDMPLKSFYRFVLESDVSFLANETVSAGPVAHFLELPDSPLLTLNMITPESWMVEAVRSPYDLDNIHLQEMKGVVTAEYELEHLLLEGHCFDLSTGQPPRGLQFTLGMSQDPLMQDTIVMANLGYFQLKANPGAWILKLREGRSEDIYQILAHDGTDSPTDSPADSGDVKVVLNSFHSKIIKVRVQKKSDRISEDLLSEATENKGIWDSIASRRDGALGARLRYYSVKSIAKKMCYCRPSIAGGGSSSEDGEKNREDVLNIFSVASGHLYERFLRIMMLSVLQHTKTPVKFWFLKNYLSPSFKESIPYMAEAYGFQYELVQYKWPRWLHQQTEKQRIIWGYKILFLDVLFPLAVDKIIFVDADQIVRADLKELRDLNLEGAPYGYTPFCDSRKEMEGYRFWKTGYWASHLGNRRYHISALYVVDLKKFRKIAAGDRLRGQYQALSQDPNSLSNLDQDLPNNMIHQVAIKSLPQEWLWCETWCDSASKTTAKTIDLCNNPKTKEPKLSAAVRIVPEWVEYDNKIKQLLRDVQEQKDNDRATQTQSPMPEPSSSPEKTGSERDEL

SEQ ID NO: 4615 - protein, 1541 aa, Ascobolus immersus
MRLQSGVARFVVAAAILGRTNILGVLASSSPSVKVGLRTSWQGPPFLLELLETAAEENSTAYFPLLDRIAAQDFVGYKTEKQLYDRFIEVAHSVGTLLKPEDLASFNFALSIHASAPRVEAQYQYYEQTLVPMMGRMFRPECPVWLLWSSKQVCDTDWSTMLDEFQRFPNNPKALPFDRILNRNDELPTAILLADIESPEFGKFHRQLSERARKGKLSYRVRYRAPIDREARPLPLSGYGVDLALKKTDYLVMDDRQAAEGKEAGTDEVQKAKENLQSGESSEKATIKALHPKDIAFLGTKAGSYVMSQANPLDSLISMLQDFPKHSFAIANTNVSEEFTEELGENVQQGYQLEYGPGANTLWINGLQQGDTQVNAFALLQTLRRERRNIHSLQQLDLTAPEAIQILSHKAIGESKSDGLPQRFDASDDIEGGGVITWLNDLEKDEQYENWSPSLQTFLRQMYPGQLPQVKLNLFNMIVTVDMSKKADVSLVVEQLLMFIERSVAIHMGFVPITNTPESKAQAKVFYYLRDTYGLTAALRYISFATELGDSGPVKKVFEDIVATQTPIEGKQVKEWADITGGEAPLVSAATQWSNRLGMKANPEGAFLNNQFIPRSDETWLRQMSQRVTIDAQVLQRALASQLVSSKDEFFKVLYENIAKRRNKYVYPDDEDTLNLIDIAKVEADHSSVLENLPKVTTLDEDSSYQFDIWVIGDVDESDGHDLLSAAAEAQATIPGIRLSVINNPEIVNDKPALSTLLNRFKELLKSHEQLKQILAEAPPLKHFAELPQVTELAMKVQPGVKTEGWAIPDHMEAAKFWKSAAPLVAKAGLEPGQRGLVINGRVVGPIGREDEFSAEDFIDLIKLEKRKRIDPVIQAATDLGVLEKLAKKDAIPRLANIVLLTSQPLDGVAGIFDPVSPVRSSDFENWTCKNTCIERGDKEKAVLRITASLDPVSSTAQKWAPILKALSAMDGVYLQIFLNPSRVLTELPIKRFYRYVLEAAPTFDSTGTMVAPEATFSNLPEDALLTLTMDVPPSWLVTPSESIHDLDNIKLSTMKSRLNGGDVTAIYSLRNILIEGHSRDLTVGGPPKGAQLTLGTEADPHAADTIVMANLGYFQFKANPGFYELGLKEGRTEEIFEIKSAGIDGYNVRNADPSKHITVLSFEGATIFPRLIRKPGMETEDVLAPTTHKNRSPAALFKKGLQGADNLLTKWGFLAPAPGTKLLRPANAEINIFSVASGHLYERFLNIMMLSVMKHTKSTVKFWFIENYLSPSFKDFLPHMAEKYNFQYELITYKWPHWLRPQTEKQRQIWGYKILFLDVLFPLDLDKVIFVDADQIVRTDLKELVDLDLEGAPYGFTPMCDSREEIEGFRFWKQGYWKSYLRGLPYHISALFVVDLNRFRELAAGDRLRGHYHQLSADPNSLSNLDQDLPNHMQNQLPIFSLPQDWLWCETWCSDESLGTAKTIDLCNNPMTKEPKLDRARRQVPEWVDYDGEVAELARELKGKGAGGDHLEAGKKEEKEVKVEEKPVERVEEKKGHDEL

SEQ ID NO: 4616 - protein, 1500 aa, Coniochaeta pulveracea
MIRLSQLPWGLTAALLATTYLPCFHVSAGPSVNVGLNAAFPAPPYLVELLETAAQENETSYFPLLDRIAAGSFSTATTDKDLYEKFLEVLQEDGHITHPEALSTFNLALSMRSAAPRIEAHYQYYATAIEPVLRKQEGEEYTENKCDPWVLIDGKHKLCNSDQLDVDSASTVPHGASQQRTLPFDRAYGVGARDFILYADVTSSSFPVLYKWVKSVADDVGGTYRVRYKRSAAQPAAPLTVNGYGVELSFKRTDYIVIDDRQASEATTGSDAQKVMLDEDEEITDIKPLEKSDLSSLGMKAASFVLESDSPFDTLLKLTQDFPKYSTSIVAHNVSEGFETEHQANRMQMVPAGANVLWMNGVQLIDRQIQPFALADMLRKERRLINGVLDLGLTGKEAVALLGHDEVAQAKAEPDATRFDWRDEIEEGKVIIWLNNMEKDKRYEKFSKSLMTLLQPTMPGQLPHIRRDMFNLIVPVDFTKIEDLQIITQQLLAFMRRLVPIRFGLVPLSPTTEAAEQAKVVYHLLENYGLGAVASYLEALVEEKKASKPSKTLYEQAISDKPARADATPLPFHEISTSEHHEQQIKLAKHWAERLNANAEVPPVFFNGFAFPRSEGWLGVMQTRLGQDLRALQEGIYYRLIEEDTWLPSHFLENAVTRRNVYIFPEDAKTLNVLNINKIYTEHSDLFSKVPVLEADERSTKEAWAALTVIADLDDAEGRKLLFHALQFRQANQGVRLDIVHNPTVTSHSAAMMNERVKIRQENLLSVYRQVELEAMLEDSRQAPDPIFDAALARFLAAIKVKSGENLLILNGRVVGPVTSDDSFKLEDFELLMEVERAERILPVYKAIEDLSLSDKVSGPLAAAKLTSVTALSTISDLPEGIFESAPSLRISHFKVWNTTHTSFEVGHESTATIHFVAVINPASEQGQKWAAVLKVLSELEGVYLRVFLNPMDGLSELPVKRFYRYVLDSRPSFDDDGKVKALSATFAGIPSEALLTAGMDVPPAWLVTSKVAVDDLDNLKLREIQARRGVDRVEAIYELENILIEGHSRELPGGNPPRGVQLVLANANNTHFADTIIMANLGFFQFKANPGVYNIHLEEGRSSEIFSIESIGALGWAPVAGDENPDICLMDFGGVTLYPRLTRNPGQEDADVLEEVVKPTNAAKEIVSKGLNFLKGKGALSKSATEHAEINIFSVASGHLYERMLNIMMVSVMRHTKHTVKFWFIEQFLSPSFKSFLPVMAETYGFKYEMVAYKWPHWLRGQREKQREIWGYKILFLDVLFPLSLDKVIFVDADQIVRTDMYDLVTLDLQGAPYGFTPMCDSRTEMEGFRFWKQGYWANYLRGLPYHISALYVVDLRRFRELAAGDRLRQQYHQLSADPASLSNLDQDLPNHMQFQIPIHSLPQEWLWCETWCSDETQAQARTIDLCNNPLTKEPKLDRARRQVPEWNVYDEEIEAVRRRRLEGKEGTGGEERKGKGGKMLTRLPNGEIAKTLHVKDEL

SEQ ID NO: 4617 - protein, 229 aa, Poeciliopsis prolifica
MMLSVLRHTNTPVKFWFLKNYLSPSFKETISHMAKSYGFQYELVQYKWPRWLHQQTEKQRIIWGYKILFLDVLFPLAVDKIIFVDADQIVQADLKELRDLDLQGAPYGYTPFCDSRREMEGYRFWKSGYWASHLGQRKYHISALYVVDLKKFRKIAAGDRLRGQYQALSQDPNSLSNLDQDLPNNMIHQVAIKSLPQEWLWCETWCDDASKATAKTIDLVSPGAVTFKV

SEQ ID NO: 4618 - protein, 732 aa, Aethina tumida
  MOD_RES (192)..(192): Any amino acid
  MOD_RES (455)..(455): Any amino acid
  MOD_RES (460)..(460): Any amino acid
KLNKIILAALEHLPSDKATTFALSLLLDNQKVKDIKEGKQVTIPNEITRNIDAQELNLKMLRVYAQRVLNLKAGQIAIVANGRVLGPLAEEENFTLEDFNLLMRFSGASYLDKIIEAMGKDADEEDDVCSDTLMKVVSLLISKVQGRSRFDISYSGTDHSVIRTIPPRNADQVAFDLVAIVDPVSRGAQKLXPILQVLHEVLNCKIRLFLNSVEKNSDMPVKSFYRFVLEPEIQFSEDGRQLPGPIARFNNMPTSPLLTQNYHVPDNWLVEVVRSVYDLDNIRLENVESNVHSEYELEYLLLEGHCFEQSSGSPPRGLQITLGTESKPVIVDTIVMANLGYFQVKANPGAWILRLRQGRSADIYNIVSHDGSDTPENSDDIKVVISSLRSHIVKLRVQKKPDKFNMDLLSEDEGNSGIWNSITSSFSGNEEGEEEKLNIFSLASGHLYERFLRIXCCLFXNTKTPVKFWFLKNYLSPQVKDFLPYMAKEYGFEYELVQYKWPRWLHQQTEKQRIIWGYKILFLDVLFPLDVKKIIFVDADQVVRADMKELQQLDLGGAPYGYTPFCDSRKEMDGFRFWKQGYWRNHLQGRRYHISALYVVDLKRFRRIAAGDRLRGQYQALSQDPNSLSNLDQDLPTTYDDQVAIKSLPQEWLWCETWCDDASKASAKTIDLCNNPQTKEAKLTAAVRILPEWKGYDDEIRELQKKIDSGLLDEEAEQDAPTIRTTDIHSEL

SEQ ID NO: 4619 - protein, 1512 aa, Pneumocystis carinii
MRVNRLKKAWYIISVCFLGVLCQSVEFPIINAYLASSFKAPSFVNIYLETVSTYGELYFFELLDAISKTGNNRLAELNEENYKYLHKIVYDSGIIKDNITLSMLDYELGLHLLAPRIETYYHYYNYTVIPEMKNKKFMYECKNWILFNGKQYCDVEEFLRAKECIYEERESVILLPFDHIFDIYKDYDAPVAILYADLSSDDYKTYHSCLYEEAKKGNLKYVFRYKPENYSSDILYLNGYGVQISLKKTDYLVIDDRNIVDEIGGNHTLSIDSDDFLSNIQNDEIKPLTNAELKRLGISIVQFVTQSKTPLETLNFVLQDLPKYASYLSSIEVTRNLSEMLKMNYEYINPGMMLFTINGREINPAKINGFSLSRYLRNDYDLVISLKKLGLSAKEARFFVDESIFNIFNKFFDNRFDFRDKHENSMAIIWLNNLEKDSSYLHFSNDIYQYLNDLPSQQLHMVRRNLHHIIMFLDLSGRIDFMFLRIIFSLLHRSFPIRIGVVPIWNDSEVMFFFEIIYHIDFNRYIYRTRNDRNILYKNFKIIASKYSFSKNMGYMSIDEIMKSKKLNKYVLKTKEWAMRLNIKNDNYILVNGKFIEKKNWQHSILYVFPNDVNIIRKKIIKNSPGNDVDILDYLLEDAIFIRKFYMQPTNKLIKFQKFTNFIQNQENMEFSSINENLDTEQSIWLIADFDTKKGIKYLKSALKYITKYPHTSLRFLHNPQLDDKERSNNISSFLYLLKEREIDVAQPTLNYIRKIFNNYGSAGIDKNIEYPDFILNNYNSSQLELNSMKAKLYWKEIGNSLNKLGFMPGEFGLLINGYSVGPIPESDDFLLDDFESLGNFCNLSMVSKLKVIVNELSIKNSKKLKIFFPLFSSVILSYMVLEKHDDFDNSSPNKRYNLQDFFKKLTPSFAYGDENDCLFNVKVILDPLNEISQKLVSILKALKQLESVCLKVYLNPLKEIHDLSINRFYRYVLHSSLKFDSNGNLIYPNAVFEKLPMSHLYTVDYDFLESWIVTQKESIYDLDNLLIQDLSSKKISEVRIAYELKHILIQGRAEDITLKNVPAGIQLALKTKNNNFVSDTIVMNNYGYFQFKANPGVFKMDIMKSHSNIFEISKISGEFESNNDQFSKQIILDSFEGLTIYPKLVRNPEKENASIFGMNDSDSDGFTSGTVLNSTHSQQTDEFKSNSSMQRSHAEINIFSIASGHLYERFLYIMTLSVLKHTKHTVKFWFIENFLSSSFKNFLPHVANEFGFEYELITYRWPHWLRPQKEKQRQIWGYKILFLDVLFPLDLDNIIFIDADQIVRTDLKELVDMDLKGAPYGYTPMCDSRKEMEGYRFWKNGYWKSYLNGKPYHISALYVVDLKRFREIAAGDLLRHHYQSLSEDPESLANLDQDLPNNLQHLVPIFSLPQNWLWCETWCSDETLKDAKTIDLCNNPMTKESKLKRARRQIPEWNKYDKIIADLIARILEQKKANESSEYVVDNIAISVDMMQNIQFNFDDKNKKKDTHDEL

SEQ ID NO: 4620 - protein, 1523 aa, Scophthalmus maximus
MRLTFIVLLLLLLNIHQVTSAPKGVTASLEAKWSMTPFLLETSEFVGEDGNEKFWQFVDTVKELTVYKQGESVRSYYNLIIKKAGQFLTDLQVHLLKFALALRSYSPAVHASQQIASDEPPPEACPAFVSIHGQHSCSTKDIKKLLKAAAGRPKPYLYKNDHTYPGVNNTDVPVVILYAEIGTRKFTSFHKVLSEKAQEGKLTYVLRHFVADPKPHKMLLSGYSVELAIKSTEYKAVDDTKVKDPKTVLNTEDDDNDVQGFHFGTLKKFHPELQEKLVELRKYLLDSTNVMAPLKVWEMQDLSFQAAATIMSVPKFDALKLMRDLSQNFPSKARSLTRVAVKQEMRKEIEENQKHLSETIGVHPGDGELFINGLHIDLDFHNAFSILDILRGEARVLEGLHNLGIKGEHQGKLLRLPVNAVDNSYALDIRHQAIMWINDIENDPMYRSWPTGVQELLRATFPGVIRQIRRNFFNLVLFLDPVQEESVELVKLAELFYKHKIPLRIGFVFVVDTKDEIDGFSDAGVGFYRLLNYIADEYDLSQALMSMVSMYNKVGVGESLSVDTLSTYLKMKFPKANAERILGVESEYDYNRKDGSLFYKKSGLGALPLALFNGVPLSPDEMDPDELETIILQRIMDTTNAFQRAVYMGQLNEGSDVVDYLMDQANVVPRMNPLVLNTDRKYLDFTSKPVVNDWEDTTMFSFLDARDKTAVVAKRMKYFTNYDENGMSTVTIWIAGDLETVSGRNLLLNALKHMKASPGVRVGVMDNPGGKPREDNTVLYRAIWASFLTQKNKATVEFVQKLLREESSQLLQQGTKMKDLLMQDMDVDAFEKKFNTLEVDFIRSQQLFSRDVMKLRPGDRAVISNGRILGPFEEHEEFTVEDFHLLEKITQGGSAEKVKAKVKEMEMKPKHASDLVMKVDALLSAAPKGEVRRDVHFIKDSHSVLQLSPRENEVFYDVVAIVDPLTREAQKMSSLLIVLSQVVNVRLQVFMNCRAKLSDMPLKSFYRFVLESDVGFLANDTVSPGPVARFMELPESLLLTLNMITPESWMVQSVRSPHDLDNIHLQEVNGIVAAEYELEHLLLEGHCFDLSTGQPPRGLQFTLGTSRDPLMYDTIVMANLGYFQLKANPGAWILRLRKGRSEDIYQVVTHDGTESPADAGDVIVVLNSFHSKIIKVRVQKNAEKINEDLLSETSESKGIWDSIASLTGGGSKKDEGEKKKEDVLNIFSVASGHLYERFLRIMMLSVLRHTKIPVKFWFLKNYLSPSFKETISHMAESYGFQYELVQYKWPRWLHNQHEKQRIIWGYKILFLDVLFPLAVDKIIFVDADQIVRADLKELKDLDLEGAPYGYTPFCDSRREMEGYRFWKSGYWASHLGHRRYHISALYVVDLKKFRKIAAGDRLRGQYQALSQDPNSLSNLDQDLPNNMIHQVAIKSLPQEWLWCETWCDDTSKVTAKTIDLCNNPKTKEPKLTAAARIVPEWVEYDNEIKQLLRRVQEQGDAATEKQTPSPSQQEKADSLRDEL

SEQ ID NO: 4621 - protein, 1326 aa, Cephus cinctus
MKILITFGDSLMQSLVEPMIWLIMDRLDRRLRLSGYGVELQMKSTEYKATDDSDIKDNSGKDDEDENDGVEEIDGLNFAILKNLYPDKRSELDELQMHLLDTSHEIGALKVWQFQELSHQAAERIMNSPSSEAIKALTDISQNFPMQAKSLIRTKVRSDMKKEMKLNQELFAASLNIQPTDTALFINGLFFDLEAIDILTLLESLRGELRVMEALHKIGFNNKRMSKLLSLDLSGNTDNQDFAMDIRDSAVIWVNDIENDSRYSRWSPVLTELLRPTFPGMLRNIRRNLYNLVLIIDPLSEESTPLIALAESLYAHSAPLRVGFVFVTNFNTSITGLTDASVAVNNAYHYFAESKNSKEALNFLSDLENYIGVHGPDVSDIKKAIKARDSSADINYILGEESEYDVGRHLASDFVRRTGFKKFPQALLNGVPLPSNQLNSESFEEAVLSTIITLTPSMQKAVYRGEVTEGDDVVDFIMNQPNVMPRLNERILKVDKSTWLNLVGVPPEDQEYVKWSSQDASAWLMENMRYVSASRRDNMHHLYSLWIVADLKESMGRQLLREALEYVESNADVRASIIINSADDVGSEIDINKIAIAALNTLPSDKILGYLKKLIKEDTVTLIAKGDYDIENEAVKEQVEQQNFILSVHRHYAKAVLGLEKGSRAVICNGRIIGPFDENEEFTNEDFSLLERFSHSTYGDKLFKNLFKSQLFDDDEYEKNDISDDMIMKISSLLVPRPQTRSRFDIPYHGDEHSAIKVPAANPDGVAFNLVAIVDPVSRGAQKLGPILNVLQQTLNCEIKVFLNCVEKNSDMPLKSFYRFVLEPEIQFTPEGHIIGAVARFTKLPTSSLLTQYIHSPENWLVEVVRSVYDLDNIKLDNVAIGVHSEFELEHLLLEGHCFEALMGNPPRGLQITLGTENQPVMFDTIVMANLGYFQLKANPGDWLLRLRQGRSAEIYDISSVDGQDVIQDGNNVKVLISSLKSHVLKLKVSKKPDKAGMDLLSEDDKSSGLWNSISRTFTTGEESEDQDEKLNIFSLASGHLYERFLKIMMISVMKHTKSPVKFWFLKNYLSPTLKDFLPHMAKEYGFEYELVQYKWPRWLHQQTEKQRTIWGYKILFLDVLFPLDVKKIIFVDADQVVRADLKELATLDLGGAPYAYTPFCDSRKEMDGFRFWRQGYWRNHLQGRSYHISALYVVDLKRFRRIAAGDRLRGQYQALSQDPNSLSNLDQDLPNNMIHQVAIKTLPQEWLWCETWCSDESKKYAKTIDLCNNPMTKEAKLQAAMRILPEWIGYDEEIKALHQRIENENRQLEREDVDISDDSPKHEEL

SEQ ID NO: 4622 - protein, 1485 aa, Pneumocystis jirovecii
MPPFVNLFLETVAAQNESLFFPLLDIISKEKHMILSKLNFDNYNYLRNLVYDYKIMRDNISLSILDYALALHSSAPKIQAYYNYYNDVVVSEMISRNFTSECKNWILFNGRQYCDIDKFLESKDIEVDQNRPVTLLSFDHIFDNNKNGDSPLAILYADLSSNNYITYHSFLYEKAKLGDLKYVFRYKPEDFNSNDSLYLSGYGVEASLKKTDYLVMDDRKIIEDVHEKMPSQSYSSEVNSSFFFSNIQDNEIKSLTNTELKELGFSITQFVMESKTPLETLNYILQDFPKYASYLSTIKINKKTLKKLTLNYKYLNPGETVFSINGLKIKLDKINGFSLLKYLRKEYDLISSLQNLGLSLEKAKSLITDKAISELFNMFLNIRFDFRDSYDDGNVILWLNDIENDPTYMHFSQDIYQYLDELPNGELHMIRRNLHHVIIPLDFSKKFDMIFFRDIFFFIQRLFPIRFGILPVWQDPKDIFLVKIFYHLFSTYGINSAIEYILYLDPDSRHNETILSRNYNFILFKYEQDIEIEDLDINNIIKSKKIEQYILKTKEWSLRLGIENDDFLIVNGKFLEKKQNWDDLSFNIFMNDVDVIRKKIVEKSLNNNVNILDYLLEDAVYRRDSYVHPMDSLPLTVVFFKIFTKNLFSIENLNTELSFWLIADFDTKKGLEFAKFALEYMIEHPYTSLRFLHNPKLSNKNNFDYFSSFLFLLSEKNIDVTESVLNYIQKLLNSYDSDGIINREIEYPYFILNIYNSTELLLNSVKAKLYWEKMKDQLDKLEFSPGEFGLLANGHVIGPFPESYDSLFDSFKLLGDFHNFSIISQLKTITERLDIKNSRCKMFFPVLFSILLSHIVFEKYDFTYFSQFGRDKIYTLTQKLTPSFTSGNQRNSAFEVKVVLDPLNEISQKLVPVLKVLEQMEGVYIEVYLNPLQKISKLSINRFYRYVLQSSLKFNIDGDLIYPSAIFERLPISHLYTIDYDFPGSWIVTQKRSIYDLDNLLLSDLFSKKIKEVVVIYELKYILIEGHAEEIGLKTPSGIQLALKTKNNIFITDTIVMSNFGYFQFKANPGVFKIDIITKESNDILKILKISDKLGSNNFKKEIILESFEGLTIFPTFIRYSGKNRILNLEELNKFEDNDFELENTTLKFMQSKHSSGSTFDIPVQKFHAEINIFSIASGHLYERFLYIMILSVLKHTKHTVKVWFIENFLSSSFKNFLPYVANEFGFQYELITYRWPYWLRSQKEKQRQIWGYKILFLDVLFPLELDNIIFVDADQIVRTDLKELVDMDLQGAPYGYTPMCDSRKEMEDYRFWKKGYWKSHLKGKPYHISALYVVDLKKFREIGAGDILRQHYQALSQDPESLSNLDQDLPNNLQDLLPIFSLPQNWLWCKTWCSDESLKDAKTIDLCNNPMTKESKLERARNQVPEWNEYDKIVANLIARILEQRNNEASESSVDNIAISVDVMENIQFNSGEENKKKSIHDEF

SEQ ID NO: 4623 - protein, 1489 aa, Nannizzia gypsea
MSPIRPWPIRPLSLFLASLALFPNVAQASPSVNVALSASFNSAPYLMELLETAAEENSTSYFPLLDRIADGRFVDAITEKDLYEQFIQVLSEDGHITDPVALSSFKFALSIRSTAPRIQAHYQYYNSSVENSLMAAQDAVCQVWAHYDGSQYCSPTLERAQQPLIAGRDESLEKLLPFDRVLAVPNGDDDESQQSLVLYADITSPLFSEFHKAVSKRARDGEITYRVRYRPSTIASGPSKPLFVSGYGVELSLKRTDYIMIDDRAEEKGGSTGSTSDSKPTLAADGLSGSPTADLEPLSSSEVSTLGLNAASFVLNSDDPFDTLIKLSDDFPRHSKTIAGVNATSEFLDEYRENREDGLQPGINTMWINGVQMSPRNIDAFSLLAHLRQERKLMNSLNELGLPVTEAVKLLSNPAIAMAQKVHGSQRFDYRDDIEGGGVIIWLNDLEKDPRYEGWSEDITTLLQPTYPGQFHELRRDVHNVVMPLDMADKEDITVFVEEIQAFVLNKVPIRFGLVPTQGSDLSKQQAKIAYYLLKTYGLESMFSYFPRGAYVHALDMLCSEILFPSKLDFEMAIKDKEPKDDQPTILSEDRLAADGENPPIYANAIPLERDERWVHFLIDKLFKDVQGMQQRIYEGEYKEDAWLPGFYLEEASPKRNALVIPEDPSDVTVKSINDAYSKHKEAFETIPRIPGNSESTIEKWAQLALVMDLDDEHGAKLLANAVVFHKMNPEVEILILHKPSTPAKEPGLSTELHSLLNGGRDLDTDAINALFDREAKRKGASADAQGFYSTIQPVIAELGADENCMHVLLNGRLIGPLNDTTILDVQDLELTLQYERSKRLVPVVKALESLKETEKIRDHLAFSRLTSMVALSTISDIPQGTFQSAPMIRTEIFNSWATKHSAITISNTEAPLVKIVATLDPATEIVQRWVPILKLLSELHGVSLKIFLTPLENIKELPVKRFYRHVLEATPSFHEDGSLKRPGASFHGLPQEALLNLGMDVPSSWLVAPKDSVHDLDNIKLSSLKEGTNVDAIYELEHILIEGHSRDMPKNKPPRGVQLLLGTERDPHFTDTIIMANLGYFQFKAQPGHWQITLKPGRSENIFNLDSVGGMGYTPKPGDDNNEVSLLSFQGKTLFPRLSRKPGHESDDVLEDGAKKQGSAKSILSQGLNFASGVFSGVAKTRKEKHADINIFSVASGHLYERMLNIMMLSVTKHTKHSVKFWFIEQFLSPSFKTFVPHLAEKYGFSYEMVTYKWPHWLRPQREKQREIWGYKILFLDVLFPLSLDKVIFVDADQIVRTDMYDLVSLDLEGAPYGFTPMCDSRTEIEGFRFWNQGYWKRFLRGRPYHISALYVVDLNRFRAIAAGDRLRGQYQSLSADPESLSNLDQDLPNHMQHSIPIKSLPQDWLWCETWCSDESLKTAKTIDLCNNPMTKEPKLDRARRQVPEWTVYDEEIAQLARTVGAKDVEAEHTAPKETEETEPEDANKDEL

SEQ ID NO: 4624 - protein, 1532 aa, Debaryomyces hansenii
MQLGCCLAICQFFLLSVVAFQDNDLSSAENKFEVNLEASWRPSPFQLNLLESISGYNESLFINTLANIIGFSIEENESDEESNEELNDVDGTLISDSHIYMKVVDALNLDDTSKSFIGFNLVNKIFTPRIQAHYEYYTNVVDPQFSHRLYKECSTDSFGNKILSGESDKHQAWILYNNKLYCSSDEVFALKTDKKSTSTDDVLPFDRVIGSNQESPLLVLYGDIESEVFKNMFINLYESAKIGKLRFVWRYIPSNNPDQREQLSGYGADITLKRTDYMVIDDRDINKIEFKNEKRIENKNYHLDKGFSRIARLDELKPISKDNLTDLGLKLTSFILSNDYSDISNHDLLNSILQDFPKFAYYVSQLDPENIDSVRESVNANVKLGMSEESNGIYINGSPINKLELDVLKLVDKVRDELKLVNELKELGFTTGQAKKLLFKFALLSAVKESQFRTGNTIMGGNENRFKVYNYQFTPMSRHKKGGVVFFNNIEKDDVYESFPSSRREAYLGFSAQHLRPGQIPIIRENIHDLIFALNFSDKEQLKVFFTFSKIILDKSLPQQLGLIACGGNEKDKMIAEIFYFIVDKASLTEALAFLYKYFDAKDEEAEKEILNAVSIPSTYSFNESIYQDVLDRFSINSPSVICNGVIYELTSTWQVLMGKQLAQDIRLIQNHIQKGDDVNKSLKSFLFENAKSERNLRIIPNDASLIKYKGINQELIDNSISFKCKKKDNGASATFWLIGDFNSINILDQFVEILRTMKVERSYSIQVRILNKSTDTDLLDKIKALFPINELRTKDIENIISWLSDRLHNSVNCKPDKNIVQLLEASGLPPNHPLLLLNGRYFRLDKNLSFKELQQLLEYEFSQRLNLFGDIISAYPDEFPRSFCEYHSSRYDCSDWFDLVSSYVTKSFHVDDNMLVSDVARFDFSSLNMDNILKISEDETSKEVEVLIIIDPIDEMSQKLVSIIYAITSFPFVDIKILLQPQLEATEEVKIGRFYRGVYPSSIPQFGKDGGLEIKNKAVFEMVPSQELFTTNIDSPARWQIVIHDSPSGVDLDNVKLSNYVDSLIYGTYVLKNILIEGYAKNVKYGMNLSGLTIDLSKDNSYTDTTVMSNLGYFQLSANPGIWEFKIKPESKSEKYYSLLSASENVFISNTDPLGSVRVAILNLNGLVLKPRFTTNSGYENKFIFEEDDNIESEDDNKIGSFMKSLLKSKAPTTKKHADINIFTIASGHLYERFLSIMTASVMAHTDKSVKFWIIENYISSHFKKLLPLLAQEYNFEYELITYKWPNWLRFQREKQRTIWGYKILFLDVLFPQDLKKVIFVDADQIARTDMKELVDLDLEGAPYGFTPMCDSRKDMEGFRFWKQGYWAHVLKDGLKYHISALYVVDLDKFRALSAGDRLRAHYQKLSSDPNSLSNLDQDLPNNMQNKIKIHSLPQEWLWCETWCSDSEFRNAKTIDLCNNPLTKENKLDTAKRQIPEWTTYDNQIKRLMDQINDNENPKISTDVLENTPRNDLHDEDNQSQYEPDYIHDEL

SEQ ID NO: 4625 - protein, 420 aa, Beauveria bassiana
MANLGFFQFQANPGIYNIHLKEGRSAETFEIESVGAQGWAAVPGDEGTSLALLDFQGTTLYPRLLRKPGMEEVDVLEQADQVTENIVSKGFKLAESFLGNVLGKKSTANLQHAEINIFSVASGHLYERMLNIMMVSVMRHTKHTVKFWFIEQFLSPSFKEFIPHLAEEYGFKYEMVTYKWPHWLRHQKEKQREIWGYKILFLDVLFPLSIDKVIFVDADQIIRTDMMDLVKLDLEGAPYGFTPMCDSRTEMEGFRFWKQGYWANYLRGRPYHISALYVVDLRRFREIAAGDRLRQQYQALSADPNSLANLDQDLPNHMQFQLPIHSLPQEWLWCETWCSDESQGKARTIDLCNNPETKEPKLDRARRQVPEWTKYDDEIAAFAQRVKAAKSPDEDKRRTNLARNTKSRNFEERLHTKDEL

SEQ ID NO: 4626 - protein, 1065 aa, Diaphorina citri
LRELYPDQKASLSKFRNHLLESTNEMAPLKVWQFQDLSQQAAQRILDAPVEDQLHTLIHIAQNFPVQARSLVSVKVTPEFRAELKHNQDLYMNTLSLGVSEGAMYVNGLYFDVDLIDMAKLLETVRHELSVMQGLYSIGITDDALQKLLCLDLSPSSKTEYGLDIRDSAVQWINDIEQDKKYSRWSYSLMDLLRPTFPGMLRNIKRNLYSLVIICDPSKKESIPLLKLIESFYVHSAPLRIGLVFNINPSDEVTGLQDAGVAMLNVFNYIGEIKKPHEALATDMTSEKLPQIYSSTDKDRYERALGEASRILSNSQLNLLKLSLAMHSDSPRVEMYNQIALQRGVKCPVALDVGDALLCTLDSLENTINSYLKKDKSSLVRMDTFRIDHQYPGCDNSSLTLILYGELGTPEFAQFHAVLEKYAKRKEINYIVRHFVKERQPRKVRLSGYGVELQMKSTEYKGHVCQRAKVKPQEDVSVEDVINAFAKEYSSVDVDEIFGPDYFINNCITDDGIPSKADVFGPLALLRIVLNFNVISPHQVYAKVKPQEDVSPEDVINAFAKEYSSVNVDEIFGLDCDYNTGRQLSREFIARTGLVRKTPQVLMNGIPLPETSLTAEDFEEAILTEIIRQTPKFQKAVYKGELTDSMDVAEYVMTRPNVMPRLNERVLNKDRSTFIDLTLPPSDEMLNLVQYVHAGKKSKADSDTLYMITHWVVVDLNSTDGRQLLDSTVEYLKSEPGSRVAFLVNPASSSDEVKGQHFAFLAALHAGLDVEKSVTIATQALTQAPASIPELKVLSYDLNNIKLKNVDSNVHSEYELEFFIIQGHCFESVNGNPPRGLQMTLGTEQDPVQVDTIVMANLGYFQLKANPGAWILRLRQGRSSEIYDITHHAGSDTPVNSTDIKILISSFKSHILDVKVTKKPDKLNVDLLAEDSAENGGLWNSITSTFGGKEDSESGEERINIFSVASGHLYERFLRIMMLSVLKHTKTPVKFWFLKNYLSPTLKDFLPRMAKAYKFEYELVQYKWPRWLTQQTEKQRIIWGYKILFLDVLFPLDVKKIIFVDADQV

SEQ ID NO: 4627 - protein, 1502 aa, Stegodyphus mimosarum
MIMMNMSRWYILLLILCTVYINFSQTLQKSVSVVLDSKWLDTPLHLEASEFLAEENPELFWKFLKDCSKLESNFFHKKSAKLQYEAVIDISSNYLSSTKIALLKFSLALRTYSPAVELFHQIAYDQKFPVKCEAIADVGGSYACDAENLKSLLSSSIRNASVLYQVDHIHPNTAQTADVILYGEIGTSSFHKLHEILEKEAEKNAITYAVRHFVLKRHKRKVRLSGYGVELAVKSTEYKAQDDTKVKEEKGPEQEEIDKYEELEGFIFSKLKELHPSKAENLEQFKAHILESSKEIPTLKVWELQELSLQAAQKILDSPIEETLRIMKDISQNFPVQARSLIHVSVSSEVKKEIDRNQQMFMHHHNLGPTDTAMFLNGMFFDMDTTDIFTLLQVLKQETRVLESLYKIKIPEQLLTKLLKMDFALDKEEYAVDIRDTTIQYINNIETDRQYRSWPGSVQDLLRPTYPGMLRSIKKNIYHLIIAADPSKSNAKDIFKLAESFYVHKAPVRIGLLFAVNPNASVDGFHDAGVAFLNAYNFISQDKSPYDGLSFITDVYANTEEKDISVDSIISHFKSLYSNEDLDLVFGIESDYDSGRKAAWNFINRTGIGKPPQVLLNGVMLKQLQLTADMFEEAILTEIMRQTPFLQKSVYKGELTDSHNILDFLMDQKNVMPRLNQRVLSSESTYIDLIAEKSEAEIIMKNMKYFVKRDDDEFRPLTMWVVADVETAEGRALLLSGLSHLKTSLHIRLGIIHNPAAKITGSILRKAIQVALDIFDCHTAKLFITKLLKPVNAMQVINNEKSVTDFAVSNMDTELFLKKMNAFDEKSLDFHKVFCKKILKFSPGQRAVVINGRVIGPFEENEDFAQEDFHLLEVYSDGLFGEKLVSQLKDGFEKSKLDSEIVMKVTSVLLSQPQPKIRHEIKYFGDKHSAVKIPAADTDEPAHEVVIIVDPVSKGAAKLSSMLMVLQRVINAHFKIFFNCVDKHSAMPLKSFFRFVLNEEPVFGPNGEFGIAPIAKFSSLPSSPLFTLGMVTPDNWLVEVVKSPYDLDNIHLEQVESTVHADFELEHLLIEGHCFEQSSGNPPRGLQFVLGTNTAPTMMDTIVMANLGYFQLKANPGAWHLNLRQGRSSEIYEIVGSENTDTPPGSSDLVIIISSFRSHIIKVRVSKKPGKQFEELLYDENDNNNGIWSTITSTFSGNKSELDGSDDKINIFSLASGHLYERLLRIMMLSVLKNTKTPVKFWFLKNFLSPTFKDFLPIMAEKYGFEYELVQYKWPRWLNQQHEKQRIIWGYKILFLDVLFPLDVKKIIFVDADQVVRADMKELCDLDLGAAPYGYTPFCDSRKDMDGYRFWKSGYWASHLAGRKYHISALYVVDLKKFRRIAAGDRLRGQYQGLSQDPNSLSNLDQDLPNNMIHQVNIKSLPQEWLWCETWCSDETKETAKTIDLCNNPKTKESKLTSAMRIIPEWKDYDAEIKQLFQEYESNKTIQRVQQLKQKTDDHDEL

SEQ ID NO: 4628 - protein, 1483 aa, Melampsora larici-
SPPISVSIQATWPEPPLLIQIIESAAIERSDSFFPILTAVSKHWRTIDSLSLTPQQIYNQTLNQITLNGLLNDQGEIESLETSIALKEASPKIEAFRAWYRDRPAPRILSFDHICPPGSHIPPPSVPVVILYASNDPRSFGPFHDVLHQASSSSPIRATYIFRWQVSSDDSQSSSIGPSHLSGWATRLDIKKSDYLTVDDRPVETNSRESRDSESESTKENTKEDAPETSTVIIPLQADEFSTIGLKATQHILTSPNPLSALRVLSEDFPRHAYNLVKNWVPGEINADLDRELKENAAEGVVKPGQSAIWINGLDISSVLPVANINFFKLIQLMRDERRWIKSLTSLGLSVSEIRKLVTDEQLNSALSGEGGARSDDLEIDPSILGERFDASDRLEHGEMILWLNDLEKDTRYAAWPKSLRDFLRPTYPGQLHAVARNTITVVLALNVTHTANLRILTESVETFITRSVPIRWGLVPLDDPNASGSSEALKGIFPIYSSGTSTGSTSSDMVDALDFKQRADAYRAAHPESDSDDQKDTASFGEGDFNSWSEKTQSYIRRLALCSGSGEVPGCMFVNGKFFVLDDDFRMNLQQTAMLHIQFLQHQIYYGLIQGSVDVSHYLYDLPGVYPARNEFVFPSPGRPVRVVNLVQAFVAAKLGSCAVEADHETNEPPISAIWVIGNLDSKSGAASVLALLELMVNTDMCFPLLEQCGDMLHLTFTLQAFPSDQTRGSVFVGFVHASSQQTDAHIDPRLSDSLGQLIHSPEHPGILIKNVTDQFAHFGLQPSKPFPESFSLSKMPSEWRRSTEDGEDVWAGAQSLITELDITEGHVAVVINGRVLDVPHSQVLQASDLRMLIDYEIQKRTNPLQVALRSVLGPERFTTIKSMVPYIASVISSVLVSSDDEAGSKTRGRAVSNALTERKHSSISYGDHDAAVIQFRVILNPASELAQSWSALLETLSGRKDVAIKVWFNPMQHVEELPIKRFLRTSFHSRIQFDQDGSSVSPSVVFKHMPTDVLLTLSIEAPPAWLALPLESVHDLDNIMLSKIGSTERERGVEGVFQLEHIIIAGHASELPSEVPPRGLQVVLTNLLTSASVDTIIMANLGYFQFKAEPGMFVMKIRPGRSSELYTLERVDLKTGKDRLSTDKNKTDEDHQFSLTTFDGLLLFPRFRKRPGKEKEKLIQPVAAMSESEDAHTSTTQKLIGHKPSDVIPGKKRNVINVFTVASGLLYERMAYLMCVSVMRHTKSDVKFWFISNFLSPSFKRFIPHLARKYEFEYELVTYRWPPWLRAQKEKQRVIWGYKILFLDVLFPLELDRVIFVDSDQIVRTDLQELVDLDLRGAPYAYTPMCNDREETKGFRFWDTGYWKDSLRGRPYHISALYVVDLRVFRAVAAGDQLRQHYQALSADPNSLANLDQDLPNNMQEVLPIYSLDQKWLWCETWCSDDGLKTAKTIDLCNNPLTHEPKLTRARRLIPEWDVYDKEVA

SEQ ID NO: 4629 - protein, 1408 aa, Kazachstania saulgeensis
MNALFKGMTAIMFWFYIVISLSLVNGITLSNKYGIPDSLRILSALKHVLRFDDSKLSIFNELYPFVTGLDSLDLVDDAFALGLEIDELPTNIAISKLLSIMYKKNDLANMFEMYYNLYPMGITTESSTSSLTTNLDGSSYFMLNGKSYNKPDDVFYLKSKELTKQANIPDKYMVVSPSELVIGTKKDAPLIIFYGCPADDQFEDFHRNLYAEAVQGDGKFRFLWRATCKLNTPAKLNNEFPLSLSLTDNSDLSLLLTNPHFPLDTPNDFITPGGKLLHLSKKDLEKLDLKVTSLIANHYYNTKNVSDVLSYASSIINNFPLYVSQLVEMDLHPKEEEKILSYNKILAKRGIDYNLLGLFLNGQHLKLSTLNEYTLLNMIDKEYNSLQKLSQVVESIDSKYPMKNSRALLNEFSTISLPHLQASQPIKIDLHRIPGFSDTVIYFNDISSDKQYSELSEDVSVFFEKSTFGELPEYKQNWNEVIFVIDFNKLDDPNNKAALAGLNRALTIVDQGYPQRIGLLPFNSENNFRATSMNTQEDESETAKIINKIYDLKRYDIEELSKFLEMLQEKGTNLKFKDPTLASVMKMPNYAKQVRDLQIYETSLIVNGEVYPFRRNTWNYLISNVVKKDADFIRQQLNAQSSRQDKSSSGFVDVRGILHLKSASSRHLKYMPEYYADALYSSEVLEALSEIEQDRVITYTFDHNYNVLHTITVVDDFDLNDTIRRVYNLLKTKFKGVRVRLIHTGDIKSAQWKNLKKLDSREHVLKLLKKIAMTKTDKKSSHSESKILRNIDSNTLKRWLPQIPTLYLERQSFFVLNGRFIQFEEGEIISKREFDDLIQKEAVRTLDSIASLEKVFPSFSNSPISSDAVEIISSILTKMYYHSKQLGDYGIEYTTETILPRMDLAHFFKENDFTIFGSPYSNTDVIELLLVVDPLEERSQKLINLLSRFEHFNFVRIKIVLFPTEKLTITPIERVYITDPVDHELIDDKISKLFDVDVDAPRIFTLTETNDIQDILLDIHVFGEKDSISEGTVDGVGGVSLELVSSSGDVIDHTITMQTFGYGQFHLANLGKNFTVRIGHDSTDYEIIGISSYGSSDFKTTPTFNVLDFSPHKLFVKVRKLSETTTDTDNESSINIFTVLMNNGEEEPFKKMILGILSRIDYSKTEKKTTFWVLDSPFLSRSFKDFIANFNENSSELGAHINLLKYEWPNWLRPQRFRNRKIAVSKLLFVDVLFPKNIDHVVYMSPTTPLLDPVKLLEETKNSRASFSLFKMKGGGYWNEGYWKKMLEDNGLSFYSVEPGFIINLNRVRELHAGDKLRLHYQRLSTDINSLLNIDQDLINNLQIEVPLGMLKTKAEINLQEHDKYIIDWLPKLEKSREELNTKHSVIFQEEAYDIAMEDDQLIEHDEL

SEQ ID NO: 4630 - protein, 1513 aa, Rhizopus delemar
MPRISTAILGLVALGVFLVKAESPTVDLTLVAPWSAPDFLLEIAETVALSNETNYYKLIDELVQIQQNASSWTHQEIYNKAVERVTILDKDDVNFFKLSLALHEAAPKIEAYNQYYQQAILPSLVEYDDQCDVWVQVDNKQACSLEALIEVLKNTNSESVNHALLPFDHIVRPMNERPQKTLVLYTNTFSANFNEFYTWLKSKVEDQDLMFVIRYKPSSTEKTPLYLSGFGVELALKKTDYLVIDDRDDKSENTIKEKISRKTNQNLFEGAESTNIEPLTSSEIQSLGLKAAQYIARSNRPLETMSHLAQDFPKYSKSVSALELDTEFAQEVLRNQRFAVQGGSNAVWVNGKALEMNQIDPFYLSRILRSEKKLIKSIQNIGFSSKEAIELITDPVLSEGEGKGDVISGIFDVRDSPETPFITWWNDIEKDKRYHGWPSDIMEILKPTYPGQLHPIRKNIYSLVLVEDLASQESLNRIVNEIQAMIKRTIPIRFAIISFVDHDDSATTLAAQALHYINQNHSKSAGMEFLETMLDLMASNGLTRATEEIVEVSFLHATKEFEVEKLSFKEAIDAQKPFTAATREFMSRMGIKGLGSKEGIMFFNGKLLEFNEDKPWIHTLMPHLSEQTRIVQKMAYNDEFDPKLNFYDYILSQSNVATRRNPYILTSHANPLRIHTFDTTTELLELKYFQSENSTIPSVNFWVVTDFDTLTGLKLATEAVLFAESNPKVRIAFVHKSSRFNIQLVKDSTGPKFSDVFCKLIHSDETTLSTIKDILQNTNLPSETSSNNGEMNIQSEFEPLPILPGIPIIDIDVKEQGQKWSKIHTALQKDGLESDFIGVVMNGRVIGPLSLDDNLQFTKQDFDMLFEYENVKRISLVEQAILHRLEATTADTIMKLTAIVENDKAQVVQDVMEDHVPVNRNKVYENIDAADHTRIVAGDVDNTFLEIGLILNPLSEMAQKLAPMVQTLSEMEGVSVIVYLNPVSELNELPLKRFYRYVFDKEVHFDPHSGEQQIPTAYFANLPTDPLYTLGVETTNAWHVTVKEANMDLDNILLKQQAAVSAVYELQSILVEGHCLDSVIKSPPRGLQFELVSFGSEKRDTLVMANLGYFQLKALPGLWRLGLREGRSSMIYSIQDVGANGKWNWSAQGDQSDVLALTSFEGLTITPLVHKKPGMENEDVLEPSQPKEKEASQSGLWSSINQKIFGKKQDKSLTVTKSDNAEINIFSVASGKLYERFLSIMMASVMKHTQSTVKFWFIENFLSPEFKDFLPHMAEQYGFEYEMVTYKWPAWLRAQQEKQRTIWGYKILFLDVLFPLSLDKVIFVDADQIVRTDLKELIDMDLHGAPYGYTPFCSDRKEMDGFRFWKDGYWKVHLGEKPYHISALYVVDLVRFRQLAAGDRLRAQYQQLSADPNSLANLDQDLPNNMQHIVPIYSLPQEWLWCETWCSDESLKKAKTIDLCNNPLTREPKLDRARRQVPEWENYDNEIDELRKKVKTMSPSDFEEKKRPLKDEF

SEQ ID NO: 4631 - protein, 1621 aa, Cephalotus follicularis
METRFRSGFFCVFAILLVCVTPFASVYGGDNSDRRPKNVQVAVRAKWSGTPILLEAGELLSKERKDLFWEFIDLWLRTEMVDADSYSARDCLKRISKVGRSFLSEPLASLFEFSLTLRSASPGLVLYRQLADESLSSFPLADDSASNDLSGEVLEKDENVRNEKTDRLLVGLNPKCPGGKCCWVDTGSQLFFDVAELLLWLRRPPDVTEDSFQHPELFDFDHIHFDSSFSSPVTILYGALGTDCFREFHVTLVEAAKEGKVKYVVRPVLPSACAVKTGLCGAVGARDSINLGGYGVELALKNMEYKAMDDSTVRKGVTLEDPRTEDLSQEVRGFIFSKILERKPELTSEIMAFRDYLLSSTVSDTLDVWELKDLGHQTAQRIVHASDPLQLMQEINQNFPSVVSSLSRMKLNDSIKDEIIANQRMIPPGKSLMALNGALINIEDIDLYLLIDLVHQELSLADQFSKLKLPHSTVRKLLSTLPSPESSMFRVDFRSTYVHYLNNLEEDAMYKRWRNNINEILMPVFPGQLRYIRKNLFHAVYVLDPATICGLESIDMITSLYEDNFPMRFGVILYSSKFIKKIELTGGELHSSAAENDLQLQEDASSLIICLFIYIKENHGTRTAFQFLSNINKLRTESADSADDVPEIHHIEGAFVDTILPKAKSHPQGILLMLEKEQTFKELSQESSMFVFKLGLFKLQCCLLMNGLVLDSNEEALIAAMNEETSRIQEQVYYGHINSHTNVLDEFLSESGISRYNPQIISDGKVKPKFVSLASSVHGGEPVLNDVNFLHSPDTMDDVKPVTHLLAVDVTSKNWMKLLREGIRYLIEGSKGARVGVLFSAHQDADLSRLFFVKVFEFTASSYSHKKNVLEFLDQLCSFYEQKYILAPSAVAESTGAFIEMVYELAEANGLSSKPYKSSLTEFSDEKVRKHLNKVAQFLYRQLELESGVNAVITNGRVTFPTDESTFVRHDLHLLESVEFMRRIKHVAEIIEEVIWKDVDPDMLTSKFISDIIMFVSSSMAMRDRSSESARFEILTAEYSAVVLNNDHSSIHIDAVIDPLSPSGQKLASLLRVLGKCVQPSLRIVLNPLSSLVDLPLKNYYRFVIPAMDDFSSTDYTVNGPNAFFANMPLSKTLTMNLDVPEPWLVEPVIAVHDLDNILLENLGDTRTLQAVFELEALVLTGHCSEKDHDPPRGLQLILGTKSTPHLVDTIVMANLGYWQMKVSPGVWYLQLAPGRSSEIYILKDDGDGRRDKSLSKRITINDLRGKVVHLDVLKKKGKEHERLLASTDDNNLQEKKQGNSWNSNLLKWASGFIGGNQQSENSENTLERHGKGGRHGKTINIFSIASGHLYERFLKIMILSVLKNTTRPVKFWFIKNYLSPQFKDVIPHMAQEYGFEYELITYKWPTWLHKQKEKQRIIWAYKILFLDVIFPLSLEKVIFVDADQIVRTDMGELYDMDLKGRPLAYTPFCDNNKDMDGYRFWRQGFWKEHLRGRPYHISALYVVDLAKFRETAAGDNLRVFYETLSKDPNSLANLDQDLPNYAQHTVPIFSLPQEWLWCESWCGNATKSKAKTIDLCNNPMTKEPKLQGARRIVSEWPDLDLEARQFTAKILDDTESRAEL

SEQ ID NO: 4632 - protein, 1537 aa, Tieghemostelium lacteum
MKRLLLIFTLVTLLSINIQCSDLESSKLVHVSLLSNWGFTPLHYESAEFINKQDKKLYWKFIDSFVDTINSKKREQLRDKDIYELILQSSRDVVDSNTFEFLKLNLAQRTMSPKVEVYRQLSIAEKPKDGVHSDWFVYNGKMYTDSKDIDSLDLSESLVGDNDHQILYEFDHVYSGNVDSTLPILILYGDITTEKFQKLHQKAKKFSDEKKVNYVLRYVISESSDKVYLQGYGFELALKNLEYKVMDDSSIKKDADGQSQKSITIPNEDVSGFNFFKLSTRKPELLQKLSTFRSFLLAHSQQFDELKVWELKDLGIQTAQKVISSSDPLRSLKYISQHFPTLANSLARISVNETLKKQMESNQKFINPQESLVLLNGRVINTETINTLTLTDMLQEELQPLTQIQSLGIQTEKISQLCDKASVDPDIRYRVLPEDLDAIIYLNNMDSNVAKGWTKSLEGLGKDTLDENGIQIARNLLTTVMVVDPSNTDAVSLLSDLSEFNQQVTSPSRFGFIFSTFNKPKQLDAASPKEIARLFIYIKNKAGLNPTLFLFRAMNYYRRMFSPGYISKAVMTHSIQAIAQQYRSVDTRSMNQAMQSVDHDITLQEMNNFVQNQMSIASDSAPLVFLNGRVIDLTNPKMEFSDQLLLQLANEFNQLKPLYTSGDITEDSSNLYKDILESKHWISVQGSKLLDTMSSDLITPEPTQYLKLLFNSKDSQLEKDYGKLLKDAIYYPAESKDTIYPITHLIIGDFDQKASRDLVLNMIEYQLNPENQEISSNVRFSIINCPMESSPNIFGKYLLSVRSQIKSLEDLKREFEKKLTDIIYKYSESNENLFHLQTRYARDYLRVNITENVPVVIVTNGRLTEIKNPSQSIKTIHNLNVMELKKSKTSLEILTGTEKLDNNLMMVAQSMVSNHMKNPNIERRSIPNSIEFSFRVINTQSPMKFTLVLNPFTKVAQKIVPIVEAFSKTLNISVDVLVNPPVSISEFPMKNYYHYVMQLDMKFDDKTGKLLSSQTSGTITNLPESRVLTLAMDIPGSWLVQPIVAKYDLDNIRLKDLGQENVLNAVFELENLVVEGSCLDVTLRGPPAGLEIELTPVGNSLTETQDTIVMSNLGYYQLKSNPGIWKLSLKPGRSSDISQIYDSDKEITLDHQSVIIDQLYVPTGNLYIRRKKGKEYESLIQEDEEPKQPQATKEPPSLWSSFFPKKKSIEEKKKEIQTVKNSDPELIHVFSVASGHLYERFLKIMMLSVTKNTDSPVKFWFLKNYLSPGFKEFIPKMAEELGFQYELVTYKWPWWLRKQTEKQRIIWSYKILFLDVLFPLDVKKIIFVDADQVVRTDMKELWDMNLQGASLGLTPFCDSNKDTEGFRFWKTGYWRDHLRGKPYHISALYVVDLQKFRRITAGDQLRATYDQLSRDPNSLANLDQDLPNYLQHQVKIFSLPQEWLWCETWCDQSSKSKAKTIDLCNNPLTKTPKLQNAVRIISEWTSLDNEAKDLDLKFDKEKEKNQQKQQIQKDLEKSKIDLADLISDTLNEAQKLI

SEQ ID NO: 4633 - protein, 413 aa, Aphanomyces astaci
LPDQHVIYVNGRPLELVAPVTPSLFDGLVAYESATRSKVVSKAYVSQFKHHVLTAEDAADKTLQLNVVLSMVDSYLKTPRVAAVLPDDVQRPTYSYVTPSGSSSLDVVAYLDPLSDTAQRASGILRMLHSVLHAKITLVLVPPPSYDEFPLKRFYRFLWGGTSSSLVEFDRLPRHPVLTLNIETPELWNVQMVQSDVDIDNIQQNASATFTIKDVLVYGQCVDKTNAQYPTLPNGLQLVLERSVAKLHSHKDTVVMKNLGYFQLQAAPVPVIVYDFLSKTLQLEVKKQPGQEGVRLLDDGPEAPKAPAQPEETSVWTSLVQWGAGNFKNSVAALQAEFGMDIRLVTYKWPNWLRRQTDKQRIIWGYKILFLDVLFPLGVDKIIYVDADQVVRADLKELWTMDLQGKAYGYTPF

SEQ ID NO: 4634 - protein, 2233 aa, Volvox carteri
MNATRPLKVGVVGGSISWGTGATMRGERDWFSLFMSWLASVSSYPVTGRNGCIPGTPSHYMVLCLEHSVDVDLDLVLVEYVFNDGLDDCDCIRNNGVVKSVEQLLRKLMDLPSRPAVVMVQVPHVRSKDFDPFFRTSEDLEGALAAYYDIPTVSLRDALYPLNVHRPTEGFLWNQTYNEHHPGDAGHKALADIVVHLIQETALGLLSYPPSREEAAKLERPLLPPMYTGNLPPSTSVCLVGHTFTSLVTYAQGWSWVNEGTEEKPKWGYVATEPGSRLVVRLPDTLPPGGRHAAAAAVPVLLHYLQSYAGMGKARVECGGGGCNCSTVVVDALHLGRSSQTYMALVMVEGLGLMAGEGEAGTKREGDDGAAAPAGCELSVTVLEETSSILDGGHKFKAEEDAALIWPFLDRMSSLSPDATGTDLDDAACWRSITETAAELVSPSVGKLIPLTLGSRQYGAKLQMVRQLAEQFHPHEVSTATASCCFVALEGQVATTPQQLADLLTSSSSSPSSSLSTSSSSTNPDSEQLFSFEHIYRGKATGSLGGAETSRVAILYGSPGLPCFGPLYEQLKTAVDEQSVGDGSGGGNGLMFAFRPLLTTTCEPLSGCARAGTGGQLLLPGWGVEAALKNTEYSAMDDKEVARQRQQQQQQGGTEGSGDDEEGAAEEADFGSGDDAVVKGFRLDVLAARRPDLRSELLTFRDQLLAADDEESAELKVWDLRDVGLQATQRILGSSDPLALLAEISQNFPGIVSSLSRQVVSSSLKNAVTHNQQMVSAGANFLLLNGLAVDVNNLDFFGFLSRLRSEMRLRDSLVGAPLELSPNLAKQVLAARAEDGAAAGAGGGGAGGEGEPRLSLGSTSSAMSKHVAFLNDLERDPRFQRFGRNLAELLNTFPGRLRPLARNVFTSVVVVEPLCSESLELVANIDRMWQGGYPIRFGGERFGRGFATLKEAFGPAAAWRMWIDAAEAVTSGYYSDPQEVVEAAFTSAWGAAARSPPPGTRAKTAARKSTSDALKMLKEGSGYAAEVGMQLMETASWLMIKGLVAPPPAAAVAAAATPAADRDEDAERCTAPPVVWMNGLTAKAGGSSPAEDIMYKVMGEMQRLQEAIYFGRMDDNSGGGDALAAVLEMFGAVERLNQRIVGPKARNAQVLNLVPLLRHPAHETLRMLYRESGSEDGDGTPYVAPVTHYVAADLANEEGRQLVAESLRLLSEVLPSSSSRDCRLVLVANPSQPAAAPSLLEALVEGGMRQLESGGRDKPLAPLHSTHPGSHFPISTSSNMHGLDVVSYLSRLMSDSALAAGSGGEAAGGGGEVEEQTQEAIKYAEEAGLDGEAIKSFLAKAVDESLTYRAVQADLCRTVFKLEPGAAAVISNGRVTPVYKPSEEHSLPNIFVPTKPSFQIHLELLAEDLSLLQRVTSGGMAGSVAKAVERAYSEGLQRLPADLPSGVSASDALSEISSTVVSALSAASRAAASAGSQEGSGGASRLGPGASLQLQQMMAMLKRKAVEVSGGPDPPFHLEAVLNPLSRSAQRLTSLLLVLREALGPSMSLTLNPQKDITEMPLKSYYRRVQEAGLGGQGGKLRGAARVYALPSGLAPGSGPPGPPTAYFSRLPARRVLTLNLDAPEAWLVEPAAALYDLDNLRLEDVAGEVAFAEFELDALMLTGSCVDVTASGRMTPPRGLQLHLGTPTQPHTVDTLVMANLAYFQLKAAPGRWLLSLAPGRSRDLYLLQSSTGTSRDVFAEEEEGSGEAERVAGALVRTGGGGGGDDVSTQVLISSFMGKHMILRVRKRPGMEAEDVLQADGTADDAYDTWDPDLEDDEYADDDDDKAPPAPSSGGLLGKVSSLLSGSAKGGSGGAGGELAASKKQRQLRGGDTINVFTVASGHMYERLQKIMILSVLRHTKSRVKFWIIKNYMSPQHKQVIPAMAEQFGFDYEFVTYKWPHWLHKQTDKQRLIWAYKILFLDVLFPLGVDRIIFVDSDQVVHADLAELYHKDIKGAPYAYTPFCDNNKEMDEYRFWKGGFWRDHLQGKPYHISALYLVDLKRFRQIAAGDQLRVLYDQLSKDPNSLANLDQDLPNYAQHSIRIFSLPQVWCGVVWVGDFGAGFRNRDVMGMCEEWLWCESWCGNVTKAKAKTIDLCNNPKTKEPKLTAARRIIGPLWEELDRQQEEVTRMVQSMLEAREEAGPPGSALPPPQPPAVGEPAGHGQEEEGLDMSWEAADQRHESHHASDRTEL

SEQ ID NO: 4635 - protein, 1324 aa, Lachancea thermotolerans
MLLWTLLVWSYAIFASCTTVRLSNASSGVKLRLWNAVVGLVNDEQLVQDLYFLIAGVSDELDELKTDSTPLDQIVEALARHNPELASLLSLRYALEPGFSNDTSNQNYFLLNNKRFENADDIFYLKTDDLNAQKSACINDVLDNEDVVMGSNRDAPVILFYGCDRVEDWEEFNRNLYMEAQAGKVRFVWRSTCPNDLPFEFEPSAVALTVKGSQWNTEFGHALDVPESLVLGTEPSFRAQQVSDEQLQDLDMKVGTLVYDFYEKSQNATETIRYFRQIVNNFPVLARSLAEQGDITIDNRWEAALKKLAKEGIDNTMLGLFVNGQFHKLSNLNKWSVLQSVILELQRVNFLMDLLQKYQNITPGESLVLAKKLLNTFSKRSLTTQQLLQPVKYDLHRIPGFSESIIYFNDIELDSDYAEKLKDDIAMFFEESEFGELPAYRENWNEIVFVIDFSDLRSKDTWEALQGLLRALQVVKKGYPQRIGLLPFSTSAQDHGVLGKIYELKQNKPLETLVSYLEDLSPIERPQQSVFQKLPPVLEIINDRLKINETSIVINGEIYPFKSNLWNYLVSKVLKKDVSFIKSELLRINTKNFKAREILHAKSFIERNKKYAPDYFEDATYSNTNVTALLSLAHRIVETSTGGGLNTIHTVTIVEDFNTPLGLQRLIHLLQIKLHGVRVRAVHSGLLGKNWDKLKFTISNADTSKLQNYLRSLKSNGECNYIEPAIVGQWLLDLPRKILQRTSYLAVNGRFIHFEQGELPTIYEYEMIVQREATRVLDAVASLQEVFPDSLKEPLDPNYVEMVSAVLAKMFYDGERLYNNGIDFTAEASISRINLGELLPSESFGAFQTSEEPRKVEVTLILDPLEERTQNLLALASYLGSLDFLKLQVVLMPTTDLKVFPNHRLWIEGEKDLSIIDTRKFYVDVEVPPYLHVGERKDNVFELEYIKVEVNAFENKEEPSKGLVEGIGNVCLNLLNANHEVIDTATTTDTFGYTQFRLRRLEQGLTIESCSSNYRVSSFTSNSKADYIASDHFDVTSLAPTRLYVRLEKTQGMLPEVSEDNRIINILSIIENAEDEVSFEKQASSVMRSRGSFDTKFWIILGEEPSASFLSFVEFMTAESAGEVTFEYLTVDWPRWLRPQRFRPRQLAAAKVMMLDTLFPKGVTKVVYMSPGARVPNITELWEYDFDSVFCAPRAYQRDGTPYWKQGYWRNFLSKNNLKFHATEPLFIVNLGKYRQEHAGSKFRIHYQRLSPGINFLVQLDQDLLNDMQTLFPISSLNKRLLKVAPHLQTLDDNLYQSLQEKFNAKKSGQKLEDLSETIVHDEL

SEQ ID NO: 4636 - protein, 1472 aa, Neonectria ditissima
MLRLSKLPWSLAAALTVALQAAAAPSVNVGMDAAFPSAPYLLELLETAAGENETSYFPLLDRIASGHFATAATDEELYNQFLQILQQDGHISSPDALSTFKLALSLRSAAPRIEAHYQYYSTAVEPAVSVQNPEQCPDWALLDSKQYCSPSLTTAIETGLTSTQLKTLPFDRILGVGKEAILYADPTSPSFGSYHDALSKAAQKGELSYRLRYRRSVDASDTPLSVSGFGVELALKRTDYIVIDDREAPQDSEQKPVAESVVLDGDEEVADLKPLSTTELASLGLKTASFILNSENPIEALVKATQDFPKFSALIATHEISEDFAAEQQVNVANGVPTGIGILWMNGVQLIDRQIEPFQLVDMIRRERKLINGVRELGFNGQQAISLLGHPTIAGAKSEDEPMRFDWTDRSEEGKVLVWLNDLENDARYASFQKDLMTLLQRSYPGQLPKVARNIFHLVTPVDFTNVEDLAAAAQFSSFMARGVMLRFGLVPLTSTPEAVAQAKIVYHLIETYGVETLLAYLQKYQDSSSNGPDAKSFAKAIEGQETDLPKLTFAEVLEAESYAHQVKLSQAWVNRLKADTPVRPLFANGLAVPREKSWVQTMSMRLTEDQQTVQQGVYLGTIDDETWLPGVFLQNAMATRNTYIFPDDDKAVRILDVGKLYNEHADLFSSIPVLESSKESTKEDWALLTVIADLDTEAGQDLLLSALQFRHGNPGVRLDVIHNSASSSSSSVNSGLKTAGPELANVRSKEELKTLFTSRDDAHETRHAKALAKFLPYAKLLPGTQALILNGRLVGPIRSGDSLGVDDFQQFLSFEQKSRILPIYAAIEDLGFGDKLSDPVAAAKLTSITALSTISELPEGIFDSAPAVRNTLYNTWDSTHTAIEVGDPETASIHIAGLLNPTSEQGQRLAPILKVLSELDGVYLKLFINPREVVAELPVKRFFRYVLDSKPSFDESGNVKGLRATFKGLPSEALLTAGMDVPPAWLVAAKASVQDLDNIKLSSAKGDVDATYELENILIEGHSRDGKRGAPKGAQLVLATEKDPLVTDTIIMANLGYFQFKANPGFYNIQLKEGRSAEIFDIESVGAQGYSAVPGDEGTDVALMDFQGTTLYPRVNRKPGMEEADVLDESESDGGIVAKGLKFAESILGSSKSAKSISAKEHAEINIFSVASGHLYERMLNIMMVSVMRNTKHTVKFWFIEQFLSPSFKEFIPHMAAEYGFKYEMVTYKWPHWLRQQKEKQREIWGYKILFLDVLFPLSLDKVIFVDADQIVRTDIMDLVNHDLEGAPYGFTPMCDSRTEMEGFRFWKQGYWANYLRGLPYHISALYVVDLHRFRQLAAGDRLRQQYHALSADPNSLSNLDQDLPNHMQFNIPIHSLPQDWLWCETWCSDEAQASARTIDLCNNPLTKEPKLDRARRQVPEWTVYDDEIAALDRRRKALPLSSEADKSAPERNTKSRSWEDDRQGHAIDEL

SEQ ID NO: 4637 - protein, 1516 aa, Colobus angolensis
MAPAKATNVVRLLLGSTALWLSQLGAGTVAASKSVTAHLAAKWPETPLLLEASEFMAEESNEKFWQFLETVQELAIYKQTESDYSYYNLILKKAGQFLDNLHINLLKFAFSIRAYSPAIQMFQQIAADEPPPDGCNAFVVIHKKHTCKINEIKKLLKKAASRTRPYLFKGDHKFPTNKENLPVVILYGEMGTRTFSAFHKVLSAKAQNEEILYVLRHYIQKPSSRKMYLSGYGVELAIKSTEYKALDDTQVKTVTNTTVEDETEANEVQGFLFGKLKEIYSDLRDNLTAFQKYLIESNKQMTPLKVWELQDLSFQAASQIMSTPVYDAIKLMKDISQNFPIKARSLTRIAVNQHMREEIQENQKDLRDRFKIQPGDARLFINGLHVDMDVYDSFSILDMLKLEGKIINGLRNLGINGEDMSKFLKLNSHIWEYTYVLDIRHSSIMWINDLENDDLYITWPTSHEKLLKPVFPGSIPYIRRNFHNLVLFIDPAQEYTLDFIKLADLFYSHKVPLRIGFVFILNTDDEVDGANDAGVALWRAFNYITEEFDISEAFISIVHMYQKMKKDQNILTVDNVKSVLQNKFPHANVWDILGINSEYDEERKTGASFYKMTGLGPLPQALYNGEPFKHEEMNIKELEMAVLQRMMDASAYLQREVFLGTLNDRTNAIDFLMDKHNVVPRINSLILYANQQYLNLISTSVTADVEDFSTFFFLDSQDKSAVIAKNMYYLTQDDDSKISAVTLWIIADFDKPSGRKLLFNALKHMKTSVHSRLGIIYNPTSKINEENTAISRGILAAFLTQKTRFLRSFLGQLAKEETATAIYSGDKIKTFLIEGMNKNAFEKKYNTVGVNIFRTHQLFCQDVLKLHPGEMGIVSNGRFLGPLDDDLYAEDFYLLEKITFSNLGEKIKDIVENMGINSNNTSDFIMKVDALISSLPKRASRYDVTFLRENHSVIKMNPQENDMFFDVIAIVDPLTREAQKMAQLLVVLGKIINMKIKLFMNCRGRLSEAPLKSFYRFVLEPELMSGANDVSSLGPVAKFLDIPESPLLTLNMITPEGWLVETVHSNCDLDNIHLKDTEKTVTAEYELEYLLLEGHCFDKVTEQPPWGLQFTLGTKNKPAVVDTIVMANHGYFQLKANPGAWILRLHQGKSEDIYQIIGHEGTDSQADLEDIIVVLNSFKSKILEVKVKKETGKIKEDILTDEDEKTKGIWDSIKSFTIRLHKEDKKEKDVLNIFSVASGHLYERFLRIMMLSVLRNTKTPVKFWLLKNYLSPTFKEVIPHMAKEYGFQYELVQYRWPRWLRQQTERQRIIWGYKILFLDVLFPVAVDKIIFIDADQIVRHDLKELRDFDLDGAPYGYTPFCDSRREMDGYRFWKTGYWASHLLRRKYHISALYVVDLKKFRRIGAGDRLRGQYQALSQDPNSLSNLDQDLPNDMIYQVAIKSLPQDWLWCETWCDDESKQRAKTIDLCNNPKTKEPKLKAAARIVPEWVEYDAEIRQLLDHLENEKQDTILTHDEL

SEQ ID NO: 4638 - protein, 1512 aa, Ochotona princeps
MAPAGHTVRLLLRSALLCFSLLGAGPASAAKAVTARLAAKWPETPLLLEASEFMAEESNEKFWQFLETVKELAIYKNAESDYSYYNLILKKAGQFLDDIHINLLKFAFSIRAYSPAVHMFQQLAADEPPPDGCNAFVVIHEKHTCKINEIKKLLKKANSRPRPYLFKGDHKYPTNKENLPVIILYAEIGTRAFAEFHKALSKKAQNAEILYVLRHYIQKPSSRKMYLSGYGVELAIKNTEYKALDDTQVKAVTNTTVEDETGADEVQGFLFGKLKEIHSDLKDNLTAFQKYLIESNKEMMPLKIWELQDLSFQAASQIMSTPVYDAIKLMKDISQNFPIKARSLTRVPVSQQMREEIKQNQKDLQERFEIQPGDSRLFINGLRVDKDIYDPFSILDFLKSDGKMMNGLRNLGIDGENMSKFLKLSSHDLDNSYVLDIRHSSIVWINDLENDGLYVSWPTSCQEYLKPQFPGSVPSIRRNFHNLVLFIDPTQRYTSDFIKVAELFYFHELPLRIGFVFILNTDDKVDGNSDAGVALWRAFNYIAEERDVSEAFDSIVDMYQNVKDKNILTVDNVKNVLQSKFPHAEVGDILGTYSQYDKERKAGASFYRISGLGPLPQALYNGQPFNHKEMNRKEMQLAIIHKMMTTSIDLQKDILTGTLHDRQNAIDFLMDKDNVVPRINSSILNIQQQYLNLIPSTVTADIEDVSAFSFLDSHDKSAVIAKNMFYVTQEDDVISSVTLWVIADFDTPSGRKLLSTALKHMKTSVHSRLGVIYNPSSKINEDNTAICRGILVAFLTQKSNSLRNFLGKLAKEETATAIYSGHKIKTFLSEGMDKNAFEKKYNTIGMNIFRTHQLFCQDVLNLRPGETGVVSNGRFLGPLDKDLYVEDFYLLEKMTFSHLAEKIKGIAETMESNSKNVSELVMKIDSLVSSLPNFGTRYDITFLKEDHSVVKINPQESDMFFDVTAVVDPLTREAQRMAQILIVLGKIINMKTKLFMNCRGKLSEAPLESFYRFVLEPEVMSGPSDSPSLGPVAKFGDIPESPLLTLNMITPEGWLVEIVQSNCDLDNIHLKDIERAVTAEYELEYLLLEGHCFDSVTEEPPRGLQFTLGTKNQPVVVDTVVMANLGYFQLKANPGAWILKLRDGKSEDIYQIVGHKGTDSQPDLGNVTVVMNSFKSKVLEVQVRKKQDKIKEDILSDKEEKKKGMWDSIKSFTRRLHKEDDKNKDVLNIFSVASGHLYERFLRIMMLSVLRNTKTPVKFWFLKNYLSPTFKEVIPHMAKKYGFQYELVQYRWPRWLHQQTEKQRIIWGYKILFLDVLFPLAVDKIIFVDADQIVRHDLKELRDFNLDGAPYGYTPFCDSRTSMDGYRFWKTGYWAAHLLRRKYHISALYVVDLKKFRRIAAGDRLRGQYQHLSQDPNSLSNLDQDLPNNMIYQVAIKSLPQDWLWCETWCDDESKQRAKTIDLCNNPKTKEPKLKAAARIIPEWVEYDNEIRQLLDQLEKKKENAILGHDEL

SEQ ID NO: 4639 - protein, 1625 aa, Sesamum indicum
  MOD_RES (258)..(258): Any amino acid
  MOD_RES (1271)..(1274): Any amino acid
MGTLFRSGFCFLILVILCICLSGHSVSAQNRKPKNVQVALRAKWSGTPLLLEAGELLSKEWKDLFWDFVESWIHSTNVDSDSNTAKDCLKKISRYGKSLLSERLASIFEFSLTLRSASPRLVLYRQLAEESLSSFPLADDVISNTIDGGISEPNDTTKTANSEAFLLGMNPESPGNKCCWVDTGGSLFFEVGELQMWLQNSDDVKDGAFQQPEIFEFDHVHPDSTAGSPAAILYGALGTECFKEFHIALSNAARKVQXIVRSVLPSGCEAKSASCGATGTGEPLNLGGYGVELALKNMEYKAMDDSTIKKGVTLEDPHTDDLSQEVRGFIFSQILERKPELTSEVMAFRDYLLSSTVSDTLDVWELKDLGHQTAQRIVQASDPLQSMQEINQNFPSVVSSLSRTKLNDSIKQEIIENQRMIPPGKSLMALNGALINIEDIDLYLLVDMVHQELSLADQYRKFKIPPSAVRKLLSVLPPSESYAFRVDFRSPHVHYINNLEVDAMYKRWRSNINEILMPVFPGQLRYIRKNLFHAVYVLDPASLCGLETIDMMISLFENNLPMRFGVVLYSTKLVENIEANDGELPVAHLKDDQEDISSLIIRLFIYIKENHGTLMAFQFLSNVNKLRTESAADDSPEVHHVEGAFVETILPKAKSPPQDTLLRLEKEQKWNELAQESSLFAFKLGLTKLECSLLMNGLVSEPNEEALINAMNDELPRIQEQVYYGQINSHTDVLDKFLSESGIQRYNPKIIAEGKTKPKFVSLCASVLAKESVLNDLYYLHSPETMDDLKPVTHLLVVDITSKKGMKLLREGIRYLIGGSKNARIGVLFNSNVDATLPSLFFMKAFEITASSYSHKKGVLRFLDQLCSFYEQEYILASGVAESYQALMDKIFEIADANGLPSKGYETSLSGFSAEILRSYLNKVTQFIYRTFGLEFGANAVITNGRVIRLSDGSTFLNHDLHLLESLEFKQRIKHIAEIVEDIKWEDIDPDMLTSTFISDIVMAISSSISVRERSSESARFEILSAEYSAVILQNEDSSIHIDAVIDPLSPSGQKLAALLRILSKYIQPSMRLVLNPVSSLVDLPLKNYYRYVVPTMDDFSGTDHTVHGPKAFFANMPLSKTLTMNLDVPEPWLVQPVVAIHDLDNILLENLADIRTLQAVFELEALVLTGHCSEKDQEPPRGLQLILGTKNTPHLVDTLVMANLGYWQMKVFPGVWYLQLAPGRSSDLYVMKEDGEGAQGTTLLKRIIIDDLRGKLVHMEVMKKKGMEQXXXXQPGTQNSWNSNILKWASGFIGGKDQSQKEKSSSLEPGSGGRHGKKINIFSVASGHLYERFLKIMILSVLKNTNRPVKFWFIKNYLSPQFKDVIPHMAHQYGFEYELITYKWPTWLHKQKEKQRIIWAYKILFLDVIFPLALEKVIFVDADQIVRADMGELYDMDLRGRPLAYTPFCDNNKEMDGYRFWKQGFWKDHLRGKPYHISALYVVDLVKFRETAAGDQLRVLYETLSKDPNSLANLDQDLPNYAQHMVPIFSLPQEWLWCESWCGNTTKPKAKTIDLCNNPMTKEPKLQGAKRIVAEWPDLDFEARRFTAKILGESIEPQEQPPPPPKIETTSDNSSEDEESRAEL

SEQ ID NO: 4640 - protein, 1731 aa, Nothophytophthora sp.
MSLERTQIKIGAGTRGSRQSKDNEEENDDGAGEKRRLGGAAVVFTDIVGVGEGDQREPDGQLAQLAVFPASGDQVRPSKRESSPSYLSRACWSHVNRCLRVSSEFLAEENPLYFWQFLEKLETRTASIQQLNGDVDALAKLAIAVAEDIAPESKNVCLPLYLVLPILELMLATRTYSVKVEMFRQLALDSGVRPCGADAETWAVFYREPHCVEAVACSVDELEALLHGENQTKTGEEACVAAGVNDVELAVDHKYPHLAPSAGPLPVSGILYGLLGTPTFHTFHEKLAALARINEMQYMVRHYPRDSPLETLLQGYGVALDIKNMEYKTIDDSKKTGEDAELQGHADEEEDEDDDDDIDDEEVEGFLFKPLMQRHGAISEELKRFYDVLIKQGDDDQQEIKAWHLKDLGVSAARAILDAKNPLKKMQTLAQDFPLQAKKLAFSRKTLSVAFRDEIETRRQQAANKKLKNKFILNGIAVDPMERSFNVFDLMKTLKEEWSVAKQLGGLPLEQSELDAMLANVRDTSQEQPAVRIHVRGALDGSTPLYLNNIEMDPNSARWSPEVDTLRRPAWNLIFLRKNMYEYVLAFDPLTSAGRTALGHVGFMRMRGAPIQWGLLVSSKELMASKTSEDRRALVEAYKTLTTDDKATAWHFTKLLMLAQSKDAAEGDIANGVGEETEGQEAETETRKDQIRPTTIAAAFLQGVADDGSPDVLISGLLSAYAEATSSVGTIAENGVKALELLQSERFDDEVLAMTEFIHLKHLSLGWSLFNGVLQKTLDVQKSVMGHFGRDQPLYVAMAHQDALNDDMDLVEELMASQGVYPAYLSIFEKPEAKHPGDAEIPAPKHLLADDVDGRLEAALRSAVSYLHAPGSRALPKKQTVLFPADLSDPRDAGHVYRVIKAVLENSEQDLRVGVVHRVKPETSTADEKDEPEVGELVAAILAAVGDSDQESHLKFILEALNCVAKQKTVDATRAKLMATLNKMTKDKDAVFEKVRALLKSNPGKWLTSDQRDAMVQCNMLLHSRFPPATADESDDETAALLVPHLFINGRRVDLPPQSLSDEDVATIVSFDLKYRTQPVAKALIKRSATLSISEADELSFTIVRTTGIVDKYVKTPRTSRLDVGEDSLNSVRLSGDPSLQVAAYVDPLSEASQMMSSMLLMLHSQLNATVELVLLPAAELTEFPLQRFYRYLFEKQPSLAATNVEFRKLPVQPILTMKIETPEAWNVQILHAGDDLDNLRVDPDSPVEVKATTSAVFRLESLLVYGQCRDMTFNMYAPPNGLQLVLERELGVKRMHRDTLVMKNLGYFQLQATPGVWSLHLARGRAAELFDIIDPDSDLPLEAQDVSVYDFGSHIMQLMVRKKEGMELEELLESVDQEEQSKKVKKTKEDVEPIAEDAGVFGSYWNSMLSLMGKKSEDAAKPQQEAAMEGDSVSDEETALVPSGARSGETIHVFSLASGYLYERFIKIMMSSVLKRTNNPVTFWLLENFLSPDFKSSIPVLREQFGMDIRLVTYKWPNWLRQQTEKQRIIWGYKILFLDVLFPLGVQKIIYVDADQVVRADLKELLELDLQGKPYGYTPFCDSRNVGFQFWRQGYWKEHLRGKPYHISALYVVDLTLFRQMAAGDMLRAVYSQLSADPNSLSNLDQDLPNYAQHQIPIFSLPQEWLWCESWCSDETKATAKTIDLCNNPKHKEPKLDMAKRVIAGELFNESWIELDQEIKDAEARFATTA

SEQ ID NO: 4641 - protein, 1622 aa, Eumeta japonica
MNNTGFLKTAFIFSTFLISLVTAEPDTLKKSKSVTTFVNAKWESTSLVLELAEYLALESVDLFWAYVDDVNSLKTSLELLKTDKEKYDSCIGVASGLLAPAQLRIAKLALSMHITSPSVQMFMEIANNNGARDVQCDTFVAIASRLICDNDVLRDVLKSSTYYDPEEHKLETYRLDHYYPSSNNKSLTAILYGELGTTDFSTKHKILADYADRGIINYIVRWNVKPQGKPKLRLSGYGVELQLKSTEYKSQDDSTPKDSEGNETFTTSEEEDENDPQNQIDGFNFGRLKNLFPALRTPLERFRRHLSEASEELAPLKVWQMQALSMQAAAAVLDAHDAGGDEALKVLTSIAQNFPMQTKSLIHVNVPRAFREEVLYNQDIWASSLGLRPAEPLLLVSGAQYDAEEVDILALLAALREDIGPMNTLHALGISKKLINTLMSLELGESYTWEEYGLDIRDTAITWLNDLETDDRYRRWPSSYMEMLRPTYPGMLRNLRRNIYNYVIVIDPISKLSIAPLKLGDTLLKHATPVRVGLVLAPIPDRSHDDAIIEAAVRSAFNFVAQEKNSNKEAFYFLSQLLDSSEQNLSLDQIRKQLRRYINSQDIDDIIAEDSEYNFGSQLTQEFVSKIGSNKFPEVLVNGVPLADEGGNSVTQSVELLEEALVGALSRHTGRLQRAVFRGELSDPDDAVEYLMKQSHIMPRLNRRVLASESSQYLDLSGTAASSEFFSEDKIHRLLHLTGRDALATALPLLRYFSKPGKPDKVTQTIWVIGDLNQKQSRDLLKNALIFMRESGAVRVAFIPNVDGSRTVDQSFNKVILAALAALEPAKATSYVVKLLDDEGCHERQDCDILPEIVPALNKYEWVLKAARVLCARSMHLRAGSRAVVHNGRIIGPFEDNEDFGLDDFTLLERYSNQVYADKIADVLDVKKKLRNEVTDDDDIEADAVLTPDTRLKLTAVLASRNPRVRTPLPVGLRTEHSMIDLRPIYDNEAAIEIVVVLDPASTAAQRLAPLLLVLRRVINCHVKLFLNPQDKNSDMPLKSFYRYVLEPELQFTQSGASTGGALARFSRLPHAPLLSMELRTPANWLVECVKSVYDLDNIRLADVETLVHSEFELEYLLLEGHAWDTTLGTPPRGLQLILGTRDRPDLMDTIVMANLGYFQLKANPGAWTLRLRPGRSEDIYEIVGHDNTDTPVGSTDIQVLMSSFRSHVIKLRVSKKPDKQHLDLLVENDDKNSGGIWNSIASSFGGGEESEAGDDTINVFSVASGHLYERFLRIMMLSVLKHTKSPVKFWFLKNYLSPSLKDILPYMAQEYGFEYELVQYQWPRWLHRQRDRQRTIWGYKILFLDVLFPLQVKKIIFVDADQIVRADLKELVDLDLGGAPYGYTPFCDSRKEMEGFRFWKQGYWRNHLQGRSYHISALYVVDLKRFRRIAAGDRLRGQYQALSQDPNSLSNLDQDLPNNMIHQVAIKSLPQEWLWCETWCDDDSKTYAKTIDLCNNPMTKEAKLSAAMRIVPEWREYDTEVKALMARVRRGLYQHQDHDQEFEIVHHEDTTSSEKDSNSVTVVLLGHESAELAIDAATPMIAAVAALEPLRAHRAPAAPAAQPRAPARVRAQRRVTPPKFK

SEQ ID NO: 4642 - protein, 1489 aa, Daldinia sp.
MIRRLFQLPCGLAATLLATLCLNSGHVIAGPSVNVAMRAAFPAPPYLVELLETAAGENATSYFPLLDRIADGAFADAKTDKELYEKFLQILKQDGHMESAEALSTFKLALSMRSAAPRIEAHYQYYDTAVAPSLEKAKTDCAEWVLMSGNQYCSASLAHVDGHISGDSQTRSLPFDRALGAGSEAILYADITKPEFGPFHKSLSEKARKGEISYRLRYRVDETEERESLPVSGYGVELQLKRTDYIVIDDREAESETDSAAKSTPTEVILDGEEEVTDLKPLSSSELVSLGLKAGSFIMQSEDPFETLIKLTQDFPKFSTSIAAHNASDAFVKEHRQNRALSVPAGMNVLWMNGVQLIERQIDPFTLVDSIRRERKLIEGVTSLGLSGKEAVSLLGHREVTSAKSSDEPRRFDWRDEIEEGRVIVWLNNIEKDKRYADYPKSLMALMQRAYPGQIPPIRKDIFNLVVPVDLSKPEDLSLVVEQLQTFIKRLLPIRFGLVPLTPTKIAEERAKIAYYSLENYGLSSFMSYLEACSNRDNSEQAHLDKAVKNRTLKDEATALSLKEILESENYAKQLKLANHWVERLNANTEVPPLFLNGLAIPREDNWLQIMSMRMSTDLQLVQQGLFMGTIDDDMWVPQLFLEGAATRRNLYIYPDDENTLIVLDVNKLYTEHKDLFEQVPVIEAGEETSKETWATLTVVADLSSQQGLRLLLSALSFRRNNPGVRLDIVNNALKSSSAHEINAALKQDVAKLLEIENLETLEILLSGPVDVQDDGYNAALSRFLTAAAVAPGAQFLILNGRVVGPFVDDSEFKESDFELLLEFEQETRILPVYKAADALGLADKITSPLTAAKLTSITALSTISDLPEGIFESAPTLRTSLFDKWNSTHTMIDVGDASTANIHFVAVINPASEIGQKWAPILKVLSQLDGVYMRIFLNPREKIEELPVKRFYRYVLESAPSFDETGKVKALGATFKGLPSEALFNLGMDVPPAWLVAAKISVHDLDNLKLSSIKTDVEAIYELEHILIEGHSREVTGGPPRGVQLLLGTERDPHFDDTIIMANIGYFQFKANPGYYNIHLKEGRSSEIFNIISVGAKGYNPVPGDEGTEVALMDFQGTTLYPRLERKPGMELEDVLEESSSSGGDDLISRGLKFAEGILGTKPKPKSVSDEEHAEINIFSVASGHLYERMLNIMMVSVMKNTNHTVKFWFIEQFLSPSFKEFIPHLAKEYGFKYEMVTYKWPHWLRQQKEKQREIWGYKILFLDVLFPLSLDKVIFVDADQIVRTDMIDLVNLDLQGAPYGFTPMCDSRTEMEGFRFWKQGYWKNYLRGNPYHISALYVVDLRRFRQLAAGDRLRQHYHQLSADPNSLSNLDQDLPNHMQFVIPIHSLPQEWLWCETWCSDESQKEARTIDLCNNPQTKEPKLDRARRQVPEWTVYDDEIAALDRRRRGLATDGDSQKVLTIGGDEKNTKSRTLEEKSDVKTRTKDEL

SEQ ID NO: 4643 - protein, 1481 aa, Purpureocillium lilacinum
MRPPALSAVVAAALTALPLAAASKSVNVGMNAAFQAGPYLLELLNAKKDLSETAAGENSSAYFPLLDRIASGHFASASSDNELYQKFLDVLRNDGHVSSPDALSTFNLALSLRTAAPRIEAHYQYYTTAVEPAVADSKCSDWILLDGKQYCTPAMDDVVKHDLSKSAIKDLPFDRALGAGREAVLYTDPASPTFGEFHAALSKAARAMTLSYRVRYRRSSVVDFRPLPVSGYGVELALKKTDYIVIDDRESDHGSQKPLGSDAVLNEVEDVADLQPLSASELGPLGLKTSSFIQRSTDPFATLVKLTQDFPRFAASLATHNVSQEFVAEAERNRANLIRGGINFLWMNGLQLIERQIEPFNLVEMLRRERKLIRGVRSLGLDGKQAVSLLGHESVSSAKGDDEPLRYDWTDREEQGRVIIWLNDLENDARYADYPKELASLLRRTYPGQMPPIGLNIFNLIIPADISRPDDIQFLSQVISIMSRGIPIRFGIVPSTSTPEASAHAKVLYHLIKNYGAESIVGYLQVLGERGTLTADEKILSAALASQELLPGGQTLSLQEVLATDSYAAQADLAASWTKRLRADTPTAPLFINGILTPRDKKWMQTMSMKIGEDLQNVQQGIFHGLVGEDTWIPGIFLKGAATRRNPYISLEDDKSLRMLDVSKIYEEHGRLLGQLPVFGAYADSSKENWAVVTVLADVTSDDGQDLMLAALEFKRNNPGIHLELLHNPADISTASRVNSLLKADTETVATIETKEALSKMIDSTADASGDEDFSAALSSFLSMARLGTGTQSILLNGRVVGPIAPGDPFTSDDFHHLLDFEQQRRILPVYKAVDDLGLTDRLSSPIAAAKLTSITALSTISDLPEGIFESAPTIRSTLYDSWNTTHTAIEVGDAKSADIHIVGLLDPVSEKAQRWVPILKVLSDLEGVYVKLILNPRDNIGELPVKRFFRFVMEPKPSFDASGNVAGLRATFKSLPSEALLTVGMDVPPAWLVAPKESAHDLDNIKLSSAQTDIDATYELQHILIEGHSRDDDGSPPRGAQLVLSTEREPLVTDTIVMSNLGFFQFKANPGFYKIQLKAGRTSDIYTIESIGAQGWEPAPGDEGTELALMNFQGSTLYPRLKRKPGMEEEDVLESSDRSASDSLVSKGMKFAEGLLGGSKGKEVSAQVHADINIFSVASGHLYERMLNIMMVSVMRNTKHSVKFWFIEQFLSPSFKEFIPHLAKEYGFKYEMVTYKWPHWLRQQKEKQREIWGYKILFLDVLFPLSLDKVIFVDADQIVRTDMMDLVNRDLEGAPYGFTPMCDSRTEMEGFRFWKQGYWANYLRGKPYHISALYVVDLRRFRELAAGDRLRQQYHALSADPASLSNLDQDLPNHMQFQIPIHSLPQEWLWCETWCSDDSLASARTIDLCNNPQTKEPKLDRARRQVPEWTVYDEEIAALDKRRKQAQASQPDPKDGTKAVNTKSRTLEEEPTSSHIKDEL

SEQ ID NO: 4644 - protein, 1488 aa, Hypoxylon sp.
MMRLLQLPCGLVATLLATLCLIPSYVVAGPSVNVALKAAFPAPPYLVELLETAAGENATSYFPLLDRIADGTFANAKTDKELYEKFFEILRQDGHMENPEALSTFKLALSMRSAAPRVEAHYQYYDTAVAPSLAQARDDCAEWVLLAGKQYCSAALAQSEGQITGDSQLRSLPFDRTLGNGPEAILYADIAKPEFGAFHNSLVDMARKGEISYRLRYRVDQMNEREPLPVSGYGVELQLKRTDYIVIDDRDSETETDSAAKSAPAEVVLDGEEEVTDLKPLSSSELAPLGLKASSFILQSEDPLQTLIKLTQDFPKYSASIAAHNTSDTFVKEHRLNRGSGLPPGMNVLWMNGVQLIERQIDLFTLIDSIRRERKLIEGVTDLGLTGKEAVSLLGNREVTAAKSDDEPRRFDWRDEIEDGRVIIWLNNIEKDKRYADYPQNLMSLMQRTYPGQIPPIRRDIFNLVVPVDFSNPDHLALVVQQLQSFIKRLLPIRFGLVPLTSTKQAEERAIYAYYLLENYGLAGLMSYLEALSTGGQSELSNFNQVIKDRTPKAEASPRPFEKIRESEDLTKQVELAKHWVERMNADTQSPPLFLNGIALSREGTWLQAMSMRMTADLQLVQQGIFTGQINEETWIPGLFIEGAPTRRNLYIFPEDDNSLAVLNVNKLYSEHSDLFNQVPVIEANEETSKETWATLTVVADLTSQQGLDLLLSALAFRRNNPGVRLDIINNPPASIKSHDINALLKKDVAKLLEVENLETLEVLLTGPVEAQDSGYATALSRFLATAAITPGSQLLILNGRVVGPFASGSVFKEADFDLLLEFEQATRMLPVYKAADALGLADKISSPLAAAKLTSVTALSTMSDLPEGIFDSTSTLRTTMFEDWNSTYTTINVGDASTANIHFVAVLDPTSEVGQKWAPILRILSELDGVYLRIFLNPKDRLEELPVKRFYRYALDSAPSFDEAGKVDPQGATFKGLPSEALLNLGLDVPPAWLVAAKISIHDLDNLKLSSIKTDVDAVYELEHILIEGHSRETMGSPPRGVQLLLGTERDPHFDDTIIMANIGYFQFKANPGYYNIHLKEGRSSEIFDIVSVGAKGYGAVPGDEGTEVALMGFQGTTLYPRLQRKPSMESEDVLEESADAGGDLLSRGLKFAEGILGGSKTKTKSVSDEVHAEINIFSVASGHLYERMLNIMMVSVMKNTNHTVKFWFIEQFLSPSFKEFIPHLAKEYGFKYEMVTYKWPHWLRGQKEKQREIWGYKILFLDVLFPLSLDKVIFVDADQIVRTDMMDLVNLDLEGAPYGFTPMCDSRTEMEGFRFWKQGYWKNYLRGNPYHISALYVVDLRRFRQLAAGDRLRQHYHQLSADPASLSNLDQDLPNHMQFVIPIHSLSQEWLWCETWCSDESQKEARTIDLCNNPQTKEPKLDRARRQVPEWTVYDDEIAAVDRRRKGLVADSEAQKVLQGGEEEVNTKSRRFEEESDPKTRTKDEL

SEQ ID NO: 4645 - protein, 1290 aa, Trichinella murrelli
MWVFPLIVVCFVSPVLVSPRKAHKNVIVSVRSKWPSTSLIMEASEFMSKESNEKFWQFIEAVIDKHQNSLGNKTDREVYNGILQIGDQILKSKARLEFLKLALTVRVHSATVEMHRQIAATSLDVQNGKSVYAVVHGKQISDLQQLDTILKHAEALARPVTYEFDHIYPGSKQGSVCVLLYADIENPHFKPWHLQLKKLVQRDGISYILRHYPKMNDDMVALSGYAVELAIKSTEYKAVDDSDKQTGSESGVSSSEEEVTDLNGFNLHLLEADELTPLKVWQLQHLSFQAGQRVILAPKEEALRVLRDISQNFPIMARSLTRMSINPNFKNEVEENQADAFSKLNIEPGDSAFFIDGIVIDLEEKDIFNLIELLKNEEMLISGLLKLGIRRKDFTLLYAMKGNDPNAEYAVDYTQWSPEYINNLESDAAYRNWGNSIHAILQPYFPGMIRPIAKNFFTLIFVLRLGDRASQNLLSTAYQMYEHVLPIRIGFIFVVNNDKSVSGYDDAGVAMLNAFNFIKEDRSVSKAVMFLIKIYNTSMRETISVEDVHKLFKSSYRDENLKSVFNSEEYNQGRSSGVDFIKESGLSMVPMVLMNGYPFTAEEISPEHIEEAILSKVMRFTVDIQKDVYEGNLKENMDVQQHLLKKPTVLPKLNYNILQMENIFLDMTDTSKYGAMSVEKFSHLDSSGKTQFIIESILYLTKNDDDILRPVTLWIVADVESDDGQQFFLNAIKYLKYSVDMRIALIHNPKSEAQATKGTASLVQACIQFLPLYQSKAVIGKIFANKITTLEDLINVSPSGISWPEFKKAYNSMSDIWMQLHVHYAKFVLNLDPGVGAIVANGKVLAPLSASDFNSLKDFNFIERYLLTSGCNDIAQHLKIIPYLDKSPKALSDLVMRLYAFLRRYNANEKRHWPIIENYHHSCIQIEASDPTAAQFDIVAIVDPLSPAAQKMSHLLVILSSVLNVHMKVCMNCKSKLSEIPLKNFFRMVLPRELEFADDGSLKAQPSARFSALPQKQLFTLNIIAPQSWMVESVEAVYDLDNIKMEEVKGDVVAKFQLEYILLEGRCFDERSGSPPRGLQFTLGTFHEPFMFDTIVMANLGYFQLKANPGAWILALREGKSAEIYEVKSVDGVVQNQTTSVVILDGFSGRMIHVKVAKKNDQLENELLAESEDAESESLWQSISKTFQSGEKYDVINIFSLASGHLYERFLRIMMLSVLKHTKTAVKFWLLKNYLSPGFKEFLPYMAGHYNFSYELVQYKWPRWLHQQTEKQRIIRSFLSMRIKLYERTC

SEQ ID NO: 4646 - protein, 1839 aa, Symbiodinium microadriaticum
MDHLAALGKLGELGCGPNEVLQRHPGRGPPARMSSEGWSHEAVKMLMAGQHVASMQLFPQYEIDALLAGLVDALAELHRSAGKVRLLQVQMPRQGDGCLSTRVPPALADRFHEVLVLFHMLPMFVLGTLSGQISGSGLVLCSTFDAVVTVQASFDFSSLSLDFPGVTDFLCPRLNQVVLPSSGIPLSAVQAKELGLVYDALHSEEQLQDLLARICSKLSECAPNAVAQSKAFIQKIGSMPMEPKVLGDLACHIAKRMQDPEFQDSIRQIVDKGHLPAHTRPANRVVPENLLSESQAPGPLIQQPIGAHVVQRCHATPLVCTGCPVSVRVLCLLLACGLQPTSVGLEVEVTVQAAWPAASLAAELLEGLAEVGRGATFLRALSGSSSSQWRQDAAKHADAALCCQGKSAYGRLLSLRARHSFSSAVVEAARGMERADRAILEEQGRLDAATCPIGQPWVMLHSKGGYTEVVCGKELAKLSKLVLTGSKPGTSMGRLSGAPRRSGLDHVLYEFIAEEDSCPELIGYGDLGDPSGASELLKALLEAADALATASSCGRVAFRHATPAGDAPPAVLGGYGLELMTRSADEVAKSKDDDSPQEAEEEVDGRCLREVSDPAESFHGIDIAAIAKHFPDSASALCRLRSDLVTQAEKPLLPWELTRLGARAAMRAVRLSNESSLEGLVSLGEVAQDYPSGWGRALSAGTSEDSQTARELMEDAEAIKGDDTLQVNGWQVPEKQRGLLPVLRAQLPLFRSAELLASSGISQSGAFALLRDARSGPAVPSRVNTGDPRTEKKGKVPSFLLDKQNPLLLGLGFVIDPCSRKQLKIFNAIIKRTLPAMAWLRLQSSTHSAATRLLVRFAEDHASEEENLCSEDAVKRIKGLYKKAFQQYQYEKAKKLKTSDDSSSLDLRFPSPSVSVNGKMIVGLENIEKLLEPEIQQEVQQISFAFQMMRTRPSMVPEKQILNFAYSSKHLHPSSFRIQPKLLTAWYPGISTSPIRHVPLRPDMLRKVPGGQLQGKSTRPYPAVHLAVLSSGQGGDSKLLQDLREVLGAFAALSSLSGSHPTPKRYLHIAITAGCSQPVGSPLPVSGALRRCVAAASTGGFDQLTQLLDALRAADVTAEMLLTACGASLPQKVLQEKAVTVVQEDVELCQAHLPILRDLGVLDGTMLLVNGRLFGPLELDGQSFTAGIVAHAEELELDFGPVQLQDGLVLAEDAVVKMLKQRAGSTEDYLLAFALAVRARSVVESFAARSGETTEEKSEEGEQLQDSHRKGVAEVMYERAPPGLRMHLAPREVSFGSPIRVYALLNPLGKGAQRLPPLLALLHQELNAEVFVTLRPVRLAESPLTGYFRTAAAPTAPEGGLAALGEWNGTMKGVRIELPPRRGQLLSVQLVAPDDWLCSPVDSAADLDSIPAHAPRGSPGAKVHVRYEVEALFLEGVAEDARGSPATGRQLALAPLRGVAETAGSNSVVVKSGYFQLRQKPGVYQLSLRSNEERLLRPKGLVQLADLAGRGSLLEARVGKMGLGEDAQASFFKANDSESTQNFEGAGGDPAECSETIHIFSVASGLRYERLLRIMMLSVRKHTKCKLRFWLVENFLSPRFRRILPGLAEQVGFAVSRVTYKWPTWLRGQTQKQRVIWAYKILFLDVFFPAEVKRILFIDADQIVRANVEELWRMDIKGHVYGFVPFCGSGPPESLTSHIWGSLTGKAAKQEDLKNPDTVGFRFWEQGFWKNHLAGRHYYHISALFVVDLEVFRQTGAGDTLRDVYQSLTADPHSLANLDQDLPNYIQANLPIYSLPQEWLWCESWCSESSKTNAKTIDMCQHPSKKEQAKPNDVVIAAL

SEQ ID NO: 4647 - protein, 1081 aa, Drosophila persimilis
MDLLRPTFPGMLRNIRKNVFNLVLVVDALQLTARSVIKLSESFVIHQAPIRLGLVFDAREAGKDNSEDYIAITCAFNYVSQKKDARAALSFLTDIYAAVGETKVVKKEHIVKQLTKEFSTLTHAKAEEFIEEDSTYDYGRELATEFVQRLGFSDKGQPQALLNGVPMPSNIVTADSEFEEAIFTEIMTHTSTLQKAVYKGEMTDNDVAIDYLMNQPHVMPRLNQRILSQEDVKYLDINGVAYKQLGNVAALNRLSNRDMTATVMENLKFFGGKKSTERIGRASLQFLTIWVFADLDTQEGRSLLTHALEYVQGGESVRLAFIPNTENVPAGDSKNLNRLAWAAMQTLPSAQATEQVLKWLKKPKEKIEVPSKVQDILGSTELHLKMLRVYAQRVLGLNKSQRLVIGNGRLYGPLSADESFDSADFALLARFSSLQYGDKVRQVLKESAQDVGADFTSDTLLKLYASLLPRQTKNRFKMPTDLKTDHSVVLLPPKQEKLPHFDVVAVLDPASRGAQKMAPMLILLRQVLNCQLSLYMIPVPQHSDMPVKNFYRYVVEPEIQFEANGVRSDGPLAKFSGLPANPLLTQQIQVPENWLVEAVRAVYDLDNIKLSEIGGPVHSEFDLEYLLLEGHCFDASSGTPPRGLQLVLGTKSETTLVDTIVMANLGYFQLKANPGAWSLRLRDGKSTDIYGISHIDGDNTHYDAGSSVVQVLITSLRSHVIKLRVSKKPGMQQAELLADDTDQAAQSGIWNSIASSFGGSNGNQAANDEDTETINIFSVASGHLYERLLRIMMISLLKHTKSPVKFWFLKNYLSPQFTDFLPHMAAEYNFQYELVQYKWPRWLHQQTEKQRTIWGYKILFLDVLFPLNVRKIIFVDADAIVRTDIKELYDLDLGGAPYAYTPFCDSRKEMEGFRFWKQGYWRSHLMGRRYHISALYVVDLKRFRKIAAGDRLRGQYQALSQDPNSLSNLDQDLPNNMIHQVAIKSLPDDWLWCQTWCSDSKFSSAKVIDLCNNPQTKEAKLTAAQRIVPEWKDYDAELKTLLARIEDHENSHSRDIDDDPVDDHVVVTTLPPPPEPKHGEL

SEQ ID NO: 4648 - protein, 1183 aa, Galendromus occidentalis
MFRDLCHNFPSVARSLSSIKVEDDLSSAMERNKRYFQGYLNLEPTDTALFINGLYFDLEVSDLFVLLDSVKQETKLLEGLHDAGFSAETIQKMMKLDLNSKNSIYAVDIRDSAVQYVNDIESDPEYRTWPKSLKDMLRPTYPGMLRSVRRNMYHLTIVGDPASPEAQDMFKFAESFFTHRAPVRIGFVFAVNQDLQVNGLNDGGVAMLNAYNYIAQNKKPIDGLAFITEVYASQADGYIEAESVCKLFRSKYPDTELDSVFGSESEYDTGRLLAWDFINRTGIGGDSPSAMLNGVLLKRENLKGEVFEEAVLTEVMKQTPKIQKAIYKGELVEDDNVIDFLMTRENVMPRLNERILNAPDKDLTTFVSLVGRETDIDASSLAELSSADMGASFAAKLKYVGQAKLSPLSVWVVADLESERGREIFGQALEHLENSHDARFAFIYHNKDHKVGELVESALDSLRPTEATSFLTKLFRNWKEIESGSLRAEQLVKNDKLNLLGEEAVRKTVQLHAAFATTLRLAPESRAVIINGKLLGPLGEDEAFTAGDFNLLEKYSMSLYGSKLRDLVKNSDSAMRASSVLQKYAQNKVRHDIKYATDKHAVIDTPAKLPQQAAHEITAIVDPASRGAQKLSQVLILLQRVMNANVKVFFNSAQGQKELPLKTYYRFVAHAEPQFGPSGELSAPRAVFTGLPSKPVLTLAMATPENWLIGATRSLYDLDNIRMADVETRVNAEFELEHLLVEGHCFDAYSGSPPRGLEFTLGSPADPVMYDTIVMANLGYFQLKANPGIWFLRIRDGRSSELYDVTSTENTEKCGEEVAVLVTNFRSKVLKVRVQKKSGKANEELLVEDDGDEDGIWNSITSSLGGRSKGDKENEEEDVINVFSVATGHLYERLLRIMMLSVLKNTNTKVKFWFLKNYLSPSMKDILPFYAEKYGFEYQLVEYKWPRWLNQQTEKQRIIWGYKILFLDVLFPLSVKKIIFVDADQIVRADLKELRDLDLGGAPYGYTPFCESREDMDGFRFWKRGYWSQHLGSRRYHISALYVVDLKKFRRIAAGDRLRGQYQGLSQDPNSLSNLDQDLPNNMIHQVAIKSLPQEWLWCETWCDDASKPQAKTIDLCNNPKTKEPKLVAAARIVPEWTSYDEELKSLIDTFELRRAKPTTPGEKTHKERAESDRKDAVFHSEL

SEQ ID NO: 4649 - protein, 1490 aa, Glarea lozoyensis
MAISSFPWGLTKALLASTYLHSLCASASPTINVGLQASFTASPYLLELLETAADENSTSYFPLLDRIADGYFSKSSTDKELYEKFLEILKEDGHMPDTESLSSYQFALSMRSAAPRIEAHYQYYYTAAEPSLAGARTESCPSWVLLNNKQYCSPALDTANADIEGNQQVQELQFDRIIGNISAPASILYADITSPTFGHYHKTLVKTAREGKTSYRIRHKKALSQNSDSHIFPGYGVELALKRTDYIVIDDREGEQETVEIDSEKKEVKFEDEEFADLKPLSSSELLGLGLKASSFILESEKPFDTLVKLSQDFPKYSSAIASHNPTKEFVAEHEYNRAQLVPAGYNVWWMNGIQMVDRDIEALKFLDMLRKERTLINGVRNLGLTGQEAIQLLSHENIANVKGENEPQRYDWRDDEEGGKVIVWMNDIEKDKRYEDWPTSLQALLQRTYPGQLPTVRRDCFNLVLLVDFTSPEDVHLIVEQLRGFVQRKLNIRIGLVPIVQSVHSLEQARVVYYLVDSYGLSTAILYLEKSLAAGKLSAPSKSVFEAAIEGRNPKPEKVTRAVSEVLKSDDYQDHIEAVKQWTVRLSTDSTIPPLFINGVVLPRTENWLQIMSQRVTSDLQAIQTAIFQDFFEHDSWVPSLFMASAAKRRNSLIVPEDEKNLKIFDVNELLVDNQDLFHVMPHIDVGTESAKEDWAHMTVVADLESEGGVKLLATAAIFREANPSIELAIMHNPSDGIVDTGFSYDLFARMEEQPAKIQTVNGITDMLSSEKSVEVEPIEQAAKAYWHQAAPFIKSLNLLAGENAILLNGRLVGPIPSSVDISNEDMIQLLSYEKSKRGVPVYSSMEALGLAEKISSPQDAAKVISMVAISTISDTPDGMFEQASTVRMAKFDIWNSTYTMIEVGDISSATIQMTVLIDPASEQSQKWIPILKTLSELDGVYVKLYLNPKDRLQELPVKRFYRYVIDSKPSFNEDGSLKALKASFTGVPQEALLTLKMDVPPAWLVAPKVSIHDLDNIKLSSVKSDVEALYELEHILIEGHSREVPGGAAPRGAQLVLGTERDPHFADTIIMANLGYFQFKANPGYYKIKLQEGRSEEIFNIDSIGAKGWSPAPGDENSEVVLMSFQGTTLYPRLSRKPGMGDEDVLESKTDSPMDFVSRGLNFAQGILGKGKSIETKTSENAEINIFSVASGHLYERMLNIMMVSVMKHTKHTVKFWFIEQFLSPSFKDFIPYMAEEYGFQYEMVTFKWPHWLRGQTEKQREIWGYKILFLDVLFPLSLDKVIFVDADQIVRTDMIELVNHDLKGAPYGFTPMCDSRTEMEGFRFWKQGYWKNFLRGLPYHISALYVVDLHKFRQIAAGDRLRQQYHQLSADPASLSNLDQDLPNHMQAMLPIHSLPQEWLWCETWCSDEALKEAKTIDLCNNPLTKEPKLERARRQVPEWTVYDDEIAAVDRKRKGLPVEGKNEKSRTMEVMIETPETKKKGDKDEL

SEQ ID NO: 4650 - protein, 1567 aa, Ostrinia furnacalis
MRFTGFLFSVITLFYVNNCLATNNDLPKREEKKAKSVTSFVSAKWESTPIVLELAEYLAGESSDLFWSFVDEINSLKSSLESLETDKEVYDACVGVTSTLLAPAQLRMAKLALSMHLTSPTVHMFDQISTQNGAKSVQCDTFVDIASRKVCDNDALRDILKSYDQYDPEEHKLETYLLDHSFPSSDNKSLTAILYGELGMTDFATKHKILAAYADKGAINYVVRWNVKPRGRPKLRLSGYGVELQLKSTEYKSQDDSNPKESEGADAPTASEEEDENDPQNQIDGFNFGRLKNLFPALRTPLERFRRHLSESSEELEPLKVWQMQALSMQAAAAVIDANDAGGDESLKVLASIAQNFPMQTKSLIHVNVPRSFRDEVLYNQDVWAQSLGLRPAEPLLLVSGAQYDAEEVDVMALLAAIREDIGPMNTLHALGLSNKLINTLMSLELGESFTWEEYGLDMRDTAITWLNDLEADERYRRWPSSYMDLLRPTYPGMLRNLRRNIYNYVIIVDPTSLTSGPPIKLGETLLKHATPVRVGLILAPGSEDSRLEAAVRSAFNYVAQERNSNKEAFYFLSQLLHPSQEETLNLEYIKKQLKKYASSGADLDDIIAEDSEYNFGSQLAEEFVSKLGTNKYPQVLVNGVPLSDEGSTPVTSSVELLEEALVTALSRHTGRLQRSVFRGELSDSDDAMDYLMKQPHIMPRLNRRVLGSEPSQYLDLSGVPSSTELFSEDKIHRLLHLSGRDALATALPLLKYFTKPGKPDKITQTIWVAGDLNKKDSRELLRNALTYMRETGGVRVAFLPNVDGDPETDQSLNKVVLAALTALEPAKATKYVAELLENEGCHERQDCDILPELVPALNKYEWVLKATRVLCARSLRLRASARAVVHNARLIGPLNDGERFTVEDFLLLERYTSQVYGDKMSEVFDKKKTLTNDVNDDDDDLSVDMSNEDRLKVISVLASRSPRVRTPLPVGLRTEHSLVDLPPRMKNEPSIEIVAVLDAASLPAQRLAPLLLVLRKVVNCRLKLFLNPQDKNSDMPLKSFYRYVLEPELQFTSSGALTGGALARFSRLPHAPLLSMELRTPPNWLVECVKSVYDLDNIRLADVETVVHSEFELEYILLEGHAWDTTLGTPPRGLQLILGSREKPELMDTIVMANLGYFQLKANPGAWILRLRPGRSEEIYEIVGHENTDTPAGTEDIQVLMSSFRSHVIKLRVSKKPDKQHLELLVENDEKNSGGIWNSIASSFGGGEEEAQDETINVFSVASGHLYERFLRIMMLSVLKHTKSPVKFWFLKNYLSPSLKDILPYMAQEYGFSYELVQYQWPRWLQKQRDRQRTIWGYKILFLDVLFPLHVKKIIFVDADQIVRADLKELVDLDLGGAPYGYTPFCDSRREMEGFRFWKQGYWRNHLQGRSYHISALYVVDLRRFRRIAAGDRLRGQYQALSQDPNSLSNLDQDLPNNMIHQVAIKSLPQEWLWCETWCDDSSKKYAKTIDLCNNPQTKEAKLSAAMRIVPEWREYDAELKALQARVRRGLYQAADTEQEIDSGHDEETAPSDSQPKKDHEEHTEL

SEQ ID NO: 4651 - protein, 1516 aa, Aethina tumida
MKLITVILSVILSSHLTYNVAAKSKKSKSVTTLLDAKWETTPLVLEVVEYLADENVDFYWRYIDAISQLKKPLVEIENERERYNVVIEQASKLITPSQLSVLKLGLSLHIYSPKVQMFGQMAVERNLPNCETVADIGGHLTCDINEISNLIQKATKQEQKGVEVFKIDTHYPGSENRSVVVVLYGELGRKSFSDFHAVLQQKAQEGIIDYIVRHYVKNSSGIKQRLSGYGVELQMKSTEYKSQDDTEVHEKASSEENSQEEEDGEVEGFDFGKLKKIYPDLKNELNKFKQYLEETSNELAPLKVWQFQELSLQAAERIMNAPKEEALKVFTNIAQNFPMQAKGLVKTVVNANMKKEMKKNSEIFASTLNLQPSDTALFINGMFYDVDLVDVYGILDVLRQELRTMEGLHKLGIGNKRLTTLLGLDLSDSSGSQEFAIDIRDSAINWINDIERDSKYNRWSTSIMELLRPTFPGMIRQVRKNLFNLVLIIDPTDSESRGILKLIESFVIHTAPIRVGVVLHVNSSTSLTGLEDAGVAMLCAFNFVSQKKDPTGALTFVRTVMGKAGENRVTVDDVKAELKRQFTEDYDDIIGEDSDYDFGRQLSADFIQRTGLGSSPQALLNGIPLPKNQLNLDDFEEAVLHEIMAQTPNFQKAVYKGKLTDGDDVVDYVMNQPNVMPRLNERILNKDKSFYLDMLGEPSSTTNIQQLLTLSPRDMTATAIENIKYFVGAEKNKAKPYKAMTYWILGDLDCPKARNLLVDALTHMKDEPDVRVSFLPNVNGDKPNKLNKIILAALEHLPSDKATTFALSLLLDNQKVKDIKEGKQVTIPNEITRNIDAQELNLKMLRVYAQRVLNLKAGQIAIVANGRVLGPLAEEENFTLEDFNLLMRFSGASYLDKIIEAMGKDADEEDDVCSDTLMKVVSLLISKVQGRSRFDISYSGTDHSVITIPPRNADQVAFDLVAIVDPVSRGAQKLGPILQVLHEVLNCKIRLFLNSVEKNSDMPVKSFYRFVLEPEIQFSEDGRQLPGPIARFNNMPTSPLLTQNYHVPDNWLVEVVRSVYDLDNIRLENVESNVHSEYELEYLLLEGHCFEQSSGSPPRGLQITLGTESKPVIVDTIVMANLGYFQVKANPGAWILRLRQGRSADIYNIVSHDGSDTPENSDDIKVVISSLRSHIVKLRVQKKPDKINMDLLSEDEGNSGIWNSITSSFSGNEEGEEEKLNIFSLASGHLYERFLRIMMLSVLKHTKTPVKFWFLKNYLSPQVKDFLPYMAKEYGFEYELVQYKWPRWLHQQTEKQRIIWGYKILFLDVLFPLDVKKIIFVDADQVVRADMKELQQLDLGGAPYGYTPFCDSRKEMDGFRFWKQGYWRNHLQGRRYHISALYVVDLKRFRRIAAGDRLRGQYQALSQDPNSLSNLDQDLPNNMIHQVAIKSLPQEWLWCETWCDDASKASAKTIDLCNNPQTKEAKLTAAVRILPEWKGYDDEIRELQKKIDSGLLDEEAEQDAPTIRTTDIHSEL

SEQ ID NO: 4652 - protein, 1515 aa, Hyphopichia burtonii
MYTFLWRVVVFSLAVVVSASKENTEDNNNFGIDLQASWAQIPFKLNLLESVASRNESLYLQVLPRIIGFVDSNDSDDDREPDVDGGNEISDAAIYDEVLRSLNLDSIQESFVNFNLVNKIYSPRVQAQFKYYNDVVMPKYQGKLTESCSVDSFGNEVDGVKDGKFPSWVQYNDKIYCSPDELYALQTDSKSLNEEILPFDRVIGANGEAPLLVLYGDINSDSFISMFENMYLSAKEGKLRFVWRYIPTQDLGPEYLGGYGVDLTLKRTDYLAVDDRNIKEIEAKSSKKTSNSKKLKLENDLNAIAQSNADLHPITKDQLKDLGSKLVTFIQSNSYKAIKKYDLLKTVLNDFPKYAYYISKLKNQKQFPFVNDVIEQNRKIGASEDSNGIYINGLSIPKEQFDLTTLVHQIESELKVSNELVEYGFTIPQAKKLITKFALLSAVKESQFKTGNSLMGDNENRFKLYEHEFVPNAKDKKGGVLFFNNIETESSYLLYSANRQEMYIGPGAYQMPHGQIPALKENVHDLIFVINFSHKEQLKVFFAMAKFFLDRGIPKQIGILPLIGSDPRDEKLAQLFYFLAEKGSAKESLALLYKYFETTNVDEENALFETINIPEDHIHSYAEFRDTLHKFSIDSPSVIFNGVINDLQGSTWQKDMKNQVAQDVRLLQHHIRQETDQGKKLKDILYENAKSERNLRVIPKDPANILYKRISNEMYEKSVGFKKDLENKELSGTFWLIGDFNEKKLIDQFIIILKVIAKSSSPNSMQIRVINTSQNNDLLDQLQEKFSNKPLNKSNTKNLIDYIKDYKSGSLESLRSESVSKLLEENEFQLHQPSLIFNSRYFRLTEIFKAKELQTLIEYEFKQRLSIIKDLVEAYPEDFSYRTLFDFNRNSGSDNIDWFDLVLSSITKSFYVDDFLILLDDVARFDFSSLNMNNTIDVVDYDNKKPIDILLIIDPTEEYSQKLVNVIGSILDFPFVNIKILLQPNEKSDEDVSIKRFYRGVFPASRPQFDSEGNFDVKYQANFTNLPEDQLFTTDIDGPHKWIITSHDTAPENVDLDNIKLSNYEYTQISGSYELKNILVEGYANDVRIAFPTTGLELELISTNDKIDTNVMATYGYFQLPADAGIWTLSIKSDSISSKHCSLLSASSNRYVANDTPLKSVQVPVFDLNGKTLSVRVTKNPGYENKNLLIELANGGLEHKDETKGSSWFGSLINSGKKEVKPKQADINVFSIASGHLYERLMGIMIASVRAHTNKLVKFWIIDNYISPQFKKLLPKLAQKYDVEYQLITYKWPVWLTKQREKQRTIWGYKILFLDVIFPQDLDKVIFVDADLIVRSDLSELVDFDLEGAPYGFTPMCDSREEMEGFRFWKLGYWTQVLQGGLNYHISALYVVDLNNFRALTAGDRLRNHYDRLASDPNSLSNLDQDLPNNMQKWIKIKSLPQEWLWCETWCSDQTFSSAKVVDLCNNPLTKENKLDRAKRQIPEWTSYDDQIHALQHPVSDSSDRPVSEHAHDEL

SEQ ID NO: 4653 - protein, 1449 aa, Meira miltonrushii
SPPVQVQLRSPWPSPPLVLEILEAVHEENGDAFFDLINHLLNPWVLNVNPRNHEGDYEPISLIDATDEDVFRRAQNVISQHHMLPTLAQELNWNTSLALRTQVPKISAFWQLYQTSGVLDRHASRQKSEEECGSWVDFEGKVICTDAELIEAFEAFTGHKNDFQPFPPITASDHVLKTGSKSGPIAILYADPYTSNFWPLHHRLTEYTLGSRPDHAPLQYILRWKPSKHLGDETLPGYGAYLDLKKVDYLVIDDRKLVEADGRTTESHTVPEDALQSADVQDRDWLNKQLHATADDQTQSMGNLSKEEISSIGFKAAYNIMKSSDPLRALHQLSQDFPSHAVALARSADAPKSEFLEEMEMLHMTRIEAGGEDVWMNGRSMSGKEFQAFGLLAAMRNERTLMQSFTLLNLSNQQAFELLTSAEVSSAYTTDDSAPPPFFDASDRIERKDGDNDTVGAISYWNDLEDLDDQRYGFWPVELASLLRPMYPGSFPQIRRNVFNVILALDLRQVDAVKFLSETVQMASSKVAIRWGIVPFLSSSPESSQLADLFWLALEQLGPTDTAKYLRRVAFAAQQIQSDKVNVRRAGEELDKMLHTTSTEREELLKSTESISLKRQKAAKWTKRLRADETATGTVFVNGQLMPFHPQLLQILHQVVAIQLQSLAKLIYYGEINDEETDVSTFFYDLPTTHTARSILLFPPEEGPIKTKAIELTGEIGVVCRNALSTGPEASSLAVWQVGDVESERGKKLFDILSTLSETQEFRLGSLSLSSFGLGQNDGTFGILINGRLLYNLDPSEFTQTDFEALIKQEKAKVDSIPSEGQDPWQTVAVSSIVHSANFVEKSKQGFFVSSSTARSTIMDAIEAEQFSFSFGDRNSSALRFSVLVNPLGKSVQQWSGVLSMLATQPDVYVRVILNPKQNVTEVPLKRYYRDSTPSQLQFNPQGQVLSSSLTFNDMPNEAVLTMGLDAPPTWLTMPVDAIYDLDNIRLRDAVTPTVRAVYELKYVLIEGHVRDDKSKSVPRGLQLVLESLDGTQTLDTIVMANLAYFQFRAAPGVYRLRIRNGRSSELFDMISVGNAGWDSPTVEETGDEIILNTFQGLTIFPRMSKKNGKEKEQLVEDGEASTQNGDSKSGISPGSILQRAQSIFSSASSSITGGSSAQVNVFTVASGHLYERMTYIMILSTLKHTKASVKFWFIENFLSPSFKRFIPLLAKEYNFDYELVTYAWPHWLRGQSEKQRSIWGMKVLFLDVLFPLDLQKVIFVDADQIVRADLLELVETDLHGAPYGFPPMGNDSIDMDNFRFWETGYWEKFLRGKPYPISALFVVDLNRFRLVAAGDKLRGHYQALSADPNSLSNLDQDLVASMIHNVPIFSLDKEWLWCETWCSRSWYDDAKSIDLCSNPKTHEPKLDRARRQIPEWTPLDEEVAEVARKLEKEGRLDANVVATTSAID

SEQ ID NO: 4654 - protein, 1496 aa, Byssochlamys spectabilis
MMLAARLCQLWHSSLVLITIVLPLLAQASPSVNVALQASFNSAPYLLELLETAAEENSTAYFPLLDRIAEGAFEQPVTEKELYDRFLEILKEDGHLINPESLSSFKLALSIRSAAPRIEAHYQFYNTSVQPLLAVAQDAACPVWAHLDGEQYCSSALERAQQGVDGELDPRALPFDRVLGDTSAPPSILYADITSPLFNEFHLKLSALAREGQVSYRVRYRPPQHAEAKPLFVSGYGVELALKRTDYIVIDDREAEPKEQKSSAGKKAPIAGIDALKEESPADLKPLSASELSSLGLSAASFIMNSANPLETFLKVTEDFPKHSSAIAAHNATTEFLTEFRANRAGLSLPSGYNVMWINGVQISPRQIDVFSLLEHLRKERKLITRFKDLGLSAQDAVNLLWHPAFTEAQTADEPQRYDYRDKTEGGDVIIWMNNIEKDKRYEGWPTALVALLQRSRPGQLPPVRRNIHNIVVPVDLTDIDDVRLVVETLQTFVKRKIPVQFGLVPTVNSPDAISQLKIVHHLHNSYGLAATLQYLEELLSKNIASPDKSSFQSATKERKLRPDAQALVFEDVQADEIENIVSRTTRYLKRLDALDGRPPTFVNGVPLARDENWIQGLTMRVNRDLQAILQGVFEEIFEEDAWLGEYFLSQAAQSRNKLIIPEDAKDIRIADLTSVYEKHEDSIKDLPRWSSASGQGNSLESQHIIVVADLGTRPGLDLLATILRYRRLHREAEILFIHNPSAGSQSDISAKLTKILQDDNIDTTALVADIDSDNLKREVSETEADEISKYWSTKQPLARELGFEPGARGLVLNGRAVGPIPSFATLDAIDMEQLLAYEKSKRIDPLAKAVKSLGAESKLADPSSFAKVASLVALSSIPDIPEGLFDTQSTARLNVFTKWEDTYTAITTSTSEDAVINVVATIDPTSEAAQRWVPILYVLSKMDGVNTKIFLNPKEQIQEIPIKRFYRHVLEAEPSFDSNGSLARPGASFSGLPVEALLTLGMDVPAPWLVAPKESIHDLDNIKLSSVKDGSDVDAIYELKHILIEGHSRDMTTLSPPRGVQLLLGTKNNPYFDDTIIMANLGYFQFKSQPGFWNIELKPGRSQRIFNLDSVGSLGYTPQPGDDNNEVALLSFRGKTLFPRLSRKPGHEDDEVLDIGPAPGSAMDYVSKGFSFASSVLSSVGMKGGSSEKHADINIFSVASGHLYERMLNIMMVSVMRHTKHTVKFWFIEQFLSPSFKSFLPHLAEEYGFSYEMVAYKWPHWLRGQQEKQREIWGYKILFLDVLFPLSLDKVIFVDADQIVRTDMYDLVTLDLEGAPYGFTPMCDSRESMEGFRFWKQGYWKTFLRGQPYHISALYVVDLNRFRALAAGDRLRGQYQALSADPNSLSNLDQDLPNNMQHQIPIKSLPQEWLWCETWCSDESQTQARTIDLCNNPMTKEPKLDRARRQVPEWTEYDEEIASLAKRVAAEKEKDQAAREETQPEKEAENEAAWKKDEL

SEQ ID NO: 4655 - protein, 1486 aa, Phialocephala scopiformis
MGPFNLPWGLTGALLATTYLHSICVSAAPSINVGLKTSFSSAPYLVELLETAVDENATSYFPLLDRIADGHFSKASTEKELYDQFVQLLRDDGHMQAESLSSYKFALSMRSLAPRIEAHYQYYHTAAEPSLKAEQDTFCPVWVLFNGKQYCSPSLKDAHGDVNSETQTQELQFDRIVGNSSAPASILYADITSPIFGKFHKTLIKTAREGKTSYRVRHRKPLNSEPKQLIIPGYGVELALKRTDYIVIDDREESDSKPSAVPEKEVKFEDEELADLKPLSTSEVFSLAVKASSFIMQSETPFETLVKLSQDFPKYSSAIASHNATKEFLAEHEYNRGQLVPAGYNILWMNGLQLIERQIEALDLLDLVRKERRLINGVKDLGLTGPEAIQLIAHNEIASVKGESDAQRFDWRDEIEGGNVIIWMNDIEKDKRYADWPTNLAAFLQRTYPGQLPTVRRDSFNLILPVDFTDAQDVLMIVDTLLSFVKRKLTLRIGLVPITTTPHQVEQARVLYYLLDTYGLQAVIAYLQSSYSAKKLSVPSKSSFNSAVEDRKLRAEKIARPMEDLLKTEDYQEQVKASQKWIRRLSADSKIPPMFVDGVALPRDENWLQSMSQRVNTDLQTIQQAIFMETFTEESWLPLHFLSQASVRRNSLVVPEDEKTLKLFDINKLLGEDQESVNQLPSMKADLSLPKSDWAHMIVIGDLDSEAGVNLLATAAASQEANPSIEVVFLHNPAPGASKSGLSTDIFAYMRDNSFKPLPDVAQLMTILTKDEQSSSDAFHDAKDYWHAYDNIVKSLALRPGENAIVLNGRLVGPIPAVPDFDTDDFDQLLSYERSKRITPTFTAIEALGLSEKVVDPLSAAKISSIVSISTMSDTPDGIFEQASTIRMGQFNMWNSSHTVIETGDASIATIQITALLDPASEQGQQWIPLLKVLSELDGVYTKIFLNPKERLQELPVKRFYRYVLDSKPTFDESGALQPLGASFSGVPQEALLTVGLDIPPAWLVAPKVSVHDLDNIKLSSIKTNVDALYELENILIEGHSREIPGGQAPRGAQLVLGTERDPHTADTIIMANLGYFQFKANPGFYKIDLQEGRSSEIFNIDSIGSLGWSPVPGDETTEVVLMSFKGTTLYPRLSRKTGMETEDVLEAKLEGKMDFMSRGLDFAQGFFGGKQKALAEKEVQADINIFSVASGHLYERMLNIMMVSVMKHTKHTVKFWFIEQFLSPSFKDFIPYLAAEYGFKYEMVTYKWPHWLRAQTEKQREIWGYKILFLDVLFPLSLDKVIFVDADQIVRTDMIELVNHDLKGSPYGFTPMCDSRTEMEGFRFWKQGYWEKFLRGLPYHISALYVVDLVRFRQLAAGDRLRQQYHQLSADPNSLSNLDQDLPNHMQSVLPIHSLPQEWLWCETWCSDEALKDAKTIDLCNNPLTKEPKLDRARRQVPEWTVYDDEIAAVDKKRKGLNGAEKNTKSRTLEEPMVTESTASKKDEL

SEQ ID NO: 4656 - protein, 1517 aa, Xenopus tropicalis
MLSPLILCFFSLTLASALAQVPTKGVTASLAAKWPASPFLLEASEFIAEEGNDKFWQFLATVQELTIYKNKDTEYSYYSLILKKAAQFLSDLQIALLKFAFSIRAYSPTVQMFQQIAADESPPEGCSAFVAVHGMHTCKPSQIKKLLKEASERPRPYLYKTDHIFPTLSKTAPVVILYAEVGTKEFAKFHKTLAEKAESGEIIYVLRHYIQHPGTRKVQLSGYGVELAIKSTEYKAMDDTKVEANNSSPKTDDGIAEEVQGFYFDRLMQMYPDLKENLVDFRKHLIESTHEMVPLKVWELQDLSFQAASKIVSTPVYEALKVLRDTSQNFPIKARSLTRIALNQEMKKEIEENQKHLSETFGIHPGDASLYINGLHIDLDVHNSFSILETLKNEGKTLNGLSALGINNEDLSKFLRIQVHSGDENYALDIRHSSITWINDIETDHMYSPWPSSVQELLRPAFPGVIRPIRRNFFNLVLFVDPVQEYAADYVKLAELFYRHNVPLRIGFVFVVNSDEESNTGEDAGAAFLKAFNYIVEESDSAQAFSSIINMYNKVDDGETLTVDMIKSVLKYDLPKMDIEQVMGLHSEYSNKLKAGATFYKKSGLGPLPQVLFNGVPFNSEEMDIEEMETVILQKILDATGFFQRAVFMGLLSDQLDAVDFLMDQPSVVSRINPSILTSEKNYINFISTPVAAKYTLHEFDTFSFLDSQDKSAVIAEHMKYLTKEDEDVIHGVTIWIIADFDKPSGRQLLAKALKHMQKTSITRLGILNNPTVKMTEENTLISRALWASLLTQKSQNMLKFFKRLAKEETAEALLNGRKIKDFIVSEIDDDAFEKKYNTMGLDVLRTQELYCREVLKLLPGQMATVSNGRLLSSIDADEFSEEDFHLLEKITYSTSAEKIKNLVKKTTTLPNRAASDLVMKVDSLLSSVPKGESRQDVNLIKQKHSLVKVEPEDAGPFFDVFAIVDPLSREAQMMSHFLIVLGRLINMKLTMFMNCKSKLSEMPLKSFYRLVLEPEVTFLRNNSLSMGPSAKFLDMPESALLTLNMITPESWIVEAVQSSCDLDNIHLQDIDGIVTANYELEYLLLEGHCFDVTTGQPPRGLQFTLGMKNDPVMVDTIVMANLGYFQLKANPGAWTLRLREGRSEEIYHIFSHMGTDSPSDQEEIIVVLNNFNSKIIKVHVQKKPDQIHADLLSSEPEEKSGLWNSLMSFTGAGNIEDKEKKHDVLNIFSVASGHLYERFLRIMMLSVLRNTKTPVKFWFLKNYLSPKFKEIIPFMAEKYGFQYELVQYKWPRWLHQQTEKQRIIWGYKILFLDVLFPLAVDKIIFVDADQIVRADLKELRDFNLGGAPYGYTPFCDSRKEMDGYRFWKSGYWASHLGHRKYHISALYVVDLKKFRKIAAGDRLRGQYQALSQDPNSLSNLDQDLPNNMIHQVSIKSLPQEWLWCETWCDDKSKEKAKTIDLCNNPKTKEPKLKAAARIVPEWTEYDTEIRQLLKDIEEQSKNITASSGNGLKHDEL

SEQ ID NO: 4657 - protein, 1451 aa, Anopheles sinensis
MDSTVPPSMRRFIRSNFGIFVILVASFLAFPSVRGESKSHPITTQLSAKWGITPAQLEIAEFIDEESSNSFWDFVELLNNVPGGLYRLETEEKRYQKSIELASEILGDGQINLLKLALSLHSFSPKVQAHLQVANEVLLKGDCETTIFASVNGKVACEVADLRSILQAGGRDSSTVETFAIDHIYPGSENNSLTVVLYGEVGTREFKEFHDAIRLATDRGTVRYVLRHYVRKVSSRKVRLSGYGVELHLKSTEYKSQDDSPRAQDPATASGDDAASEEELEVEGFDFAQLKKRFPHLTHSLDRFRNSLLEKHEEIAPLKAWEFQELGLQAAQRIAEMQGDEALQMLQFTAQNFPTQAKSLLSQTVSEDFKKEMRHNIEVFGRNLNLQPPDSALFLNGLFFDAETIDTITLLDTLRSEMRVLEGLNRIDIRGRSATPLLGLDLSSSSKEFAIDIRDSAITWINDLETDAQYRRWPGSLKDLLRPTFPGMLRNIRKNLFNLVLIVDPIAEDGAGRDIVKLAESFVVHMAPVRIGLVFKSGEGEDYRALTCAFNYVQQKKSATEALGFLTDLFAATVDLNVIRYADVRAVLRKKFNRLKLEEVDEILGEDSDFDYGRQLAQEFIDRLGLKTVPQALLNGVLLPQSTLNSEEFEETILTEIMQQTPSLQKAVYMGDMHDGEPVIDYLMKQPHVMPRLNQRILSQDEPQFLDMSGRAHPDLEDITALGQLSNADLTATLMKNLKYFGGKSTYEKFLGYRVHFLTVWVVGDLQEEATRKQLKNALKFMKSSSGTRVAFIPNVDGKDAARSELKKDLNALVWASINTLEVDETYDLVMKLLDRYTDTAGSSDFPGTLVPDSVLGFLPATQMHLKMLRVYCQRVLKLKASTGTVMANGRLLGAFEAGEFFDEEDFSLLESFNGLQYTDKIRAAMKQATAADSDSEVPPITSDTIMRLVSILVPRQQSKSRYTIPSDVQESRTVVKLPAKRSDQPFFEVVAVLDPASRGAQKLSSLLLLLRDVVNCQMKIYLCAIDKHSDMPVKTFYRFVVEPELRFTGDGRLSPGPSAKFVGLPANPLLTQSLNVPENWLVEVVRSVYDLDNIKLSEINGPVHSEYELEYLLLEGHCFDSATGSPPRGLQITLGTEDRPIIVDTIVMANLGYFQLKANPGAWILKLRHGKSADIYDITSADGPNTVHAGESTRVIISSLRSHVLKLRVTKKPGMAGVDLLGDEKDGAGGGGVGGGIWDSISSIVGTGDGGTGGAGETEVLNIFSEMEGFRFWKQGYWKNHLQGRRYHISALYVVDLKRFRKIAAGDRIRGQYQALSQDPNSLSNLDQDLPNNMIHQVAIKSLPQEWLWCETWCSSETLQYAKTIDLCNNPLTKEAKLTAAQRIVPEWKDYDAEIKRLQAKVDDKEHEEQTAAAAAAAAGAGERITKADAGSNVHSEDDGSDPETRHTEL

SEQ ID NO: 4658 - protein, 637 aa, Carlito syrichta
FLGPLHEGIYAEDFYLLERITFSNLVEKITDIVANMEIDTKNMSDLVMKIDALVSSLPKRASRYDVTFLKENHSIIKMNPQENDMIFEVIAIVDPLTREAQKMAQLLVVLGKIINMKIKLFMNCRDKLSEAPLESFYRFVLEPELILGANDMSSLGPVAKFLDIPESPLLTLNMITPEGWLVEIVHSNCDLDNIHLKDIEKTVTAEYELEYLLLEGHCFDTRTEQPPRGLQFTLGTKNKPVMFDTIVMVNLGYFQLKANPGTWILKLRQGRSEDIYQIVGHEGTDSQPDLQHVIVVLNSFKSNILEVQVHKKPDKIKEDILSDKDERKGIWDSIKSFTLRLHEEDKKEKDVLNIFSVASGLLYERFLRIMMLSVLRNTKTPVKFWFLKNYLSPTFKEVIPHMAKEYGFQYELVQYKWPHWLHQQTEKQRIIWGYKILFLDVLFPLAVDKIIFVDADQIVRHDLKELRDFDLDGAPYGYTPFCDSRTDMDGYRFWKTGYWASHLSRRKYHISALYVVDLKKFRRIAAGDRLRGQYQVLSQDPNSLSNLDQDLPNNMIYQVAIKSLPQDWLWCETWCDDESKQRAKTIDLCNNPKTKEPKLKAAARIVPEWVEYDTEIKQLLDHLENEKKNAILTHDEL

SEQ ID NO: 4659 - protein, 1514 aa, Ctenocephalides felis
MRLSVLLLLVGSTHLWTTGILAKDIKSKTVTSLIHAKWKSTPIVLEASEYLADENPDYFWKFINVICNLTTPLSKLPNDEARYNAILETAKTMLTQSELGLMKLALSLHIYSPKIEMYAQIAIDRNIPTDCAIVLDINNNLFCNLEDVDKYLKNEVENVVELFKIDHYYPNSCNCSNMVILYGELGTPEFSKYHKIFSKKASDGQINYIVRHYIKDRGNRKLRLSGYGVELQMKSTEYTSQDDSLQLVNDTHSEMNPEEDDEIDGFNFKQLRNLFPEISQNLSKYREYLSESTEGFSSLKAWQFQDLGLKAAARILSSSIDEVLAVLTYTAQNFPTQARLLLRNQVTVPVSEEIKYNSEIFLANLNLQPTDTALFINGLFCDIDTMDIFALVDVLRSEVRTTERLFKIGITSSAIPLLSLELSSNSESQKGFALDFRDSAVWWINDLENDRHYSHWSSSLMEMLRPTFPGMLRNVRRNLFNLILIMDPTELSSRPLLKIIESFVIHKAPVRIGIIFFLASEEDKERHSSGLALLCAYNYITEKRDSREAIGFLTDVFARIGEGEDLTISDIRSELERKFKSFDLKDVFDEESSYEYGKQLAAEFISRAGMTTRQQALLNGVPLPTAQLNSDEFEEAVLTEILHQTPIIQKAIYKGDLQDHHNVVDFLMSKPHVMPRLNQRILSTEDNIYLDMSGTSYTNITNVPFLLQLNNADLTATLIDNIKYFFPGKRNEKDSLMYTTLWVVADLNTNSGRKILLSAMKYMKSSGVVRLAFIPNAEVKEKYDINKLVLAALETMAPVEAEDYIMKLLQQRPQEYSVDDLGFSTFFKKAIVEQDANLRVLRVYCQRVFNFPISARGIIYNGRLIGPLNDNEQFYIEDLALLERFSNMMYGDKLKAILKNGKEFQDGRLTNDVIMKTVSLLGSRTQVKSRFEIPKVKEHHSVIKIPAKDNENIAMELWAIVDPVSHGAQKLGPILNTLRKILNCNIKIYLNAAEKYSDMPLKNFYRFVLEPEIQFTSSGKATPGPMAVFNRIPTTPLFTQNMQVPDNWLVESVKSIYDLDNIRLQDVDSVVHSEFELEYLLLEGHCFDSGGSPPRGLQITLGTSDEPLLMDTIVMANLGYFQLKANPGAWLINLRAGRSKDMYDMISVDGVDVSKSSDFRILLLSFQTKVIKLRVAKKSSMVHLDLLGDDDSQHGLWNSLTSSFSKGEADETLNIFSLASGHLYERFLRIMMLSVLKNTKTPVKFWFLKNYLSPAFKDFLPLMSKEYEFEYELVQYKWPRWLHQQSEKQRIIWGYKILFLDVLFPLSVKKIIFVDADQVVRADMMELYNLDLKGAPYGYTPFCESRKEMDGFRFWKQGYWKNHLQGRRYHISALYVVDLKKFRRIAAGDRLRGQYQALSQDPNSLSNLDQDLPNNMIHQVAIKSLPQEWLWCETWCDEDSKSEAKTIDLCNNPQTKEAKLSAAVRIIPEWSSYDNEIKTLQNKIDASHLAEDIDGNANQLYDTDDFISSWHSEL

SEQ ID NO: 4660 - protein, 1408 aa, Tupaia chinensis
  MOD_RES (909)..(909): Any amino acid
  MOD_RES (1141)..(1141): Any amino acid
MPSGLPVTVSHGLVELLAERRCLHVLNRAPKYRVRHSFKYRALVSIATLYRGNWQARHQLSFLRGVSVAEMGSGTDIHTPFQTRTCIFTADDMGFRSINALHIKQFENLSFQAASQIMSTPVYDAIKLMKDISQNFPIKARSLARIAVNQNMREEIQENQKDLQDRFEIQPGDARLFINGLLVDMDVYDPFSILDMLKLEGKMMNGLHSLGINGEEMSKFLKLNSNIQDYTYVLDIQHSAIMWINDLENDDLYVTWPTSYQELLKPTFPGNIPSIRRNLHNLVLFIDPAQEYTLAFIQLAELFYYHAIPLRIGFVFILNTDDEVDGTNDAGVALWRAFNYIAEERDVSEAFVSIVHMYKLVDDQNILTVDNVKAVLQNEFPHANILDVLGIHSKYDAERKAGASFYEMTGLDLLPQALYNGEPFSLEEMTTEELQMAILQKMLDASIHWQKEVFMGTLNDRVNAIDFLMDKNNVVPRINSLLLSTEQEYLNLISTSVTADVEDFSTFFFLDSQDKSAVIANSMYYLTQEDDVISAVTLWIIADFDKPSGRELLYKALKHMKTSVHSRLGVIYNPTSKINEENTAISRGILTAFLTQKNRLLRSFLMKLAKEETANAIYSGEKIKTFLTEEMDKNAFEKKYNTIRMNIFRTHQLFCQNVLGLLPGEIGIVSNGKFFGPIDEDFYVEDFYVLEKITFTNLVQNIKGIVENMEINSKNMSDLIMKVDALLSSLPTRVFRHDVTFLKENHSIIKINPLENGTFFDVIAIVDPLTRGAQKMAQLLVVLGKVINMKIRLFMNSRGKLSEAPLQSFYRFVLEPELMSGVNNVPSLGPMAKFLDIPESPLLTLNMITPEGWLVEIVHSNCDLDNIHLKDMERTVTTEYELEYLLLKGHCFDTLTEQPPRGLQFTLGXKNKPVMVDTIVMANLGYFQLKANPGAWILKLRQGKSEDIYQIVGHKGTDSEPELEDVIVVLNSFKSKILEVQVQKKPDRIKEDILTEKDEKRKGMWDSIRSFTIRLHKENKDEKDVLNIFSVASGHLYERFLRIMMLSVLCNTKTPVKFWFLKNSLSPTFKEVIPHMAKEYGFQYELVQYRWPRWLHQQTEKQRIIWGYKILFLDVLFPLAVDKIIFVDADQIVRHDLKELXAFDLEGAPYGYTPFCDSRTEMDGYHFWKTGYWASHLLRRKYHISALYVVDLKKFRRIAAGDRLRGQYQALSKDPNSLSNLDQDLPNDMIYQVAIKSLPQDWLWCETWCDDESEHRAKTIDLKWNGTHSILLCVLLGLVDIHWLCTELCQSLKMALRFGDALERFTGCRTQLYLWLSVSTVKECKANSSKEESKRAALSRLVQFMLSLIISVSVNGNFILSVAEANELGFSILTARIRPSADPVSVAFSWFIYVYKQKEEAQPRWHSL

SEQ ID NO: 4661 - protein, 1283 aa, Rozella allomycis
MSFLLFATLLFQLFLLISAYSVNSRLEAHWLNSLTLEAYHFFSFDQESFISFLSTAHNQKQEYENILTFTRKKYPLLEPYLNFTLSSRLFAPLVSSSLITCNNNSLIAAKCNDDWNCYSSISDISNLKCTDIAGRFNNIEFVDFIKQNSHLKLHLLNNLNSEFNDALNPSKFALSGYGVELVYLVLDDLKFKDFINDKEFNKLIENKDEKIDENVNELLSDPEIHTLNSTENETAINGIFSILKDSDNFLNDLTTISHNYPIVLPHLIKCSKRKKIRKYERDVLFLNNIPLDMNQINLFHYLNSIKILEVWNKDIGRIIKEFRGMKLISPRFDIPVEKCITISDVERDKRFKHFSRDISRIFYPFNGPLIPIRFNMATLVYVFDISDNQKYKEILDSLVFLVQNTIPLRISILPFATNDFDLINLVSISEISSPKKIIEILKDLKSNKGKEEINEKIKKPNSIYSSVANAFEKDLEFFQSRFESLDLKTNFYELILNSDKKFYFNYPLFFKSINYLEFSNLKHVLWIKEKSLPGKIMIFANSKISFKFELKKEFNLILDEFLDYKLAINSFAINGRIFELEDSELTREIFDLALEIYLYETRENNFGDEKWCTKSGEKWCIKNECVDCGCDYRDEESVITSTIPANDSTIPANDSTLNNCKSNSLIAVALGTLQNQFKLLPTTDERNKEIKFDLFVNQKCLFCFKWISTPLSKSTLSLSKIFKELTTSDEIGVSFGFNANNLQKFESNRIYRFVFTSKPQFDLENKLIIDYAKFEKVPMETLFTLNYDVIHEWIVVPEKGEDDFDNIKLSLLRRNVYSIYKLSNILTQGQAIDETNMDYPKGLEIQMGINKIKNIQASNGESVNTSNIDTIVMYNLGYFQLKTNPGSWFISLCNGKSSDFFSITFPTNILVNKFHGSSVLLKLKRNKGKEYLDFNKEPSNVSIWKFLANKIPFLKNENKSKAEINIFSVASGHLYERMLRIMIKSVVSNTKSSVKFWFIESFLSPTFKKTIPFLAKEYNFIYEMVAYKWPTWLRDQKEKQRKIWGYKILFLDVLFPLDLDKIIFVDADQVNFSFYLYLDYLHGAPYAFTPFCDSREDMQNFRFWNHGYWKSFLGDNLKYHISALFVVDLKRFREIAAGDLLRQTYHSLSLDPNSLANLDQDLPNHMQQFGLKIHSLPQEWLWCETWCDDKSLSTAKTIDLCNNPKTKEPKLDRARRLIPEWNIYDNELTNLLLFIQKALEIYPQNYLLENWNYIRQNKFHLELYPAVYNFKPHLSHFLRWTRD

SEQ ID NO: 4662 - protein, 1521 aa, Macrophomina phaseolina
MRVGQWLLSSQTALLLAALSPHSVTASPPINVALQARFNSPPYLVELLETAADENSTAYFPLLDRIANGYFDSQSTEKELYESFLKLLQDDGHITDPDALSSFQLALSIHTAAPRIEAHYQFYNTSVEPSLEAEQGEECDSWVLLDGKQYCSPELDKEHGLVTDARTADLPFDRPLSLERRSVASILYADITSPSFRKLHKTVIKTAEAGASSYKLRHKPPKNFRYEPQAVHGYGVELALKRTDYIVIDDRQAEEAADKPASDAAQTILQDQEVTDLKPLSESELKGLGLKAGSFVMGSEDPLDTLLKLSQDFPKHSSAIAAHEVSEEFLKEHKENRAAILPPGYNILWINGVQVMPRDVDAFALLEHLRRERQIINGVRKLGFAPPEAIGVLSNNAIAKAKDNDEPQRYDWRDAIEGGNVIMFLNNLEKDKRYAEWPESLRALLQPTYPGTLPSVKRDIQNVIIPLDLTHPLDTTLLVETLQNMVKRKLALRWGLVPSTKNIRAERQAHVVYYLQEYYGLGAVLQYLEHSLKLKEITEPSKTAFYTVTEGAKIRGNRVAKTFEEIFEEKSVVDRVKGASDWLRRLAADGNSPPFFVNGVALRRNDEWLSTMSMRVSQDLSMIQKGVFEEQFDQDGDDWLPEVFLANSTLRRNPLVIPEDEKDIKHLNLAQIYAEHGDLIERLPRFNAADDSEWFQWAQLIVLGDFDSNAGANLLADAYQFSSNHGDLETIFIHTGDVDHRSRMAYLLYKNAGKTEMEDLPEDFEPTAQEIKEVEEFWSSMKPLIRALDGDAGRESLVLNGRTIGPLRKRRPLTEDDLENLLKYERKKRIEPAARAIIDLGLEKKIQSPASLAQFTSLVALSTVSDIPEGIFDSPPTTRRDVFKFWNDTHTCIKTGDIDKATIQIVASVDPSSEAAQRWLPIFKVLSELSGVHMRLFLNPKERLDELPVKRFYRYVLDSKPSFDEDGSTKTLQAKFEGIPSEALLNLGLDVPPQWVVAAKESIHDLDNIKLSQLKGQSSIDAIYELEYILIEGHSRDMTTGMYPRGAQLDLRTASNPRYADTIIMANLGYFQFKANPGFFSIELQPGRSQEIFRIDSAGTLGWSPQPGDRTQEIALMDFKGVTLYPRLSRRAGKEDEDVLETPSSMVENLAAKGAALADGILSKVGLKGVKTGGMIQKTLRSVGLSTDLKAASSPHADINIFSVASGHLYERMLNIMMVSVMKHTKHTVKFWFIEQFLSPSFKSFLPTLAAAYNFDYEMVTYKWPHWLRGQKEKQREIWGYKILFLDVLFPLDLDKVIFVDADQVVRTDMYDLVTLDLGGAPYGFTPMCDSRTEMEGFRFWKQGYWKNFLKGRPYHISALYVVDLNAFRRLAAGDRLRQQYQQLSADPNSLSNLDQDLPNNMQAVLPIHSLPQEWLWCETWCSDESLKDARTIDLCNNPQTKEPKLERARRQVPEWTVYDEEIAALARKARAQGEAGAAAGVVVDEEDRELLEKVERQAQEVEREREEEKKKKEEKTHDEL

SEQ ID NO: 4663 - protein, 1587 aa, Arthrobotrys oligospora
MWFSTLRTQQSSRRALLSGALALASLQGVYSRSQPQDIEEPGTVKQWEGVNLSLKTPWNGGPYILEILECAGLEEPAFYFTLLDLIKSGTIKLVDSDKEMYESVVNYVETHQLLDHRFIPTWKFCISLRETSPRIEAQYQFYSNKVTFPKGKSCPVWFDDGETQSCNSGDISKVKPESSSASKLIPFDRQNKEDTRKGLVTFYIDIIDKGFPTAFSEMSEAADKAGIAYKIRYKPSPSLKNPKPVGLSGYGVGLSLKKTDYLVIDDRDAQEGSAPASDASSTASSAKPSPTYKFRTPENLKPGEKRFPLWDLVDVDDPVRDLRDLLPLSQTNIGDIGFKTANFITKSGIFPPDMLMKILSDYPKYAHTIGTMGGVLNEWVQEHSDNREKFVPAGYNLMFLNGLALDPSEVNAASLIKLMRRERHHGIQIRELGLNQEETHDLIGHANITDAKLSPEQPRFDYREQAGEENAIIWLNDLAVDERYKDWAPSIQEIMVHQYNGELAGIRKNIHTLVMALDFSNREDLKVITERLNIMVTREFALTIGIVPIVRNNLGSANSRIFRALLQSYDLETAVSYIRDGLEADKNGVRYPAPEYVHHAIKGRTRLEGAPEVSLSAVMESKQFQEYARAAGNWEARFGIVDRPYPFLVNGLLDYYNNEWIRTLTQIFPKDVQRMQEAIEDGKLTDDDDIREFLLNNPLPKKSAAIFPLSGKLDLFNLADLFKSNPEIFEKLPHFPGKLVEETETSSADVWVIGDFDTEDGHNLLAEAAKLQASRPGISITAISNPGGKTKVQTTSALLHSLVGNTEILKITGFLQKIIEEIKPEKDFMDLKVEGQSVFGGDAKTEGWAIPNKVAAEKFWSEAAAVVERIFGVKPGQKAVLVNGRLVGPFNEEVKWTKDDIETLVRVELQTRINPILNAAKSIGVLERLRAANYKGRLTSTLTELLEGEKTNLAISGMSVRTNRAMGWKRSKTVLTAGDPIWSTFRFIVSLDPVSEVGQKWAPILRVLMSMDGVGVYTFLNPNDNLREVPIKRYYRHVLSSQPKFDENGDILDPKAQFVGLPDQTLYSLSMDVPPSWLVTPSETIHDLDNIKLQTFKERFGTSDLNATYVLKSILIEGHSRDTTHNQPSSGAQLELGTSENPLMQDTIIMSNVGYFQFKSNPGHWQIRLKPGRSSDIYTIQSLGGDGFNPSSNAEDDVKDITLMSLNGVTLFPRLKRNKGYEKVDVHSSLGSTDGTVEKAASFAEGLLSKLGLGKKKETAVAKAPAEINIFSVASGHLYERFLNIMMISVMRHTKHTVKFWFIENFLSPAFKDFLPVLAKEYGFDYELVTYKWPHWLRGQKEKQREIWGYKILFLDVLFPLNVDKIIFVDADQIVRTDLKELVDLDLNGAVYGFAPMCDSRTEMEGYRFWKTGYWKQMLGELKYHISALFVVDLKVFRQLAAGDRLRQQYHQLSADPNSLSNLDQDLPNNMQRQLPIFSLPQDWLWCETWCSDESFKTAKTIDLCNNPMTKEPKLDRARRQIPEWTEYDDEVAALAKKVKAKGVENMREALVQKEALGEQEKGVKEEKTEEKKDEKAADAEKPKDEL

SEQ ID NO: 4664 - protein, 1525 aa, Boleophthalmus pectinirostris
  MOD_RES (860)..(872): Any amino acid
MRMWLTCVLLLSLLCETSGSVDSKGVTTTLTTKWTETPLLLEASEFLAEESQEKFWDFVEANENIEGVHDDTDQAYYELIVKKAGALLSSVQINMLKFALSLRVYSATIHSFQQIASNEPPPAGCSAFFSVHGVKTCDTESLGDLLKTASERPKPYLFKGDHRYPGSSPDAPVVILYAELGRQKFSELHQTLVSKVHKGEAAYVLRHYVAKPSNKKVHLSGYGVELAIKSQEYKAKDDTQVQGVEVNATVIGENDPVDEVQGFLFGKLKTLYPELKEQLKELRKHLIESTNEMAPLKVWQMQDLSFQTAARILAAPAVDALNVMKDLSQNFPTKARSITKTVVSAEIRKEIGENQKFFKGNLGLQPGDSALFINGLHIDLDAQDIFSVFDVLRGEARVMEGLRSLLIETPYIHDILKLNVQPSESDYAVDIRHPAISWINNLETDHRYSSWPYNVQELLRPTFPGVIRQIRKNFHNLVIILDPTQDNSADLLNVAEMFYSNNIPLRIGLVFVVSDEDDVDGMKDAGVALVRAYNYMCDEVNSQSAFETVMSMFNRVPPGGQLTVTDVVKVLEKRFPYVEISSVLGADSTYDTNRKEAKAYYAQTGVGPLPVVLYNGIPYQREHLDPDEMETVTMQKILETTTFYQRAVYLGELATDHDVVDYIMNQPNVVPRINPRVLSTSRTYLDLSDTNNYFIDDYARFSSLDVKEKNTAIANSMNYMTKKDDGYIRPVTYWVVADFDTPSGRKLLYDAIRHMKSSNNVRLGMINNPSSAVSTETSRVARAIWAAMQTQSANNAKNFITKLAKEETAAALEKGADIGDFAVGGMDMALFKSAYEDSKFDFLLSHAAFCRDVLKLKKGXXXXXXXXXXXXXNGRIIGPLEDEEVFNQDDFLLLESIILKTSGERIKSKVQQFGIEEDRASDLVMKVDALLSSQPKGEARVEYGFADDRYSAVKIRPKEGDIYFDVVAVVDPVTRDAQKLAPFLMVLKQLVNVNLRVFMNCQSKLSEMPLKSFYRYVLEPEVLFQADSSFSPGPMAKFLDMPQSPLFTLNLNTPESWMVESVNTRYDLDNIYLQEVDTIVGAEYELEHLLLEGHCFDVSSGQPPRGLQFTLGTASEPVIVDTIVMANLGYFQLKANPGAYILKLRKGRSDEIYRIYSHDGTDSPADSDDIVVVLNNFKSRIIKVKVQKKPDKFNEELLSDGTEEVDTGFWKSITRGFTGGGKTDEPKPEKDDVINIFSVASGHLYERFLRIMMLSVLKHTKTPVKFWFLKNYLSPTFKEFIPHMAKEYGFQYELVQYKWPRWLHQQTEKQRIIWGYKILFLDVLFPLAVDKILFVDADQIVRTDLKELRDFDLEGAPYGYTPFCESRREMDGYRFWKSGYWASHLAGRKYHISALYVVDLKKFRKIAAGDRLRGQYQGLSQDPNSLSNLDQDLPNNMIHQVPIKSLPQEWLWCETWCDDHSKKSAKTIDLCNNPMTKEPKLQAAVRIVSEWTDYDQEIKRLQNRLHEKTAQDHGPQKSTDEHTEL

SEQ ID NO: 4665 - protein, 1510 aa, Phyllostomus discolor
MAKAANVVRLLLGNTVLWLSLLRSGTASASKAVTAHLAAKWPETPLLLEASEFLAEESNEKFWQFLDTVKELTIYKQTESDYSYYNLILKKAGQFLDNLHINLLKFAFSIRAYSPAVRMFQQIAADEPPPDGCDAFVVIHKKHTCKINEVKKLLKKAASRPRPYLFERDHKFPTDKENLPVVILYAEMGTRSFGKFHTVLSEKAQNGEILYVLRHYIQKPASRKMYLSGYGVELAIKSTEYKTLDDTQVKAVANATVEDEIETNEVQGFLFGKLKERYSDLRANLTAFQRYLIESSKEMTPLKVWELQDLSFQAASQIMAAPVYDALKLMKDISQNFPIKARTLTKVAVNQQMKKEIQKNQQDLLDRRDIHPGDARVYINGLRVDADAHGPFSVLDTLRLEGKRMYGLQKLGLGREDMSKFLKLNSRVRDSNYVLDIRHSSIMWINDLENDGFYAAWPASCQELLKPVFPGKIPSVRRNFHNLVLFIDPAQEYTLDFIKLAENLYYRRVPLRIGFVFVVNTDDQVDGTSDAGVALWRAFSCIVEEQGALQAFKSVARMYQKVKNPNILTVDNVKSVLQNKFPHANILDILGIYSRYDDKRKAGASFYKTTGLGPLPQALYNGEPFKYKALGIQELESALFQKMTDVTVYLQKEVFMGTLNDQTNAVDFLMDKSNVVPRINHLILYTEWQHLNLISTSVTADVEDFSTFSFLDSQDKSAVIAENMYYLTQEDENAISSVTLWIVADFDKPSGRKLLLNALKHMKTSFHSRLGVIYNPTSKINEESTAISRGILAAFLTQKNSFLRNFLRKLAREETATAIYSGDKIKAFLIEGMDKNSFEKKYNTMGVSLFRTHRLFCQDVLHLHPGEMGIVSNGKFLGPLDENFCAEDFSLLEKITFTNLAENIKDIVENMAINSKNKSDLVMRVDALVSSLPLRASRHDITFLQEHHSVLKTDPQEADVFFDVVAVADPLTREAQMMAQLLIVLGKIVNMKLKLFLNCRGQLSEAPLKSFYRFVLEPELTSVANGIIEPGAKFSDIPESPLLTLNMITPEGWLVETVRSNCDLDNIHLKDMETTVVAEYELEHLLLEGHCFDVVTEQPPRGLQFTLGTRSQPVAVDTIVMANLGYFQLKANPGVWILKLRHGKSEDIYQIVGHEGTDSQSDLGDVIVVLSSFRSKTLEIQVKKKPDKIKEDILTDQGEKKGMWDSIKSFTRSLHKEKDETETDVLNIFSVASGHLYERFLRIMMLSVLRNTRTPVKFWFLKNYLSPTFKEVIPHMAREYGFQYELVQYRWPRWLHRQTEKQRIIWGYKILFLDVLFPLAVDKIIFVDADQIVRHDLKELRDLDLGGAPYGYTPFCDSRTDMDGYRFWKKGYWASHLLRRKYHISALYVVDLQRFRRLAAGDRLRSQYQALSQDPDSLSNLDQDLPNNMIYQVAIKSLPQDWLWCETWCDDESKQRAKTIDLCNNPKTKEPKLKAAARIAPEWVEYDAEIRRLLDRLDTGKHALLTHDEL

SEQ ID NO: 4666 - protein, 1568 aa, Cavenderia fasciculata
MYIVLVVFVTLLAATQLASAEDEHQKKSTYVALDSNWNSTPLYLEAREKVDESLYWKFIQSFNDACVKANKDSTQMTDKEVYDIIIDTSKEILGDDSAYLLEFLIADLSIRTYSPRVQTYRQLYETNSKYNNKQNEFIQLNDITLNIKDKESITTIEYDKSKENEVYSYDTIYPSTLTHSFDHITMMQEEEKDKRVVIYYADITSKDFSAVHKYLIKLYQEKKIIYVVRFYVPASTDHVRLQGYGYSLSIKSLEYKVMNDAVIQNEGGDSNTAASIPNEDVGGFNFHVLQKRHPDLTKKLTTFRSYLLAHQQQAELKMWEIQNLGLQTAQKIVTSSNPMQSLVYISQAFPSYASSLSRISVNSTLKQSIANYQKIFTEGENQLYLNDRVIDITEEFDLNPLGLSETILNELKSMMNVKKIGIESNLISKIASTFMAPNLVRFNMLPENKDVLITLNNLETDPAFSKWEKSLSDLKNEAISYSSIFKKKNLFTLVFVVDLDNADAFQTIAYAQNLANNNIPCQIAIVFKTSNSDRLRDNLTSEKIAKIFLTFRSKMGIKAATFFVNALNYYKRSYGMDQVTMQLVSSAFNTVVSQMGNNVGRLQTIVEATTYNDLLKEANDFIQQKAISVFPQIFMNGLLLDAKKSIAESINHICFEELRQVRKLYLEGIITDLDQDYYSIMMDYHATHESLLESLNPLVVPSDINPVEFRSLSPPNSNKKIEKLGQDLLAEQLHWISATGAEDEVKLISHMIVGDFDHDTTVQLAKNAMDRLQKGSPKDVRVAFVNANTKSKLGRQLTFANTVEEATSILSGVTGDSKSLDETKIENISVFSKSVLGLACQFNSYILTNGRLITVSHNEEDIFNDFFMLEKFEIGKARSVKDILPENPKVRGVELTKPRDKSNLIMTLVSVFGMQSSNTDVVRKQVPTTVTPSFRYEPKANANITPLLRFTMVVDPLCKTAQKMVSIVNSVASHYGIAVDVFLNPLQQLGELPLKSFYTYVSQLHLNFDDAGKLSKHYASGVSSNLPDNRVLALAMDTPSTWIVKPLVAKHDLDNIRLKDLGVKEPTLNALFQLEYLLLQGFAYESRIGVSPPAGLELVIDSLGTLQHQDTLVMGNGYFQLKANPGYWKLALLGRGKNIMNLLNSDSKASDTDQVHPVSYLTVATDSYRGNSIYLKLSRKAGQEHTPILPPVTDQPKNTAPQKVAEEEAEDDKGFLSSIGSLFGGNNNNKPSARVENKKLPASNETIHIFSVASGHLYERFLKIMMLSVKQNTNSPVKFWFLKNYLSPEFVEFVPYMAKQYGFEVELVTYQWPTWLRAQTERQRIIWAYKILFLDVLFPLSVNKIIFVDADQVVRADLRELWDMDLNGAAYGYTPFCNSNPDTEGFRFWKTGYWRDHLRTKPYHISALYVVDLNRFRRIYAGDQLRMTYDQLSRDPNSLANLDQDLPNYLQHNLRIHSLPQEWLWCETWCSQSSKGKAKTIDLCNNPLTKTPKLENAVRIIDEWTDLDNEAKECEKKWKLEKESKKQQVLPNPTTSETQTTTDKPTTTTIDPEQAIEAIDSASIYMDQ

SEQ ID NO: 4667 - protein, 1500 aa, Elaphomyces granulatus
MASVRGFIVPWPLIFFVLNVALPLLALAGPLVNVALQSSFNAGPYLLELLETAAEENSTSYFPLLDRIAEGVFEDVVTEKELYDRFLKVLLGDGHLQDAESLSSFKFALAIRSAAPRIEAHYQYYNTSVQSSLMSAQDAACPVWVHAGGKQYCSSTLERAQQDVSGQSNPRDLPFDRILGDISAPPSVLYADVASPMFNEFHQKLSSLAREDQISYRVRYRPSQHSDLRPLFVSGYGVELSLKRTDYIVIDDRDAQAKDERGSKKNQATSSVEEELKEESPADLRPLSSSEVARLGVNAASFIMGSADPFDTLVKLCQDFPRHSSTVAGHNASENFLNMARSGSSQALPAGYNAMWINGIQIGPRQIDAYSLLEHLRRERKLIGDFNKIGLSTLEVIDLLSHPSITESEVNDEPPRYDYRDDVEDGGVIIWLNDIEKDKRYEGWPTSSLAILQRMFPGQLPNVRQNIHHVVIPVDLANSDDVHLIVEFLLIFIRRKVPVRFGLVPVIHSQSAISQFKIVHHLHETYGLSALMKYLEESMSKKKFTTADKSAFQAAITDREIRSGATSRRFEEIMQTNEFENVMSRTSAYLKRLDCDGKAPLALVNGVVMSRDENWMQEMPMRLTKDVQSLQLLLTDGVFEEDTWLAGHFLSQSALSRSEWIIPKDPNDIRIINLAMIASSNGDVLNTLPRVASGDDENGTIKMVHIIVISDFNTKQGLEFLTATLNFCQAHPEADVILLHNPDTGSSKSGTSSRLYHLRDKGQIDAAQLLGEINALPDVSGWNLDEDAADEISSFWEGMRPLVMDFGFAPGKSGIVLNGVAVGPPPSNVVVSVREFEQLLAYERLKRIDPVSKSLTALKLDSKISDPFDFAKITSLVALASISDIPEGIFESGSKLRVNILTEWIHDFAVIDVTDSLDAKINVIAAIDPTTEQAQRWIPILKVLSKLVGVNVKILLNPRDQIQELPIKRFYRHVIEAEPRFDSVGALRRPGASFTGLPEEALLNLGMDVPPSWLVAPKESVYDLDNIKLSSLKEGANVDAIYALEHILIEGHSRDTTKKSPPRGVQLLLGTENDPHFSDTIIMANLGYFQFKAQPGFWKIGLKPGRSQRIFSLDSAGGLGYTPKPGDENTEVALLSFQGRTLFPRLSRKPGHEEADVLETGPKPGSAMDYVSKGLNLASGVLSSVGVNPKSESAEKHADINIFSVASGHLYERMLNIMMVSVMQHTKHTVKFWFIEQFLSPSFKEFLPYLGKEYGFSYEMVTYKWPHWLRGQREKQREIWGYKILFLDVLFPLSLDKVIFVDADQIVRTDMYNLVTLDLEGAPYGFTPMCDSRESMEGFRFWKQGYWKTFLQGLPYHISALFVVDLNRFRAIAAGDRLRGQYQTLSADPASLSNLDQDLPNHMQHVLPIKSLPQDWLWCETWCSDEALTTAKTIDLCNNPQTKEPKLDRARRQVPEWTEYDDKIAALMKHVATAESRTQGSEPQESHTGRENVEEQKDEL

SEQ ID NO: 4668 - protein, 1529 aa, Melanaphis sacchari
MAKFNEYNGYISSRYNNRSMNHSVRRKRRNKKDDTSIFYFIIGLLFVFLLFGRESENKNSKKGKYVTTMIDTKWSMVPLVLEMAEYMAEENSYSLWSFVDSISQLNPALSELENDQIKYNIALSKAGLLLSNSKLRLLKFSLSMHTYSPRIEMYAQMAADRGVQCSTSVEIDGELVCSIKELKKVLQRISAEGSKHLCETYHIDHHHPSSKNKSNIAILYGELGTAEFASYHTVLKQYAQEGFIDYVLRHFVKEKSEQKVRLSGYGVELHMKSTEYKAEDDSVVKDKNDMNRNEIEEDTSEIEGFDFKRLIELYPDKKLDLLKFRNHLSESSSELAPLKAWQFQELSLQAAQRIMSGPPQDAIQTFIHIAQNFPTQARSLANVKVSKELRAEVSKNQDSFSMGLNLQHTDTVLLLNGMYFDIDITDMSTILDSVTQELSIMEGLYSIGITDKKAISSMLALDFGSVKGKSYAVDIRDSAIQWINDLETDALYKRWPSSVDDLLRPTFPGMLRSIRRNLYNLVIVCNPASKSSWPLLKLTDSFLNHQSPLRVGIVFNVSPKTAIGLNDASVALLNAYNYIVEQTSKPLTAFKFITKIYTSISEDRDVIVDDVLSEFKKQYPKAFIDEIFGEDSDYDTARVLAKEYVAKTGFRKLPQVLLNGVPLQEKSLVEEDFEEAVLVELVTQTQTLQKAVYKRELTDTDNVVDWLMTQPNVMPRLNSRVLNTDSSKNLQLSDKHESVLKSINYITFAKKSSINPITHWIVGDFSKLSTFKLIKNTFEHLKSDSESRIGVIPNPSNDDEHTIKINKIVFEAFKQEDKLNILVKHLSQAIKVDKNHIEIINSLPEEIHFEASKIDIQSYSSFAIEALNFESGQCGVITNGRILGPFDEDEDFLTDDFALLEQHTLKGSVNKILNILKESDVLDITSDMIMKASALISSRSQTKNRHSMPDVSTKHSVIKLSANNEDEPVFEINVIVDPVSRGAQKVGSIISVLSRVLNANINVYLNCVDKNSDMPVKSFYRFVLEPEVIFDKSGHLSPDPIAKFSNMPTSPLLTQILHVPDNWLVESIESPYDLDNIRLEDVEMGVYSRYELEYLLLEGHCYDSVNMNPPRGLQMTLGTKSSPVMVDTIVMANLGYFQMKANPGAWMLRLRQGPSADIYDIISHEGSDRSPNSMDIKVLISSFRSHIIKVKVAKKPGKQSLNVLGDDDTENKGLWNSITSSFSSGSPDKSTDETINIFSVASGHLYERFLRIMMLSVLKHTKSPVKFWFLKNYLSPTVKNFLPIMAQEYKFEYELVEYKWPRWLHQQTEKQRTIWGYKILFLDVLFPLDVKKIIFVDADQVVRADMKELVDLDLGGAPYAYTPFCESRKEMDGFRFWKQGYWKTHLQGRRYHISALYVVDLKRFRKVAAGDRLRGQYQALSQDPNSLSNLDQDLPNNMIHQVSIKSLPQEWLWCETWCDDASKKTAKTIDLCNNPLTKEAKLTAAMRIVSEWKDYDNEIKKLQIKQSQHEDEVFNVETQSKGTEEHTEL

SEQ ID NO: 4669 - protein, 1876 aa, Smittium simulii
MFKTKPNSILASLWFWLTLLSLAALFSRINAESQKILSNPDVSSAQVDIINADNPIDLTNDKNYSTPPVKAIIRAPFSAPNILIELSQVIYKHDKTLFFNFIKHLNQNLDLFEKTDKDAYNAAISWIEIQLNPQIVKKNIKPDTKWLLSVINFELANHHEVPKIIAQYQYYSELVSEKFKADSKNIESSRSNYFKNGWVSWNGKSATNFNELEALVGTDTFYGDTYKDKNLNKSPILSFDHIYPAKTGNPTKIAENLAIFYSNLKEKDFGKIHDYLLHLSNLGNTVYVLRFIPDNPDVFQSQISKSSMGISGYSVELALKSTEYNVTNESSLFDIIDSEPEGSGSEWDFNLNKYNTVQTNMDKSKYLNFYDKQSSVTEDFSDDEKNTMSLKATQVILNSKSPIDMFNWIVSDFPKYAKFVSSQSSLKNLTYIAALRESSIETPLNEISLNGLVLKKKNLNIFSLINHIETERKAVVALMKLGFTTSQATGFISAPRNFDKNSKVNSGVIAYDVRDNSESKVVISWLNNLEKDSRYKTWSSNANIVYTIQSTGAAPLIARNILNVVVALDINTRFGIRLLFDTVFDSIKKNLPVRFGIIPILSSGSHTYNDQLKVCECSSISEALDASGGSKTTKQLDSPEMTVRLYYYVYHFYGIKKLSELFESIIKNAKSDHDIAKVAKSSYNSVIIKQKAQIKEKKVLKMISTLFPKSKKEEIDDFTTKFQSKYLEWDQLLSCPIVSAIMCKHRDYTSRLDLNNLNNINDLNQSKKDKASGDKTIKDVNSIVKIFASGYELSYSKDLINTLTRMYQQTCILLFRKMFMGFDINGIKDFFTYFLTEGNLKKYRSNLISSVSVLDGSVSETQKINKNTMIGVLDFSGSVDTINSKNDTPAQWINELLYIEQPQIKEASSESVKNHPLTIWIYTNLESEAAKKVIKESLQAAQQLLRSKSTSNFRVRLSLFHNLKAQDSNRNNKQKSSDDIDSEDGADDENADENTDLQDNFDNVTSDDKNNTRTKLYLLLSHFQKNQENSSSDNYILSLQYIIEYLENLDIDGITGELLIKKSSHEVDVDVANNVVSEFSNVLNNISEKDLLEINQYYLKSYQILSSMIVKYGARDELEYILRDEVSGDETAIIINGRAFPKLTASSYYNAEIAINLFKDQWENRVMGSQKLFNHLFKESENLLTRQLQDLYIVSGSIVDYYHYEYAFDDFIFNKISITRKDIFEEIYKSKETRFDIGNTDNYFAHFKAVIDPLSDDSQDWVPLLQTLSKMDGVKVSIVLNPLSSQNLQLRKFKRYVISHKPIFSSSKEGNRIELGAEFNDMPKDALLTMGMDVPSSWLVTAVSSKYDLDNINLRSIKSKYGVAALFSLKYVLIEGHASEPNKKAPPSGIQVSLSKLPASMTPSIENLKKKSNQNFDIYLGEIAKSPNDTLAGTIVMENLGYLQLKTHFGAYGFSVREGRSLKLFDLDCIGVGAYSDCLNNAGATEAQPVEDSLAKNYGIVVLDSFNGATVYPFFSKRKGMEDEPILLKELSKESGQDQKASDLNNNQLAGIWSKIKSFGSGVKAKNQINTDLDYSEEAQLNIFVVASGHLYERLMSIMIVSVMKNTKSTVKFWIIENFMSPAFKAFMPILAQNYNFKYEMITYKWPHWLNSEKEKQRTIWGYKILFLDVLFPLGLKRVIYVDADQIVRDDLQKLYDMDLKGAPYGYVPFCDDKKEIDGYRFWKVGYWKSHLQGKPYHISALYVVDLVQFRLLAAGDILRFQYQNLSQDKNSLANLDQDLPNHLQHSVPIFSLPQEWLWCETWCSEEGLKNAKTIDLCNNPMTKEPKLKRAKRIIEEWSIYDKEIEDIKLQNSKHSSVNGPNSSINESKNPEKVEL

SEQ ID NO: 4670 - protein, 1620 aa, Puccinia graminis
MKRSRGLRDRLGLLLTLGVDILAGSPPISVSIQATWQEPPMLIQVLESAALERPGLFFSSIDAVCSGWESSKRSTDQQTYEYLTSLLRSPGLLDGPGELESLAFSIALKEAQPKIEAFRVWYASLPSNLTGQSETQASESDDCKSWTLINNSRICDTSKLSELLDSNDPSEKIQSQPQVLPFDHQQGQSHENARLPIAILYASPDPSSFCPFHQVLHKASKELPSKATYIFRWKIPSAPSSSTKSQSASLLSGWGASLDIKKSEYLTLDDRPVESSSSDDPQLILDGTKQPAGRESQVDSEPAKLKPLKAAEIFDIGAKATQHVLSSPSPLTALRHLTEDFPLIAHTLVNEWVPGRISRELRLELKENMEDGIPPGRSVVWMNGLQLSSLVSLENLNLFKLVEIMRNERRWITSLTSLGINSLQARKLIVDEKLNSAMNPEAASASASGEMDASSLGARFDASDRQEGGGAIIWFNDLEKDERYSMWPTTLRAILRPTFPGQLHPIGRNLINVVLGLDLTQTQNLHNLGHVIEVFIARSLPIRWGVVPIPTKNPSQAEKMSRSFWNMIEALGPIETLKFIKEFTQDLEPESGAIDVEKFISKANQSVLSAEEESPEDPQSKEERFQVWLTKSQLYSSRLSLCSNDHSLPACMMINGRFFPMEENYRTHLQETATLHTGFIQHQVYFNLLKDDANVAEYLYDLPLVHRARNDLVFPSEARPLQFVDLVEALQSSDALAANVFFRNEAAPVKNGDPRPIASLWVVGNLDSNTGMSAVAAALGLLMKPFPNVSTQVSFVHVPSDDTEISTEISTDLSALITTSDVQKITIQDLLDKLSGHGHQAMTSDDGDSTKTEKNSELVLKKIQTKASDLPNIKNRAWFGAQEFGKAIGAKRDGIAIVINGRLLQVSSTSKLLSEDLVLLVEYETQQRINPLMEALKSLEEFDVKQHHANLPLIMSTVGFVLVGSNDGSTQTSSSEARSDKHLARNGVHSSYQHGDEAKALFDFSVVLNPTSEAAQRWSALLDTLSHRSDVAMKVWFNPSLEVSELPIKRFFRTAISNSLEFDKNGRVIPALVNFHGIPTETLFTLAIDSPPAWLALPHDSIHDLDNIMLSELPPAYSSQGVEAIFQLEHIILAGHAREVPSDIPPRGLQIVLSDLLRNQEVDTIIMANLGYFQFKSAPGIHRLSIRPGRSLELYQFEKTDSSADGNDESHQLLSLTTFNGLTIYPRVRKRPDKIGENLIQPLSTSPTTSKKGPAAEFSKLMGQNQGIDLANGASRSVINVFTVASGLLYERMAYLMCVSVMRHTQSPVKFWFISNFLSPSFKRFIPHLAREYGFDYQLVTYRWPSWLRAQKEKQRVIWGYKILFLDVLFPLEVDRVIFVDSDQIVRTDLKALVDLDLGGAPYAYAPMCNDRNETKGFRFWDTGYWKESLQGRPYHISALYVVDLRVFRTVAAGDQLRQHYQALSADPGSLANLDQDLPNNMQGILPIFTLDQSWLWCETWCSDEGLKTAKTIDLCNNPLTHEPKLKRARRLIPEWDAYDQEVAALAARIKKNNQGDLAAKITVQAGQKIEDDQDLSSDPLSESDHLEKEQEDVMLDSSGLNQENPSTLLDKEGVSRDEL

SEQ ID NO: 4671 - protein, 1450 aa, Monosporascus sp.
MKASFPEPPYLVELLETAAGENATSYFPLLDQIADGTFAGLTTDKELYEKFLEVLQKDGHISSPDALSTFKLDLSLRAAAPRIEAHYQYYDTDVEPATHDLQEKCPEWILLEGKQYCSPSLEGAGAIIAAESPFHKALAEKARKGDVSYRLRYRTDKRGELAPLPVSGYGVELQLKRTDYIVIDDRDAEAEAEAGEIQPTVPTEVNLDQEEDVTDLKPLSSSELASLGLKAGSFIMQSEDPFETLIKLTQDFPKFSASVAAHNSSDAFTQEHRHNRMAMIPPGMNVLWMNGVQLIERQIDPFTLVDSIRRERKLIKGVTDLGLTGQEAVALLGNREVTLAKSGEDQTRRFDWRDEIEDGQVIIWLNNLEKDKRYANYPKSLMALMQRAYPGQIPPIAKDIFNLVIPVDFSKPDDLSLVVEQIQSLIKRQLPIRFGLVPTTTTKVAEDQAKIVYHLLENYGLGGLMSYLEAGLTGKTVSGPQEDNFDSITKARTPRAEATPLPFKEVFESEHHVKQIELARHWTERLGADTAVPPVFLNGLAIPRDEGWLRVMSMKLSSDLQMVQQGIFMGTVDDDMWVPSLFLEGAPSRRNVYIYPDSDNPLSVLDVNKMYSEHADLFSLIPVIEASEDASKETWATLSLVTDLSKREGLKLLLSALAFRRSNPGVRLDIVNNPTESTRGYSVNSILRKDVGKLLEVENLETLEVLVAGDVADEDDGYDSALSRFLAKNAFKSGDHLIILNGRAVGPIAVASLFKEEDFQQLLEFEQSTRILPVYKAAEALGLTEKISNPIAAAKLTSITAISTISDLPEGIFESAPSLRTNMFDEWNSTYTMFDVGDASTANIHFVAVLNPTSEVGQKWAPILKVLSELEGVYMRVFLNPKERMEELPIKRFYRYVLDSAPSFDEGGRVRSLGATFKGLPSEALLNLGLDVPPAWLVAAKESVHDLDNLKLSSIKSDVDAIYELEHILIEGHSREGSSPPRGVQLLLGTVRDPHFADTIIMANIGYFQFKANPGYYSIRLKEGRSSEIFDIISVGAKGYNAVPGDEGTEVALMSFQGTTLYPRLKRKPGKEEEDVLEESDHESGGDIISRGLKFAEGLLGGSKKKALSPSAEEHAEINIFSVASGHLYERMLNIMMVSVMKHTNHTVKFWFIEQFLSPSFKEFIPHLAEEYGFKYEMVTYKWPHWLRPQKEKQREIWGYKILFLDVLFPLSLDKVIFVDADQVVRTDMMDLVNHDLEGKPYGFTPMCDSRTEMEGFRFWKQGYWANYLRGRPYHISALYVVDLRRFRELAAGDRLRQHYHTLSADPASLSNLDQDLPNHMQFVIPIHSLPQDWLWCETWCSDESLASARTIDLCNNPQTKEPKLDRARRQVPEWTAYDDEIAALDRRRRGKAGTKQEDAGHIVFGGEQPGQKVLQGSRGAGEEAVQRNTKSKTLEDPGSEPTKSEKDEL

SEQ ID NO: 4672 - protein, 229 aa, Rhizoctonia solani
MDLKKVIFVDADQIVRTDLKELVDLDLQGAPYGYTPMGDDNEAMEGFRFWKQGYWKDALRGKPYHISALYVVDLVQFRKMAAGDRLRGQYQALSADPNSLANLDQDLPNNMQDQVPIFSLDKDWLWCETWCDSARFDRAKTIDLCQNPLTKEPKLARARQIPEWTLYDNEIAEFARSLADSGKIRSRAISGSVDALASVGKKVTTSNTEESPAPTPDEQAEPHQAHEEL

SEQ ID NO: 4673 - protein, 1516 aa, Grosmannia clavigera
MALLPSGSTAASSVNVGMIASFPSPPYLTELLETAAQENASSYFPILDRVASGHFSQAATDRDLYESFLSLLQEDNRVSSAEALSTFKLALSLRSAAPRIEAHFQYYRTAVEAQVADSPESCDQWILWQGGQYCSPSLDKATATVRNHEAQRKALPFDTKLGDGVDAILYADITSPDFGPFHTFLAAKARKGELAYRLRHVRSASSAGREDSLERLPVSGYGVELALKRTDYIVIDDREAEAAAATTTASADEVVLDGSDEVADLKALSKSELAELGLKAADYIVQSADPLATLLKVTQDFPKYSSAMAAHEVSEAFATEHRANRALLVPSGMNVLWMNGVQLTERQMQAFALVDMIRRERELVNGMRTLGLSGEEAVSVLGHDAVATSKATDTPLRFDWRDELEEGRAIVWLNNLETDARYADFPSNIRALLQGGQRGQIPAVRRNMFHQVYTVDLANEADVQLVTEQLQGFVRRMLPIRFGFVPLTYSKASTRQAKAAYYLFEACGISGLTAYLEQTVRDHTAASGPDARAFAAVLEGHVEAGFKTEDTPLLTLDEVLRSERYEQAIRLAQHWTERLGAGSSTAAPAIFVDGVAMPRDGNWIQAMSARLGQHLRSLQEAVYYGQIGEDDWVAGHFLQGAVTTRNPYIYPDESSVNNKLSVVDVGRLHAEHADLFGDIPVLEAGAEAGPETWAAVTVVADLESDEGVKLLFSALQFGLNNAGVRLDIVHNPSGPRKSTTGPKAVNAALWKQLEQLAGAESWEALKTLITTSEAAAASYVAAVERFRTATTIEAGANAVLLNGRLIQPIKQADDFGPDTFAALLAFEQQKRIEPVYAALADLELGERVLTSALAAAKLTSMVALSTMADEPEGIFEGGPALRTTTFRKWQTDHTSFAIGDETTATIQLTAVVNPASELGQRWTPLLSVLAQLDGVFLRVFLNPANRLDELPVRRFYRAVLAATPTFDEVSGRLAIPRARFDGLPSEALLNLGMDVPAAWLVAPKTSVHDPDNIRLSAVRGDVEATYELEHILIEGHAQEVQTQKGQRPLPPPRGAQLVLTTESGVLGDTIIMANVGYLQFKANPGHYRIQLKPGRSASVFALQSVGAQGMTAVPGDEGDDVALMDFQGTTLYPRLTRRPGMEAEDVLEEGGSSVAEYMAKGIRFAEGILGKKDKNKMKEKKATQADINIFSVASGHLYERMLNIMMVSVMRHTQHSVKFWFIEQFLSPSFREFIPILAAAYGFEYEMVTYKWPHWLRAQREKQREIWGYKILFLDVLFPLSLQKVIFVDADQIVRTDLYDLVTLDLGGAPYGFTPMCDSRVEMEGFRFWKQGYWHSYLSRNSQGPPAPYHISALYVVDLQRFRAIAAGDRLRQTYHTLSADPNSLANLDQDLPNHMQFQIPIFSLPQDWLWCETWCADEALATARTIDLCNNPETKEPKLDRARRQVPEWTVYDDEIAALAKEHRERGGQGGGDRRQGMPMRAADETSELSGDLRGETAGETAAEVGTEPRVRDEL

SEQ ID NO: 4674 - protein, 1571 aa, Plutella xylostella
MMKATGVYILFSVLVLVAATIASNPDPPKSAEKKSKSVTTSVSAKWEATPLVLELAEYLSGESSDLFWSFLDGVNSLKVSLENLETDKQKYDACIGVATTLLAPAQLRMAKLALSMHITSPAVRMFDQIAVQNGVKDVKCDTFVAIASRKICDDEVLRDILKTYDQYKPEDHQLETYLLDHTHPSSDNKSLTAILYGELGTVDFKTKHTILAAYADKGIINYVVRWNVKPRGRPKLRLSGYGVELQLKSTEYKSQDDSTPKEEGGEAAETSEEEDENDPQNQIDGFNFGRLKNLFPALRTPLERFRRHLSESSEELSPLKVWQMQALSMQAAAAVADAHAAGGDEALKVLTSIAQNFPMQTKSLIHVNVPRAFRDEVLYNQDIWSTALGLRPAEPLLLGSGAQYDAEEVDVMALLAALRADVGPMNTLHAMGLSKTLINKLLSLEMGEQFPVEEYGLDIRDSAVTWVNDLETDERYRRWPASYMELLRPTYPGMLRNLRRNIYNYVIVIDPISYASGPPLKLGETLLKHATPVRVGLVLAPAAGRGGREAALEAAVRAAFNYIAQEKNSNKEAFYFLTQLLDNTESKSAEKLSLEQIKKHLKKYASAGADLDDLIAEDSEFNFGQQLAEEFVDKIGNNKFPEVLINGVPLADDAGNPTASVEQLEEALVTSLARHTERLQRAVFRGALSDADSPVDYLMKQPHIVPRLNRRVLGSESSQYLDLSGAPASVELFTEDKIHKLMHLTGRDALATALPLLRYFTKATKQEKITQTIWIIGDLNNKDSRTLLKNALTYMRESTGIRVAFIPNVDGSSSVDQSLNKVVLAAVTALPPPRAAQYVAGLLDDEGCHEKQTCDILPELVPHLHKYEWWVLKAARVLCSRSLHLRASARAVVHNARMIGRLAETDKFVLDDFALLERFTSQTYGDKLSEVFDKKKSKINEVTDDDDDEEDDFIDLSPDARLKVISVVAGRGAHSRTPLPAGLRTEHSLVDLPPLYPDEAAIEMVAVLDPASAAAQRLAPLLLVLRKVVNCRVKLFLNPQDKNSDMPLKSFYRYVLEPELQFTPSGSQTGGALARFARLPHAPLLSMELRTPPNWLVECVKSVYDLDNIRLADVDTVVHSEFELEYLLLEGHAWDTTLGTPPRGLQLVLGTRETPDLMDTIVMANLGYFQLKANPGAWILRLRPGRSEEIYEIVGHENTDTPAGSADIQVLMHSFRSHVIKLRVSKKADKQHLDLLADGDEKNSGGIWNSIASSFSGAEETDSEDTINVFSVASGHLYERFLRIMMVSVLKHTKSPVKFWFLKNYLSPSLKESLPYMAKEYGFSYELVQYQWPRWLQRQKDRQRTIWGYKILFLDVLFPLHVKKIIFVDADQIVRADLKELVDLDLGGAPYGYTPFCDSRKEMEGFRFWKQGYWRNHLQGRSYHISALYVVDLRRFRRVAAGARRRGQYQALSQDPNSLSNLDQDLPNNMIHQVAIKSLPQEWLWCETWCDEKSKTYAKTIDLCNNPQTKEAKLSAAMRIVPEWTQYDEEIKALMARVRRGLFHAGDVDQESEIQHEEHDTSPSHDTHTEL

SEQ ID NO: 4675 - protein, 922 aa, Phalacrocorax carbo
AARSYYEQTGVGPLPVVLFNGMPFQKDQLDPDDLETVTMHKILETTSIFQRAVYLGELSNDQDVVEYIMNQPNVVPRINSRILMSDREYLDLTGMNNFYIDDFARFTTLDSKDKTAAVANSMTYLTKKGMSSKEIYDDSFVRPVTFWIVGDFDKPSGRQLLYDAIKHQKSSNNVRISMINNPSEDPNSQNTRVAKAIWAALQTQTSNNAKNFITKMAKEEIAKAVEAGADILEFAVGGMDINIFKEAFESPNVDFILSHAIYCRDILKLKKGQRAVISNGRIIGPLEDGEMFNQDDFHLLENIILKTSGQKIKSQIQQLGFEEDLASDLVMKVDALLSAQPKGEARIEYHFFEERYSAVKLRPKEGETYFDVVAIVDPVTRDAQRLAPLLLVLNQLINMNLRVFMNCQSKLSDMPLKSFYRYVLEPEISFTADNNFAPGPIAKFLDMPQSPLFTLNLNTPESWMVESVRTPYDLDNIYLEEVDNVVAAEYELEYLLLEGHCYDITTGQPPRGLQFTLGTSTSPVIVDTIVMANLGYFQLKANPGAWTLRLRKGRSEDIYRIYSHDGTDSPPEASEVIVVLSNFKSKIIKVKVQKKLDMMNEDLLSDGTSENESGFWESLKWGFTGGQKNEDVKQDKDDVLNIFSVASGHLYERFLRIMMLSVLKHTKTPLKFWFLKNYLSPTFKEFIPYMAEKYNFQYELVQYKWPRWLHQQTEKQRIIWGYKILFLDVLFPLAVDKILFVDADQIVRTDLKELRDFNLDGAPYGYTPFCDSRREMDGYRFWKSGYWASHLAGRKYHISALYVVDLKKFRKIAAGDRLRGQYQGLSQDPNSLSNLDQDLPNNMIHQVPIKSLPQEWLWCETWCDDSSKKRAKTIDLCNNPMTKEPKLQAAMRIVPEWQDYDQEIKLLHSLFQKEKESGTPAK

SEQ ID NO: 4676 - protein, 595 aa, Trypanosoma cruzi
ENHLPSTSGLTSFVVKPANGDTVPRHTLTVVIDPVAQQSQFLISLCDYVTRSPLGVSCTVHMGATEHASKLMRNFYQFVSEMELRFDAVGRVVPPAAVFHRLPSKHLLTLGIEEPESWTVFSLDAKYDLDNILLDKLPSSSQYLHAVYRINSILLTGSARDAEQPNPSRGLPLLIRSTKTNPEAGVTRDTLVMAIMGYFQLQSSPGVWYLTVQPGDIAKIFYISQVDGIPVNDGANKNHHGRFNYTAGQNIPVVVSSFTGKFLMLGVSKTPGHEEVSIEDVNEASALHVDWPPKGPIKSKPDRPTLNIFSVASGHLYERFLRMMIHSVMRTSFDVHGANTTRIKFWLIENFLSPQFKTLVPLLAKHYGFDVGFVTYRWPWWLHKQTEKQRTIWAYKVLFLDVLFPLDVDRVIFVDADQTVLADLHELYNMDIGNAPTAYTPFCRKHPNPATKNFRFWDHGYWLEHLHGKPYHISAIYLVDLRRLRAIAGGDKYRLVYSRLSSDPNSLANLDQDLPNFIQDQVPIYSLPEEWLWCETWCGAESKARAKTIDLCNNPLTKMPKLDNARLIIPGWEETDTELEALSEKLLQQQKQQIS

SEQ ID NO: 4677 - protein, 1476 aa, Wallemia ichthyophaga
MRRLGFFLTACLAYVNADLHTPPPVHVDVQASWSQPPYCEIAMEAAYRLQPGMFGRLLDTIDCTNTPEKIYTQVRSEITKSKQSLFDLHMALESSSPAIIASRSILESEGFSFDPECPNFISYQGRKICDVDEVSTLDQQAWPESTAIVDTAIDHILSEPSSAAPPTIIHYADPTAHNFKSFYDFFKKRTKVLKYVIRWAPTNASSQPQKLAGWGVKLDLKKREYLSLDDRTVSKRADDIKTNVISSEDYNFLPRKLQEAFGQSLVNFEGNDNIKTLSSNLIALLQQSDNQLELLNTISQNLPLLAPALADGAFEGAENVLNELSFNQDKYLKAGQNAIWLNGRRMYDKDLEPFTLLRQLESENLLIGAITDLGFSRSDAIKVLSHRALYASQIIRPDSVADGLVDASDRIEEGGVIRWMNDLEDHKQYNGKFWSPYMRNLLNPLGKVARNYLNGVLVIDLSNKQAIEMLSTNVRAFIDRGIPVRWGVVPYINPLNHDSLMAAKLFYGLIDSRGVDTCLNYFAEAVAYTGTFAERAEAAYSNLPSVNGTLSQDEFDTTVKSKAVKNDLKKAQSYTRRLGVSPGEHEESFAGEIFINGQPVQFDDKTILTLQEHITSQTEAITKAVRNAEIDERSDVSVFYYDKSSTLKRRNKYLQPSKKKAHYIQTYPKLLDGPYVTPETQDRTDVTIWLVSDFNKPESLELIKHALSGMIISPTFRLGFVHNPSECETATGTISQMLRMLPDRSSPLEFIDALQNRGEIREDADGIVNAGAWISETGINPGDSGLIVNGRVIGPIPPNGLVEEDYVYLFQRDYAERVLPVVKALDETCPHLLQDDPDTVATLLSRLGSLLWKTNQNEQPEGIYEPPYTPRARVWNRLHTKYTSIQVGKELSSQYSFDVVLDPMSEQGQKLTKILIALAETGDAHIRIAFNPDISIENLPTNRFYRFAMNSKPHFNQYGQSINQAVQFVQMPADALFTLELDPPQSWIARPVYAPVDLDNLNLVTAPYKDLNVIFQLDKIVVDGHARDSKTSLPPRGLQVALKHGQIDTQIVANLGYLQLAVTPGQWSLEIREGYGRQVYEIESLGSLGWNSPTVDEGFETFMLDSFEGVKLYPRFKKKPGMEGVDVLSEQRETGLVPYAKAAISTLKSFLGFTYESDHADINIFTVASGLLYERFASIMILSVLKHTNHSVKFWFIENFLSPSFIEFLPHLAKEYGFKYELVTYKWPSWLRPQKERQRMLWAYKILFLDVLFPMSLDKVIFVDADNIVRTDLKQLIDVDLHGRAYGYPPIGMDREEMDGYRFWTEGYWKDYLRGRKYHISALYVVDLKRFRQIAAGDRLRGQYQGLSADPGSLANLDQDLPNNFQTEVPIWTLDGSWLWCETWNSEESITQAKTIDLCNNPKTKEPKLERARKIPEWTEYDDDIRQFSDKLAKEKLIKSLLVTETEELAQGPKAAAEEAPTAPDYFKDNHRKDEL

SEQ ID NO: 4678 - protein, 1467 aa, Drechmeria coniospora
MALAASLQVSASPSVNVGMRAAFMDAPYLLELLETAAGENSTAYFPLLDRIANNHFGSLTTDADLYNAFVDVLQLDGHITNPEALSTFKFALALRSAAPRIEAHYQYYSTAVEPVVQDLSCQDWILFEGKQYCTPTMDTVAQEGLFNSQVKALPFDRALGNGKEAVLFTDPTSPTFAEFHNILSKAARASALTYRVRYRRSMANNSQPLPVSGYGVELTLKRTDYIVIDDRETGSDSAQGNLGSEKVFSDFEEAAELRPLSTTELSTLGMKTASFIRGSNDPFDTLLKLTQDFPRFAASIAAQNVSKEFANEYEENLGLMMQGTNVLWLNGVQLIDRQIEPFSLIELLRRERNLISGIKELGLDGSQAVTLLGQAVSSVQGGVEVQRYDWTDRPEDGRVILWLNDLENDVRYKQYPKTLISLLQRTYPGQMPPIGRDVFNIVVPSDFTNAEDLAFVSQIVPIVERGIPIRFGLVPLTPAPGATSRAKVLYYLNELYGPHAVINCIEQWRGKDSTDADATVLHNVVAAQESLSKTKPLSLAELLKAESYAERTKLAARWVERLDADTPTRPLFINGIVTPRDENWMQSMSVKIGEDLQAIQKRIFEGVLDEDTWVAGVFLDGATATRNKYIVLENDKALRMLDVGKIYNDHAGLFSQFAALPPSSELTMENWAVVTVFSDLETSDGLELALMALEFKRNNPGIHLELAHNPQDPSTASQINAALRSATELLISAEEEALREIVAAGKGHVSQEDHSAALSAFLAVSKIGSGTKTILVNGRIVGPIASGALFTAENFQQLLEFEQRHRIMPVYTAISNMGLTDKLSDAISAAKLTSMTALSTISDLPDGIFDSASATRSTMYSSWSSLHSGIELGNSETANIHLVCLLDPVSEKGQRWGPIIRVLSELEGVYVKILLNPQGHITELPVKRFFRYVMESKPFFDERGKVAEHRATFKGLPLEALLTTAMDVPPAWLVAPKVSVHDLDNIKLSSIENDVEATYELQNILIEGHSREGQGTPPRGAQLVLATEKDPLLTDTIVMSNLGFFQFKANPGFYNIQLKEGRTVDIYTIESIGAQGWGAVPGDEGTELALMDFQGKTLYPRLKRRPGMEHEDVLEKNDNSPDSFVSKGLKFAEGLFGNSKRSALSGQEHSEINIFSVASGHLYERMLNIMMVSVMRNTNRSVKFWFIEQFLSPSFKELIPHLAKEYGFKYEMVTYKWPHWLRQQKEKQREIWGYKILFLDVLFPLSLDKVIFVDADQIVRTDMMDLVTLDLEGAPYGFTPMCDSRTEMEGFRFWKQGYWARYLRGRPYHISALYVVDLHRFRELAAGDRLRQQYHALSADPGSLSNLDQDLPNHMQFQIPIHSLPQEWLWCETWCSDESLENARTIDLCNNPQTKEPKLDRAKRQVPEWTVYDDEIAALDMRRREQKNKGKTDHLTASSATQLEADIKSQTSEEGDARDDAHNMDEL

SEQ ID NO: 4679 - protein, 1435 aa, Kuraishia capsulata
MFMLLRLLVISVIFQYCSADLPDHTIDIQLAGNWKKTPFALNLIESASNENESYFLPAVSIILGVSLPSGDNDDFDETELSLEDISELSDEQAYLNVFKLLKNDFERASFNVSLSSRLFSPRIQAQYSHYTQTAQSSARTACGSDSSSWAVLNGEFYCHPDDVFALKTTGSSSMELLPFDRVVGDKNKPTVELYGDYRSASFKQFFLNLYISARAGKISFVWRYLPDLSADEPEYLNSYGVDLTLKRTDYIVIDDRKFDNQVTAGSKKAEDANDYIDDIPPLNKEHIPDLALKLTSHVLSTSNSDADRLKVLRDLVQDFPKYSSKIAQSGDDYASILGAVNENLKVPVPDGLYINGVPVPEKKLNPLKIMSVLKRELGLQDLLSRLMGSAANAANLSEELSGRLNEFTGSVVRYDVSSIEGAIVYLNNIEKDPQYEHYSTSRDSYGDLQPGVFPPVKENVHDLVFAINLSDPAQLYYFLQTVTAILNRSVPQRVGVLPLIQSEADEIIANQFLYACNVYGLRNGISFLINLNEEVFSKGLETISLSDLYLLDIPENYDFDALLSHNRRFQNRFKIDSPHILVNGVFYSLLNPRWQYMINSQVSYDINLLHSAYLEGSIPDGMSLRAYLLSGSRSHRNTFIAPDQGNAENFEFLTYTSEGAREEILRAVQDDKIHSFEKLIENIPSDTLWFIGSLKNPQVAAQLRNIADWFESSASDNVRALIVNTDLEKASPSGKISDLLHGISSGDVHLDREVVQLVESTLGLEVQAESAFILFAGRLIDLKSKLLDVNDLSLLKEFEEEHRLAFIRDISAGIPSVTSSADVFEHFVMLLTQTYYYKQTDYISGGLPPRYKISDLNTKTSLRVGSDESSIQVTIVLDPITEYSQKLLAISTMFQEMPFVSLKVILRPHSDLEDIPIKRFFRGVYDYRLVFDKETGAIDESSKRALFESVPDKTLFTLDIDAPPSWIVMIKEANADLDNVKLELSGPVSGLYELKNILIEGHSFETGSEDSPSMGMVVDLRQNGELYSDTNIMANLGYFQLKANPGLWEFSIKDGTPSSDLYSLLEVTKEYSANVKALTPKRVENLAILDLSGLVVYVKVSKKPGKENESLISLDQPEGTTGGSLINKGFGFLKGAFDRTQKTKQADINIFTVASGHLYERFLGIMTASVRRHTGHTVKFWLIENYMSPLLKKSLPILAEEYDFQYELITYKWPIWLRSQREKQRTIWGYKILFLDVLFPQDLDKVIFVDSDQIVRTDLKELVDLDLEGAAYGYTPMCDSRTEMEGFRFWKQGYWKNLLGENLKYHISALYVIDLKKFRELAAGDRLRQHYQTLSADPNSLSNLDQDLPNNLQHIIKIHSLPQEWLWCETWCNDESLKKAKTIDLCNNPLTKEPKLDRARRQIPEWTEYDDAITNLLNQRLFGKDEQSENTHDEL

SEQ ID NO: 4680 - protein, 1391 aa, Diplocarpon rosae
MELFTMPWSLTRALLATTYLHSLSVSASPSINVGMKASFSSAPYLLELLETAGNENGTSYFPLLDRIADGHFSQASTDKELFDAFAKTLKEDGHMVEPETLSSWKFAVSMRVSAPRIEAHYQYYHTAAEPSLSSEHDTSCPVWVLFNGKQYCSPELDAASGHIVGESQLQELQFDRILGSPSAPPSILYADITSPTFAKFHKILVQTAREGRTSYRIRHRRSLADEEKPLIIPGYGVELALKRTDYIVIDDREESEIKTASATHKKELKFEDEEFADLKPLSSSELSSLGLKASSFIMQSENPLESLVKLSQDFPKYSSAIASHNVSSEFIAEHQLNRDHMVPAGKNIIWMNGVQLMDRQIEALDLLDIFRKERKLVNSLRNLGLTRSQAIQLLSHFEVSMVNAENAAPRFDWRDEIEGGNVIIWMNDIEKDRRYASWPTTLQAFLKRVYPGQLPTVRRDCFNVILPVDLTNPQDILVVADTVLSFVKRKLALRFGLVPLTSTPDSVAHAKVVYHLLDNYGIQAAMEYLEAAYTSQKLSAPTAKSFQTAIGGRTVRNEKTALTLQEVLESESYQGRIEASKKWIKRLAADSKIPQMFIDGAAIPREENWLQLMSQMVTNDLQAIQQAIFSETIDEETWLPSHFLLGASTRRNTLIVPEDEKTLKLFDFNKLLEENKDILNILPRIEADASSEKASWAHLILVADLESKAGEKLLATAAVFREANPSIELVIVHSPSSVNTESGLSIDFYNHMLGNGHKAFSHINDLTAVLTAELAAPGEEIQQQSIEYWRGADAVVKSLGLLPGQNALLLNGRLVGPIPADSDFDQGDFEQLLSYERSKRITPVYAALESLGLQEIVSTPLAAAEISSIVATSTISDTPDGIFEQASTLRMSRFDNWNSTYTAIETGDVVTASIQITVTLDPASQLGQKWVPILKVLSELDGVFTKIFLNPRELLQELPVKRFYRYVLDSQPTFDDAGALRPLSATFTGVPQEALLNLGMDIPPAWLVAPKVSTYDLDNIKLSSIKTDVEALYELENILIEGHSREIPGGAAPRGVQLALGTERNAYTADTIIMFNLGYFQFKANPGYYKIGLLEGRSAEIFNIDSVGSKGWGPIAGDENTEVVLMSFKGATLYPRISRKPGMANEDVLESKPESKMDFVSRGLNFAQGVLGKGKGVAEKEVQAEINIFSVASGHLYERMLNIMMVSVMKHTKHTVKFWFIEQFLSPSFKDFIPSLSAEYGFKYEMVTYKWPHWLRAQTEKQREIWGYKILFLDVLFPLSLDKVIFVDADQIVRTDMIELVNHDLHGAPYGFTPIDESLKDAKTIDLCNNPQTKEPKLDRARRQVPEWTVYDDEIAAVDRRRKGLPVMAEKNIRSRTLAAEAVTSRKKDEL

SEQ ID NO: 4681 - protein, 1484 aa, Mus musculus
MCSRGDANTADAAAARRVTGLRYNMRLLIALALPCLFSLAEANSKAITTSLTTKWFSAPLLLEASEFLAEDSQEKFWSFVEATQNIGSSDHHDTDHSYYDAVLEAAFRFLSPLQQNLLKFCLSLRSYSASIQAFQQIAVDEPPPEGCKSFLSVHGKQTCDLDTLESLLLTAADRPKPLLFKGDHRYPSSNPESPVVILYSEIGHEEFSNIHHQLISKSNEGKINYVFRHYISNPSKEPVYLSGYGVELAIKSTEYKAKDDTQVKGTEVNATVIGESDPIDEVQGFLFGKLRELYPALEGQLKEFRKHLVESTNEMAPLKVWQLQDLSFQTAARILAASGALSLVVMKDISQNFPTKARAITKTAVSAQLRAEVEENQKWVNNLEVDSRYNSWPSSLQELLRPTFPGVIRQIRKNLHNMVFIIDPVHETTAELISIAEMFLSNHIPLRIGFIFVVNDSEDVDGMQDAGVAVLRAYNYVAQEVDGYHAFQTLTQIYNKVRTGETVKVEHVVSVLEKKYPYVEVNSILGIDSAYDQNRKEARGYYEQTGVGPLPVVLFNGMPFEKEQLDPDELETITMHKILETTTFFQRAVYLGELSHDQDVVEYIMNQPNVVPRINSRILTAKREYLDLTASNNFYVDDFARFSALDSRGKTAAIANSMNYLTKKDDSFIRPVTFWIVGDFDSPSGRQLLYDAIKHQASVSDFILGGGGIVERLSTPVLKTSNNVRISMINNPSQEISDSSTPIFRAIWAALQTQASSSAKNFITKMAKEETAEALAAGVDIAEFSVGGMDVSLFKEVFESSRMDFILSHALYCRDVLKLKKGQRVVISNGRIIGPLEDNELFNQDDFHLLENIILKTSGQKIKSHIQQLRVEEDVASDLVMKVDALLSAQPKGEARIEYQFFEDKHSAIKLKPKEGETYYDVVAVVDPVTREAQRLAPLLLVLTQLINMNLRVFMNCQSKLSDMPLKSFYRYVLEPEISFTADSSFAKGPIAKFLDMPQSPLFTLNLNTPESWMVESVRTPYDLDNIYLEEVDSIVAAEYELEYLLLEGHCYDITTGQPPRGLQFTLGTSANPTIVDTIVMANLGYFQLKANPGAWILRLRKGRSDDIYRIYSHDGTDSPPDANDVVVILNNFKSKIIKVKVQKKADMANEDLLSDGTNENESGFWDSFKWGFSGQKAEEVKQDKDDIINIFSVASGHLYERFLRIMMLSVLKNTKTPVKFWFLKNYLSPTFKEFIPYMAKKYNFQYELVQYKWPRWLHQQTEKQRIIWGYKILFLDVLFPLVVDKFLFVDADQIVRTDLKELRDFNLDGAPYGYTPFCDSRREMDGYRFWKSGYWASHLAGRKYHISALYVVDLKKFRKIAAGDRLRGQYQGLSQDPNSLSNLDQDLPNNMIHQVPIKSLPQEWLWCETWCDDASKKRAKTIDLCNNPMTKEPKLEAAVRIVPEWQDYDQEIKQLQTLFQEEKELGTLHTEETQEGSQKHEEL

SEQ ID NO: 4682 - protein, 1523 aa, Habropoda laboriosa
NLQMRLIVPLYFLLLCAIHLEADKRVNKYVTTQIDAKWKETPLALEAAEYLNDENPSYFWKFIDTFANYDMRNATEKDNYNAVIAFTKKYLSSSEVALLKLGLSLRIYSARVEMFTQMAENKNISILDCYNVADVGGRFTCSLEELEELASQETWLIPDTYSVDHRYHASQQSEKIIILYGQVGTPKFSDFHEKLKALAETNGITYILRHYLKDRVDRNVRLSGYGAELQMKSTEYKATDDSDIKDNADKDSETANDSTEEVDGINFMTLKNLYPDKQTELDKLQTHMLETSHEIGALKVWQFQELSHQAAERIMNSPTSEAINVLTDISQNFPMQAKSLIRTKVNVEMKKEMKLNQAMFSTSLNIQATDTALFINGLFFDLEAVDALSLLESLRSELRVMESLRKIGFSNKEMSTLLALDLSTNMDKQEFAIDIRDSAIIWVNDIEQDSAYERWPSSITELLRPIFPGMLRDIRKNLYNLVLIVDPLSAESTSLITLAQSLYLHTAPLRVGFVFVTNYDTSTTGLTDASVAVNNVYHYFAEAKGSEHALQFLIDLGNYIGPEGVDVEDVKRAVRAQDSSANINYILGEESEYDVGRHLASDFVKRSGFKKFPQALLNGVPLPSDQLNADSFEEVVLSTIMSQAHTLQKAVYRGELTQGDDVVDYIMNQPNVMPRLNERILKPEKHTWLNLIGTVPSDEDYSKWSPQDLSTWLMNKMRYMYVPRRTSVHHLYTFWVVTDLNDSTGRQLLREALDHMESNGDVRITVIVNPLLDTNDVDNTVDINQIVLAALNGLPIEKAMRFIRNMIKEDVVSDIVSGTFDIEEEDVREELKKQTDELTVHRRYVKMVLNLEKGTRAIVCNGRLIGPLDVGEEFTSEDFSLLERFSQSTYDDKLFKKLIKGQLLENEDDEYERNEITDDMLMKITSLLASHPQTRSRFHVPFHGEDYSVIKVPAANPDQVAFNLVAIVDPVSRGAQKLGPILKTLQRSLNCYITVFLNCLDKNSDMPLKSFYRYVFEPHLQFSSDGGINGAIAKFTKLPTSSLLTQYIHAPENWLVEVVRSVYDLDNIKLDNVAIGVHSEFELEHLLLEGHCFEAVMGNPPRGLQITLGTEKQPLMVDTIVMANLGYFQLKANPGEWVLRLRQGRSAEIYDFTTISGQDVLQNGNDVKVVISSLRSHVLKVKVSKKPDKVGMDLLSEDDKSSGLWNSISRTFTATDDSDDQDEKLNIFSLASGHLYERFLKIMMLSVIKQTKSPVKFWFLKNYLSPTLKDFLPHMAKEYGFEYELVQYKWPRWLHQQTEKQRTIWGYKILFLDVLFPLNVKKIIFVDADQVVRADLKELATMDLGGAPYAYTPFCDSRTEMDGFRFWKQGYWRNHLQGRAYHISALYVVDLKRFRRIAAGDRLRGQYQALSQDPNSLANLDQDLPNNMIHQVGIKTLPQEWLWCETWCDDTSKKYAKTIDLCNNPMTKEAKLQAAVRILPEWVGYDEEIKMLQLKLENENRQMEKEENDILEDSEDFTKHVEL

SEQ ID NO: 4683 - protein, 1722 aa, Papilio machaon
MNSTGLIISLLVILVHAFVFVSTDSDLPKRDEKKAKGVTTFVTAKWESTPIVLELAEYLSGESSDLFWSFVDGVNSLKSPLQGLATDKEVYDACIGIASTLLVPAQLRMAKLALSMHLTSPAVRMFDEIATQNGAKDVQCEEYVHIASRKICDTDTLRDILKAHKQYDPEEHSLETYLLDHSYPSSDNKTLTAILYGELGTVEFANKHKILATYADMGAINYVVRWNVKPRGGPKLRLSGYGVELQLKSTEYKSQDDTTPKETDAGEAAEPSVEEDENDPQNQIDGFNFGRLKGGPKLRLSGYGVELQLKSTEYKSQDDTTPKETDAGEAAEPSVEEDENDPQNQINGFNFGRLKNLFPALRTPLERFRRHLSESSEELAPLKVWQMQALSMQAAAAVVDANDAGGDEALKVLTSIAQNFPMQTKSLIHVNVPRSFRDEVLYNQDVWASSLGLRGAEPLLLVSGAQYDAEEVDVMALLAALREDVGPMNTLHALGLPKNLINKLMSLELGEAYTWEEYGLDIRDSAITWLNDLETDDRYRRWPSSFMELLRPTYPGMLRNLRRNIYNYLIVIDPTSTLSGPPLKLGETLLKHATPVRVGLVLAPGSDAALTAAVRSAFNYIAQDKNSNKEAFYFLTQLISSCENDQMTLEHVKKNLKKYASSGTNIDEIVYEDSEYNFGHQLAEEFLFKIASDKYPLVLINGVPLWDDGSPTPATSSVELLEEALVSALARHTARLQRSVFRSELSDTDDALDYLMKQPHIMPRLNRQVLASEPTQYLDLSGVPSSPELFTEDRLHRLMHLTGRDALATALPILKYFLKSGKPEKITQTIWVVGDLNEKESRDLLRNAITFMRETGGVRVAFIPNVEGGSVDQSLNKVVLAALATLEPAKATKYVTTLLEDEGCHERQDCDILPELVPVLNKLEWVLKATRVLCARGMRLRVGARALVHNARIIGPFEDKLGFSMDDFLLLDRFSNQVYGDKIAEVLLKKKTTVENDVFDESITVDIPELSADEYLKVISVLASRSPKSRTPLPQGLRTEHSLVDLPPQYADEAAIEIVAVLDPASTAAQRLAPLLLVLRRVVNCRLKLFLNPQDKNSDMPLKSFYRYVLEPELQFTAGGALTGGALARFSRLPQAPLLSLELRTPPNWLVECVRSVYDLDNIRLADVDSLVHSEFELEYLLLEGHAWDTTLGTPPRGLQLILGSREQPELMDTIVMANLGYFQLKANPGAWTLRLRPGRSEDIYEIVGHENTEMTAGNSDIQVLLGSFRSHVVKLRVSKRAGSQHLDLLADNEDANAGGIWNSIASSFGGGGGGGEEAEGAEETINVFSVASGHLYERFLRIMMLSVLKHTKSPVKFWFLKNYLSPSLKDILPYMAQDTGSSTSWCSTSGRAGCSDNAIASAPSIRGGGGGGEEAEGAEETINVFSVASGHLYERFLRIMMLSVLKHTKSPVKFWFLKNYLSPSLKDILPYMAQEYGFEYELVQYQWPRWLQRQRDRQRTIWGYKILFLDVLFPLHVKKIIFVDADQIVRADLKELVELDLGGAPYGYTPFCDSRKEMEGFRFWKQGYWRNHLQGRSYHISALYVVDLKRFRRIAAGDRLRGQYQALSQDPNSLSNLDQDLPNNMIHQVAIKSLPQEWLWCETWCDDNSKKYAKTIDLCNNPMTKEAKLSAAMRIVPEWREYDDEVRALQARVRRGLYQHTDTDQERHLHDAGKEHEHTEL

SEQ ID NO: 4684 - protein, 1543 aa, Pseudocercospora eumusae
MAGNTIYKAAALVGLLVSAKAAPSVNVALRTAFDAPPYLAELLETAAEENATSYFPLLDRVADGYFDSSKTDEELYKSFRTLLEQDGHLGKEDLSSFDYALSIHSAAPRIEAHYQYYNTSIVPSLPDDAQSACESWVYVPFSGQRYCSADLDEATAQPFGKAEASVHQLPFDRVLGDTASDKPSILYADLFSDSFRKFHKTLSKTARDGSTSYRVRYKASVGHERKPLTVSGYGIELALKRTDYIVIDDRNAEEEKKDEPVSANDGTLSEEEVSDLRPLSQSELRRLGLRAASFVMGSEQPFDTLLRLSQDFPKHSSSIAATEISEEFIAEHSANREVLVPAGFNVMWINGVQIMPRDVEAYALLEHLRRERKMIKSVQEIGLSGTEAVELLSHEAITASQVEQEVQRYDWRDNAEGGDVIIWMNDIEKDKRYAEWPETVTMFLQRTFPGQLPAVRKDCHNLVIPIDFADYNDALLVVESLRGFVQRKVPIRFGMVPIIKTPDSETQAKVIHYLIDRYGLATALDYLETSLETAGRKYGPVIEKLFRTAVETGELRPDKEEMTLESINGDAYLQSRIKGAKEWVARIGSTDVTPPVLMNGAPFQRNDDWLQTMSARVSQDVRVVQQAVYLGEVTDEDYLPYLFLEKASLKRNPLVIPEDDKDIRHVNLGELPSFGDLPSLGASKDTIERELVHLTVAADLDSKEGFEQLMEALMYRREHDNVEVAWLHVPRDGTADTRLGSVFYKDTALEPLFENLLWQYDTLVAEDPASNREGDTALEFAARKRIYAELYKKAARTNSPELDEKVRSIWAPFRSTISAAGITPGKKALLVNGRVVGPIPDSIGLDVSDIETLLSYERKKRLLPAALAIEGLNLQEKASTPLAFARVSNLIALSMVSDIPEGIFEAAPTVRTGMFKSWNSSHTAIHLGDEKTATIQVYASIDPASEVAQKWIPIIKTVSEMEGVYTRLFLNPKERLEEIPVKRFYRHVLSSKPSFESDGSLQANTAQFRGLPADALLNMGMDMPPAWLVAPKITVHDLDNIKLSAVKSDIEAIYELEHILIEGHTRDVTVGPPPRGAQLVLGTDADPHFADTIIMANLGYFQFKANPGVYNLALQKGRSEEIFRIDSAGAAGYNEQPGDNTTEIGLMSFKGTTLFPRISRRPGMEDEDPLEPAKTALDFVAEGAESLLSQLGLGNQASKYLSKATKLGSGLLSGASKTDSITERKHADINIFSVASGHLYERMLNIMMLSVMKHTKHSVKFWFIEQFLSPSFKDFLPVMAEEYGFQYEMVTYKWPHWLRGQKEKQREIWGYKILFLDVLFPLDLDKVIFVDADQIVRTDMYELVTHDLKGAPYGFTPMCDSRTEMEGFRFWKQGYWKNFLKGLPYHISALYVVDLKRFRQMAAGDRLRQNYHQLSADPASLSNLDQDLPNHMQALLPIHSLPQEWLWCETWCSDESLKDAKTIDLCNNPQTKEPKLDRARRQVPEWTEYDNEIAAVAKRHKEKMAGGVPAVQGSDGEESMQERLQREDAERERKKKEHVRDEL

SEQ ID NO: 4685 - protein, 1530 aa, Gonapodya prolifera
MLSNRPSHSRSIVSLLLLCAVFLHASASDSPPVVAVVQSSWSATHPLLEALELVAERGYSAFFGALSKVAVTPPPSSPEAVYDYIYKLLADNELNPPESPAYLPLAKVALSLHAPSAAVQSHYHLYNTTLSSRFAGNPEFRHHCPSWADVGGRQACSVEELDSILVDSDWKSSAPEVFPFDHQTGDSDSPAILYGDIFSVDFPALHSRMLSLASEGRLAYVLRFRPPQPQDDRSGGARISLSGYGVELAVKKTDYKVIDDRKIASGSDEDDGTEEAFAREESESDDVLGLLDTPQIVQIKDEEAIADLGLKASQLILKNPNPLAALEQLTGDFPKLAHIVAEIPTDETLRAHVTANKGRSGPRGRQQMGGGALNTLEVNGVELDPVLLDPYQLLRVLKTEASVIDSLGRYSLAANETISILNAPMPLYTSGKGGASDRIPWGDSFDTRPKTVAIWWNDLERDRRYMAWPKGINELRRFSFPGQLKYVRKNLFSCVMMLDVSKRTSLDLVEQVFNFVRGEVPIRFGLVPAVDADLSGEASDMAKMIKFLVDGYGLKDARDFIVSVLQAARDKGEQDSIVALAKPIFQTVVHESAPKHQVRGDVTAPLDELLASLDDSLTETKEYMNRLGVSAKESIAFCNGKPIVLDESWSQTMVSVYFQQIDYLVRSLYEDRVNDETDVFEFFATLPGVHSRRNPYLFTGSETVPVIDTNQVPRENVIYIAKDPKKTYPVSIWVISDFSDEAGVKLLREALAAINDDTSNARIGLVTSRHFASTRAKSIALQLRKAPVDRTIPTVALDDAMIAIENALTEENLERINREHSATTESDISEFLADNELPTLQVNLIVHNGRVIGPLGPGHYLTSSDINIAISMDFHDRISPVAERIEKILSIRDNVPQGHVVSEMIMQCTSTASLGSTLNELHSGLYKAPKSRTGFDPLQPTPLEPSEFQIGDMTKAHFFFSATLDPLTADSQKVSAILHRLSEIEGNLVHVRIRLEPTPKLTEVPLKRFYRYVFNPRVEVNPSGRVVASSAIFHGLPENALLTLGLDAPERWLVTPIASLHDLDNIKLSDLDLRSRKRGIESTFALKNILIEGHSRDATTNAPPRGAQLILGTEDRREIVDTMIMANLGYFQLKANPGIWELNLREGRSTDVYNIDLVTDEAKKMMLQKVDRVSGNANPRHSVILRSLEGVTLFVRLSKKAGMEKEDVLAPEKVDPAKLIPKSSGGVFGSIKALFQRPLDAVPSKKNTAINIFSVASGHLYERFMSIMFVGVMRHTSSPVKFWLIENFLSPSFKDTLPRLAERYGFDYELVTYKWPYWLRKQTEKQRTIWGYKILFLDVLFPMSLDRVIFVDADQIVRTDLRELIEMDIRGAAYAFTPMGDSRKETEGFRFWKTGYWANHLQGRPYHISALYLVDLERFRQMAAGDILRSQYQMLSADPESLANLDQDLPNNLQDQVPIFSLSRDWLWCETWCDDESFKTAKTIDLCNNPMTKEPKLDRAKRRIPEWAVYDAEVAELLANLTSGRKRDEL

SEQ ID NO: 4686 - protein, 1631 aa, Medicago truncatula
MRFRSIHFSLLFISITSFSLLLLLLLVTADTRSPKNVQTALRAKWSGTPLLLEASELLSKQQQHYFWNFIDIWINANDDANPDANANAKYCVKKILEHGRSLLTEPLASIFEFSLILRSASPTLVLYRQLARDSLSSFPLFHNDNEIAEIKKNETQLDPLRVGVSVESPGGKCCWVDTGEHLFFDVDELRSWLQNNHDHQKVGNSFQSPPVFEFDHIHFDSATGSPVAILYGALGTNCFKEFHVALLEAAKQRKVKYVLRPVLPAGCDAQIGPCGSVGVSESVNLGGYGVELALKNMEYKAMDDSAVKKGVTLEDPRIEDLSQEVRGFIFSKILDRKPELASEIMAFRDYLLSSTVSDTLDVWELKDLGHQTVQRIVRASDPLQSMQDINQNFPSIVSYLSRMKLDDSVRDEITANQRMIPPGKSLMAINGALVNVEDIDLYMLIDLVHQDLLLADQFSKLKIPPSIVQKLLSTLPPPESDMFRLDFRSTHVHYLNNLEEDGKYKWWRSNLNEILMPVFPGQLRQIRKNLFHAVFVLDPATTYGLESIDMIMSLHENSFPVRFGVVLYSSKYITQLEDHSTKEDGDKFAGDISDMIIRLFSYIKGNYGIEMAFKFLSNVNKLRIESDDNVEDAHLEQHHVESAFVETVLPKVKSPPQEILLKLEKEPELKELSQESSKLVFKLGLSKIQCSLLMNGLVIDPNEEALMNALNDETQRIQEQVYFGQIKSHTDVLDKFLSEAGIQRYNPRIIADNKPKFISLSMFTFGEASILKRINYLHSSGTMDDLKPVTHLLAVDITSGSGIKLLRQGLNYLIEGSKDARVGLLFSGNQTTNLFSLLFVKVFEITTSSYSHKKNALDFLDQLSSVYLQKYIRTPALEVDGTQAFIDEVCKLAESNGLPSEGYRSSLSEFSADEARRHLSEVEKFLFTALGSESGVNAVLTNGRVTSPIDESTFLSADLHLLESIELKKRTKHIVEIIEEMTWDDVDPDMLTSKFISDIVMSVSSAMSMRERSSESARFEVLSDEHSAIILNNENSSIHIDAVLDPLSPTSQKLSGILRVLWKYIQPSMRIVLNPLSSLADLPLKNYYRYVVPSMDDFSNIDSSINGPKAFFANMPLSKTLTMNLDVPEPWLVEPILTVHDLDNILLENLGDTRTLQAVFELEALVLTGHCSEKDHDPPRGLQLILGTKTSPHLVDTLVMANLGYWQMKVAPGVWFLQLAPGRSSELYIFKEDDDGSKNKQSSKLITINSLRGKVVHMEVVKRKGKEHEKLLIPDDDDDLQHKKKGSGWNSNLLKWASGFIGSNEQSKNAESNSPENARGGRHGKTINIFSIASGHLYERFLKIMILSVLKNTHRPVKFWFIKNYLSPPFKDLIPHMSQEYGFEYELITYKWPTWLHKQKEKQRIIWAYKILFLDVIFPLSLEKVIFVDADQIVRTDMGELYDMDLKGRPLAYTPFCDNNREMDGYRFWRQGFWKDHLRGRPYHISALYVVDLKKFRETAAGDNLRVFYETLSKDPNSLANLDQDLPNYAQHTVPIFSLPQEWLWCESWCGNATKSKAKTIDLCNNPMTKEPKLQGARRIVAEWPDLDLEARKFTARILGDDLEPIQSPDQSKDSTNEDSLKEDLESKAEL

SEQ ID NO: 4687 - protein, 1622 aa, Hymenolepis microstoma
MQLLEDMILDVQGVHVSKDGNRDLQKRLFRLTVASRALSPAVQTANHMASVAHFQFGANNLEACEGRKTWGRIGSMLICDLDLLEASVQKALIACSASCPDNLADSALLSDNVFPTNVESNSSPHLIVHGDLRSIEFYKWHMIAKQLAKDNKIVYIFRHFIRTRTSSKTWLNGYGVALDLKSTEYKAMDDKSSESGRDFSSDALSENEMEPVIQGFNFTLLRAKYPELKLELNSFQRHLITGTTEVKPLKAWQMRDLGLQAAQTVMDVASENDTDISGLLMIKDLSQNFPSRAYQLSQRKVTEKLKEELKINQNILEQHYGIQAGGSVFLLNGLALSPDIDIYALLDLLRSESHLLSQLHGLGLSTEQSARLLQVSPSGEDSYRVSTFIDSYKHTVTGERLLDISSAPILYLNDIERNPAYSSWIPNIHVLFMMGAPGQLRQIRKNLFNVVFVVDPTEPMAIEMLKLAEILILKKVPLHLGVLWSVNPEIDTLGRTLARAFVYIAENMKSYPGRRGLPSGLGNPGAMIALNFLTDLYSTYDEKDLTAQIVESEFKKAFPDAYYEDIFVEPGFECSYDKDIKNHFDFLEDSGIRQSAGSPSLIFNGMTFSLEGINKLGGLQEAIMTTALEQTVYFQQAAFEGRLYDHLSAAELFAADGLLVSRINHRLLSVLPPLVNKFALGDGSDGKSVTPFLQFDMLKASTEGSVASNLSPGEITNFLADQMRYLQKGDLESETRANTVWVVLGDIEPSITSSNHSLKLLAQAAKFMRRHATMDTRLGFVLNPSSTASFSEKGVWGAGGWLTRALLLIGHPAEKMFPMSNSDKTAEKYMNIMAAKNFIIKITEEALKMVRGEIKDPSPLSELTVSGMEVDKFEKTFAELDLKGKLALHTSFCQKTLHMQPGDSAVIINGRVYGPLLDNETFASEDFRLAEQLSIKSAGMETMAKQLAKMLPNRQPNYISELVWRSASVMESAKWRLTSFAKSLSSEGIFASGGSNRISLKGLRSQYSGFTLPANTEGLAYDLVAVIDPVSKEAQRLSEFLLVLRRSLPCSITVILNPVAGLSDLPLKNYYRFVWQPSLYTAEGESLAEAPSAYFDHLPGNSLLTLGVDAPHNWMVAPIRAEEDLDNLRLGEIASQTGNQRVDAEFELEYLLLEGHCLDNSTRQPPRGLQFTLGTAEMLDRYDTIVMANLGYFQLKANPGAWHLNLREGPSREIYKIIGHEYADSPSGAPSLIAVIDSFRPKIIRVDVQKKPDHLNDSVLEEKEEKDEMDADGSGGGGGGSDKPLGKLWSVVDSTINFIRMSSTTVDPLRNPNNETINIFSLASGHLYERFLRIMMLTVIRNTKSPVKFWFLKNYLSPSFKEFIPYMAEKYGFDYELVQYQWPRWLNAQTEKQRIIWGYKILFLDVLFPLNVKKIIFVDADQIVRTDLQELVNLDLEGAPYGYTPFCNDRKEMDGFRFWKTGYWQSHLGNRPYHISALYVVDLVRFRKMAAGDRLRGQYHALSRDPNSLSNLDQDLPNNMIHQVPIKSLPQEWLWCETWCSDKSKEKAKTIDLCNNPLTKEPKLKAAKRIIPDWTSFDEEIKELQEEFSKSKGKEAPVSTTTPVPRLVTTEQSDMTTEKEEL

SEQ ID NO: 4688 - protein, 1547 aa, Capitella teleta
MMRFLASALWLCLCAFLPIVLSKYVSVNLDAKWKHTPLVLEASEFLAKESNDKFWHFANAISEMKDFQTGEAMKKSNDEHQYLASLKIASHLISPLQLNLLKFSLALRANSPTVEMFNELSKDKSPPAECEVFVEVNSIISCEIDALGAFIKAAAGQPKPMLIKSDHHYPGTQGRPVMVILYAQLATPAFHQWHEILRKRAEDGEINYIFRHYIKESASHQVRLSGYGVELAIKSTEYKAKDDSKVEGQAPDSEEDTEDVEGFMFGKLKKLHPELNEHLTEFQEHLRKTSGDIDELKVWQLQDLSFQAAQRVLMAPEEEALATLREISQNFPIAARSLAGKPITDELRKEVKKNQDKLQNSVGLMPGDNAMFINGLQADLEVYDVFTLLDHLKAEAKLMEGIHHLAKQYSVVDKDEMSGLLKLDINSADSTYAIDIRDDSVVYLNNIETDRKYASWPASVQELLRPTFPGMLRHIRKNLFHLTFFVNPADPSARDLLKMAEAFYVHNAPARIGLVLVVNSDPEVDPMTDAGVAMYRAFNYIKTQDSPAKALSFITDIYDKYKSSGLAAEHVVTELREQKPKADVKKVFGVQGAWDKGRKESVEFFKRTGLTSAPQVLINGVPMKASELTADEFEEAAVTAILKATPDLQKATHSGHLNDRTDTLDFLMTRGNVMPRLNARILNPTDHFLDFSEEIRSYILIFTNCRLILFTFDSAAATMLTDLEAFQELSPGKMASAVANGLKYLAKKDEDAVRPVTMWIIADLESPEGRSTVYDAIKQMKTTNNIRFSVVHNPSEMPSPNTLSISRAVQAAISHLPVSTAKSFITKLVKEDLVKELESGSKTLEDLAVGGMDFDDYAVSLEKLDDKIFHAHRLFCEKAVEMKPGQIAVIANGRVLGPLTADENFIQADFALLEKFTHQQSAGKIHDKIKKLQLDQQDASDLTMKADALLSSVPQKESRKEVKFKAEKHSVLKISALSDGPAYEVVVVMDPTTRAAQKYTPLIEVLQQVTNVDIKIFFNCREKLSEMPLKSFYRYVLEPEVLFSADKSLASGPGAFFKDMPSKPILTLGMDPPESWLVESVKTHYDLDNIHLEEVERGVDSNFELEYLLLEGHCYDSQTGQPPRGLQYTLGTKTHPDQVDTIVMANLGYFQLKAKPGAWFLKLRHGRSEEIYDIISHEYTDSHADSDEVIVVMDTFKSKIIRVKVSKKPGMEMEDLLSESGAQADQGLWDSISSSLTGGTKDESEDKDETLNIFSLASGHLYERFLRIMMTSVLKHTKSRVKFWFLKNYLSPSFKDFIPHMAKEYDFDYELVQYKWPRWLHQQKEKQRIIWGYKILFLDVLFPLNINKIIFVDADQIVRADLQELADFDLEGAPYGYTPFCDSRKEMDGFRFWKSGYWASHLAGRKYHISALYVVDLKKFRRIAAGDRLRGQYQGLSQDPNSLSNLDQDLPNNMIHQVAIKSLPQEWLFCETWCSDAELEKAKTIDLCNNPLTKEPKLSAAQRIVPEWTDYDQQIKSLWDTVYSSKKPAVSSGSSHTSGDTKDRDEL

SEQ ID NO: 4689 - protein, 1550 aa, Gigaspora rosea
MILRKFISILVICFLSLIFISNAETPPVQAWIKTSWEAPYLVLEIIESVAVENSSAYFSLIDEFLGRGLISSNTMSDRDLYKQALDIIESGQYLSVPTSLSFLEFALYLHTTAPAVQAYYHYYNATVVPSTKDYIENHENLKFDPECDVWVDWYGNQACSIEEFKRITGITDNNKFDLSFNIKSDAPFPKLLPFDHILQYDEVTPIAILYANLYSPDFVTFHKLLSDLAKNGVLNYVLRYRPPREKRDMLYLSGYGVELALKNTDYIVLDDRDDVNVNENDNQEPIFQERSSTDHLFDQQISEIKPLKFGEITDLGLKAAQFVLEAQNPLLALSQLSQDFPKYSGPISQITLNSTWEAEIQLNQQYITDLEKNSIWINGLNLDSHTVDPFSLLKTLRRERQIMLSLKSLGLNLQRAVELLASPIISESKSSQDLFRGVFDVRDKSDEKHVIVWLNDLEKENRYAHWPHRIYELLRPVYPGQMRYIRRNLFSVLFVLDLSYVDNLKTITDYVNTLIARDIPIRFGVVPLFSDDQPNALVMAQIFYYLVDRYSTTLTMDFLTQIYSELNKKSTKEFIEIIREKYNHVINDKKLNEEKSSSTFEDIINSENSPVRKQIEDAAEFIKRFHIKPDDDGVLFVNGKYFDMDENYQRNMIQMINEYTMFLQQKVYIGEINDVTDIYDYFMSMPGIPDRRNSYIFVSDDKPLNVVNLVIDNNWSNVPINNLKYIYSENQTSEEIPMTILIVSDFNQEYGAMQALKALEFLDSSPNVRISFIHNPSNDTGDSIMSSMIYYLLYEVADLPKDLSFKSAFKEFLDKLSLEKNHMKDGDDEHQIPIGKIVNSAVSAGWQMIDNLKADKYWKDMKPFIKNRLKLDKGDTAFVVNGRIVGPIDPKDSFTPDDFELLANTELNERINPVIEAVKNLNLNLTLQGTNYSDFFFKLTSVISVSGVSDGPVSLFNVQNNKRDLLYQSLKRNYGLIQIGQKETAMYYISAVVDPLSQTAQKWSTILMALSQIEGVYIELYLYPQLNLKELPIKRFYRYVLEPRLTFNATTGALIPPTAYFAHLPEDPLLTLGMDVIQSWLVTPKASIHDLDNIRLANLTKGVDALFELKNILIEGHAFDVTTNSPPSGLQLILGTNNYPAMVDTIVMANLGYFQLKANPGVWTLQLREGKSKEIYDILSVGSEGWFSRNVNETGYEIVLNSFEGPIIYPRFVRKPGKENVNIKDDENDDSFWDYITNKFSHKQDIHKQDKAEINIFSVASGHLYERFLYIMILSVLRHTNSKVKFWFIENFLSPSFKDFIPHMAKEHGFEYELVTYKWPHWLRNQAEKQRTIWGYKILFLDVLFPLDLDKVIFVDADQIVRADLKELVDMDLNGAPYGYTPFCDNRPDMDGFRFWKSGYWSEHLNGKPYHISALYVIDLQRFRHVAAGDKIRGQYQYLSADPNSLSNLDQDLPNNMQHIVPIFSLPQEWLWCETWCSNESLSTAKTIDLCNNPLTKEPKLDRAKRQIPEWESYDNEVAALAEKITQQKASAPDNKQNVPERILHDHDEL

SEQ ID NO: 4690 - protein, 494 aa, Sugiyamaella lignohabitans
MNTPNAWIVTPSICEYDLDNIILSTASEDGVLKGTYQLSNILLEGHATDTTLDVPPRGLAVDLGTREEPKIVDTIVMANFGYLQLKANPGLWILSPKSGRSSKIFELVSIGLSSVSLSHESNKIWLTSMTGATIFPKFRRYPGMEDEDVLDTSEVSTIASKIGSGLAKVWSKFDRKTTNIVSVDDKSQAEINIFAVASGHLYERLLSIMTVSVMRHTNHTVKFWLIENFLSPSFKEFLPTLSSKYGFEYELITYKWPHWLRGQKEKQRTIWGYKILFLDTLFPQTLDKVIFVDSDQIIRTDLKELVDMDLQGAPYGYTPMGDSREEMEGFRFWKQGYWKKYLNGLPYHISALYVVDLKRFREIAAGDRLRKQYQMLSADPESLANLDQDLPNHMQRQIPIFSLPQDWLWCETWCSDESLATAKTIDLCNNPLTKEPKLDRARRQIPEWTVYDNEIADLESEFKQIKHQSNLEDKILDPVSSVQAEVDSIGHDDL

SEQ ID NO: 4691 - protein, 1523 aa, Unknown
  Description of Unknown: fungal sp. No.11243 sequence
MRPHIMGRAGQLLFATAVLTATANAAAPTVDVSLQAAFPAPPYLVELLEAAAEENNTAYFPLLDRIAEGHFDAATTDKQVYDAFLKVLQDDGHISDPQALSTFKLSLSVHSAAPRIAAHYQYYNTTASRIGTTGEECEAWLLFDGKGYCSPDLSAQPDAVVKDKHDLRMLPFDRVSGNPESQSSILYADITSPSFRKFHKTIAATIKDGRTSYRLRYKPSKSAKQEALAVSGYGVELALKRTDYIVIDDRAAPKQSEEEEKTAKQAVLNDDDDVADLKPLSASELQHLGLKAATFVMSSEDKLATLHRIVQDFPKYSGALAAGGVSDELWTELKMNAMSFLPPGYNALWINGIQSYDRDLDVFALLEQLRRERKLISSAKALGLSEKEAIELITHPAITSPSDQQDVQRYDWRDDIEGNDVIVWMNDIEKDKRYFDWPETVQALLQRTFPGQLPSVRKDIHNVILPIDFSNMTDLVMLVDSIQNFVKRGVAIRFGLVPITQSDAAAQQARIVYHLTQTYGLGVTLSYLESSFRAAVRGSRLSVQAHFEEAIHEKKLRRDRVAVPFQDVLVDEAIFAKIENARSYLTRLGASDADAPYITNGVPIPRGDDWMQHMSNRVGTDARLVQQGVYMGTIDENTWIPGVFLQGASSRRNALIIPEEDKDIRVLDLSSIPELGNAKFGSVPAIRANKESIDTYTAQMLVIADFDSEQGGKLFHDALQFRKEKDNVELFFLASSPGQVGGFTQKLDAILSKEGDLQLADLEGLEWSPATQDSSNNEGPAFSWKAGQILLQALHLPVASSVILLNGRVIGPISSMTSVTSDDLEMLLAYERKKRLQPIVTALEALGSFELASSPYSFSRITNFVALSQKSDVPEGIFEGGSTLRTSIFQQLKGEHSAFEIGNIETANIQLVLAIDPAAETAQRWLPVVKVLTEIAGVHAKIYLNPKDSLEELPVKRFYRHVLRPEPVFDASGKVDDRGAHFSGLPADALLTIGMDLPPAWLVSPKESIHDLDNLRLSSVKGDSVTAIYQLDHILVEGHSKDTTSGAAPRGAQLALTTGPGDRFADTIIMSNLGYFQFKANPGFYDLSLMKGRSQEIFHIDSAGLAGNIPSSEDTSNGIGLTSFRGTTLYPRLSRKPGMEKEEVLEPNKSTLERTVDTLADTAGGVLNAIGLDGKTAGDWISRASQKVASLSNAGSSSKDISTLPHADINIFSVASGHLYERMLNIMMLSVMKHTSHTVKFWFIEQFLSPSFKSFLPLMAEEYGFRYEMVTFKWPHWLRAQKEKQREIWGYKILFLDVLFPLDLDKVIFVDADQIVRTDMYELVQYDLKGAPYGFTPMCDSRTEMEGFRFWKQGYWKNFLRGLPYHISALYVVDLVRFRQMAAGDRLRQQYHQLSADPGSLSNLDQDLPNHMQHVLPIHSLPQEWLWCETWCSDESLGVAKTIDLCNNPQTKEPKLERARRQVPEWTVYDDEIAAVAKRKAGENASLPGIGEKGEQERLQVEEYRRKQEEEKAKNGDRVKDEL

SEQ ID NO: 4692 - protein, 1524 aa, Lomentospora prolificans
MKPRRLPASLGALLLTFASAPALAVPSISVSMRAAFPAGPYLLELIETAAAENSTSYFPLLDRVAGGYFTDAASEKDLYDRFLALLLQDGHISDPDALSTFKLALSMRSAAPRIEAHYHYYSTGVEPNFPSGSTPACDTWAFFDASRYCDYDSLSSLVVNGEPARLPDLPFDRVLGTGPSVVLYTDMQLPSFASFHNSLVEMARRGDISYTVRYRRGERPEEDDSPLPVSGYGVELALKKTDYIMIDDRDATTGRNGDSTVNRDSPDQIVLSEEEEVTDLKPLSKAEVSSLGVNAASLIMKSESPFDTLVKFTEDFPKHSAWIASHNASDEFIKEQRENLGGIVPPGVNVLWMNGVQLIERQIEPFTLVDMLRRERKLIAEAKNIGLTGSQAIALLGHPNVTSAKVDGSSQRFDWRDEREGGGVIMWLNDLESDTQYEEFPSVLTALLQRTYPGQVPRIRRNIFNAVIPIDVAKVDDLKVALQILAFVHRLLPVRFGLVPFSSNAGATDLMKVFYYLHDNYGLEGLFTYIELAAHGEQAAADDAMFEEAINAGSPPAGFKTQKLEEVLASTPLNERIRLTENWVGRLNVNSGTTPVLVNGVIVPRIDNWLQGMGARINLDLQTLRQGLQLGEVNEGTSIQELFLQESVVSRNLRIYADDEEGLNMIDLGKLYREHATLLRNVPVLDAYVDSTLENWATLSVVADLTSEDGLSLLQSALQFKANNPGIRMDIIHNPIAETSMASEINAALVANSGKLLEAGSIQEIRSLLSSHAFAPDTSYGTLLSSYLASTKLRPGSKGLILNGRVVGPLSDNEAFDEDGLQQLVEFERKNRILPVYSAVTDLGLGKVIKDPLAAAKLTSLVALSTISDLPEGIFESAPTLRTSIFNTWRSRHTTIEVGDPESASVHIVGLLNPASEQAQRWTPILKVLSQVDGVYVKLFLNPDERLEELPIKRFYRYVLEAEPTFDEVGKVKPVGATFRGLPLDALLTVGMDVPPAWLVAAKSSVQDPDNIKLSLVKGDVDAVYELRNILIEGHSRMVTQNTAPPSGAQLVLGTEKTPHSADTIIMANLGYFQFKANPGFYNIQLQTGRSSEIFEIESVGALGYGVSPGDEGTSVALMDFKGTTLYPRLKRKPGMETADVLSDGANEAKPSSENLLSRGFKAAAEFLGGSDAKASGGDKGKPLKEHADINIFSVASGHLYERMLNIMMLSVMKHTDHTVKFWFIEQFLSPSFKDSIPHLAREYGFQYEMVAYKWPHWLRQQKEKQREIWGYKILFLDVLFPLSLDKVIFVDADQIVRADMMELVNYNLEGAPYGFTPMCDSRTEMEGFRFWKQGYWANYLRGLPYHISALYVVDLRRFRELAAGDRLRQQYHTLSADPNSLANLDQDLPNHMQFMIPIHSLPQEWLWCETWCSDESLRDAKTIDLCNNPMTKEPKLDRARRQVPEWTVYDEEIAAFERKRKGETTAEDRKEVPSVQEQEQLKEKEEAQSQAAEDDGENEPAVERNTKSRKWEEEPSSRVKDEL

SEQ ID NO: 4693 - protein, 1483 aa, Aspergillus bombycis
MISGIGPVASWRLSVIVAALLTCLVHASPSVNVALEASFDSAPYLIELLETAAEENATAYFPLLDRIADGAFDDVVTDKEVYDRFLQVVHEDGYLRTPESLSSFKLSLAIRSTSPRIAAHYQYYNASVQHSLMAAQDAACPVWVHSDGKQYCSSTMERAQQDVSGDLDLRELQFDRVLGDTSLPPAVLYADVASPMFKEFHQTLSALVKEGQISYRVRYRPPQHWSPRPLYVSGYGVELALKRTDYIVIDDRDAGQKERRNEANKVGDLEEDAPDDLRPLSSSEVSRLGVNTVSYVMDSNNPLGTLVKLSQDFPKYSAKIAAHNATTKLLQDIRSSRLGMLPSGVNVMWINGVQMDPRKIDAYSLLDHLRRERRLIEKFRDLGISAQEAVDLLSHKLLGESLEQDAPQRYNYRDEIEGGGVLIWLNDLEKDAKYDSWPGELGAFLRPTFPGQLPQVRRDAHNIVVPVDLTDAEDMNFVVKTIQVFVKRKIPVRFGLVPIASSPGSTAQLKVAHYLQETFGLASLIQYLEESLSANKIASPDKTSFQAATKERKARADRSALSLEEIQKHGELAKTVSRTVSYQNRLQITGGSSLMFINGVPVVRDDNWVQEMSNRVGKDLQSLQQGIMDNAFEEDTWLPGVFLSQAFDRRNPWVIPEDPKDIRVIDLAKVSESQKGGLDVLPRITSDKDNALDSVHMIVIGDFDSESGAKLLTAALESRQKHSDVEILFLHNPAHVPSASGSIALYHLLKESQNVDVTQVLADIGSSGASVPAHKEAEIAHFWALQQPLAGELGFAPGVSGVVINGRVVGPIPGDYTVVPDDFDQLLIYEHTKRIDPVAKAVKDLAIGSKLSGPLAFAKLTSLATLSTISDVPEGIFESTSDARMNLFDKWNDSHSVVTVSNSEDPAITIVASIDPTSEVAQKWLPILKVLSELASVRLRLFLNAREEIQELPIKRFYRYVLDPEPSFSNDGAVLRPGASFSGVPVEALLTLGMDVPSSWLVAPKDSVHDLDNIKLSSLKAGSDVDAIYALEHILIEGHSRDLTTKTPPRGVQLALGTQENPYFADTIIMANLGYFQFKAQPGLWQINLKPGRSERIFKLDSVGGMGYAPQPGDENNEVALLSFQGKTLFPRLSRKKGHESEDVLDTNSKPGSAMDYVSKGLSFASGILSSVGAGSKLSTTEKQADINIFSVASGHLYERMLNIMMVSVMRNTKHSVKFWFIEQFLSPSFKSFLPHLAKEYGFSYEMVTFKWPHWLRAQREKQREIWGYKILFLDVLFPLSLEKVIFVDADQVVRTDMYDLVNLDLEGAPYGFTPMCDSRHEMEGFRFWKQGYWKNFLRGQPYHISALYVVDLSRFRALAAGDRLRGQYQMLSADPNSLSNLDQDLPNHMQHQIPIKSLPQEWLWCETWCSDESLGQARTIDLCNNPQTKEPKLDRARRQVPEWTEYDGEIAALVEKVSLEQQQSEEVQPDDEEDEEWTKDEL

SEQ ID NO: 4694 - protein, 1634 aa, Handroanthus impetiginosus
MGTQVRSGFCFVILILLCICISGHSVSAESRRPKNVQVALRAKWSGTPLLLEAGELLSKEWKDFFWDFVESWIHSVNVDSDSSTAKDCLKKIAKYGKSLLSEPLASIFEFSLALRSASPRLVVYRQLAEESLSSFPLADDFIASSSGGPNETTKGKNSEAFLLGMNPNSPGNKCCWVDTGGSLFFEVTELQTWLQEPNDVTDGAFQQPEVFEFDHVHPDSTAGSPTAILYGALGTECFKEFHMALSEAAKKGKVKYVVRSVLPSGCESKSSPCGAVGTGEALNLGGYGVELALKNMEYKAMDDSAIKKGVTLEDPHTEDLSQEVRGFIFSRILKRKPELTSEVMAFRDYLLSSTISDTLDVWELKDLGHQTAQRIVHASDPLQSMLEINQNFPSVVSSLSRMKINDSIKDEIIANQRMIPPGKSLMALNGALINIEDIDLYLLVDMVHQELSLADQFRKLKVPPSAVRKFLSVLPPSESYAFRVDFRSSHVHYINNLEVDAMYKRWRSNINEILMPVFPGQLRYIRKNLFHAVYLLDPASLCGLETIDTIISLFENNLPMRFGVILYSTKLVEKIEANDGELPAAYLKDDQEDISGLIIRLFIYIKENHGALMAFQFLSNVNKLRIEAAAEDSPEMHHVEGAFVETVLPRAKSPPQDTLLRLEKDQTLNELSHESTMFAFKLGLAKLECSLLFNGLVYEPNEEALINAMNEELPRIQEQVYYGQINSHTDVLDKFLSESGVQRYNPKIIADGKAKPKFVPLCASILAKDSVLNDLYYLHSPETMDDLKPVTHLLVVDITLKKGMKMLREGIHYLIGGSKNSRIGVLFNAKEDATLPSLFFMKVFEVTASSYSHKKGVLQFLDQLCSFYEKEYILTSGDAASHQALIDKVFQLADANGLPSKGYESALSGFSAENLRSYLDKVTQFLYRTIGLEYGANAVVTNGRVISLLDASTFLSHDLHLLESLEFKQRIKHIAEITEDIKWEDVDPDMLTSKFISDIVMAISSSISMRDRSSEGARFEILSAEYSAVILQNENSSIHIDAVIDPLSPSGQKLSALLRILSKYAQPSMRLVLNPVSSLVDLPLKNYYRYVVPTMDDFSGTDHTVHGPKAFFANMPLSKTLTMNLDVPEPWLVQPIVAIHDLDNILLENLADTRTLQAVFELEALVLTGHCSEKDHEPPRGLQLILGTKNTPHLVDTIVMANLGYWQMKVFPGLWYLQLAPGRSSELYVMKADGEGTQDTSLLKRITIDDLRGKLVHMDVVKKKGMEREKLLVPDDDDSHSSNKKGTKNGWNSNILKWASGFIGGKDQSKKGQSGSLEPESGGRHGKKINIFSVASGHLYERFLKIMILSVLKNTKRPVKFWFIKNYLSPQFKDVIPHMAREYGFEYELITYKWPTWLHKQKEKQRIIWAYKILFLDVIFPLALEKVIFVDADQIVRADMGELYDMDLGGRPLAYTPFCDNNKDMDGYRFWKQGFWKDHLRGRPYHISALYVVDLVKFRETAAGDQLRVFYETLSKDPNSLSNLDQDLPNYAQHMVPIFSLPQEWLWCESWCGNATKSKAKTIDLCNNPMTKEPKLQGAKRIVAEWPDLDLEARRFTAKIVGEHFEEPQELVAAPEIQTADDDSSEDLESKAEL

SEQ ID NO: 4695 - protein, 1434 aa, Fusarium avenaceum
MPCVSQCLAIALVAAVATSASPSVNVGMNAAFPRGPYLLELLETAAEENSTAYFPLLDKIASGHFGSATSDAELYDQFLEVLQQSGHITTPDALSTFKLSLSLRAAAPRIEAHYQYYITAVDPKSKIDGADDCQTWAFIDNKKYCSPALDTVVDSDLSAKQLNVLPFDRVLGLGKDAVLYADPTSASFGPFHDSLSRAAKQGSLSYRLRYRRSSSIPATPLSVSGYGVKLDLKRTDYIVIDDREADHKGQKPIANDVDLDADEEVADLKPLSTSELASLGLKTASFILKSENPLDSLVKSTQDFPKFSGSIAAHEVTKEFADEQEKNVAAGIPSGINFIWMNGVQLIERQIEPFNLVEMIRRERKLIDGVRKLGFNGQQAVSLLGHPQIASSKADDEAPRFDWTDRLENHKALIWLNNLEKDSRYQKLPSDLTAAYGRAFGQLAQFMQRGVTLRFGIVPLATTPTAAAQAKVVYHLMETYGLEALITYLQESEEGPDGAANKRAFSRTIDDREPVPGASKMSLSEVLEAESYVQRVKASQAWASRLNADTAVRPVFVNGLAIPRENNWVQTMGQRLSEDQQVIQKAVYFGQIEEGMSVSDLFLNTALSKRSTYIFPDDDKALRILDVNKLYTDYTGLFGKIAVLPADAKAAKVDWAVFTVVADLNTDDGQDLLVAALEFKHKSPGVRLDLIHNPSSPTDAHTINGAFKVNEGRLSKMRNKDELKTILEASWTSEDEGFSTALASFLSVANIRPGTKGLLLNGRVVGPLPSNVSFKNDDLQQLLEFEQRNRILPVYAAIEELGFTDRLLDPIAAAKLTSITALSTISDLPQGIFESAPSIRSTLYTTWNSTHTAIEVGNPETASIHIAGLLNPISEQGQRWAPILKVLSELDGVYLKVFMNPKEVVGELPIKRFFRYVLNSKPSFDKTGHVQSPKATFKGLPSEALLTAGMDVPPAWLVAAKNSVQDLDNIKLSSAKADIDVTYELENILIEGHSRDGKRGAPRGAQLALATETDPLVTDTIVMANLGYFQFKANPGFYNIQLKEGRSSKIFSIESVGAQGYSPVPGDEGTEVALLDFKGTTLYPRLNRKPGMEELDVLESPDKEDKGIVAKGLKFAEGLLGGTKSPKEISAQEHAEINIFSVASGHLYERMLNIMMVSVMRNTKHTVKFWFIEQFLSPSFKEFIPHMAAEYGFKYEMVTYKWPHWLRQQKEKQREIWGYKILFLDVLFPLSLDKVIFVDADQIVRTDMINLVNHDLEGAPYGFTPMCDSRTEMEGFRFWKQGYWANYLRGLPYHISALYVVDLNRFRQLAAGDRLRQQYHALSADPNSLSNLDQDLPNNMQFTIPIHSLPQEWLWCETWCSDDSLAKARTIDLCNNPQTKEPKLDRARRQIPEWTVYDDEIAALDRRRKGVEDNKDKSIKNQAVEGGAHTKDEL

SEQ ID NO: 4696 - protein, 1893 aa, Artemisia annua
MEPRSDLGFGNVLMYVFGLFSAEIKDQNVQVALRAKWPVLHYFLKLVWELLSKEWKDHFWDFIEIWINNESGNTDHYTAKDCLQKISNYGKSLVTGPLASVFELSLTLRSSSPRLVLYQQLAEESLSSHPLSDDINANFIDGGASEDNQDKKADSLLVGVNPKSPGGKCCWVDTGGALFFDLPDLLSWLRNPHKDGDIFQQPELFDFDHVYFDSAIGSPIAILYGALGTDCFKEFHRSLVEAAKEGKVKYVVRPVLPSGCESKSGHCGAIGTKDPLNLGGYGVELALKNMEYKAMDDSEIKKGVTLEDPHTEDLSQEVRGFIFSKILVLSRYFLLIFKNLVIINAESGLHVENYFLRGDGDIFQQPELFDFDHVYFDSAIGSPIAILYGALGTDCFKEFHRSLVEAAKEGKVKYVVRPVLPSGCESKSGHCGAIGTKDPLNLGGYGVELALKNMEYKAMDDSEIKKGVTLEDPHTEDLSQEVRGFIFSKILERKPELSSEIMAFRDSLLSSTVSDTLNVWELKDLGHQTVQKIVHASDPLHSMQEINQNFPSVVSYLSRMKLNESIKEEILSNQRMLPPSKSLMALNGALIDIDDIDLFLLLDMVHQELSLADQYTKLKIPSSTVRKLLSTLPPAESSGFRVDFRSDHVQYINNLEADARYKQWRSNLNELLMPVFPGQLRYIRKNIFHAVYVLDPASICGLETIDTIVTMFENSLPVRFGVILYSTKMIETLEANGGEFPSSLENESQIKEDLSSLTIRLFHYVKENHGMLKAFEFLSNVRVNKLRMESGEEDAPVLHHVEGAFVDTILPKAKTPPQDTLLKLEKDQSFRESSQESSLFVFKLGMSKLECSLLMNGLVHSSNEEALMSAMNDELPRIQEQVYYGQINSRTDVLDKFLSESGIQRYNPQIVGDKAKPKFVSLTASIVGDESLLSNMEYLHSVGTIDDLKPVTHLLAVDLTSRKGVQLLHEGIRYLEALMSAMNDELPRIQEQVYYGQINSRTDILDKFLSESGIQRYNPQIVGDKAKPKFVSLTASIVGDESLLSNMEYLHSVGTIDDLKSVTHLLAVDLTSRKGVQLLHEGIRYLMAGSASARVGFLFNSDLDSGSNSFILMKALEITASSYSHKKKVLNFLDQLCSFYATSQDSQSSQALLDKISELADASGIQSKGFMSALSEFSVSKFTSHLKKVGQFLHGQVGLEKGVNAVITNGRVVRVPEAVTFLSQDLHLLESVELKQRVKHVADIIEEVTWENVDPDTLMSKFMSDIIMSVTSSLSTRDRSSEGARFEMLSADYSGVVLGSENSTIHIDAVIDPLSSSGQKISALLRIIQKCSQPSMRLVFNPLSSLVDLPLKNYYRFVIPSEDDFSNTDSTVHGPKAFFANMPLSKTLTMNLDVPESWLVEPVIAVHDLDNILLENLGDTRTLQAVFELEALVLTGHCSEKDHEPPRGLQMILGTKKNPHLVDTLVMANLGYWQMKVSPGVWYLQLAPGRSSDLYILQDGQEMHLTKRITIDYLRGKPVHLGVVKKKGKEHERLLIPSDDDDSSRKQGDEESWNSNILKWASSLIGGNGQSKKSVSTKVENVNNGRKGKTINIFSIASGHLYERFTKIMILSVLKNTQRPVKFWFIKNYLSPQFKDVIPHMAQEYGFEYELVTYKWPSWLHKQKEKQRIIWAYKILFLDVIFPLSLEKVIFVDADQIVRADMGELYDMNLKGRPLAYTPFCDNNRDMDGFRFWKQGFWKEHLRGRPYHISALYVVDLIKFRETAAGDNLRVFYETLSKDPNSLSNLDQDLPNYAQHTVPIFSLPQEWLWCESWCGNSTKSRAKTIDLCNNPMTKEPKLQGARRIVTEWPDLDLEARRFTSKILGEDVSPVEKVVSPPAQQEVPEEDLERKDEL

SEQ ID NO: 4697 - protein, 1859 aa, Smittium mucronatum
MFSGRKFVRFLLTLLVVQHSAPFVSVLGDDSQGPSEPALGQKSNQHVFAKDQGLPSADSPPIKAMLRAPFASPHILLELGEIIYSRNPNYYFLFLDYLTKNPSLFDSSPEKAYKSGMDWLKTELLASNSVSSSDSIDWIIGLSDLDLSVHTKAPKIIAQFQYYLNVVSESPLFSQSPNTHPPSNSNSNNNNEKNQIGDCHSWVWWNGNKACNQDDLEKLVESQTFYGDTYKSPVTSFPVSLSFDHIYPSPNPNKHPDNVAILYGHPSSTGFSKLNNYLIHLSNLGDTKYILRLIPPHNSNSPIVSNGNLNGMELSGYSVELVLKSTEYKVIDESNLFSNTDGQVEGSGNEWNFGENHYKERSYISKKPSSLIQADNNSTIVTNIDKDLLINLSKNIAEEVLNASEPLEMLEWITGDFPKYTHLFTHPPKNKTRAKIAQKLSKKLVGVKNVITLNGLAITPQSLNPFEISNMLENERKVSSSLQSLGLSSEQAIHFISSPMGTNPDSSPDSTNASEDLIYDISDKNEGRLVIGWLNDLSNDLRYKKWPSGISSIFYSQGSSSLPQISENIVSSVSALDLSTIDGIQFFTETIIGAIKKDYPFRFGIVPMSSTFSSSAILKSKTCVDLTNIDFSQPDQSLATSSLSPEPADTMARVFYYLYHFAGIRKTTEYFTQVLKLASSKNPSEISANTIIQVAESAYNSIIFGTKNNQSLKKIKNLITNFSNDKDTIDLISQKYRDDFLSWDLIKSDPVLGALLCKHSSYVSRLNLIAPDTNQVASKDELPNSQSVTVFANGNQITDLGSFVPELVKNYQQSSYLLLTKLLSGSIPNTGMDILQEIISSTPHTAFRNQLITSKCFLDSKPGTKLVAKSEQVGILSLFNSDFSNSQTKKIKQWLSGIEYLYIPSLQTPQISNSIPTTIWLWANLDSVVGRNRIVESLQSALDLCISGKNEISGFRISIFHVPKSFSKDKTVEEDNDEEGDNQDGDTKNVPKSKEGKLIYFIMKKITASGDSSKFSSNEAKLLATTYIQHLLKNKEDSAITGQNLIDELKNLDKKSKLKLDLNLANDLVETLNKEISNIERDDEISSYYNKYSADMVDLIKVSYGGGNWDEISIFKNGFQPDDFLISISGRLFPVVKSHQQYNSDVVKILLAREYAARIGGSEKAFSKGLTAKESKKQKRISADTFLQTLCILEQSKMSSISDSIFQSGNTLNRLDIFEGLDGYEDFTFEVSTSNSRNKNSNIYAHFKAFLDPISDDVQDVVPFLRILSKIPGIKVSVMINTFTVPESLPLRQFKRFVFNHKPLFDSKNGGQRVGVGAEFNNMPKDALLTLEMNVPSSWVVSATKSDYDLDNINLKSVNSKFGIAALFSLNSVLIEGHAQDTVNKSPPSGLQVVLSKGPYSVSSNKSQFDNDVYSREKSNYGEIEAETIVMSNLGYFQLQGQFGVYSLSTREGRSSRMIEIICLGANSYSKCSRALESKYVEKSKESNNYGVIVSDSFNGVTVYPVFSKRAGMEKESILASGGDEDKPIDEGVGIWESAMRAFNKMFGAKDEPNEKEINSVVEVKEADLNIFAVASGHLYERLMSIMIASVVKHTKSTVKFWIIENFMSPSFKKFVPILAAQYKFQYEFVTYKWPHWLHSEKEKQRTIWGYKILFLDVLFPLKLKRVIFVDADQIVRADLQELSDTDLEGAPYGYVPFCEDRKEIEGYRFWKVGYWKTHLKGRPYHISALYVVDLTRFRELGAGDKLRYQYQSLSSDKNSLSNLDQDLPNNIQHIVPIYSLDQDWLWCETWCSDQGLERAKTIDLCNNPMTKEPKLERAKRLIPEWNVYDAEIQKLRTSFNSDSSQKKEKPDEYIKQEL

SEQ ID NO: 4698 - protein, 1460 aa, Folsomia candida
MTWISSCLQFLGVVAVTAIIVTVTEAHQPPKQSITTRLQAPWAPTSLLHEASEYLGELNPNLFWSFLETTLQKLEHLPTPATGRTEHDLALVVAYNFLSSSKLRMLDWALTARTQSPKVLSLQQLAPENTPPECPDAFVNLGSKTSCSVEVLEKLLEQSSGAEGLLQPPLLTDDDHKFPSLVWTQHQRTEGEERSSPPSVAILYGDFKSKKTPELHQLLKRWSDRVGYVFRPFETKGNKGDNDGKKLLLAGYGIELQFKSTEYKAQDDSEQAGSRELGGFNFDKLEELYPDKGEELAKFQNYLAAQKGAKTEFEALKAWQVQELGLQASYFAAEKPDMLTALRDVSGNFPSRAATLSSLRVPPEFKKSVAHNQRLLASHFNLDEGEGAFFLQGSYVDPDALDLFTFMQNIQVELEFMELLRSLRQDWPAVTRGEVEKIIALGTKSQAEPELALDMRDSSIFWINDLEKDEEYEDWPDDLTQLFFRMGGIMLRPVRRNVFNLVVTVDPADPSAGALLKMVHSFMVHKSPVRIGVVFCSAPSTPETDTTNASLIRRLMNFAASEGKMRTVFHDVVNAYVTSDFVTLKKKWGSLTNGDELEFGAELACDFVRRSGRPTPSAFLNGVPLKWDSLDDFEDVVLNQLLKEAQSVQVEAYNGKVNEDTDIFEHLMNKCHVLTRLNDKILDTSNSKVVSFGTESWSALGKQFRDPLANIANSVAYLTPTGKKSVPVTVSLWVFSDLETEQGRTFLLRTVEFLEESATHARIAFISSSDHLSKFTQEVLEAFGNADLKAIKKLLQSDTYDAGARGESNVLGQELMKQLGLSGGDRGVLVNGRLIGPLPPTESFELGDWALIQKFTFDSCPKHLEGDDWTPDAVMRLCSALASSTFKKSAKRFILPEFQSPVMAGKGREGGSGTGDTAGDVFYVDLTAVIDPASRHAHKMAALLTAVEQKVGEWVRSRVVFNPPSKHSELPLKSYYRYVAGLTPDETVTFEDIPREPLFTQNIAAPDNWMVEVVTCEKDLDNIRLKDLGTDSVDSVYELEHLLVEGHCLETKTGSPPRGLQFTLTPHNPNVRTAETIVMANLGYYQLKASPGLWALDLREGPSRDIFALESNKQRIVSVNSFQSVVLKVKVRRNPGKETASLLDTEEENSSWFGFGGSKQKEAEEDTINVFSVASGHLYERLLRIMMLSVVKNTKSKVKFWFLKNYLSPTLKDILPEMAKEYGLEYELVQYHWPRWLNPQREKQRIIWGYKILFLDVLFPLSLKKIVFVDADQVVRADLKELFDLDLDGNPYGYTPFCDSRTEMEGFRFWKHGYWKSHLGRRKYHISALYVIDLLRFRRIAAGDRLRGQYQALSQDPNSLSNLDQDLPNNMIHQVGIKSLPQEWLWCETWCDEGSKKAAKTIDLCNNPQTKEPKLDAAQRIVPEWKDYDTEIRNFQQRLHKERSGDRSSSNQDKDKHTEL

SEQ ID NO: 4699 - protein, 1286 aa, Peromyscus leucopus
MFLSGYGVELAIKDTEYKALDDTQIKTMTDTAVEKETEADEVQGFLFGKLKEIHSDLKDNLTAFQKYLIESSKQMMPLKVWELQDLSFQAASQIVSTPVYDAIKLMKDISQNFPIKARSLTRIAVNELMRKEIKENQKDLRDRFEIKPGDARLFINGLLVDMDVYDPFSILDMLKSEGKLMSGLKNLGLSEEDMSKFLKLNSPVWNYDYVLDIRHSSIVWINDLENDGLYISWPTSCWEFLKPVLHGTVPSIRRNFHNLVLFIDPAQEYTLDFIRLAEFFYYNEMPLRIGFVFILNVDNEVDGTTDAGVALWRAFNYIEEKYDVSEAFISMTHMYEEVKGHRVLTVDNVKNILQNKSPYADILDILGPHSKYDRRRTAGTSFYKMTGLGPLPQALYNGEPFDLKEVSTEELKGAVLGKMMDAFVYLQRDVFMGTLNDEINAIDFLMDKNNVVPRLNSLILHTEPQYLNLLSSSVTADIEDFSTFSFLDSQDKSAVIAESMQYLTQEDPVISAVTLWIIADFDVPSGRKLLLNALEHMETSVHSRLGIIYNPTSKINEENTVISRGILAAFLTHKNSLLRRFLKKLAKEETAEAIYSGDKIKTFLTTGMDKNAFEKKYNTVGVNTFRTHQLFCQDVLQLQPGKTGIVSNGRFLGPLLEEFYLEDFHLIEKITFSNSVEKIKDIVENMEINSKHMSDLVMKIDALVSPLPVRASRYNVTLLKENHSVIKINPPENDTFFDVVAIVDPLTRAAQQMAQLLAVLGKIVNARIKLFMNCRSKLSEAPLRSFYRFVLEPELMSGTNNSPSRGPVAKFLDIPESHLLTLNMITPEGWLVEIVHSNCDLDNINLKDTGRVVTAEYELEHLLLEGQCFDRTTEQPPQGLQFTLGTKNNSALVDTIVMANLGYFQLKANPGAWILKLREGKSEDIYEIVGHEGTDSETDAGDVIVVLNTFKSKILKVEVKKKLSKIKEDILADKHENRGMWDSFKSFTQSLHEGDKKENDILNIFSVASGHLYERFLRIMMLSVLRNTKTPVKFWFLKNYLSPTFKEVIPHMAKEYGFQYELVQYKWPRWLHQQTEKQRIIWGYKILFLDVLFPLAVDKIIFVDADQIVRHDLKELRDFDLGGAPYGYTPFCDSRTEMDGYRFWKTGYWASHLMKRKYHISALYVVDLKKFRRISAGDRLRGQYQALSQDPNSLSNLDQDLPNNMIYQVAIKSLPQDWLWCETWCDDESKQRAKTIDLCNNPKTKEPKLEAAARIVPEWVEYDTEIRKLLDHLENKKNAISVHDEL

SEQ ID NO: 4700 - protein, 353 aa, Paenibacillus sp.
MIVKNESEKIGRCLRSVQSVVDEIVIVDTGSTDHTKQIASTFGARIFDYIWNDDFSSARNYALEQCNGDWILVLDADDRITHASRKEIDDFIRKHAALGRIQITNSFDYNGELRESKAHVTRLFPKGSFYTGKIHEQIVSELPRKNVPIEVYHDGYFKSEKYKRNIKMLEVELEQNPDDSYTLFQLGKEYRIIKEYAKANVYLTRCYKAITSNDGYKPQVVIEYLYTILGLDDFERGLTLIEQETHNLSDYPDFLFASGLFFMELVFSETDKYFKYFPLIEESYLKCLSIGDTTKYESVKGTGSFLAAYNLAVFYETTGDLGKAKTYYRISAEYNYKMAQQRLGILNTIKEEN

SEQ ID NO: 4701 - protein, 631 aa, Lysinibacillus sphaericus
MKPRILIASPVRQKPLILDYFLFSLQSLNKDEHKVDFLFIDDNDDQQSTELLTLFQSQNEGVKIIKNNQQNELYRKDEHTHYWTDSLIEKVGKMKDRIIEHAIQLQYDGLLLIDSDLMLYPNTLQNLWNAQKDIISNIFWTEWNKNEVALPQVWMMDEYTLYEINNGEKLEPIDIANRTSAFINKLKVPGIYEVGGLGACTLISRKALLKGVRFKQLKNLSFWGEDRHFCIRASALELPLFVDTRLPAFHIYRESDLLGAEKFKNEIIIGKKQQATVSLCMIVKNEEQVLARCLSSVQGLVDEIIIVDTGSSDKTKEIAKQYTSLIYDFEWIDDFSQARNFSFSKATKDYILWLDADDIIEERERIHFLNLLEELTNKEVDSVMMDYHLAFDENGNPTYSLKRNRVVKRSCDFKWVGAVHEYLAVQGNVIQRNIAITHRKEKAYTDRNLKIYKRREAQQEQFTARDLFYYGNELKDHALYKEAIDKYQQFLATKQGWIEDEIAACIKIADCYEMLNDADRQLHFLLKTFAYSTPRPECCCRLGAKFLADSQYEQAIYWYEQAISMKNKPKQGNLIEHIAWTWLPYIQLAVCYDRLGQYDISNNYNEQALQYDPTNKLILDNQQYFKNRLKD

SEQ ID NO: 4702 - protein, 373 aa, Paenibacillus sp.
MYRKRVKTLITISLCLIVKNEEKTLRPCLSSVAKAVDEIIIVDTGSTDQTKSIANSFTDHIYDFKWIDDFSAARNFAFRRATKDYILWLDADDILKEEDCNKLIKLKADLEPSVDSVTMFYNYAFDEFGTPTFRFKRNRLVKRENQFKWIGAIHEYLEVSGNIMDSDITVTHCRIHTKSDRNLKIFQNRLLRGETFTPRDLYYFANELKDHNKYAKAIIYYNKFLANGKGWVEDEISSCSNLADCYNQLGNSEMELQSVFRSFQYDSPRAEFCCRLGYYFLTRKQYEPAVFWYKLASELQVPTHNLGFSNPKFSTWLPHLQLCVCYDHLGQHANAYKHNEIARTYRPKDRNIQHNKKYLESVLHISDSSQDAE

SEQ ID NO: 4703 - protein, 357 aa, Amphibacillus jilinensis
MITISLCMIVKNEADVLERCLASAKDIVDEINIVDTGSTDQTVEIAKGFTDRVFFYKWTGDFSAARNESMKYATKDYILYLDADDVILPEDQKKFLKLKETLNPNVDAVSMYYHAGTDGFGNVTLKYRLNRLLKRTKGFKWQGDCHNYLNVSGHIINSDIAITHKKQQHSVGRNLNIYQKRKERGDTFTARDYFYYGNELRENGHYQEAIDSYNKNLELKTGWIEDKVYACINKADCYRFLNQAEQELAALFQSLNYAKVPRPEICSRLGFHFQSQHAYQQAVFWYELATQLETDPNKWSFTYPAYSTWYPHLQLCVCYYKLGNFEKAFEHNERARVYRPEDERILYNKQLLENKRS

SEQ ID NO: 4704 - protein, 574 aa, Bacillus sp.
MKPLISFCMICKNEEKMIARCLNSIKHVVDEMIVVDTGSTDKTIQIATSLGAKVYQHEWVHDFAVARNSGLERATGDWILFLDADEELHPEDGKKLRKFAKYSRAPGCYLKLINFVGKSDNFKSSTKDTVPVLRFFRNHHDIRFVGRVHEQIGGSIRARYETKYIPYENIRIFHYGYLEDIVKEQDKIKRNFKLIKKQVEEEPKNPFHHYNIAGEYIRVNQFQFALEHLRKAKSLCEINRVGFGHLIVKKEITCLDFLGRHEEALEVCRNEIKRFQDYPDLLYILGRCAIVCQKNEEAKEAFRKVMTMTTPPSHYVIDVTIPKIKAPFYLAKLFEEVGEVGKALNFYEGILMNNGLAYYPAFERFLDLMVSQEGEKVLLRQLRKLSFSKIEKELIVQHLYEANFYELALQLVKEGWNDNGQIKNMLLFLTNHESEVSGETNLKLIVQWIKEQTLHNPTRIENSTFIHFLHNGEWPDDVYPTKLDWELLEFAYKLSRVHEKRKNATQLMKLWKYFIFLKGNTSEVSRGGLSLALNLVFQARSLLNEQKSPVSHLWEDVSHHIPYPLIEQGGRIDV

SEQ ID NO: 4705 - protein, 356 aa, Lachnoclostridium phytofermentans
MITISLCMIVRNEEDNISKCLISVRDIVDEIIIVDTGSTDKTKEIVGLFTNEIYDFEWINDFSAARNFSFSKATKDYILWLDADDVLLEADRIKLKRVKEILDPSIDVVMMNYNYAFDEKGNVLLSHFRERLLKRAKNFLWNDPIHEFISFEGKVVNSDITITHKKSHMNNRRNLNILEAMLAEGKEFSPRNMFYYAREKLNVNEYEGAIEYFNKMLDSEKGLPADCISSCIYLAKAYKAKNDRKNMLKALIRSFEYDTPRAEICCQLGYYYKDIEDYKRAIFWFDLAMKLEKPESKWGPILHEYWGFIPCIELCLCYYKLGNIDEAIKFNDKAAEYKPEHPSVLQNKKAFGNIKN

SEQ ID NO: 4706 - protein, 351 aa, Unknown
  Description of Unknown: Lachnospiraceae bacterium MD335 sequence
MAKLPISVCIIAKNEEKYIGDCLSRIKRYGFEIVVTDTGSTDSTKEIALQYADKVIDFEWINDFAAARNYCAKAASYNWILALDCDEMMESFDEKAVRMMTQKYPKDRGMLNFKLMLRNAVGEECFEWDKMVRLYNKKYYEFQGAIHEQIVPRNDFDTRKHNPANIILPVNIVHLGYSISGEEMEKKQQRNIELLRGCVENEPGNSYLWFQLGQSHYIIKDYENAVLYYRKSLELLNGNLSAGHAQELLISLSKAYAGLEQYEATLEVLLEYADRCKSAKYAYATALAYIENEAPVKAMLEFIKIIALPDAETLGSDLETCYGCIIDLYEQMGDPGMAEFFRNKRNERFYN

SEQ ID NO: 4707 - protein, 650 aa, Brevibacillus sp.
MKISVSACVITKNEEKNLPVCLKSIQSIVSEIIVVDTGSTDRTVQIAKEFGARVFSFEWIHDFAAARNYAIEQASSDWIIFLDADEYFSPDCVQYLPGAILEATQKELDMILCMMSHIEPKTGKLTFSNIHIRIFRNHPQIRYVGAIHERIVRMDKPAQALDVQQDITIIHTGYCDEDLHTKEKGKRNLEILFSELQKKPDSFDLLFYIAESYLVDKKYEEALEYAKRAQKYRNSGLKGVYEKNYVNIIKCLNQLGEQEKVILQTILEAIEEYPNYPDLYLLLGDAHKRSYRYRDAIHVYQIGVNLLNQSSIAQSNGYATAAKVLDSVGFLYSKLREWNQSVTYHVQALQIDKFLYTSLVNLISVLGRFEKPDTVVAFLDKIYERSNIRECLYLFRASLESNNIGVATILLKNLPEKDPALKEFKAIFDFLTGNYEHAYSVFCDLYRETSTIEYAYGALAAAWKKNNPNYYTDLQNLFSNDSELHQLTLNILGDTSQFNIDKKSMLMFLIYVCGTLKISDFQLLFDVVKKSNLYLEMAEYLYIQEKYVDAYQFYNVFLEQGEQLPSNRLAEITFKVGDCLLQCGLHEHAWAFLQKAHSLVPEDFRVYESLFELAKHSKRVHEVKSVLETAIRKYPDSNFLRNIKEQLILA

SEQ ID NO: 4708 - protein, 283 aa, Cytophaga aurantiaca
MNSITVIILTFNEEKHIARCISNLNKIASKIFIIDSYSTDKTVEIARSLGAEVYENPWVNYASQFNWALENCPIETTWTMRMDCDEYLLDELIDEVNHKLPGLPADVGGIILKRRVIFMNKWIRRGGFYPHNLLRIWRSGTAKLEDRWMDEHVVLEEGKTIFFDKDMVDHNLNDLTWWINKHNSYASREVIDLLHIANHTTSSQNVESTLVGEQYSRKRWIKEKIYSKIPLFVRPFIYFVYRYIFLLGFLDGTPGLIWHFLQGFWYRFLVDAKMYEQRIKNKS

SEQ ID NO: 4709 - protein, 355 aa, Romboutsia weinsteinii
MEISLCMIAKNEEDVIARCISSIKDIVDEIIIVDTGSTDNTIEIAKNLGASVYEFEWIDDFSKARNYSFSKATKDYILWLDADDILNPDDIDKFRELKSNVNNLVDSVTMNYVLTVGPKGEFISSLRRNRLVKRERNFKWIGQVHEYLEVYGNIINSDINVIHKKEKAYTNRNLRIYEESIAQGKELSTRDKYYYANELCDNGRYDEAIEQYIKFINTNEGWVEDIKGACSKIADCYSYKKDSENELRYLFKSFEYDVPRADFCCRLGHKFFGENKLDIAIYWYNQAINAAPKEGNLSLINHDTYTFTPWVQLCVCHDRKGDMKLAIECNEMAAKYKPDSPAVKHNREYFKTKIQ

SEQ ID NO: 4710 - protein, 302 aa, Bacteroides sp.
MSNNSIAAIILTKNEEKHLERCIRSLKGVCDEIIVIDSFSTDRTCEMAEQMGAKVYRNPWKNYATQFNYGVYQCPIQSEWIWRIDADEFLEGNIGLAVKDAVSRCNADVNGVYVRKRIDFMGRPLLHGGWYPSYHLKVFRKGHGDCENRWMDEHIRIFDGTTITVKEGNQVDANLNDLTWWTEKHNGYATREMVDMLMMEYGMDAKAEEVIPKFFGTEEQRKRWLKIKYVKAPLFVRPFINFFLRYVLKAGFLDGKEGFIWHILQGFWYRMLVDAKIYEIKKRFGHDAEKIKAYLKENYLNL

SEQ ID NO: 4711 - protein, 300 aa, Persicobacter sp.
MLDISVIILTYNEEKHIERCINNVKGWVKEVFIVDSFSSDKTVALAQKMGAQVFQNKWEKNYAKQFNWGLANLPITGEWVLRLDADEYLLPELVAELQDRLPNIESRVSGITFKRRHIFMGDWVKQGVYPVKLCRLFRKGKGVCEQRWMDEHIVLKSGTDLEFEHDFVDHNLNNLSWWIGKHNGYAIREAIDLLDMEYGLISKETVPQDLELNRQADSKRSKKYKYMRQPLFGRALAYFIYRYFFKMGFRDGKAGFMWHFFQGWWYRTLVDAQIFEIKQKCGGDTTAIKQYIAKEYQIQL

SEQ ID NO: 4712 - protein, 309 aa, Dyadobacter jejuensis
MVDLSVIILTHNESKHIERCIRSLQLITDKIFIVDSYSTDNTVEIARSLGVEVVQNKWISYAFQFNFGIQNTPFKSTTWSMRMDADEYITPALAAELQETLPHTTPDISGYYLKRRVYFMDKWIRRGGYYPIWLLRIWRQGDGVCEELWMDEHIKLSRGNTARLEHDIVDHNLNNLTWWTQKHNNYAIREVIDLLNIKYNFGNKESVTPNLWGSQEQRTRYLKIKYAEFPLFTRPFIYFVYRYFFKLGFLDGKKGLIWHFLQGFWYRFLVDAKIYEVYRSAGKNKKDIIEHFRTEYGKDLEKPNQSVAL

SEQ ID NO: 4713 - protein, 252 aa, Unknown
  Description of Unknown: Candidatus Amesbacteria bacterium GW2011_GWA1_46_35 sequence
MLSSIIITKNEEDMIGECLLSLEFSDEIIVVDTGNTDSTDDIAKSFGARIVTSNSNSYAEFRNAGLKAARGDWILYVDADERVTPLLKKEIEQIMFSPDSASAYQILRKNIYLGKEMRFGGWGGDRVIRLFKRSALQRYEGQLHEQPVFTGNLLTTHYELTHYSHRDLSSMLDKTLDFTAYETRLRLAAGHPPLAWWRFLRVMLTEFWLRFVKLSAWRDGVEGVIDGIFQVFNMFVIYARLWKLQNEKRRHI

SEQ ID NO: 4714 - protein, 280 aa, Unknown
  Description of Unknown: Candidatus Cerribacteria bacterium 'Amazon FNV 2010 28 9' sequence
MGETTVTKEKPTISAIIITKNEEEMIANCIATLLFCDEIIVVDSGSTDNTVGIAKREGASVVCTTEGKFKDWRMAGLREATCDFVLYIDADERVTPKLADEIKRTIAFTSYSAFLLKRNNIHFGKWMQHGGWERDSIVRLFSRGKLLRWEGNVHENAIVEGPIGLLQEPLVHLTHRNVRDGLIKSYVWTDTEAQALVNAGAKQVTPFTLVRKTLMEFFRRLILKKGYKDGMEGWIESMQQAMNRFLVYERVWELQQKPSLPQRYERVEKEILHLWKQIGK

SEQ ID NO: 4715 - protein, 345 aa, Butyrivibrio sp.
MRGMAMVTVSLCMIVKNEEDKLKTCLDCLKDLVDEMIIVDTGSTDKTVEIAKSFGAKVFEYEWTGNFSDARNFSFQQATCDFIYAADADETIDEENQKRFKQLKIDIDELDIDVVQMYYCNQLSHNTVYNYDRELRPKLFRRVRSFVWEDPIHETVRLDPTVCNSDVEIIHNPTEEHGERDLTAFRCSITRGEYISKRLHNLYARELYLVGSDEDFMLAKKFFEESIVDTGRTLDEIKEASCVLAHIAVIERNTEALLKYSLKDLTTIPSSEMCYELGNYYRNIGDLDEAIVWYYNAVYESSPILNIHIGGDVTLMKLSECYRELGNLEQAEDYEKEARNWHVPY

SEQ ID NO: 4716 - protein, 323 aa, Spirosoma luteum
MADVAVIILTHNEEKHITRCLESLKSFTDKLFIVDSFSTDNTVEIARSMGAVVVQNAWVNYATQFNFGIAQIPFQTPWLMRMDADEYVMPELASEINKRLAGLPDQVGGVYVKRRVFFLNRWIRHGSFYPIWLLRLWRRGDGFCEQVWHDEHIKLTKGESIQFEHDIVDHNLNNLTWWTQKHNHYTILEMINLLNYRYQFDKAETVQPRLFGTQEQRMRYLKEKYASLPLFTRPVLYFLYRYFIRLGFLDGRPGFVWCFLQGLWYRFLVDAKLLEVSIRVGTDKEALIDYFRKEYGKDLRPDKTPPVGQSSISSPSASASNPA

SEQ ID NO: 4717 - protein, 273 aa, Leptospira biflexa
MEGKRKRKLSVAIITFNEEKNIGDCIRSVVSFADEIIVLDSLSTDKTKEIATSFPKVRFLEAPFPGHVEQKNKAISFCQNEWIFSLDADERADEVLQNSIQTFLETDEVHCDGYKIARLTFHLGRWIRYSGWYPQRRYRLFKKENASWIGENPHDFIELKPGSFGKVMKGNILHYSFTDFSHQITTINQFSSIVAYTRYAKGERFSLVKTIIKPLGKFFEIYLFKFGFLDGIPGLWIALASSFSTYLKYAKLYELDQLKIQRPSNIRKDYGKK

SEQ ID NO: 4718 - protein, 356 aa, Paenibacillus agaridevorans
MKTLSLVMITKNEEAVLGRCLDSVKSLVKEIVIADTGSKDLTNEVAATYGAKVFECEWNQHFAEARNFAISKASGDWILVLDADEYISNDCAAAISAFINKGDAIGRIRRIDKFRSKDGVSYASSYISRLFPKHVRYQGRIHEQLDSSLPRVTLPVEVQHDGYFETTRSERNIPLLLMEIEADPANPYYHYQIAKEYRGLEKHEAARQHLQTSSSLLTKRELYYPNVIVDYLYAMMATKQMEIGIQVINENQQQLNDFPDFHFVRGQFYLDLLLQDTQRYIHLFPEIEKAYLECLRIGESNKYESVMGTGSYSALHNLAVFHEVTGNMNKALDYYEQASHFSYAPSIERLAQLKRN

SEQ ID NO: 4719 - protein, 356 aa, Unknown
  Description of Unknown: Thermoanaerobacterium saccharolyticum sequence
MCQSITISLCMIVKNEELTLDRCLTSIKDAVDEIVIVDTGSTDLTKNIAKKYTDKIFDFKWIDNFSAARNFSFSKATMDYILWIDADDYMEPDDLEKLINLKDNFDTSIDSVTMKYVLTKTSNGSPSFISIRNRLVKRTKDFKWIGAVHEYLEVYGKIYNSDIQIVHGKIKNTPNRNIEIYEKMIESKKDFSPRDMFYYANELAEHKRYAEAVQYYNMFIDSKKGWMEDILYSLGKLADCYEALGDLNKRDEAIFKSFEYDVPRPEFCCRLGYKFLQENKIKQSIFWYELATKVEKPNQGFVNIACSTWLPHIQLCICYYRLGDIEKSYMHNEEARKYDPNNPMVLQNKAFLESIL

SEQ ID NO: 4720 - protein, 363 aa, Bacillus toyonensis
MITISMCIIVKNEEKTLERCLKSVEGIPDEIIIIDTGSTDLTKKVAKQWTQHVLDFKWINDFSAARNYSFNQAKMDYIFWLDADDILLPKEHQKLLDLKQTLNPNIDAVSMIYHTEFDINNNVLTSIPRIRLIKRDKKFQWYGVVHEDLHINNQNNIYESDIIVTHKKIHNNKKSTRNLKIYEQYYKKNKDKMTLHDIFHYARELQKHKKYKEAIKFYLIFLDSQDIQIEHRLFVMHKLASCYYLIGDFQKEKEITLHSLEYDIPQPEFSCRLGELFLKKDQFYQAIFWFKQAIEFSSTNSSLFIEQQPFKTWLPHKQLALCYYQIDDYKQSYYHNKMVLKYSPNDKETIINIKTIEQLINTK

SEQ ID NO: 4721 - protein, 459 aa, Yersinia frederiksenii
MSDINYFNSNYLIRLKDFILNSIAESDKINLLNNWLDKVSFILEIDPRLNCFVVMDNTFHDIYLDKILNDILVLFERIYQVSLPTISAVIIVKDEERCIYRCIESILDYVDEIVIVDTGSTDSTMDIINSIVSDKIKTYSTPWENDFSHARNFAKRKAKKDWLMFIDADEYLDGKGDYNEVKEILLILQFLSIKNEMVICPFISNHNGYNVTTVRRFFLNNTDINYFGLVHEEPRINNTKPYYISVNITFIHDGYMHEIVKNKRKTDRNLSLLSKMMLLEPNNLRWKYFYYRDGIEVIDLLNAEVGIKSSLILNEQYDFSKSNIREDEFTFALLDLLAKNNLRQSKFDDVDIITDIMNCFLPENSNSYYYKCLINIVELKSKYKELLDKTILYRERNIDPQYGMIHSEGYHIDALISILLFDNNYISQAAKYFDFLNSINFNSDILNEYKSKIKQIKSL

SEQ ID NO: 4722 - protein, 272 aa, Unknown
  Description of Unknown: Chitinophagaceae bacterium sequence
MLPNTNISVVIITLNEAGNIADCLRSARMLTEDIIVVDSGSTDGTARLAALCGAHVLQHEWKGYGHARNLGAAAARNPWILALDADERLSTDLVRELNQVRLQQGIVYRFPRRNHWEERPIRFGTLGFERIARLYHRGDAHWNDFAVHERLTGIFTMLHLQGCIVHYGIQDPARYAEKKAHYAWLCALTYARQGKAAGLLQRIGAPIFNAFKSFVLLGGFLDGARGWQTAAAIFSYTLRKYRLLHQHRATLLAPVPAEQSVSSAYTLARFDP

SEQ ID NO: 4723 - protein, 310 aa, Runella zeae
MNDISVIILTYNEEKHIERCIRSLMPFTDKVFIVDSGSTDRTVSIAESLGAKVVYNAWITYAVQFNFGIENIPFDTKWLMRMDADEYVTPELANEIKTNIASLDSSISGVYVKRRVMFMNQWIRRGGYYPTWLLRVWRKGQGICEELWMDEHIKLSEGQTVQFQNDIVDHNLNNLTWWTQKHNNYAIREVIDLLDIKYNFGDAERVIPKLFGTQDQRKRFLKHKYASLPLFTRPFAYFLYRYFVKLGFLDGTKGLMWHFLQGLWYRFLVDAKIYEVYYRVGHDKQAIIDFFKNEYGKDLTAAQNRPVEVR

SEQ ID NO: 4724 - protein, 249 aa, Unknown
  Description of Unknown: Candidatus Microgenomates bacterium sequence
MFSAVILTKNEENNIKDCIASLSWCNEIIVIDDDSFDKTAEVARKLGAKVYLRSLNKDFSAQRNFGLLKAANEWVIFVDADERVTETLSSEILAFQFSNFNKFSGFFINRKDNIWEKELKHGESGNIKLLRLAKKDAGKWEGAVHERWKISGQTDILSNELIHFPHQTISEFLKEINFYTDIRANELFRKGKKVNIFSIICYPVVKFLQNYFIKFGFLDGLEGFIFAVTMSFHSFLVRGKLWQMLQNEK

SEQ ID NO: 4725 - protein, 294 aa, Ruegeria kandeliae
MTHTITAIILTYNEEQHVERCIRSLDGVVERICVIDSFSTDRTVEVAESLGAEVFQNSWPGHAAQFQWGLDTIGVTSDWTLRIDADEYLDQGLRARLLGDWADEAFNGYYLRRKIVFLGRPITHGFFYPLKILRLWRTGQARMEQRRMDEHVVLKDPHTEVLEGGDLVDENLNSLSWWVEKHNGYAALEAISRIEAEEGKRKSEAKLSGQAARKRWLKEKVYTRIPSTLRASLYFVYRYIFGRGFLDGKEGFFFHFLQAYWYRTLVEAKLFELEKRAADRGITPYALLAEEGVL

SEQ ID NO: 4726 - protein, 305 aa, Unknown
  Description of Unknown: Candidatus Sulfuricurvum sp. RIFRC-1 sequence
MKSCISVIILTFNEEKHIGRCIESLLPITQNIFIVDSFSTDRTVEIATALGAKVFQNRWPGNHAIQFQWGLEHCPITTEWVMKMDSDEYLLPELANEINEKMNMLSDDVSGIYIKRRVYFMERWIKHGGYYPIWLLRIWKYDKGMMEQRWMDEHIKLSSGTTVQFEHDLVDDNKNNLTWWTEKHNNYATREAVDILNIIHGFSKYDEVEANIFGTQEQRKRWLKIRYASLPLFVRPLLYFHWRYFVKLGLLDGRQGIIWHFLQGFWYRFLVDAKIYQMNHIARKENKSLKQVIKDTFGIDLDAAR

SEQ ID NO: 4727 - protein, 254 aa, Neisseria lactamica
MIMKKVSVLIVAKNEANHIRECIESCRFDKEIIVIDDHSTDNTAEIAEGLGAKVFRRHLNGDFGAQKTFAIEQAGGEWVFLIDADERCTPELSDEISKIVQTGDYAAYFVERRNLFPNHPATHGAMRPDSVCRLMPKKDSSVQGKVHETVQTPYPKRRLKHFIYHYTYDNWEQYFNKFNKYTSISAEKYREQGKPVRFVRDIILRPIWGFFKIYILNKGFLDGKMGWIMSVNHSYYTMIKYVKLYYLYKSGGKF

SEQ ID NO: 4728 - protein, 399 aa, Dictyoglomus thermophilum
MTSKVGITACILAKNEEKVISNCLKSIVNYVDEIILVDNGSNDKTVEIAKDFGSKIINAESFTFDSARNLYIEAASYPWIFVIDADEVITPEGGLELRKLVREVSDNIMAFYLPHLNYFGEGKWANFLMCRLFRKHPQIKYNDRPIHASVVPSIKALNGAFARGSVLLHHFDLLYCEEKSLSKRFRNINLLESEIAKNPQDHNLHYYLGLEYWALDRLDEAEREFKLAISLDHNRSPLAQFFLAQLYLSMNEIEKSETIVENLLSFDIGIKDKIYTLLAEISLKRQELDKALSFTKEALLYDPMSPNLNLNFASLLERFDPISAIRHLQIALKYNPFLLNSIIYKEIKVANIYKIQKSGTFLSSTKTIFDHMINCWERIGDYEKAQEWRKKKINITYAT

SEQ ID NO: 4729 - protein, 247 aa, Unknown
  Description of Unknown: Elusimicrobia bacterium HGW- Elusimicrobia-4 sequence
MISVIIITKNEEDNLTRCLESVKWADEIIVVDSGSTDATVEIAKKFGAKVFVNDWKGYGAQKNFAIDKATGEWILSIDADEEVSHELREEIKKVIQNTGDYVAFKIPRRLIFQGKFLRCGGCYPNYQIRLFRKNKAKFNLDLVHEQLIVGGKIGYINGSLIHYSYKNLSDYFERFNRYSTLDARKRFSNNKKFYFWHYIQPFFKFFSMYFLRLGFLDGSQGLIWAILSSFYTFVKFQKLKELWNEKK

SEQ ID NO: 4730 - protein, 295 aa, Bacteroides vulgatus
MLDISVIILTYNEEIHIERCLKNARKFAKEIFIVDSFSTDKTIEIAEKMGAKVYQHTWENYSKQFNWGLQNLPIHTEWVWRMDADEYLSDSLINELHQRLPNLTGEINGFTVPCLRIFMGKYIKHGIIPLILLRLFKIKYATCENRYMDEHIQLSEGIIDSLKNPFYDDNLNDLSWWTNKHNGYATREAIDLLMTEYELLPQDTVVNSGSHSASIRQKKLKYIQMPLFWRAFAFFCFRYIFRLGFLDGKEGFLWHFLQGFWYRTLADAKVYEIKKRFGWNDKRIKAFIKETYLDK

SEQ ID NO: 4731 - protein, 349 aa, Bacillus toyonensis
MIVKNEEQTISRCLDSVEDIVDEIVIVDTGSTDATKKIVTRYKAKIYDFKWIDDFSAARNFAFSKATKKYILWLDADDVIAEEDKKKFLQLKRTLDDSIDAVSMKYYLNFDAEGNPTYQLRRYRLVKKKRDFQWTGFVHEYLAVYGNLINSDIGVTHKKEKGHTDRNLKIYEKHLADGKILNPRDVYYYANECKDHKLYDVAIKWYSKFLDGGEGWFEDNIQACLKRAECYLGLGKWKESIYSCLYSFMYDTPRAEICCHLGYLFLQQDEYPKAIYWYLSAIEGSKPKDSPFICEACYTWLPHIQLCICYDRIKEYEKAIYHNEQAAQFLPNHPSIKYNREYLDNLLKK

SEQ ID NO: 4732 - protein, 730 aa, Epulopiscium sp.
MDEIIVVDTGSTDKTVEIAKDLGAKVYDFKWVDDFSKARNFAISKATGDWIIFPDADEYFEEGKQQNLLKRIKLVDGLGYEALQLYVRQINKATPKKWTFSYYIKAFKNKSCLRYERAIHELLVNTEQELYDVQLEEADIILYHDGYSNPEIQNDKLDRNINLLLKVIEDNPADKLSLLYLAREFLSKKDYESTYKYLMLIEGDLGIYETYNRKVAYYTYLLSTLNSLNKPLDMLQQVYNEAIDFDDNYSNFNFIMALYYIKNREHTKSIKYLEKTIDNLQIIPNHKYLLVNIFDIDKVYELLAQSYRLQGNLKKSREICVEKLGHKTVSLCIIAKNEEHNLFNCITSVKNIVDEIIVVDTGSTDKTVEIAKSLGATVHYFEWVNDFSKARNFTISKATGDWILFIDADEYLNQKHQTDLFNSIQQVADTGINAISICRINYNLKGGLTKQDYKIKAFKNCSEISYTRPIHEFIVHNNDNLNVMTLPSDKVRLYHNGYSEEELVKKDTINRNLQILLANIASNPDDEIAFLYLGRELVGKQDFENAYKYLKCIKDICKVELKNKEKMYYVNFLNCMMELKVAEDEIVFLYNQAINFEPDFPDFHWNMALYYLAKNNILDAIDCFEKTAIGLKRFPQDNFGYVNIKMLSEIYMMIIDLYMLINEYDKVIFLYKELLSYNKADKNILNRFLDLVKDNYPEDIVEFLKEIYDFKNYNELDFIDRVMKERKMSK

SEQ ID NO: 4733 - protein, 700 aa, Thermanaeromonas toyohensis
MCMIVKNEEAYLEKCLSSARNVVDEIIVVDTGSTDRTIDIARQYGAKVITFEWGQDFSAARNLSLEQATGDWILYLDADEELVEVDKEAFLQLLKDPKVEGYYFRIISPTAGETGDQGLRHLSLRLFRNRPGYRFQGALHEQIVPSILATNPSAQLWDSGLYIYHHGYKQEVVGSRNKVSRNLDILQKQMEKAPQDSYLRYNLGVALYEAGDLAGALREWENVEQKIDIRAGYAPTFFRNYAIALLKDNQPLRALEVAERGLSYFPDYTDLHYLRGQALEQLERYTQSQDAFLRCLELGEAPARYVTSIGVGSYLALYKLGELMEKCGYYELAINYYQKAFHLQPELPGLLSSLGRVLKRVLHEPLQVRAYIQDHIKITSFPQLLQVVDLLYSSGDYYGCLLYLNEYLLRTGTKTDEIRLLKAKALMQLNRWEEAKYQCVEIGPESPYYLDALLYICICNWSTRPRKNSLPWITKLRGRDDKLYSILEVLNRKIMWGEEPADELDVVTLEGLIVKLVQVNNWDLARMAATLILPQTRAETSFKEASTEASSAPKETSTEGGTEQEAELCYLLGRALFNHKFYLEAADELLRALEAGLSRDDLFYMLGFICAQRQALWEAEQLLHQAIRLNPEKKEYYEELVEVLLKQTCQTLKETLAHFPDSPEVKDILTRVKDCQLQLRARRGVPVEESHHQPMYDRQG

SEQ ID NO: 4734 - protein, 373 aa, Unknown
  Description of Unknown: Sporomusa sequence
MSDSAKQAHAPITISLCMIVKNEEATIERCLRSVEQIVDEIIIVDTGSTDKTKELVSQFTNNIYDFEWIDDFSAARNYAFSKATQEYILWLDADDVFFDQDRQKLLDVKATLSREVEVITMLYYLTFDPSGNVACQIRRERLVKREKNYQWIGAVHEFLDAKGTQLDTGIAVAHKPLKHDSDRNLKIYERRQLKGEEFSPRDLYYYANELREHNLYNRAIECYQKFLETKQGAFEEKIAACASLADCYYLLHDEENELKYIYQSFQYSTPRSEFCCRLGFNHLNNNRIKQAIFWYTLATHLKTANSSWGLVNNQCETWLPHLQLCVCYSRLGDYKLAYEHNEKAAKFIPDNALIHHNRKLLQSKLNMEPSESE

SEQ ID NO: 4735 - protein, 370 aa, Brevibacillus nitrificans
MTAPLISLCMIAKNEAEQIPLALQSVLPSVDEIIVVDTGSTDGTPDLCRSFGATVVDHPWEGSFAQARNRGLEHATGKWILWMDADEELDADDQKKLRSLVEASDAAALSLKLIHYFGPSKDTLRPHLAHRCPQVRLFRNQKGFHFVRSIHEGLQTTESGLLDPPIPLLPVQIHHYGYMDDAFSSKAKSARNKHYLLQEKAQGDYDPWCDYHLAAEVYREGKWEEAFSLVNLSMEGFLTRQQIPPSLLYKLKYEILFHHGSMRGAWPGIERAIQLYPTYVDLHFYKGVFLLEHGFYPEAVKALEQCLYLGEDQWEHLSLRGVGSFRAYSALARCMEKMGKPNDARVYSQHAAASTAFFSPNRLLEQEVTR

SEQ ID NO: 4736 - protein, 302 aa, Clostridium sp.
MKISLCMIVKNEEKYIKMCLENAMKLADEAIIVDTGSTDKTKKIIGEFNNSNIKLIDYKWEDDFSKARNISIEAAKGDWILMLDADEKLLCNVDKVRNILEKAKSESYRIPLYNILNTSNVVYSSVYLKLFKNNRGYKYFGRIHEQLNVKDDQINGNGIDSSIAQIIHYGYLGNVIKDREKAKRNLKILRKQLKDNPNDPFVRYNIGASYEVAGNYKKALEYFFKANDILKRGDPTGLTLYEIDMAKRICECLINLKKYDDCIMLASNLLTDNKYKGYVDLQYIKSWCYFFTKEIQKSCRKF

SEQ ID NO: 4737 - protein, 256 aa, Roseivirga seohaensis
MQQIKLSGVIITFNEEENIGRCIESLKEVCDEILVVDSFSTDRTKDIALSHQVKFIENAWKGFLDQKNFAQDSASFDYVLQLDADEELSEELKKSIQLVKNNWAYDGYIFNRFTNYCGKWIRHSGWYPDAKLRLYDRRKGKWLGLDPHPSVFMDSESRTRHIEGDLLHYSYTSYEDHINRSAKYAKQAAIAMHTLGKKPSNFKLIFSPAFRFFNSYILRGGFKDGFEGLIICKTASYYTFLKYMYLKLIHKGKSIE

SEQ ID NO: 4738 - protein, 360 aa, Virgibacillus sp.
MHSISLCMIVKNEEEVLEQCLRSVESICDEIIILDTGSTDRTKEIALQFTNKVFDFEWVDDFSKARNKSFSYATKDYILYLDADDVVLPEDLDKLKNLKETELNDTIDAVSMYYHTSFDQQGNPTFKFRRNRLLKRSNHFKWFGAVHEYILVYGNIYHSDIAITHRKEDKEIDLSTRDRNLKIYEKQLEKGVEFTPRELFYYANELKDHQRFLEAINYYKKFLNSERGWIEDAIRACIYMADCYKALGEIDEETTALLHTFKFDLPRPEVLCRLGDHFMNKNSFQKAIRWYMLALTIEVENDAGFTNTAYTTWYPHLQMCVCYWQLGNKQKSYEHHLKVKEHDPYSEFAIKNEEFFKDIH

SEQ ID NO: 4739 - protein, 365 aa, Ruminococcus sp.
MVTISLCMIVKNEELVLERCLASAKNIADEIIIVDTGSTDRTREIGKRYGKVFDFTWIDDFSAARNESFFRANMDYCMWLDADDVVTEENQKKLLELKMSLNPDTDVVMMKYAISEDEEGKPLFSYYRERMVKNGKGFLWEGRVHEAIVPRGKVIYSDIVIAHRKMAAGDKERNLRIYETMLQEGEVLKGRNLFYYGRELMAHGRYQDAVCVMEEFLDGEGWVENQIEACLNLAFCFGALGQETERAKALLRSFLYDSPRGEACFEIGQYFQRQKKWQQAVFWYETALKGNPRTESGGFVRSDYYGYLPEINLCVCYDQMGEREKAYEYHLRAKKRKPESKEVKWNEEYFRNFRDEPNGQEGHRI

SEQ ID NO: 4740 - protein, 241 aa, Unknown
  Description of Unknown: Candidatus Jorgensenbacteria bacterium GW2011_GWA2_45_9 sequence
MDKKSLAVIVLTLDEERHIRRCLESVKDITSQIIIVDCGSADGTLEIARTFGAEIELAKEIKSALHGVDDGVCGFYMKRRVYFMGRWIRHGGCYPIWLLRLFRNGAGRSEEREMDEHIVLGRGKTARLRNDFIDENLSDLRWWTDKHNGYSSREAEERTRNEKASRNTVVKGQAGRKRFIKNRFYAKLPLFLRSFAYFIFRYVFFGGFLDGKEGLIFHFLQGCWHQFLIDAKIFENRTKKD

SEQ ID NO: 4741 - protein, 273 aa, Unknown
  Description of Unknown: Candidatus Pacebacteria bacterium CG_4_9_14_0_2_um_filter_34_ 50 sequence
MNKQTISALIIAKNEETMIENCIKSLLWCTEIIVVDSGSTDRTREIAESYGASVISFKHDSFSRLREEALKRATSQWVIYVDADERVTPTLAKEIMVNIETTDAEVFRLSRENIYFGKKFKWGGWQDDKVEKVFKKESLMGWIGDIHESPNFKGELIDLKTKLLHFTHRNIVSGLIKTANWTPIEASELYKSNIAPVTFFILMRKGFMEFFRRAIFKKGYKDGLEGLIEALIQGINRILVYIQVWELQQNPSIKEKYNKKEEEILGLWKKDRH

SEQ ID NO: 4742 - protein, 299 aa, Unknown
  Description of Unknown: Microgenomates group bacterium GW2011_GWC1_49_7 sequence
MKQTLSVVVSAYNEEKSLGRCLASVGFADEIIVVDNQSQDKTVEVAKKFTKKIYSQKNILMLNTNKNYGFGKATGDWILNLDADEEVPKELAKEIQEVIRSNLKENGFWIKRKNIIYGKWITHGLWWPDKQIRLFRRGKGKFPCVHIHEYITIDGQIGELVTPYTHYNYESVSQYLRTIDRASTSEALLLADMHHEFVWYDAIRFPMSDFLKIYFAQAGYKDGLHGLVLAIFQAFYSFTVFAKYWEMQGFPQRDLAPSAVPSELYRQKKDILYWIFTTKIRETNNIFEKLLWKLKRKFL

SEQ ID NO: 4743 - protein, 304 aa, Parabacteroides sp.
MLDISVIILTYNEEKHIRRCIENVISFAKEVFIIDSFSTDRTLEIAREYHNVHILQNKWENNYAKQFNWGLEHSDITTQWVLRLDADEYLLPELIQELYEKLPSLTPDITGVLFNRRYIFMEKWIKGGIYPTKLLRLFRSGKGICEQRLMDEHIQLLEGYAVEFKYDMVDKNLNDLSWTLHKQVNYAIREAIDLLDIEINLTGTRRMDKDKYIGKQAYFKRMKKHKYVCLPLFWRAFAFFCYRYILHGGFKDGKIGFLFHFMYSWWYRMLVDAKILEIRKACGRDKEKIREHILTNYNIDIDFI

SEQ ID NO: 4744 - protein, 256 aa, Unknown
  Description of Unknown: Bacteroidetes bacterium HGW-Bacteroidetes-6 sequence
MNVKISVVIITFNEERNIGRCIDSVQSIADDIVVVDSFSKDRTKDICLEKGVRFVEHAFEGHIQQKNWAITQALYPHVLSIDADEAPDVVLCESITKAKENFTADGYTMNRLTNYCGHWVRHCGWYPDRKLRLFDSRKGKWDGLNPHDKFEMDERSSIVHLRGDLLHYSYYSRDDHRKQIVKFTDILARSMFDAGRRTNWPMIVFSTIFKFIRDYFLKLGILDGKSGFIISWLSAGATFKKYKKLRALQKSNSKRS

SEQ ID NO: 4745 - protein, 653 aa, Paenibacillus herberti
MLLSICLIVKDEEEVLSRCLESVREAADEIIVVDTGSTDKTKEVAAEFTDKIYDFEWVKDFSAARNESLRYAAGTWILVMDADEYFASGDAIKLRNFLTTITPREDQVFAVNISSFLGKDRTTAILSAGEVPRLFPNHFSIKYYRPIHEQLLSETGIKLHSFLAPVSLFHTGYLKETIQSKSKSSRNAELLTSIKKKDGFAPYDFFTAGNEFAVKADMPKAIYYFEKAIKSGTKHKTASWYPKAVISLTQCYCRQFRYFDALNLLERELIKWKDYPEYSYLKANILHYLGFIKEAQKHYLDALNVSLVKAELTHVFWLDSAEFATTMPMRRLAAIYENEGDLQNAVYYWSKLLHQDLYDFTSLHSLLNTLIHYESMDKIIFLLGQIYQVDDLKHIYILFRSSLTVRSAELAKHYYNLLLNKEFTVSIADQIFYSIVQKDQAHYSNCTNHPDYKPSNEHYTHEAIACRVWGLEIPLYRPNSSEDVSEKIQKKLNHVKAILELQEEAHTVAVNEYPELLLTILQSAYLLQEFEIYDQLIQTYSDDNIINEMANFLYSRKNESIALDYYSILLNKNALDARSCENLAMYHFKGDDIEGGLAFLEEAIRLQPQTIYLYVQYLERSNNQNKRSKIKDKLLRQFAGAVRIPEFALLLKN

SEQ ID NO: 4746 - protein, 361 aa, Bacillus cereus
MITVTLCMIVKDEEDTLERCLQSVAGIPDEIIIIDTGSTDTTKDIASKWTSQVLDFEWQDDFSAARNYSFQHATMEYILWLDADDILLPEDRERLLTLKQTLDPSVDAVSMAYNVLFDSNENVISRTRRFRLLKRSRNFQWHGIVHEDLQLHSGYHHYDSDVIVTHKKIHARSDRNLKIYEQAYQKGKQLTPQDLFHYARELQVHKRYQKALHMYQEFLNTDSVSIEHRIFVYHNMACCYHELGQPEKEHELTLHSFSYDIPQPMFCCRMGEYFIKNQQFSQAAFWYRLAIEVPTDNFAYVIEQPIYKTWLPHKQLGLCYYQLGDYERSYQHNQHVLKYLPNDPDTLTNIKALETLRNNQI

SEQ ID NO: 4747 - protein, 344 aa, Desulfosporosinus acididurans
MIVKNEEKFIKRCLECLKDIADEIIIVDTGSTDRTKEIAGNYTPGIYDFEWVDDFAAARNFCFSKATMDYIYTADADEVIDDDNIKKFLLLKSDISPDVDIVEMQYTNQLEKGSTYNFDEENRPKLFKRLRTFRWIDPIHEVIDCYNNVLTSDIKIIHKPEEGHFQRDLSIFVKSTGNGQVLNSRLHMMYARELFICGTDEDFLKAFDYFNRSLMEETLKPDDKRLSYCVLARYYNLISDAHNLFKVITKTLNGVVSSEICCELGSYYMKMEDYEEALYWYYLASGAASADLNIDYMNFIPNFQMCRCFIKLGDMTEALKHNSLAEFYKPNHPDVLANKQILIY

SEQ ID NO: 4748 - protein, 356 aa, Roseburia sp.
MSKVPISVCLIAKDEEKNIEECLKRLKPYGFEIIVTDTGSTDRTKELASRYADKVLDFAWIDDFSAARNFCAQHASNNWILSLDCDEYVNSIDVKTMRILMQKFPRYTGVIRLKNLVLDENGQTGYGTDDVTRFYNKNFYTFDYPIHEQVCSKDMAKREEMMQCFLLPMEVVHHGYALTPEEMQDKQRRNLSLLYKNLERDPDDSYTLFQIGQSEFILGNHEKAVTFYERGLASDPSPEFIYVQVMIISLAKAYVKVGREKEALALMDRYAGRCKTAKFQFTYAGVCLDNGQPLKALLYYVKTTTMADADTLGENLLHCYEHIIELYRDMGDEKMAEVFKGKYEACMREKERVVNS

SEQ ID NO: 4749 - protein, 361 aa, Bacillus shackletonii
MITISLCMIVKNEQQTLEHCLQSVKDATDEIIIMDTGSTDQTKEIAKKWTTLVYDFEWNDHFADARNAAFAKSTKDYILWLDADDILLPKDYEKLLKLKQSLSPEVDAVSMPYHCDFDDFGNTTLKVRRIRLIKRLRNYQWEGAVHEDLLIDDGNIYDSDIVITHRKNHKTSDPDRNLKIYEKLLKREKDLTARDSLHYAMELHQHREYRKATEYYLKFLDFGNLSDENRILAYTRLADCYYYLGDRKKERECTFKTFEYDVPRPESCCRLGYYFLEKQQYHQAIFWYKTAAESKDTSNWSVQNETSKTWLPHMQLGLCYFQIGEYELSYHHNKIAHSFQPNNEGITHNIKLLEDLLKNKM

SEQ ID NO: 4750 - protein, 614 aa, Unknown
  Description of Unknown: Candidatus Brocadia sp. sequence
MYLCQTKSCGFKQIRFLMGKQSMTITDLHTSQKNGRSLVKISRGRPTLSACMIVKNEEKFLPQCLQSIKDAVDEIVIVDTGSTDKTVEIAQSFGARVYYHPWKNSFSEARNHSLNYATRDWILQIDADEALEQADISLLHKLITVDSYNAIFVAIYSDLPGGRSKHYYTRVFRRGKAHFEGIVHNQLIFEGKAFQSEIRFYHYGYNLSESEMRRKYKRTGDLLRQQLAENPNNIFVIANLIRNYRNEYNFEKVIELGEKGLNISLSQTDFNSQSQRQRIYLDLAYALLNTDQIDRAEEICKEAIKENPDSLDILFVLGEILLKKEAFADALQYFKKYLIAKDKENKKPIFNLSIVDAYYYECKAYDNIGVCYEGLGLINDAEVAYKKAIELNNREPLYYSNLASLYVSQNRLEDAENMASAALKLGTNNHQIYLLLGKIQAMRKKPYEAIHTVKQLLQKDSKNIHAHIFLINLQIEANLLSEAEETLKKINSSHPDHLGLKCIAERIKYKKGDKKSVVQFINNILSSSPSHSSVYHDLGNLCIETEEYEKAIELLEKHLKTSPTDATVITNIATCYARLGKLESAMIGLQAALKIDPGCNYALQNLVALKKNFF

SEQ ID NO: 4751 - protein, 377 aa, Desulfotomaculum hydrothermale
MAKTVSLCLIAKNEEKHIARCINSAKPFVDQIVVVDTGSTDHTAEIAESLGAEVYHHIWQDDFALARNQSLSYATGDWIIFLDCDEELAPATAPLLRQVIQDDYYQGYWVKIVNFYDNRPSTSFIGFRLFRNSPRHRFEIPIHEQILPAVIRNSSPEKIGQSDITIYHYGYENDQEAHRNKIQRNLRILHKAMRDYGQTGFLPFYLGVEYQKLGDYQKALAYYQISLPRTPLTESYAPALVRGMAFCLLSLKQYQAGIDLIDHFLQVYPDYTDLVFLKGAMYAAQENIPAALACMNRCLAMGPPPGHLFSSHGIGREKPLAVIKDLTEKLLHQAAASLARGECSQVFLTLNTVLEQLTKTPYEEGFHKMIEIMLATL

SEQ ID NO: 4752 - protein, 285 aa, Crenotalea thermophila
MKLPITCIILTFNEENNIENCLKSVFHLCDEIMIVDSGSTDKTIEIAKNYTDCIFYHEFENYASQRNWALDNLPIHNNWIFNLDADHRITEELETELLRLFQEGIPDEVSGFLISRRTIFLGRWIRYGGHYPTYHSCLFKKGFGRCEDKLYDQHFVVTGKLIKVKGDIEDIITDSISRFIARHNQWSTLEARFITEKQKSRKNHELIRGNPAGNPIEKRRAFRDLYYCFPLFLRPFVYFFYRYVIRLGFLDGKEGLIFHVLQGFWFRFLVDVKIWELRRSSSGLE

SEQ ID NO: 4753 - protein, 245 aa, Unknown
  Description of Unknown: alpha proteobacterium MED- G10 sequence
MNISALLIARNEQDIIKNCLESLGFADEIIVILDRSVDDTKLICKKYTKKVFVGSWNCEGERRNFGIKKCSYDWIFEIDADEIVSKSLQNEILKKKKLTNFDFFYIKLINYVGDKPLKYGWMGCMAPDGKFCMFKKESKKWLKGLVHPNYQLTGNKGPIFENFIIHKMSNNISDLVKRFNRNTTLHSKELKLEDKRNHVSFRKVISRFIKSFFKRKGYKHGKLGLLIGILNAIYPLVSLIKSKEN

SEQ ID NO: 4754 - protein, 321 aa, Methylomonas koyamae
MYGRFADLSLIFQKINTVSNISVIILTYNEQLHLARCINSLKPVVDDIFVIDSFSTDDTVQIAEALGATVYQRRWKNYADQFQWGLDNCPIRTTWVMRMDADEYLEDGLAHEIKLKLPSVSDDIAGIYLKRKYYFLGRWIRYGDRYPLVLLRLWRKGKAHIENRWMDEHVVLDQGAALVFDGNFVDDNLNNIEWFIDKHNKYASREMIDILNHKYRFLERDERIEDSENDQAKLKRLVKEKVYNHLPIFFRPVLYFFYRYIIRLGFMDGKEGFAYHFMQGLWYRCLIDLKCLEAEFTLKGAESNVEKIARLQKLTGLNLSN

SEQ ID NO: 4755 - protein, 651 aa, Unknown
  Description of Unknown: Desulfitobacterium dehalogenans ATCC 51507 sequence
MKISACMIVKNEEKVIARCIESYRGAVDEIIVVDTGSTDQTVAIAQALGAKVFHFAWIDDFAAAKNFAIAKAKGDWIVFLDADEYFAGGTGGNLRTYLENLDKAYGAVACRMINIDETSGKIINEIVHVRIFKNDKELRYLNPIHEALHYSRKGGKLQAHLADRRKLLIYHTGYSKDINQDKAHRNLKLLLRQVDGDTVAKPEYYYYIADTYFTLSQWDKVITYVRLFRDCGAKLTNLNVRLHNILIDAMMNLHYPVGEVMEEVEIAIGKFPRHPLFYFYKAKFLYDDQRYDAAFLELRRALQLHENYEDIEVNPLAVNLGNLHSMMGVISEFRSDSGEAVEYYIKTLQIDKYDATAFDRLLRLIRPQPLEEIIGFLNALFDVEKEADLDFLATNLVNHPLPKVLAYYTSLREKKYPKEDYVVLQMLVANGYYDKAFAALLDCYGRDKDERLALVSATAAALSGNGGYVAQATKQLPSAYARILKAYHGDIMLFSEEDKPAFLSMVRTFFLWADDTAKEKLLRLADQFPDDMTAPLGSLFIMEGYYQDGLNYYNYAVQRSVEAGILVHPALYYNQGYCLNRLNSPIAASEAFIKAYEAGYRVNDIYEFLRWNVDKLNASSSVRAKANEVLRDRAESKHAERYERKPSKTYK

SEQ ID NO: 4756 - protein, 359 aa, Bacillus cereus
MVTISLCMIVKDEEQVLERCLQSVKGIPDEIIIVDTGSTDKTKQIANKWTKHVYDFKWVYDFSAARNEAFRHATMDYIFWLDADDVLMPEEANRLRMLKNVLDHNVDAVSMKYHADFDAQGNVTGSVIRHRLFKREKQYRWTGVVHEHIEVSPSDITWASDIVVKHQPPNNERSVRNLDLYERYLKRGGTLTPHDLFHYGRELSMHERYEDAINIFETYLKTPGIAPDIRLFILNELASCYFFIKDMQKEESVAFQSLKYAMPQPVFCCRLGESFLRKGDLHTAIFWYDLALQVPITYSWSQDKIAFRTWFPHKQLGVCYEHLKQEKKAISHYEQVLTYLPDEETDHNLRKLMMKQSKE

SEQ ID NO: 4757 - protein, 369 aa, Clostridium sporogenes
MEITLCMIVKNEEENIEKCITSAFHIVDNAVIVDTGSTDNTKDIIKKFGEKVKLIEHEWKDDFSESRNVSIENAKGDWILVLDADEEILGYKEPILKQITNTKKESFNIKGINKIDKEGGLNSFFYNRLFKNKGYKYYRAIHEQLNIDENKVGVLDEKISKIIHYGYSKENFIKRDKMNRNLKILTNEYNKNPEDPFICYHLGATYASSGDYKNALHYFVKSYQIGLTKGFGGYYYELLKRMSQCIYLLKDYRLCIDFLTGILKDENLRGFTDLYYILGSCLYKIKDYENAKKMFNECIKFGEKTKFPTFTGRGTFLAELMLARIYLALSNRQEAQKCYLKLLNYKEKLSEDIIEEINCYTKNVKTGGL

SEQ ID NO: 4758 - protein, 737 aa, Pontibacillus marinus
MTTISLCMIVKNEEEVLENCLKSVKKACDEIIIVDTGSTDETKEIAAKYTDKVIDFEWVDDFSAARNFSFSHAKMDYILWLDADDILKTKDLKKLLTLKKNLDPSVDAVSMFYHLAFDEHGNPTFNLRRNRLVKRERNFKWHGVVHEYLEVSGNIIGSDIAITHNKQKKKNTSIEGGRNLRIYEKKLKRGEPFTPRDLYYYANELKDNHHHKKATLYYKEFLATKKGWVEDEIMACINMADCYRRLGEKDEELNALCKSFQYDLPRPEISCRLGEYFMGKKDYQSAIFWFNTAINTKQKDNGGFQKPAYSTWFPHLHLVLCYWETGNMEMSYEHNKMAEKFIPNDPSVEFNNNFFKDYFKQEPNPTPNGKKKVLYIGWIGHKNLGDELMWNLFKEKFDESLGNENWELHGTIRKPARDFDLDQFDLIVLGGGSIICKNNTPVLHEAMKKGKKVMIWGSGIDLIEKSDIPLLAAGEKINVHNYLAEDIQKKLVEIIEHAEFAGVRGPLTYEIIRQVGANEEKLMISGDPGLLLTQKEKVDEEVKVAILPFKGNKIIGVNWGTSFNHVYGANERNVEDQLAEALKEYINNGYKIYLYSVWDHDTTALKQLYKKVNDHKNVILDTKLHDQNFLIDLASHFHFTINLKLHANLISLAANTPPIALAYGFKVYDFAKSTQLDQFVIPTDSMQMKSELMEMEALINQERDKIINRVNEIKAEYINHISSPFNQHLYLRRDDHA

SEQ ID NO: 4759 - protein, 255 aa, Unknown
  Description of Unknown: Candidatus Woesebacteria bacterium GW2011_GWA1_41_13b sequence
MASLSAIIIARNEESMIGECLLSLKDLASEIILVDTGNTDSTNDIARSFGVRIVTTSNLDYSHFRNAGLKTATGEWILYVDADERVTPLLKKEIEQIMSSDEAGNVYQIPRRNIYLGREMHFGGWGQDKVIRLFRKGVLLRYEGALHEQPIFTGQLRTTNHELIHHSHRDLASMLNKTLEFTQYEAKLRLEANHPLVVWWRFLRVMFTEFWLRFVKLSAWKDGTEGIIDGIFQVFNSFVIYARLWEMQNEKNRHL

SEQ ID NO: 4760 - protein, 498 aa, Romboutsia weinsteinii
MKDNTISVCMITKNEEKNLPRCLESIKDFANEIIIVDTGSTDKTVEIAKKYGAKVYHYKWKKDFSDARNKSLEKATMDWIVFLDADEELPLEECTKLRARINATPYEGLYLRLVNIISDTNLGDAIVLRAFKNKPLYRFRGKMHEQIVFSIQEAAGLDCIESTDVKIIHYGYDPDVADLDAKQKRNLELLESYPESDRDGYFYYSLANEYARIGENDKALEIYYKAMDTPMVNGAFPSFMPYLVVNVARVLTTSKRYIDVINYLKPFEEIYKDFGDPHFFECLAHIECSNFTKAKDALLRYLNSETGSYIYPNSNFEDQFNMGKLLKQLKASCIPHEENLISALIIASEDEEHLVDTVKTVNEIAHEVVIITPQGSNLNKKAVSNVGAKVVESKSDIYEDLFMEGYKQCSGQYILFLKPKEICSLDTQKSLTSYLAINKVESLNLLVVDTLKNVQSNEFRVFKNTELIKKMNNFKDFAKYFDSINTNTVNIYLHKMYE

SEQ ID NO: 4761 - protein, 261 aa, Granulicella sp.
MPPTLSVAIITLNEEANLARTLASVKFADEIVILDSGSTDRTLEIARSYNATVFSEPWQGFAAQKNAAIEKCTGTWILSLDADEELTIELQTEIRALLGLNPTADAYLVRRRNLFLGRWIRHGGYYPDPKLRLFRRHAANFAPPARFTDRPVHETIAVDGRVETLDYDLIHHAYPTIESYIEHMDRYSTLGSQIIVSKGQTSRSWFAFYYHVAVIPTFTFLYNFIFRLGFLDGREGFLMHLYHSTYTSWKYAKAWQTTRKR

SEQ ID NO: 4762 - protein, 257 aa, Mesorhizobium sp.
MPALSVIIITRNEEASIAQCLRSVHFADEIVVLDNNSSDRTREIAGDLGAKVLMTVDWPGFGAQKNRALAAATGDWILSLDADEWVEAPLGAEIRAAIADPKAYDGFEIPRRSRFCGHIVRHSGWSPDLVLRLFRRRSGRFSDDTVHEKVLVNGKVSRLSQPIEHDSITDLADAHDKIGRYAEASAAQLLAEGKKSSIGKAVLRSVWAYVRSYIFRLGFLDGSIGAMVAAYSASYTYQKWARVALGMRGQVHPKKQG

SEQ ID NO: 4763 - protein, 360 aa, Clostridium tyrobutyricum
MVHHITISLCMIVKDEENVIGRCLSSIKDVVDEIIIVDTGSSDNTIDMCKNFTDKIYNFKWIDDFSAARNFSFSKATGDYILWLDADDVILPDDIKKFKILKKSLDTSIDSITMKYNVGFDEYGNITLSYRRNRLVKHSKNFKWIGFVHEYLEVYGNVINSDVSVTHKKIDFKPKRNIEIYENKLKERVNFSLRDILYYANELYDHNRFKEALKYYTRFLNSKQGWSEDNIRVCNKICDYFESINQEYKARSYIFKSFEYDSPRAEGCCRLGFSFLKENKLYQSIFWYETASKLEKPQNSLGFFNDSYWTWLPHLQLCVCYDKLGKHEIAYKHNEIAAKFIPKDKRILFNKKYFSGIGIS

SEQ ID NO: 4764 - protein, 326 aa, Fibrisoma limi
MTDVSVIILTYNEEKHIARCVQSLHPFTDKIFIVDSFSTDRTVEIARSLGAVVVQNPWVNYATQFNFGITHTPFKTSWLMRMDADEYVLPELAQEINRRLPTLPDHVSGVYVKRRVLFFNRWIKHGTYYPIWLMRLWRRDQGICEETWMDEHIKLVKGQPINFQHDLVDHNLNNLTWWTQKHNNYAIREVIDLLNIKYNFDDTERVEPKLFGSQEQRTRFFKIQYASLPLFTRPFLYFLYRYIVRLGFLDGQKGLVWHFLQGLWYRFLVDAKLMEVYFHAGRDKQAIIDFFQTEYGKDLRPSRERAAASGAVDGGNSGRPDRPVAL

SEQ ID NO: 4765 - protein, 361 aa, Bacillus toyonensis
MIKISLCMIVKNEEETLNRCLESVKGIPDEIIIIDTGSTDQTKTIASRWTQHVLEFKWIDDFSAARNYSFHRASKEYILWLDADDIILPNEREKFLLLKQSLNRDIDVVSMVYHAALDEHNNVLTSIRRNRLVRTNKNFQWHGIVHEELNVDNQCNFFHSDVIVTHKKINTGNESNRNLRLYENFIKEKKGEMTIHDIFHYARELHKHKRYKMAIEYYMEFLNCTDIKLEHRLFVMHKLASCYHLIGNFQKEKEITLQSLDYDVPQPEFCCRFGEVFIKRNQFQQAIYWYNQALETLSTNNSLFIEQYPFKTWLPHKQLAFCYYKLGNYEESHHHNKMVLNYLPNEQEALINIKVIEELMK

SEQ ID NO: 4766 - protein, 569 aa, Bacillus vietnamensis
MKNSISLCMIVKNEEDFLDNCLSSVKEIVSEMIVVDTGSEDRTIEIAERHEAKVIQAEWKNNFAEARNIGIEHATGEWILFLDADEELHKDSIEELKKWTDYPDAEGYFLRVYNHFGQNGQEASVNPTIRMFRNRIGYRFSGAIHEQIADSMQLQNPQARFVMTTVRIDHYGYQSAVRDKKNKSSRNITLLEQELKNTPDHAFHLYNIGVEYLQIGAVQKALESFQKSRQLVSPQINYAHLLYKCEARCFGALNLIDEAIRCCNEGLELFPDYTDLHHYKGSYYIVKGDCPSAIEHLQKAAEIGETPKYHTEAGMGTFSTHYLLGLAFESTQEDDKAVDHYYKSYQASQASQRPLFRMFQLLRVTGRQGDLLPFIQKKFRMNTKKQRETLLTILMRTHCYSIASELIKSWLKRSSTLTGQEVRQLLSTEEDCLLLKRPCKEGEGDYAKISEEKRQTLMNEQNPFDAMLPSSFHPVLNEESVDSILQAERGARLLFSQGFFKAFQEHTNLWKKEHSSTSKNFRVNSIIQLVNTLCFNAEIHIDSALENITSSELLNSAKLTLPFDEGFIE

SEQ ID NO: 4767 - protein, 310 aa, Spirosoma endophyticum
MTDVSVIILTHNEEKHITRCLQSLLPFTDKIFIVDSFSTDRTVEIARSMGAVVVQNAWVNYATQFNFGIEHVPFKTGWLMRMDADEYVMPELANEINQRLTGLPADVGGVYVKRRVFFLNRWMKHGGFYPIWLLRLWRRGDGFCEQVWHDEHIKLTKGQPIQFDHDIVDHNLNNLTWWTQKHNHYTILEMINLLNYRYKFDEAEKVQPRLFGTQDQRMRYLKEKYASLPLFTRPIIYFVYRYFIRMGFLDGRAGFVWCFLQALWYRFLVDAKLMEVDLRVGQDKEAIMDYFQTEYGKDLRAIRPQQVSRA

SEQ ID NO: 4768 - protein, 249 aa, Myroides odoratus
MAISGLVITFNEEKNIGKCIDALFQYCDEVIIIDSNSTDNTVAIAESKGAQVHLQAFLGDGPQRTHGLQFCKHDWIMNLDADEFLDVDALAFIQKKEYEHSPYDGYKFRVKNFLGDKLINFSGWYPDSKVRFFNKKTAGPSADITHQYIVTTQEKSVNVHILHYGWQNYKQVIDKKNQYSTWAAQQLFEKGKKVSSFKPVLNGAVAFVRCYFFKKGVLNGIDGLAFAIIQSFFSFMKYVKLIRLHKSKS

SEQ ID NO: 4769 - protein, 268 aa, Unknown
  Description of Unknown: Candidatus Daviesbacteria bacterium GW2011_GWA1_38_7 sequence
MISAIVLTKNEEKMIQTCLESIKWVDEIIVVDNGSTDKTLEEVQKYTEKIYQSDKPSFAERRNLGLSKAKGNFILCVDADERVTHDLKTEILEKVNSSFEEVAWDTPRRNIILGEEKRYKPFWPDYVTRLFKREFLKGWVGDVHEYPEFDGKHGKLKNALLHLTHRDIDSMVLKSLSWANIDAKLRVDANHPQMTGWRFLRILFTELWNQGIKRRGFFNGTVGVIDALLQVFSMYISYVKLWQLQRKETLEETYQKIDQQLLKSNFRY

SEQ ID NO: 4770 - protein, 630 aa, Bacillus cereus
MKPFITACLIVKNEEDMLRKCLESLRDGIDEIIVVDTGSTDKTKVIAKEFTDKVYDFEWNNDFSAARNFAASKGSGEWILAIDADECVEKDNIKDAIKEIKLDSGKYNTYIVEIISFVGEVGQSTTVNKMARIYKNDGTVHFKGAIHEQLVAIDGIERMAMSALTFYHYGYLPHVIEKQNKKDRNMKIVKQDLKSGENKGFAYFNYGQELRRLRKTKEALNYFVKAYAYKRSVDEEWVRTCLFFIIESLTELKRYEEALKIIKDTETLWPSAPDFTFSKGDIYFLQNRVDDAKEVYQSIVANSEKYNNVVYHYDRKSFLPYERLGRIYQIEKNDEQALQSYIKALNENFLSVHIITNIVRILSEYHTAKEVYEFLMSQNVIKTNAIRLDIVKYLLSAGYVDLAIHLAVDLEDRNKDFIKVIDLKAKMITNTSRKNATITFEKIDLLLGIQEGLFDLADLCILYSITKEECIEDIVKNSKFKHIFEWLFTESGRFKKIKQEEYVVILRRAIRYNQIEFVERLIMLKKFVHKDIDAKIADLFYENGYEDIAMDFYGLSERNHITKQGYINMIEWLISQKNIEEAYKLAIEALDKFKKDFRFYKYAIEFGKKGDKTLVAKALNIFPDSSWLKK

SEQ ID NO: 4771 - protein, 371 aa, Paenibacillus lautus
MIFVNSNLPVSACVLVKNEEQHILNCIRSLIPVVNEILIIDTGSTDKTISIASHEDVIILNYTWNDDFSEVRNYAIGVASQPFILMIDADETLNINSYTYLEQYTRSCVKVPATVNIRNVIDENTIVNSVVTRLFPNLSGYCYKGMIHEQLFYDDKPLEQVLPTEIVIDHYGYRKSEIQTKHKIERNLTLLNKQLAIDSNSIYLKYQIGQTYYVNGDYQKAIPYFDDSIRMISVSKFDALPRFMSTVFLSYGYCLLYTLQFDILDNLINDATELYPDFTDLYYLYGVSLIERKDIHNFSSIQDVFEFCIRLGDVKNPLYESVEGVGSYRALFNLGVYFEVTNNVEQAFKYYLQSSEYNFKPAIEKIKRLSM

SEQ ID NO: 4772 - protein, 356 aa, Unknown
  Description of Unknown: Peptostreptococcaceae bacterium VA2 sequence
MISISLCMIVKDEEKVIKRCLDSVFGIVDEIIIVDTGSIDNTKEIVKEYTQKVYDFKWIYDFSKARDFSFSKATKDYILWLDADEILDYVNKNKLLELKENLNTGIDVVTMETYMCLDENNNPTIKSRRNRMVKSNKNFKWTGYIHEYIKIDGNIYDSDIGIIHHKVKCADDRNLKIYKRNIDLGNELSNRDLCYYGKELYCNCMIDEAIKIFDQVILKDICKEEKVDALCKIGECYLYKKETSKARKYFYKTFEYIEPRGEVLYNIAYSFEEEKKYHQAVFWYEMILNIKISKDCSQCMNISCWRFKPHLNLSFCYFELNNLPKAYYHHEKAKQINPLNKYVMANDEYFKSIIKK

SEQ ID NO: 4773 - protein, 262 aa, Edaphobacter dinghuensis
MQSTLSVAIITLNEEANLARTLASVAFADEIIIVDSGSTDRTLEIARSHPNTKIFSESWKGFSAQKNSAIEKCTGTWILSLDADEELSPELQTEMRVLLIGEPPADAYMLRRRNLFLDRWIRHGGYYPDPKLRLFRRHSANFAPATRFTERPVHETIAFEGNLDTLHHDLIHHAYPTIESYIEHMDRYSTLGAQIVVSKGQTSKSWFAFYCNILAIPAFTFLWNYFFRLGFLDGREGLLLHIYHSTYTSWKYSKAWQTTRRH

SEQ ID NO: 4774 - protein, 298 aa, Bacteroides acidifaciens
MDSIAFIILTYNEERHIARCLQSLMPFGHELLVIDSFSTDDTCRIAEKLGAKVYQHPFKNQAQQFNWALENCPIESGWIWRVDADEYISADLGERVMNTIQTCGANINGIYVNKRIVFMGRPLMHGGWYPAPQIKVIRKGFGASEKKWMDEHLIVFSGDTVYIDGDQTDENLNDMAWWSHKHVNYAYREAINMLMMAYGIDTDTDTVKPDLWGNGVERKRWFKIKYARAPLFLRPFAIFFIRYVLKGGFLDGRQGFIWYILQSFWYRMLVDVYIWEIKRACRWKKEAVKEYIRRYVSE

SEQ ID NO: 4775 - protein, 254 aa, Thalassospira xiamenensis
MADKAPRLSVVMCAHNEEERLPSCLAHLGFADEIIVLCDKCTDRTEEIAREFGAKTIVGSWDIEGERRNRVLQEATGDWIFEVDADEHVNEELGKSIRNAIVDTEFDCFVISVHNYIGKRLVRYGWGASYGTSAVRRLFRAGRKTWGLQRVHPSFELIGRTGPRLDGALLHYVDRNISDMIKRLDSYTTARAADLRASGNIGSFANNFRRIFSRFFRCFVSRKGYKEKGMGFLIALFAALFPLLSYLKARYDDE

SEQ ID NO: 4776 - protein, 255 aa, Unknown
  Description of Unknown: Candidatus Roizmanbacteria bacterium CG01_land_8_20_14_3_00_33 _9 sequence
MRQTITAIIPAFNEEKNIERCVKSVLWCDKVMILWMGNDKTGAIAKALGAEVIEMNKNAKPDFISVQKNINWAIDNATTDWIFRIDADEEVTPKLNSEIGFILNSKFIIHNSPVAYGLPRNQFFLGAFLKGGDWYYDRLVRLFRPKFARYDPIVPIHEQFKVTGKIGYLENRLNHYSHPTFNDVIKKFQLYTDAEIPQINNPVWLAFIKMIFLPLYVFCRWFFWHHGYRDGWRGVVAGALRGWYEFLRFWKFLSC

SEQ ID NO: 4777 - protein, 301 aa, Bacteroides clarus
MNNTISAIILTYNEEKHIARCINSLRGICEEIFVIDSFSQDRTLEIAKQLGAKVYQNPWKNYATQFNWGVMNCPITSEWIWRIDADEFLEGNLGQAMKYTLAECSSEVNGVYVRKRIDFMGKPLLHGGWYPSYHLKVFRRGHGECENRWMDEHIRIFDGITITVEEGNQVDANLNDLTWWTEKHNGYATREMVDMLMMEYGMDDKGKEVQAKFWGTEEQRKRWLKMKYIKAPLFLRPFINFFIRYILKAGFLDGKQGFIWHFLQGFWYRFLVDAKIYEIKKQFDFDSEKVRRYLKENYFKD

SEQ ID NO: 4778 - protein, 264 aa, Unknown
  Description of Unknown: Candidatus Shapirobacteria bacterium CG03_land_8_20_14_0_80_40 _19 sequence
MHNTNLTAIVLTRNEEPVVKDCLESVKWADEIVVVDHGSTDKTLEVVKKFGVKIIVEAPVYSNFSDRRNLGAKEALGEWLLYVDADERVTPELKEEILHTISNFKFQISNFVGYAIPRKNIRLTKVLYHGGWWPDYVLRLMRKDKLIKWEGELHEQPKIDGEVGKLKEAFLHYSHRGSLEHKLQNTINWSEIEGRKMFNAGHPPMNIIRFLSAMWREFYYRMIKQKAFLDGTEGVMEAFYQVFSVFISYARLWEMQQKSEKEKK

SEQ ID NO: 4779 - protein, 357 aa, Clostridium saccharoperbutylacetonicum
MITISLCMIVKNEEDSIARCLESVKDIADEMIIVDTGSSDKTKDIVGRYTSKIYDFQWIDDFSAARNFSFSNATKDYILWLDADDVILPEDVEKLKTLKETLDPSVDSVTAKYNIGFDEYGNVTASYRRNRLVKRVNNFKWYGFVHEYLAVGGNIFNSEIGITHKKIKHTPKRNLEIYRGKLEQGAEFTPRDILYYGNELYDHNIYDEALEYYNKFLDSKQGWFEDNIRVCGKICDYYQSINKIEEARKYAFRSFEYDTPRAEACCKIGFSFLHEKKYKQAAFWYEEATKLEKPKDSWGFFNDSCWTWLPHLQLCVCYDKLGNYKLAYEHNEIASQFRPNDERILYNKKYFEKLGFS

SEQ ID NO: 4780 - protein, 352 aa, Paenibacillus physcomitrellae
MIVKDEEKVIGRCLASVRDLVDEIIIVDTGSSDRTKDIAAGYTDRVLDWEWTDDFAAARNYSFDQATMDYIMWLDADDVLYEKDRVKFAELKQSLSWEPDAIIFNYDLAFDPNGNTIASSRRYRLVKRSQGYRWFNPVHEYLNVTEGKVLDTDIAVSHHRAGDHTARNMAIFQKWIENGGKLEGRTLFFYANELLDQKRYQEAAACYETYFGEPIGYREDRIAACAKLAECYHHLGRKDKQLDTLFKSFHYDVPHADICCAVAGCFEGREEWGLAVYWYNRALESLLPEGYMGVVSAAYQTWVPHVQLCFCYARLGHLQLALEHNNLALSYLPGEVNLLENKKRLEQALGLL

SEQ ID NO: 4781 - protein, 364 aa, Clostridium sp.
MSTVSLCMIVRNEEEYIEACLESVKHLVDEIIILDTGSTDRTKELCSHYTDQVYEAEWQEDFSLARNQCIEKATCDWILWLDADERLILKDRKLLQQKLSKKRCKSYTVRMLHFMNSMEEGKGRYYISYHIRLFQRKAGYQFQGIIHEKLVDRKGNELQSKEITDVIELYHYGYTELHLKEKSIRNLSLCLKAKENDRENPWLDYHIAAELYRLGDMKKSLEFINFSILGFLSKGKVPPSYLYNLKYDLLITCGNTENVNEGIERAISLFPDYVELHFYRGIVLFRLNLYKEAVKAFSYCILLGEDNPNYLIKYGSGTFLAYYYMGEAYRMCGEKEYALEAYRQALLYQTEFPEAEERLKEYTA

SEQ ID NO: 4782 - protein, 282 aa, Pedobacter sp.
MKVPVSVVILTFNEEKNIRDCIESILDFTDDIFVVDSGSTDKTLEILSNYPVQILHNPFENYSQQRNWSLKNIKFKTEWVLNLDADHRATKEFKEEVEKLFLNGIPNHINGLLTSRRTMFMGKWIKYGGHYPTYHAALFRLGRGKCENKLYDQHFLIEGDTLKVKGDIIDLITESLSTFTQRHDKWSSLEAIQQFENNLNKKDIIKANVTGNPIQKRRFYKNIYEQFPLFVRPFIYFFIRYFLKFGFLDGKRGLIFHFLQCFWFRFLIDAKIYELKKNSNKF

SEQ ID NO: 4783 - protein, 595 aa, Clostridium sp.
MKNQVSLCMIVKDEEEYLPRCLSSIKDVVDEIIIVDTGSTDKTVKISKSFGAKVYYFKWNNNFSEARNESLKYATKDWILILDADDELNSEARETFKALLNTELDENAIYHFETLSYYGSGIEKDNIAVNLNPRLFKNNRGVHYEGEVHNQLIRAEGDYNAVCKDIKIYHYGYIDKRIVSKEKRKRNIAILNEQIKKKPDDGFVYFNLGSEYGALDDMNKALECYYKAYEKFDQHTGYSSLLILRIIISNLNLKNYNEALKFVDIGISYYPKCTDFYFYQSLIWKELDRPTLQIRALEKCIELGEPPSELKFIFGTWSYRAYYELGNVYMKYKDNYTAYNCYIEALKLKPDYIEPLYNIIQVLEEKKVSLDEMKRILEEFFPEDKKAYYEIAADLFYHVGHYSTALEYIKKYEDTVNVTESTTVLKSRCFIRNGNFEEYTNINNIDKKSSYYIISLMYKVLCFILLNKNENALYIVNNINKDNLSDYDKRYLKVYSELIKLFDKKPTMILTNDENDKEYMNIILEVIEILLINDKFDELAIAIELLNLVDTKYALLNLGKLYYRYGYIELAQKEILRSIKEVDIYDAEGLDILKY

SEQ ID NO: 4784 - protein, 667 aa, Unknown
  Description of Unknown: Geobacteraceae bacterium sequence
MTQFTAPLISRADLLYAKGRCDEAVDLLTDSLARNPSQGSVVTRLAEFLIDSGWHARALEFLKNINTDENDGRALLLRGLCHEALQNFVCAEDIADQLLAQERQRPNALALKARIAVGTQANDKAERLFQEAIECDPGCGMAWYGRACLRRQQGELHAYHTFIKKAFLALPQSKEISIAFHENGLAIGDLQQVESVFREALAGELMDRRLRFFLIDLLLRQSKNAEAVTEIESAIVDFGADERMLAAALNIRTRLGPMSIPTQPKPGGSVSLCMIVKNEQSHLARCLRSVKPLVDEMIVVDTGSSDRTQDIAKIFGAKVFEFPWNSDFSKARNFSLSKAAGNWILVLDADETISVKDYEEFRRILKLSQSRPDAYRIQTRNYSNQANTVGFNTNRGAFPDEMGLGWSPSDKVRLFTNDPRIRFAHPVHELVEPSLQMLKIHVRPCSVVVHHYGTLQNDKTLEKTKTYSDLGRKKLKKDRNSPTAIREHAIQSARLGKHSEALDLWRRFIRLQPRSAEAYVNMGTACWDLERYAEAASFAEKALRLDPLLKEAKFNLAISLLLMGRGGEGKSLLERLIDEQPDYTAAQFMLCVAHICMQERVQAENLFRKLRSLPIGDYIGESFLDISKRFISASRIDDAGRILNTALSFGCETPAMRVLLEDCKAVA

SEQ ID NO: 4785 - protein, 644 aa, Unknown
  Description of Unknown: Desulfitobacterium hafniense DCB-2 sequence
MKLSACMIAKDEEKNIARCIGSYKDSVDEIIVVDTGSVDKTVEIAETLGAKVYRYEWNNHFAEAKNYAIDRAKGDWIIFLDADEYFVNDTARNIVPLIRRLPAHFKAIACKMKNIDYTNGKLLDEITHVRIFRRDKNILYMNNVHECLTHKTKNKAIEAFLADDKDLLIYHEGYSLSDRGKKSRRNLELLLKRLDKAPEDPTIYQYISDCYFGMEEWEKSIEYARMFIASGARFVGYNVKPYQNVIDSMLRLKCNANDILEEIYAGVNKFPCHPSFHFYLANMLFDLKKYDKAHSEYKKTLTLQEKYDDIEINSIVPNLYHVYYYMAIIASHRNEHEDALSHFVESLKMEKMQYDCLRKLLLAIKSFPAEDIILLLNSIYNKEGKEDLDFIVTVLTGVSLPKVLAYYSALRIKKYGSEDLTVVYMLLANGQYNKTFAVAQKCLDADPDNRTFGTLAVVSALLSEHGEYMAWVGAQASEPMRRFVRGLTKHEIFVFSKEDKEDYLDLITYLHLFGTKEILNKAIELAQDFDEKVIYAELGNLFFKQECYAEALKLYQHYIKQEEAKKEKQITQIYAKGICWYKLREYEKAATALIEAYELGYRQNDIYEFLRWSVDKLPSGNRSGERGLEIIAESKWQESAFLKV

SEQ ID NO: 4786 - protein, 765 aa, Unknown
  Description of Unknown: Bacteriodetes bacterium sequence
MELSVSACIITKNEEKHLRDCLKSIESCADEIIVVDTGSTDKTVEIADRLGCKVIITEWQDDFSYSRNIALNSATKNFILVIDADERLLNPEELKSAIENKGPSTGGWIINVVSEARREDGSIDTYSSGLLRLFVNHPSVRFHGIIHEQVLEPLLQQGFRLQQSNLLFKHIGYGHSSEQMRQKQERNLYLLNKSLEKNPEDAYSLYQRAKTFLALKSLEEAEKDIQKTLEIVNPNSAVKPQALNFGAVVAFQMKNYEKAIARAKESLSILPNQSFANYILGDTHTQTGNYPDALESYQRMEEAETKEDLTTKIVGDYHLPKEQLYFRKGKCLIGLKQFDAAFSEFEKGFKINNNDVGILVGMANVAFFWKKFDEARGFLLKAKKLAPNKGEITNYLEQVDNALSKIKSIQTSSEVKTGGNGYKPFLTLSMIVKNEEGTLPGCLESVRDVVDEIVIVDTGSTDRTKEIAKKYKAKIYDFEWIDDFAAARNEALKNSTGEWILYLDADERLDINSKNNIRNILMNASDEIGGFICTIESDHYQLNGSTERHRGGYPRIFRNYGIPKISFQGRVHEQITPSIFALGKSILFSDLVIEHLGYNQSREVMEAKVNRNYKMLIQHVQEEPLNAYAWYQLGQTLAQMKLIDEAEKTIRFSLQLGNLSDSVYASATSTLAQLVGNKKNFDECLYWTEKSLEKAPGQVYALHLKAYALLYLGRFEEAEQLFLEVLNRLNVKKGVPHSGFDIVIPEEIVMKGLNQAREKRITDNI

SEQ ID NO: 4787 - protein, 361 aa, Clostridium hydrogeniformans
MNGDITISLCMIVKDEEDVLERCIKSVLSAIDEIIIVDTGSKDKTKEIALGLGANVYDMQWQNNFGLARNLAFSKATKEYIMWLDADDVVTEESLQKLLELKKNLDRNVDSVTMIYVLEEDSSGNPTSTLRRNRLVKRGRDFQWIGKIHEYLAVHGNIINSDVSVHHRKIKSSSGRNLMIYEGMVKEGEELSVRDMFYYGNELFHNGHYDKAIEQYNKFLDTKAGWIEDVKTALSNMSECYSANGDNENQLKCLLKAFEHDVPRSDFCCKIAYCFFNRNMIYQAIFWYKLAIDTAPSKDNLSLVNHATYTWIPNIQLCVCYSRLEMYDLANKFNEEAGKFIPDNPMIIHNREFLKDKISNS

SEQ ID NO: 4788 - protein, 314 aa, Alteromonas oceani
MLGNFCVSSNLSVLILTHNEELHIRRCIESLKPIVSQIFVVDSGSTDKTIQICEELGVRVFRRKWKNYSDQFQWGLDNCPIETDWVMRMDADEYIEPDLIAELPKVLAVAKAETSGFYIRRKYFFLGQWIKHGAVYPLNLLRVWRTGKGRIESRWMDEHIVLDDGGQTEMLSGHIVDDNLNNTKWWTDKHNKYADREMVDILGRKYSLFAADQTLEVDDSSSQAKIKRLVKEKLYNRIPLFVRPLLYFLYRYFIRLGFLDGKKGFAFHFFQGYWYRSMVDLRVLEAEKLFADKHCDTKEKKLDALAELTGLELK

SEQ ID NO: 4789 - protein, 749 aa, Unknown
  Description of Unknown: uncultured Desulfobacterium sp. sequence
MSEIETDWVLFIKPEERVIISSAKKLTKMLTSKQAPGYGVHTKTTKDRHLLENYQWIKKLEQFKDIGCSDFIVRIEPRLVIKSHTKICMKGLAQENTDEVSWICGIIAHGLKIELIHQENETGNSDGNIREHDTRCLKGELVYDVTPEEDMVELSEMYTGFRILTNSQLDGFMEGARCGFGHYKMYIPMLEFLVKEGFFTEAKELFEQWTDHRPDDKEEYNTQLMGAMIYSNLLEYDKAIEWFKKITEKSESALAFANLGKLYLIKGDKNKAIEHLEMSKDTEGDIFLKKRILSIIKNEEWRPLKLSLCMIAKDEEDQIGKALQSVCDLVDEIIVVDTGSTDKTMEIVKEYGAKLIESKWEDDFSQARNLGLSKATGDYILFMDADEYIHPGDRFGLALFKMLLPIGKNIAFGLKIEPAKEARKMSMAQSDLLTDQKEDNYQIRVFPKKTGVRFQGKVFEDLDEALNEKQVRALRYDVVKITHSMEGREKRDKRKIPAIAKAFGSIYDSQKILKAGILFLRLGDIESAYPWLIKAAGVDPNLSAKIGMLYSRQNKHEMAKEILTNAIAQFPESSELVLSLAGVYHREENFCKVVSILGERILNIEKELISEKTALARYYLGIASIETDDVAYGIEQLAIAHEIDPANISYKIAGIYAFAKVEQWEEALQTAGQISDKEEIDIRCEVNDFVDVVQIFVDLNRHFNRKGRMEEANLCRMIIEVIIKSKLSGSEDMDKMSAMIEGVATGGCI

SEQ ID NO: 4790 - protein, 360 aa, Paenibacillus sp.
MITISLCMIVKNEEESIGRCLGSVQALVDEIIIVDTGSTDRTKEIAEQYNAKIYDFEWINDFAAARNYSFSLATMEYIWWLDADDVLLENDREKLLQLKSTFDRSIDSLAMDYHLSTGPDGKPTFSMKRNRIVRRACGFQWHGFVHEYLAVHGKIVPSPIAVTHQKEKVHTTRNLDIYEEQRAKQTPFSPRETYYYANELKDHRQFENAITHYQAFLDTKQGWIEDVMAASCKIADCYEAIEKIDEALAAILKSFEYAVPRAESVFRLGRYFMHRDALDQAIFWLSMATTLEPPKESWGMQQSGYWTWLPHVQLCICYYRKGDMITSHYHNEIALTYHPDDEMMLSNRKLLLPYQPEDPN

SEQ ID NO: 4791 - protein, 254 aa, Unknown
  Description of Unknown: Bacteroidetes bacterium SW_11_45_7 sequence
MNHVSAVIITYNEERNILRCLDSLLPVADDIVVVDSYSTDKTPQIVESKGVRIVQHPFEGHIEQKNRAITQAKHPFVLSLDADEALDKDLQQAILEVKKSGNADGYYLNRLTNYCGTWIWHGNWYPDPKLRLWDSRKGKWGGVNPHDTFIMEKDSKISQLSGHLLHYSFSTFAEHRQQIHHFADIASRAAFERGKRSSPFHILLSPTVRFLKGYLLKRGFLDGKAGWQIALWSAYAKYLKYRNLQRLWHANRAA

SEQ ID NO: 4792 - protein, 247 aa, Unknown
  Description of Unknown: Candidatus Shapirobacteria bacterium CG11_big_fil_rev_8_21_14_0 _20_40_12 sequence
MISVIVLAKNEEENIKRCLKSVSWADEVLVIDDNSIDKTVKIAKSFGAKVVNHSLEADFSRQRNFAVSRAKNDWVFFLDADEEVSLELKDEILKSLSQHPQKTSAFYFKREDFFMGKWQNFGETGNIKILRLARKGSGKWEGKVDEIWKITGGCQIFKNPLKHYSHPNLSQFLESINYRSTLNSQVFFERGEKLNFFEWLKPFLKFMQNYFIRLGFLDGVSGFVFAVLMSMHSFMVRAKLYLLWRKK

SEQ ID NO: 4793 - protein, 359 aa, Desulfosporosinus orientis
MKISLCMIVKNEEDTLERCLSSVSDIMDEIIIVDTGSTDKTKEIAAKLTEHVLDFTWIDDFAAARNFAFSHASMGYIMWLDADDLLLPEDRQKMLQLKQSLDPSVDAVSMEYHCDFDEHDNTTLNVRRIRIVKRVKNAKWHGAVHEDLSVDGKIFDSEIAVTHKQNHKNTDRNLKIYENRLLQGKEFTVQDIFHYASELHHHKKYKKAIEFYLKFLEDENNTEENKIFVCIRLADCYCQLNDKEKELALTFKTFQYDIPRPESCCRLGYYFLQKNELNKAVYWYKQAIEVPMPENSWAIVSGVSRTWLPHMQLGLCYYQLGRYDLSYQHNKIALSYRPKDKGILNNINLLEELLKQGQD

SEQ ID NO: 4794 - protein, 269 aa, Mucilaginibacter psychrotolerans
MIPVSVVIITRNEEAMIGRCLEMASLISNDIVIVDNGSTDDTIAIARAFNCRIYHKDWDGYGANKNKGITLARYDWILSLDADEVADGQLVGQLHRLMLKDPNVVYDIAFRSYFGQKRIRYGTWGRDHHRRLFNRRLVRWSETEVHETLLLPAGVKILKLDGHLHHYSVNNIYECRQKAVHYARLSAAKYANQGKKAGFFKCRLSPVFGFVMSYILRLGFLDGPEGLDIALTMYQNTRLKYQHLKLLESRKYLPSDKPPVPKKLAVEYR

SEQ ID NO: 4795 - protein, 421 aa, Bacillus pseudomycoides
MLPTISFCTIMKNEEEYIEKCLESIKNIVTEIIIVDTGSTDKSIEIAKRYGAKIIYYDNKNINFSQARNLALNIATGDWILTLDADEMFYKKDVYKILELVKTHEKIAYYFPRYEYLKNGGWFLKKALKLFKNSPNVQYRRTIGENIIDSLEECSYKFCEVDEIYIHHYGKRKKTTQLYNKKNLYSELTKGFLKENPVTYPKMYGFLAESYLLTEDYVSALNNFKIAYEKAPSLYAYKRICDLYYKMGIYDKWIGGYRKLVTTELFDESSLNNTKGHYYFLIEQYEEAKLFYEQTMESCHKYINIGLCSERLGQYESAIHNFEMAVNLNPMIKQLYPLKFSYPIELFNDTNWAFKCVYNHLLFCYLMLGKTEEALNVLMKINNEECEQLRTYVLESTKRINSMSEGVIIKYELDKLMLKNY

SEQ ID NO: 4796 - protein, 369 aa, Bacillus filamentosus
MITVSLCLIVKNEESTLQRCLNSVKEIVDEMVIVDTGSTDKTIEIAAQFTNKVLEFPWEDDFSKARNFSFQQATKDYILWLDADDVLNEKDVEKFLELKKTLSSQVDAVAMDYYLDFDEYGNVAGKIKKYRLVRRMAGFKWIGAVHEYLDVEGKVESSNISIIHKSERQSKDRNLRIYKNKLARGEAFEARDLYYFANELKENGTYDKAIFYYNKFLNTEEGWIEDKISACSKLADCYFEKGEHEKEYIAILTSFIYDIPRPEFCCRLGYYFLERNELRNAIYWYYVAIQLEISTECSGFVNPAFSTWLPHLQLCVCYDRLQQYDLAYQHNESARKFRPEDPQILHNKQYLEVMKNRNLTSLGETYVGI

SEQ ID NO: 4797 - protein, 357 aa, Unknown
  Description of Unknown: Lachnospiraceae bacterium A4 sequence
MSKIPVTVCIIAKNEEKHIENCLKHLKKYDLEVIVTDTGSTDRTKEIAEKYADKVVDFEWVNDFAAARNYCTSFAKNNWILAIDCDEYVTNIDVRILRILMQKYPRYTGVLRLKNLIPEGNNGAKGYVSDDVPRMYNKNYFEFDFPIHEQLRFKDRTKSDDVMEAFLLPIEVIHHGYALTGDDMRKKQERNIKLLEGSIEENPTNGYYYFQMGQSNFVLGDVDKAIEAYEKGMELVDNLDNVYVPEMIMSLAKAYTAKRRVDDALNFLEKYVKYYNTAKFQFEYAELLRKNNQVLKALAMYIKVTTMQDVETIGENLITCYGCIISIYESMGNKEMAELFHNQFLQCVAEKERIVNS

SEQ ID NO: 4798 - protein, 285 aa, Pedobacter glucosidilyticus
MLDYPVPISIIILTFNEEKNIKACMESALNFAEEIFVVDSGSTDATLSILENYPVQVVQHPFENYSQQRNWAIQHLPIKTQWVLNMDADHRLTEEFRTEVSALFSKPIADDIHGFLASRKTIFMNKWIKYGGHYPTYHAVLFRKDKGLCEEKLYDQHFKVEGKTQKLKGDIIDLITESLSTFTLRHDKWSNLEAFEQFHPPQHGAVIKGSLQHDNPIARRRYMKNLYERFPLFVRPFVYFFIRYFLRLGFLDGKEGLIFHFLQCFWFRFLIDAKIYELKKQQDGH

SEQ ID NO: 4799 - protein, 349 aa, Bacillus luciferensis
MIVKNEEAVLSRCLSSISNIVDEIIIVDTGSTDKTKEIAKNFNSLIYDFKWINDFSAARNFAFSKATKDYIIWLDADDILTEENANKLLALKKSLNKKVDAVGMKYHLSFDENGNPSFSSVRHRIVKRERNFKWIGFVHEYLEVYGEIIQSDAAIIHQKDKEYSDRNLKIYENAISSGKELSPRDKYYYANECVDNQLYEKAVEWYELFLKEGKGWYEDSIQACGKMADCFINLQNWEKAINSCLKSFYYDGPRGENCCRLGYIYLQQGDYSRAISWYKLATLVSVPETSPFINQACYTWLPHLQLCLCYSRLGDQVTAKKHNDLAANYVPNNPSVLYNQEYFRTYFKD

SEQ ID NO: 4800 - protein, 364 aa, Paenibacillus castaneae
MISISLCLIVKNEEKTLGRCLSSMKDIADEIIIVDTGSTDLTKQVAGKFTDRVEHFTWINDFAAARNYAFSLATKSYIMWLDADDVLKESDQLKLRELKRNLDPAVDSVTMDYHLAFDEFGNVTSKLKRNRIVKRERGFKWIGPVHEYLEVYGNIFHSDIAVTHSSIHHDSDRNLKIYEQRLAKGEVFSPRDLFYYANELKDHSKFKAAIRYYNQFLDTGKGWIEDNVASCSRLADCYSELKETRKMVDSIFRSFHYDKPRPEFCCRLGFYFLEREEFKLAIYWYKLALAVEKPEQNWGFENLACSTWLPHLQLCVCYDRIGEFETAYAHNELARTFRPTDERIVANRAYLVKRLGKKVGEEAL

SEQ ID NO: 4801 - protein, 350 aa, Alicyclobacillus macrosporangiidus
MIVKNEEETLGRCLESVADLVDEIIIVDTGSTDSTKEIARKWTPHVLDFEWIDDFAAARNFSFSHASMEYILWLDADDVLLEPDRQKFLHLKQNLDSAVDVVSMYYHLAFDSEGNVTASLRRNRLAKRSKGFRWYGAVHEYLAVNGSVLNSDIAITHLPVKHDSDRNLRIYERRLAAGETFTPRDLFYYANECFDHQNYERAIEYYTKFLNSKQGWIEDIIATCGKLADCYFHLGDMERAKEYALKSFEYDTPRAEFCCRLGYGFMQQGEWNKAVFWYKLATEVEKSKDSWGYFNDACWTWLPHLQLCVCYYHLGEYELAYKHNEKARQYKPNDEQVLYNKNYLESILKT

SEQ ID NO: 4802 - protein, 615 aa, Unknown
  Description of Unknown: Firmicutes bacterium sequence
MTASLCEGDVLEIGCGNGDLSSYISMYGNRVFGIDIDPVAVEIARYKVWDYALSDCFFDVADANQLDLPDSSFDTVILAEILEHVKEPMKVLKEARRLCKNGGKLIISVPNGYKIPSHDHLRIFNLDVLKELLAGIGVKESDINLDERVPNEWILCWFYNKKEENLNLRGKNNQDLTKYFLPPHPIEDLKNAGKVSVILPTYNGEKYIQESIDSVLNQTYKNFEIIVVNDGSTDKTYEKLRPYIERGQIKYISQGNKGKPHAINRAMQLATGDYVWIFDDDDTALPRKMEVQMRHFLRKPYLDLIHTSSIYTDSSNKTPLLVWEPSEIEQKDLLKSLLHGCIFHQGSVIVRKRCYLNAGKYDERLVRAEDYDMWIRLVKNRCNVGKILLPTVTYRQHNKVRGSKENPIPVEKVAEATREYEKIIFKKVYNDIPLAEIFPELKEENSNSGLRVSALIERAYAMAKRRLFDYALNDLKEAFELAQKNYPVSITFRGMYFIKKFSEMLTQIENEEIKNIVMYFSLLIGNRDVRNFGKKGKTTLSLCLITKDEEKNIARCINSVKEIVDEIVVVDTGSKDRTVEIAESLGAKVIHAKWEDDYSKARNIAIENATSDWIL

SEQ ID NO: 4803 - protein, 295 aa, Unknown
  Description of Unknown: Marinobacterium sp. AK27 sequence
MENNITAIVLTYNEELHIGRCLESLLKFCSAIVVVDSYSDDSTLEICKSFHKVQVVQNPFVNQALQMQWALDHTQINTRWTIKVDADEYFDEKAIRNIKAISQGEDCAVAFRRRVVFNDRWIRFGGTYPQTLVRMWPSGLCQVENRWMDEHMIVKGMRRVVVKGGFYDHNLRNIEWWTNKHNSYSTREMIQYYLEKLNPINEEDKLGFSLSTYVKRNLKKAYNRFPKLFRALFYFSVRYFFLLGFLDGKSGFYFHFFQGFWYRALIDFKIDEARIHAYDMVSFRVYIKKKYGLNI

SEQ ID NO: 4804 - protein, 350 aa, Bacillus sp.
MIVKNEEAVLSRCLSSVSNIVDEIVIIDTGSTDKTKEIAKKFTNSIYDFTWINDFSAARNFAFSKATKDYIMWLDADDIITDENAKKLLKLKKSLTKNVDAVKMKYHLAFDENGIPSFSSVRSRIVKRERNFKWIGFVHEYLEVYGEIIQSDAAIIHQKDKEYSDRNLKIYENAISSGNELSPRDKYYYANECVDHKLFEKAIEWYELFLDEGKGWYEDNIQACGKLADCYLNRNELEKAISSCLRSFSYDGPRGENCCRLGYVYLQKGDYTRAISWYKLATLVDVPTSSPFINQVCYTWLPNLQLCLCYSRLGDQLTARKYNDLAASYVPNNPSVLHNQAYFRSYFKDQ

SEQ ID NO: 4805 - protein, 300 aa, Unknown
  Description of Unknown: Candidatus Woesebacteria bacterium GW2011_GWA1_39_12 sequence
MHYTPSTTHQTLSVVLATLNEEQNIGSCLESIKTIADEIIIVDESSTDKTREIAEKYGAKVIKVKHKENFHINKQKAIETATGDWILQLDADERVSPELAKEIVEVVNSPNDELLKRVLDSPSTKNLKLFSRHQRLIEQREGRLGIHNGQIVAFFIPRRNFFLGKPLIHAGVYPDGVIRLIKRGKARLPGKSVHEVMEVDGEVGWLFNDLEHHDSPTLQRYLERMNRYTDLQAEELRRNEVPVNAFYMLLYTCYRPAITFLKLYIRHRGYLDGMRGFIWSFFSSLHYPLSYFKYWQAQKS

SEQ ID NO: 4806 - protein, 349 aa, Bacillus sp.
MIVKNEEQTISRCLDSVKGIVDEIIIVDTGSTDATKEIVKRYQSKIYDFKWIDDFSAARNFAFSKATKKYILWLDADDEIADEDKKKFLQLKRTLDANIDAVSMNYYLSFDVEGNPTFQLRRYRLVKRNRNFKWHGFVHEYLEVYGNLMDSDIGVTHKKEKAYSDRNLKLYEKHIADGKELSPRDVYYYANECKDHQLYDVAIKWYSKFLDEGQGWFEDNIQACLKRAECYLELGNWNESVHSCLHSFIYDTPRGEICCHLGYLFLQKNDYQKAIYWYRSAIEGPRPDNSYFIREACYTWLPHIQLCICYDRIKEYEKAIYHNEQAAKFIPNDPSIHHNREYFSNLSKK

SEQ ID NO: 4807 - protein, 379 aa, Unknown
  Description of Unknown: Anaerolineae bacterium sequence
MENPLISLCMIVKNEQEYLPRCLESVQNVVDEIIIVDTGSTDGTKEIARKYGSKLFDFEWIDDFSVARNYSLEQAKGRWILVMDADEELERDSGARLRKLAQADEADAYWVLQRNFYKNRPQNTLDVPVLRFFRNCPTYRYRKRYHEENTTSIRESGGKIAKDPQGLIIFHYGYLHSTAQGKPRVERAIQTMQLALQEEPNNAWLLAKLGIDLYSIGRQDEAYAYLYRFATAEQGQLDYRQATPLDTHEALTYLGDLAMRRKEYTLAKYCGLASRKLTDVFELRLYSEFAVIGGTLGETQILLEQVQQENVPLRLTSENFSLLRQKLQELSDLEGEITTLLDGFYTLLSSSQRNLLRSWKSSCRQLILAIQQILTSKRA

SEQ ID NO: 4808 - protein, 289 aa, Sporomusa sphaeroides
MISVIIHTLNEEKNIRNCLECVKWVDEIIIIDMHSKDKTVQIAKEYTDKIFFFEQMEYADPARSYGLSLATNEWILSVDADEIVPVDLKNILIKIMKENYYDAVSIPHFNYFFGHAIIGGDCAPLENPHIRFFKRNIVSYSDNIHSFFQIDYKAKIYFIENKELSFIHFGYIDVEHFLEKLNRYTTIEAKALYLNNEKNIFYKLVIKNIKEVLKFFLKKGYKDKTYGLIYTLLKCGYNICVGAKYFLMKQSKTIVPRNSIICEYDKIAQKCIQEHKKRNKKYNEDKSTN

SEQ ID NO: 4809 - protein, 477 aa, Unknown
  Description of Unknown: Desulfurobacterium thermolithotrophum sequence
MKISACIIAKNEEKNLPRLLKSLKGKFDEIILVDTGSTDKTKEIAKEYGCKVVEHEWKGFADARNRAVEEAAGDWIWHFDADFELEEDEYKKALLFLRKLPIEIKAVMIGIKNLDNSGHIKGISSHIFIHRNENGIRWVGKVHETPNVEEAIGIPVFVKHYGYADPKVQLEKAERNLKLLLQEISTLEKGSHEYILKLFYLVQTYTILSYRNKEYLQKAKEAAEEFLYLTKEKEEKFGFFFIYVYNYLLNILKMMKDKKTFEKYLFEVLEKDFQVPDFYILAYHFYKEQNKLKKALKNLRKAAELFDKSQKNPFFIKMSFASDKLKEFEKIILSEDLISEDYESELKKEWKKKKGRNLGLLFYAVSNKDRLKTIKKLVMRYPDELTVFLLFKELENKKLWKEIEKYVKTFSDFSISYLYKGKLFENKGMIEEALSYYLKYLELNKDFNVALHVNSLLRESGIIEINSKINRLTSDNK

SEQ ID NO: 4810 - protein, 344 aa, Butyrivibrio sp.
MVTISLCMIVKNEEKVLGRCLESLKGLFEEIIIVDTGSVDRTKEIALKYGAKIYDFDWINDFSAARNFAFSKATCDYIYSADADEVIDKENYLKFQALKSVLELNPTDDLPVDIVQMYYCGQLSSKSVYNFDKELRPKLYKRIRSFIWEEPIHEQVRLNPVIFDSDIEIIHKPEGDHSSRDFAAFENYTEKGKKLSSRLLDFYTRELYMAGRKEDLEKSVSYLTSVTEDENTDSNDIQKASIILCKFYRITDNIALFMKYALKDSAIGMSSEICCELGDYYLEHEDAKEASLWYYNAAFSQSAVLDIFSSGKRAFLGLGNCFENLGDEENAFFYKQKAKEWKTE

SEQ ID NO: 4811 - protein, 294 aa, Hymenobacter sp.
MNSLSVIILTFNEEKHIERCIRSLQGIASAIYVVDSFSTDNTCALATALGAQIYQNAWTNHSKQFNWALANCPITTDWTMRMDCDEYLLPELIAEINQKLPQTAAATGGFIIKRRVYFMDRWIRHGGFYPHRLLRIWRTGQAVVEDRQMDEHVVLEQGEVESLAHDMVDHNLNDLTWWTTKHNHYATREMRDLLDIDAHTTASQNVESSLTGEQYSRKRWMKENMYSKMPLFLRALVYFSYRYFIQLGFLDGKPGLVWHFLQGFWYRFLVDAKLYEHTHRQQQAAPVAPVPQPL

SEQ ID NO: 4812 - protein, 255 aa, Unknown
  Description of Unknown: Acidobacteria bacterium sequence
MRLSVVIITRNEESNIGRTLASVTWADERIVVDSGSTDRTLEIAREQGAKVFQEPWKGYAQQKNSAIAKASGDWLLSIDADEEVSSELGESIRQVIGNGTPSIAGYFIARRNLFLGRWIRHGGFYPDRKLRLFRRGKGEFVERAVHETMRVDGATAELTGDLIHHAYPTLTGYLETMNRYSSLGAEVAVQKGQVSQSLPSFFWNIRVRPTVNFIWNYFFRAGFLDGREGFLLHLYHHGYVSWKYAKAWEAKREKR

SEQ ID NO: 4813 - protein, 364 aa, Paenibacillus odorifer
MVTISLCMIVRNEEKSLHRCLSTIASLVDEIVIVDTGSTDKTKEIALSFGAVIYDFEWIDNFSAARNFAFSKATQEYILWLDADDYIKEEDQILFKKLKEILPGHIHSVNMQYNLAFDEAGNVTASLRRNRLVRRSCNFQWIGPVHEYLEVSGPSFSSDVCITHEKDKEYTDRNLRIYQKRVALGEVFSPRDQYYYANELRDHAINEEACKYYEIFLAGGQGWIEDNFQACLKLAECRERLGDKDGAFEALCKTLQYDKPRSEFCCRLGALLLEKGQLHPAAYWYELAIQLPRDNDSMGMKNGIFYTWLPHLQLALCYDRLGQYEKANHHNETALSFYPSHPSMLYNRTYFKNLLGDKYVALQA

SEQ ID NO: 4814 - protein, 647 aa, Paenibacillus sp.
MDKLLSVCMIVKNEEAVIDRCLSSINDYADEIIIVDTGSTDLTKQIAAAYTDLIYDFEWINDFSAARNAGIRRATGQWILVVDADEYYHPAEAAKLRTFLETETPNPGLVYAVSIVSYLGTSIEKSSTMSTGEVARLFPNHQNIFYTRPIHEQLYATDGTPLHFQLAPGSLYHTGYLKDAIESKDKLNRNAGIFSDLKKNKGFSAYDYYTVGNEKAMQRDFQSAIYYYERSLKKSERNSSVSWYPRCIISLVQAYLELKRVYDAWHLIETKLIQWNQYPEYYALKGSIYYYIGLFDASREEYQLAYRSAEKLAETTEVFWLDSPDYASTFPLRVLSDIAVYENDVEKTVYYLTKLLMQNPYDYRAITQLIDTLAQTQPAESISQLLNEIGNADDRKFQLYLFKVTLALGHIDLSKYYWAMLEDVESELDIIDRLNLALLQRDEAMFGNLVASLAKDQTITHDILVSCTLGSLMWGSNYYERITISEDHALSASYNSFRCLLEGAPVDSQPDIFTLLTKCYLYHNYDLYDRFVNAYSSSEITNMLANFFYNKKNYDLALNYYSLLLRNNDLSVTSLENLSLYHLTRHYIEDGLEFILAALEKRPDLPHLITLYLRFCTNPQAKQTFIKKYGDHLSYYRKIPLLASLLK

SEQ ID NO: 4815 - protein, 372 aa, Desulfosporosinus fructosivorans
MEDNPITISLCMIVRNEETTIARCLDSVKGIPDEIIIVDTGSTDNTKEIVRLYTEQIYDFEWIDDFAAARNHAFDQATMDYILWLDADDVLLEVDSRKFLDLKGNLATLIDAVNMPYVLKRDEFGVVTYSFGRNRLVKRSKNFRWIGTVHEYMNVYGQILKSDICVTHTGTFKVSDRNLKIFEKNQDKGMPFSSRDLYYYGNELFQHQLYHRAIEVYQEFLNTGQGWDEDKISACARLTDCFQQLGDKAKELEWNLKSFEYANPRAEFCCRLGFYFLRAEQYEQAAFWYGLATKLEKPDFRGPMLEACWTWLPHLQLCVCYDRLGKQELAYKHNEIARTFRPEDPQIIHNKKYLERTFGIKSIEKEIRGNEL

SEQ ID NO: 4816 - protein, 259 aa, Unknown
  Description of Unknown: bacterium sequence
MVNLTAVIIAKNEEGRIGKCLDSLKGFAGSIVVIDNLSTDRTVELCKKYGAEVIVHEEKEYFGNQRNIGIKNAPGEWIIQMDADEIVPKETADKIIKALQSPGEFVAFNVLRKNFFLGRPLKTAGNYSYMTKIFKKGRAVYADNCFHEELNIDGPVGNIDAEIDHYPFTSISQVIDKCNYYSEIESDLFLRSKDKVSIKEIKYRLTWKSLKLFWKLYFRKKGYKDGMHGLAWCILNVIGPQVRWMKIWEKASKEGKLTD

SEQ ID NO: 4817 - protein, 1254 aa, Syntrophus sp.
MRFSICVIEPAGYKYSHFLYDLCKYLCFSIESAGHECCILRNKMTNDRTNIIVGAHNQTDPAIVDQIKKVGRYILLQTEIITGDSINNWSVQKWFAEVYLPLMRKAAAVWTGVQKNIDALKKLDVQADRILWGYHPLMEEIKHKQNKDIDFLFCGSITQHRRKLLDQLIDRGCKVVTMFDDAAMYRNDLIARSRVNLAPNQGPGMNHLGGGRVLYLVNNRSIVVVERCHDQAMYEQCFPWAETEHWVELCMETLHRPDLEHVTEEYYERFKKMPMADMIAPLLDKFLAANKSSLSSITYPGWNDPMQMDTVFDAKNVLNSQVEQKNLLKKMTSIIILTNNRLDQTKKCLKSIHKHTPEPHEVIFVDNGSTDGTVKWLQGQLKENKNYRLIENKENVGVAKGLNQGIALSKGEFILIMHNDVLVSDGWLSGMLDCMSHAPLAGIVGPMTNNISGPQQIAYGEYQSVNYLDKYAARFKEKYRYRRIPCRNLDGFCLLFKRALAEKIGLFDERFGTGQFEDEDFCLRAALKDYRNYIAGDVFIHHGGKGLAGNRNVLDKKWTLSMASPEGKKLAVLKSIESANDFYSKGEIDQAVKTLIDCIKLAPDTKEIYYELARIFIESKKFSEAWEVVGTMPDSVKNDLKGLECSGYAKEGLGLDDEAAVYADRILSQKENDPAALNLKGILAYKKDDKETAADYFRKAMNADPGYGEAYTNLGVLCWSLDKKDEALAHLRKGFVLSPSVPDINSLYYSVLASLGIFSDAEAEFREAYRLYPSNKNLAFLYIDILIQQGKFDSAMRNIEDVLDVFGLDEGTLNAALAVREKIGPLQLEKTSKKDSLSLCMIVKNEEKHLIKCLKSVRDVVDEMIVVDTGSTDKTIDIARIFGAKIFEFPWTGDFSAARNHSLDQATGDWILILDADEVISECDLNELKALTHKRNSQPTAYSIVTRNYTRNVSVIGWTPNRGQYPEEAGAGWAASAKVRLFKRRKDIRFSNPVHELLEDSLKKANIPISHCNVVVHHYGKLNMDLDSEKGKDYYLLGKMKYENDPTNVRYINELAKQAHVLGKYEEAIDLWIKLLSLIEADPQSPSYKEIRRVSYGEPISEIYIQLASAYLLLNRYEEAIKAARKTIENKVKLKEYVNIYAHCEIIAGSLSNAYAALEELLETNPDYLPALFLKAVIFRLEGKKEKAQELFQLLQQKNVRITSPLNKIARQLLAHEKKEEALLILNAAIENQINDEETGTLLEALEERQSRAS

SEQ ID NO: 4818 - protein, 310 aa, Spirosoma montaniterrae
MADVSVIILTFNEEKHIARCLNSLLPFTDKLFIVDSFSTDKTVDIARSMGAVVVQNAWVNYATQFNYGITHTPFQTTWLMRMDADEYVLPELADEINRRVADLPADVGGVYIKRRVIFLDRWMRHGSYYPIWLLRIWRRGDGFCEQVWHDEHIKLSKGSSIEFQHDLVDHNLNNLTWWTQKHNHYTILEAINLLNYQYRFDNAETVQARLFGTQEQRMRFLKERYASLPLFTRPVLYFIYRYFIRLGFLDGKAGLVWSALQALWYRFLVDAKLMEVYLRAGRDKEAIIDYFMKEYGKDLRAIRPAPVKQS

SEQ ID NO: 4819 - protein, 258 aa, Roseivirga echinicomitans
MNESNTKVSGLVITYNEEHNIARCLESLIEVCDEVIVVDSYSTDKTKSICQSFDIKFIEHPFEGHIQQKNYAVSQANNDVVLSLDADEELSSELKKSIKQALSNWNNEALSFNRFTNYCGKWIKHSGWYPDTKIRLWNKKKGAWGGVNPHDSVELENGVKVEHINGDLLHYSYYTIEEHIVRSAKYAKIAAKAFHEMGKNPSSYKMIFSPLFRFTRDYFLKLGILDGFYGLIICSTNSYTTFLKYAYLRQLNLGKKID

SEQ ID NO: 4820 - protein, 354 aa, Paenibacillus harenae
MTTLSLAMIVKNEGKVIERCLNSVKHMVDEMIVVDTGSTDSTKLIAERLGAKVFDFKWIDDFAAARNFSIACTTGNWILVLDADEYFEEDYTVQLRQFINQPLDRIGKVTIISSYLDNGQLRTAKSAASRLFPRSVSYTGIIHEQLASSFERTDTPLIFLHDGYYETDKSERNLSLLLKELASKPEDSYLLFKIGKEYHRKKDAVQAEAFYTKALSNLQNHSTYSEEPIVDYLYLLLETKQLDKALAALEVHFVRLQHVSDYYFVCGLIYLELALQQPDEALQFVEMIENSFQYCLHLGQQSATEYVIGTASYLAAYNLGLLYEMFGQTEKATAMYRLSSSSGYEPARDRLNFI

SEQ ID NO: 4821 - protein, 285 aa, Pedobacter agri
MKSPLTVIILTFNEAKKIKDCLGSVIDFASEIFVVDSGSTDQTLEIISEYSEVKVFHHAFENYSQQRNWALENLPIKTGWILNLDADQRLSNEFKVEVGNYFQKGIPENINGFLASRKTIFMGKWIKYGGHYPTFHAMMFRKGKGNCEQKLYDQHYVVSGDTLQLKGDVIDLITESLSTFTLRHDKWSTLESIQQFNLKNPTAETVSGNLNGNPMQRRRYFKNLYERMPLFVRPFLYFIIRYFFLLGFLDGKRGLIFHFLQCFWFRFLIDAKIYELRKQQKNNPY

SEQ ID NO: 4822 - protein, 280 aa, Unknown
  Description of Unknown: Acidobacteria bacterium sequence
MILSVVIITHNEEANLPRTLESVKPLVSDGKGEIIVVDSGSTDRTVEIAKSFGAKVFIEAWKGYAAQKNSAIDKAEGEYILSVDADEEVSSQLAVEVENTARWRPAIHKFAHVTPDGQLEPLYVNGFWIPRRNYFLGRWISHGGFWPDRKLRLFRRGIGRFKETLVHETLDLQQLPGPGVVATPRRLRGALIHHSYPTLSDFIEHMNRYSSLAAEMVAVRGKVRFSAINIVLRPLATFIYNYFFRLGFLDGREGMLLHLYHAVYVSWKYAKAWELANKRE

SEQ ID NO: 4823 - protein, 317 aa, Clostridium sp.
MTSFSLCMIVKNEEKVLERCLKSLAPYMDEIIIADTGSSDATKKIAQKYTDKVYDFEWTGNFSDARNFVASKATKEYIYTADADEYLDADNQKKLAQLKQILLPEIEMVQMLYCTKAEFNTVYNFEKEYRPKLYRRLRAFQWIDPIHETLRIDPIVYDSRIEVIHEPQSDHSKRDLAALLQAGLKERLSKKLHHMYAMELYHSGQDEDFVKAIPVFEQTLQQDSREMDTIKEAICVLVRAYRIKGDIPKFFGYALKDTATVSSAEVCCELGRYYESTGELQEALIWYQNASTETESILDIATSQTIPQEALKRLGAY

SEQ ID NO: 4824 - protein, 266 aa, Unknown
  Description of Unknown: Candidatus Amesbacteria bacterium GW2011_GWA1_44_24 sequence
MKKIKLSVVLAVYNEEANLARCLESVKDIAGEIVIVDGGSTDKTVEIAKRFKAKIIRTDNPPNFHINKNKAIDAAAGEWILQLDADEVVSPELSREIKSITYNLKPNHYAGYWLNRKNWFLDRFLTKGGQYPDPTLRLYRRGMGRLPAIDVHEQARVNGPTSHLKSDLLHYRDTDFARYLSGFNLYTTFIAEQLRQQEIHFNLSNVFLYLCFKPLSTFLKIYFRHRGYVDGFPGLVFALYSGLVHPVSFIKFWQKTFYPDQYSKKL

SEQ ID NO: 4825 - protein, 304 aa, Unknown
  Description of Unknown: Ignavibacteriales bacterium UTCHB2 sequence
MQSNPSITLIVLTLNEEKQIERCINSTKKICSEIFIVDSFSTDNTKSISEKLGAKVFQHQWLGNHAKQFNWGLENFPIKTEWILRLDADEYLTLELSTEITQKLSTLGKDVNGVIFKRRVHFMNRWIKHGGYYPTYLLRLWRFGSGKFEERWMDEHVKLESGKTITFENDFVDDNLNNLTWWTNKHNNYATREAIDLLNIRYKFLKSDSINAELTQQQDKRKRWLKENLYTYLPLFLRPFLYFIYRYIFRLGFLDGRPGLIWHFLQGFWYRFLVDAKIYDIQRRAKKEKKTIPEVIRENYGIEV

SEQ ID NO: 4826 - protein, 354 aa, Lysinibacillus sp.
MIVKNEEAVIGRCLESVKDLVDEINIVDTGSSDSTKQIVAQYTDRIFDFEWIHHFAAARNFSFQQATKEYILWLDADDVFLEEDQEKFRALKNSLLPSFDAVSMNYNLSFDSEGNVDALIRRNRLVRKDKNFQWIGAVHEYLEVGGKLMDSDIAVSHLPLSHDHSRNITIYKQLIESGETLSPRDTFYFANELLDHGQFEEAIYYYELFLTSKQGWVEDNIRACFKLADCYSNLSEKENNFIAVLKSFEYDVPRPEACCRLGYHFMEQYKNYEAIFWYEQALIIKQNPNAPFQNKSFSTWLPHLQLCVLFDRLQQHQLANAHNELASSFIPNDAKILHNKKYFERILNNEQVDS

SEQ ID NO: 4827 - protein, 335 aa, Clostridium sp.
MITISTCMIVKNEERVLARCLDCVKSFSDEIIIIDTGSTDRTKEIAAAYTDKLYDFEWCNDFSAARNFSFSKATMDYIYVADADEIIDADNQQRILDLKKVLLPEIEIVQMYYTNQLEFGTTYNYDKEYRPKLVRRLREFHWQDPLHETLRIDPVIYDSEIAIIHKPHENHSARDFANLQALITSGQKLSTALITMYAKELFISGSDKDFLDAEDYFLTISMDVLPEDLLAPVQCVLTKCAVIRQDARALLAPALKNLSTGDGVSEVCTCLGQYYENCTNYPEAVLWYYNAAYETTSILSLDYGHRLPLEGLIRCYESLGDTESAGHYESELNRL

SEQ ID NO: 4828 - protein, 252 aa, Veillonella rogosae
MATITAIILARNEEQHIVDCINSIQCANEILVIDDGSTDRTVELAESLGAIVIPHPLNNDWSQQRRFGISQASFDWILFIDADERVSPELNEEILKAVNSGDQKAYWLSRHSLFRHNTASHGTMRPDKVLRLMPKEGATVEGFVHEAFISPFPKDKLKGKLYHYTYDNWTQYLNKVNKYTSAAATNYYEQGKSCSFLLDIILRPQWAFFKIYILQRGFLDGKFGFILSLYHYMYTVTKYVKLYYLIKSNGKL

SEQ ID NO: 4829 - protein, 359 aa, Unknown
  Description of Unknown: Clostridiales bacterium oral taxon 876 str. F0540 sequence
MIVKNEEKNIKRCIDSALNIVDETIIVDTGSADRTLDIIRSYGSKLKLIEYKWENDFAKARNIYLDHCTGDWILVLDGDEELICDSNRFYEKLSSTKAESFNLHWLNQLDNNSEMDSFAYNRIFKNSGYKYYRAVHEQLNIDEAKIETLSDDICKIFHYGYTNENVKGKNKIDRNLNILIKEYNKNPGDPFVSYHLGATYAASGDYKNALVYFAQSYELGLAKGFGAYHFELVKRMSQCIYLLKDYWLCIDFIMDLLKQSKLEKYTDLYYIAGCSFYQLKDYKCAENFFVKCIELGERSDYPTFFGRGSFLAELMLARVYNDAGNTDMCKKFYLKVLEKKKLLNEQDFREVTEYTKNMN

SEQ ID NO: 4830 - protein, 256 aa, Unknown
  Description of Unknown: Candidatus Amesbacteria bacterium GW2011_GWA1_44_24 sequence
MLSAIVIAENEEKLIGDCLMSLSFADEIIVVDSGSTDNTITVAKSRGARVVKVRGDDFSAFRNKGLYAAEGDWILYVDADERVSPLLRREVQTAISDGSPVGAYALLRKNIYLGRHMQHGGWGNDYVIRLFNKSKLEKWQYPLHEQPVYSGKLEKLSEALIHFSHRDLSSMVDKTLLFTVYEARLRFDSGHPPMVVWRFLRVMYTEFWLRFVKLGAWRDGTEGVIDGIFQVFNMFIIYARLWEMQNIVKSDHSPQS

SEQ ID NO: 4831 - protein, 356 aa, Clostridium aceticum
MITISLCMIVKNEESVIARCLDSVKDLVDEIIIVDTGSTDKTKAIVKKYTDKVLDFKWIDDFAAARNYSYSKATKDYILWLDADDVILKEDQINFLQLKQNLNPDVDVVMMQYNADFDVYGHPTLSYFRERLSKRIKNYRWHEPVHEYLEINGKIINSDIAITHKRESTSSFDRNLSIYEKVISKGIPLSTRGLYYYARELYYHEKYDEAIIYFTKFLDTEMGWVEDNICACYHLSLCYQYKNERANRLESLLKSFKYDNPRAEICCQLGYYYMEIDDYERAILWYTLATQLKKPTDHWGFVLHDFWDFVPNLQLCVCYDKLGNQQEAIKYNNKAAEYKPEDSAVVYNRNYFESLQ

SEQ ID NO: 4832 - protein, 245 aa, Unknown
  Description of Unknown: Flavobacterium beibuense sequence
MNKLSVIIPAYNEEAYIADAIKSVREAYEIIVIDSYSTDSTKEKALALGCKVIERKFDNFSAQKNFALPYATGDWILFMDADERVTQKLWFEILDTIANPKHEGYKIKFLHFYMNRFLYHKVDRVTRLVRNKDIKFTGDVHEKLNVNGSIDELKNFMVHYTYKGFFNWLQKKDSYAWFQAGMGFKKGKKVTYFHLVFKPMYRFFHTYIIKRGFLDGIPGLALASINAYGVLSRYAKLLLLQRGLK

SEQ ID NO: 4833 - protein, 643 aa, Unknown
  Description of Unknown: Desulfitobacterium dichloroeliminans LMG P-21439 sequence
MRLSACMIAKNEEKNIARCIESYKDAVDEIIVVDTGSNDKTVEVAISMGATVYHYEWTNNFADAKNYAINHATGDWIIFLDADEYFVNNSAQNIVSLIQQLNSKYDVIACKMINIDSATGKKIEEFTQFRVFRRDKHIRYTNSVHEMLKKTAENNTLEVFLAKDRELLIYHTGYSRTNKLEKAERNLELLLAELDKDESNKSFYHYISDSYCALGDWENAIKYARLFIKSGISLMGYNTKPHENIIKAMIILKYNTEDILSEINNALEIFPDNPMFHFYLANVLMELKKYNHALLEYNLVLKLHNEYDDIEVNSIPLNLYYVHYYKGVIASHCNQHEEAFASFVESLKLENKQADCFRRLLMIIKDFPVEDIILLLNSVYKKDDKEDLHFIITTMMGVPLPQVLAYYSVLLIKEYGSDDLTAVYMLLANSQFDKTFAIAQKCLHEDPSNNTFAAIAVVSALMSEREEYLDWVEEHTSEPMKSFVKGMVRHELVVFDQKYTEEYLNLINYMYLFGTKEILDRGVRLAQYFEEKIVYAELGNFFFQHENYLVALKLYQQYRKQLVIENKQLVNQIYAEGICWYKLREYNNAAASLIKAYDLGYRKNDIYEFLRWSMDNLPRGNDLEQKYLEINEHGLKTQTGSKT

SEQ ID NO: 4834 - protein, 249 aa, Unknown
  Description of Unknown: Candidatus Woesebacteria bacterium GW2011_GWC2_47_16 sequence
MDISAVILTKNEEKNIGECVKALTFCEEIIVIDDYSADKTVEIARGLGAKVFQRNLDGNFAAQRNFGLEKATNKWVLFADADERVSQELKEEMEKEVAAPNNPLLGYFVKRDDYIFGKKLKFGETASVKLLRLARKSAGQWVRRVHEVWDVPGRTKTLKNSLEHYPHPSLREFINDINFQSGLHAEANHQEGKHSSLVKILFWPKLHFLKNYFLRLGFLDGTEGFVLALMMSFHSFLAWSKLWLDERKN

SEQ ID NO: 4835 - protein, 309 aa, Ketobacter sp.
MPIDLSVLILTYNEAKHIERCIRSLKAVSNNIFIVDSFSTDDTVKICEALGANVYQRAWKNYADQFQWGLDNCPIETEWIMRMDADEYIDKDLMDEFPKLFVTDLDEIDGFYIRRKYYFLGKWIKYGTIYPLNLLRVWRHSKGRIENRWMDEHIVLVPEAKTARLLGHIIDDNLNTSRWWTDKHNKYADREMLDILDRKYELFPQDNSLRTDDDSSQAKIKRLVKENIYNRIPIFVRPLLYFLYRYFIWLGFLDGVRGFAFHFFQGYWYRSLVDLRVFEAERLLKNTKNNREKIEILEGFTGLQLKASN

SEQ ID NO: 4836 - protein, 300 aa, Bacteroides sp.
MNTNTIAAIILTKNEEKHIERCIRSLKGICDEIFVIDSFSTDRTCEMAEALGAKVYRNPWKNYATQFNYGVYQCPIQSEWIWRIDADEYLDGNIGVAVKKALAECSQEVNGIYVRKRIDFMGRPLLHGGWYPSYHLKVFRRGHGDCENRWMDEHIRIFDGIAITVAEGNQVDDNLNDLTWWTEKHNGYATREVADMLLMEYGMDAKAEEVVPKFFGTEEQRKRWLKLKYIKAPLFVRPFINFFIRYILKGGFRDGKEGFIWHILQGFWYRMLVDAKIYELKKRFDFDKERIKAYLMENYK

SEQ ID NO: 4837 - protein, 266 aa, Unknown
  Description of Unknown: Microgenomates group bacterium GW2011_GWB1_44_8 sequence
MSKRETITAIIPAHNEEQNIERCIKSLDWCDEVTVVWMGSDKTGRIAKNLGARVVIRNQTKGSNWQKVQENINWAIDESKTDWIIRVDADEEITRKLKDEILAVLERDSDAKNPDNFVAYGIPRNQYFFGSFLKGGDWAHDRLVRLFRRPAARYENFVRIHEQFVVEGKVGYLKGKINHYSHPTLTAAMEKFNSYTSTEIYDHHELFGKALYNMFTQPLYIFLRWMIWHQGFRDGIRGIVAGAYRAWYEFMLWSKYLEKLNTKKAK

SEQ ID NO: 4838 - protein, 357 aa, Paenibacillus daejeonensis
MIVKNEEEVLEQCLSSVKEACDEIIIVDTGSEDRTKEIAQSFTDKVFDFEWIDDFSAARQYAFDQATSEYILWLDADDMLNDEDKVKLISLKQSLSSEVDAVSMLYHIAYDAAGQPSFSYRRNRLVKRSKGFKWIGPVHEYLEVSGTIIASDIAVRHKKFMKKKRQVSGSRNLDIYEKRLAKGESFSPRDLFYYANELKDNAKYHKAIMYYREFLATKKGWVEDEIRACLNMYECYRGLDNAEKSMEALVMSMNYDVPRPEVSCKIGDIYKNKGQHKKAALWYRLALEVEVNDSQGFVQRQYSTWYPHLQLVVCCWELGEQEQAMAHNQAAGEYLPESPQVKHNEAFFTEYFKSKAT

SEQ ID NO: 4839 - protein, 371 aa, Bacillus cereus
MISISLCMIVKNEEANLGRCLQSIEGIADEIIIVDTGSTDNTKEIARKFTKRVYDFQWIDDFSAARNESFRYAQKEYILWLDADDVIESSEVKLLKQLKKTLDVTIDAVSMKYHVAFSKQGQVISSTRRIRLVKRTKPFYWSGIVHEDLKCQENYSYLSSDITVVHTKQTSTDANRNVQIYERAVGRGYQLSVQDMFHYARELTIHKRYKKAIEMYEKCLDSPELSLENKTFIYHQLASCYALIGNEEKEQELTIQSFLIDIPQPVFCCRMGEQFLNKKQYEQAVFWYELAIQIKLPQRYEWSISQQIYQTWLPHKQLGLCYYQMGDYRLSYIYNKKVLTYLPDDKATLSNLNNLEQVLCERGVPIPQEDA

SEQ ID NO: 4840 - protein, 253 aa, Unknown
  Description of Unknown: Desulfobacteraceae bacterium sequence
MLSVVIAAKNESAHIEKCIRSVLFADEIIVVDDFSTDETVAIARGLNARVMARDSRGVFHENKNWGIAKAAGDWIFSLDADETVSPELARSIQAAIARPEADGYRISRRNYFLGQWIKGSGWYPEYILRLFRKGQAQWPLEIHDTPKLAQGNQAAPVLEGPLLHDSYQTFEQYFDKFNRYTTRLSAEYQEQNISMQGIHGIVNLFLRPAFWFIKKYIFKMGFRDGLFGFFVSFSSALVIFVSYLKLRQRRKIN

SEQ ID NO: 4841 - protein, 358 aa, Cellulosilyticum ruminicola
MNTTISLVMIVKNEEANLPRCLESVQGIVDEIVIVDTGSEDNTKEIAKQFGAKVYDFEWCNDFSAARNYALSKATGDWNLVLDADEYIISGTKSDLVNGLKKGTVGQILLIDVFKDKMNKEEELSYSKIYLSRIMSKGTKYIGKIHEQIDSKLPRVKVNLEVGHDGYLHKDKSERNLAILYDVIKKDEKNSYMLYQLAHTLFVAGKNEQAMMWYEKYYKVSKLNEGYRCSAIVDYLYSMIQIGKLEKGITIIEKEKANYYDSPDFNFVCATFYRELVLSNVEKYINYLPLIESYYINCLEIGETTKYTSVVGTGSYAAAYNLGVWYEVSKQFDKAKVCYEMAIEWGYEKAAERIKLLK

SEQ ID NO: 4842 - protein, 368 aa, Acetonema longum
MTESSVASQSAITISLCMIVKNEEETIERCLRSAEQIADEIVIVDTGSTDKTKELVSQFTKDIFDFEWIDDFAAARNYAFSKATQEYILWLDADDVFLAEDRQLFLQLKSSLNRDIEVVSMLYNLSVDNYGKVISQLRRNRLVKREKNFRWIGAVHEYLEVGGKKLDTDIAVTHQPQDHDSDRNLKIYERRQQKGEVFSPRDLYYFANELKDHQLYNRAIEYYQKFLATKQGWVEDNIGACSKLADCFYYLNDVENQLKYIYLSFQYDTPRADFCCRLGFYHLNHNQLKQAIFWYKLATELDITNAAWGVVNHQCATWLPHLQLCVCYSRAGEYKLANDHNELAAKFIPDDPRIHHNREYLRQMLGSQ

SEQ ID NO: 4843 - protein, 250 aa, Magnetospirillum gryphiswaldense
MKLSALVVAHNEENRLPSCLQKLAFADEVVVVCDKCTDGTRTIAETFGAVIVEGSWEIEGDRRNTGISACSGDWILEVDADEHVPPALAAEIRQVIEITKYDWHEILVDNYIGDRLVRHGWGASYGKAAYPGLFRKGAKVWGHDRVHPGLIWRGRKGAMLANRIDHHVDRNISDMIRRLDSYSTAKARDLRDQGQTWGSGMANVRRLFSRFFKCYVRRGGWREGGYGFIIALCAGLYPLLSHMKAKYEKD

SEQ ID NO: 4844 - protein, 275 aa, Unknown
  Description of Unknown: Photobacterium lutimaris sequence
MISVLIITYNESLHIERCLESVKCISDDIVIVDSYSTDNTEGLAIKNGVRFYKNSWVNHSNQINWAIDNIDFKNDFIFRIDADEYLTPELVAEIKEVFSNQVDKKINGFNIKRRTYFLGRWMKHGGYYPTVLLRIWRKGKARCEDREMDEHMVLTDGDSTFLKFDFIDHNLMGINSWIDKHNRYSEKEVIEYYKSLSGRVESYELGEAKKNRLLKNKYYKLPLFLRSFLMFIYRYLLRLGFLDGKEGLMFYVLQTFWYRFLVDSKIYEKENDVNV

SEQ ID NO: 4845 - protein, 365 aa, Desulfotomaculum sp.
MASISLCMIVRNEEKVLGRCLSCVRGFADEIIIVDTGSTDRTKEIAFSFTDKVYDFKWKDDFAAARNFAFSRGTGDYLFWLDADDVIRQEEWRKLMDLKRRLDMERPDVVMMKYAVGYDGDGAPSFFFYRERLLRRCGKAVWKGRIHEAVEPFGKVVREDIMIEHRKVGTGDPDRNLRIFEQMLREKGKLSPRDQYYYGKELYYHRRYRDAASAFSEYLELPDGWREDRVDACRHGAYCMYRIGDRDRALKFLLSGLSEGIPKPELCCDLGWWFFSARRYRDAIFWYGQAVRTGRWTGEDGFVMPECRGYVPYLQMCVCYDRLGEWKTAERYNELAERCRPGTEICQLNRKYFEKRKEQQIEWVQ

SEQ ID NO: 4846 - protein, 300 aa, Maribacter stanieri
MPPISTFILTYNEEKHIERCIKNAQRFSKIVYIVDSYSSDKTVEISESLGAKVYQNKWENNHAKQVNWALVNLPITTEWVFRLDADEYLTDELIFEINEKTHKLKANISGIVFERKMYFLDKLMTKGMIQMYMLRMFRYQKGVCEDRWMDEHIVLTEGESIMFDGYFIDHNLNPLGWWIEKHNNYSIREAVELLNLEFQLIEPSNQTVTLAMSDDAQSKRDKKEKYASMPLFWRSFIYFIYRYIFKFGFTQGKEGFLWHFLQGWWYRTLVDAKVFEIKKACGSDKVKIKKFLNQNYNIRL

SEQ ID NO: 4847 - protein, 364 aa, Bacillus pseudomycoides
MEKGNITISLCMIVKNEEKTIARCLQSVKEVVDEIIIVDTGSTDQTKEIAKEYTPYIYDFEWIDDFAAARNFSFSKATKDYILWLDADDILIETEKNKLFHLKGNLDFNVDAVSMSYYLAVDENGDPTYSSVRNRLVKRRQNFQWIGFVHEYLAVYGNIMKSDIAILHKKEKEHTDRNLQIFEKALREGKKFTPRDIVYYANECVDHQKYEKAIELYTQFLDGKEGWVEDCIHACGKLSDCFTQFQKWEEALQACFCSFQYDIPRGEICCRIGHIFMEKSDYKHAAFWYEMAINVPFQNSTRFIDYASYTWIPNLQLCVCYSRLGDNEKANYHNEQAAKYVPKHVSVLYNREYFRNVLSEDIKK

SEQ ID NO: 4848 - protein, 635 aa, Unknown
  Description of Unknown: Desulfitobacterium hafniense DP7 sequence
MIARNEEKNIGRCIASYKDVVDEIIVVDTGSTDKTVEIAEAMGAKVYSLEWHNHFAEAKNYALDRAKGDWILFLDADEYFVNNTARNIIPLLRRLPSRFNAIACRMKNIDYANGQLLDEIMHIRIFRRDKNIRYKNRVHEYLICTTKNNAIEAFYANEKELLVHHEGYSLSEQRSKARRNLEILLLQLDRATEEPTIYYYLGDCYFGLGDWQKTIEYTQLFLASGTQLVGYNVKPHQNIIDSMLRLKCNPDDILKEIYVAINKFPRHPVFHFYLANRLFDLKKYDEAYHEYEKTLQLQKNYDDVEVNSLIPFLYHIYHYMGIVASYRNDYEDALNRFTESLKLEKKQSDCLIRLIMIIKDFPVEDIILFLNSLYNKDDKEELKFLVAALTKVPLPKVLAYYSALEIKKYGSDDLTVVYMLLANRQYDKTFIIAQKCLHEEPKDTTSAAIATVSALMSDNREYLDWIEEHTSESMKRLVRALVKHEVFAFSQEDKAEYLNLITTLHLFGTKKTMNRVVHLAKYFNDNTIYAELGNVFFKYGNYELALEQYQCCINQVEVEKEDQATRLYTIGLCWYRLREYENAMTSFIEAYDLGCRENDIFEFLRWSVDKLSSGNGLKERCLEIITESKRPGNKF

SEQ ID NO: 4849 - protein, 650 aa, Paenibacillus paeoniae
MTHVEKLLSLCMIVKDEEETIDRCLSSISGLADEIIIVDTGSTDLTKEIAYKYTEHVFDFKWSNDFSAARNKSLSYATGKWILVLDADEYLNTDDCERFKKFIENEQIEQNKVYSISIISYVGESIRNANVTESTMVRLFPNNQGIHYFRPIHEQVVDANGILLSTTVSPITVYHTGYLKDTVQKKDKHNRNQAIFSELKQSSGFIPYDYFTIGNEYATKGDYKKALYSYERAFKKAAPNNPWILDCASQMFTIYMKFNRVHDAWEILHQVFSHYPDYPEYHAFKGSLYEYAGHYSLAKESLLTAFHNAEALSRKTDRFFLINPSYGSIVPLSRLLKIAKVEQNKEEIVYYCIKILQANSHDFQTLNTLITVLLLKESESAVITTINKIIINQTQRDFILLHKIFLSHGNKEIAKYYENKIENRSLISIEDLLFSSIINSSEQQFKEALLKLQPDNADNPKINLAIMIATLKWQNPFIDMLVYNENQIKAEQQLSMYQKIINNTIAQQDIVQNVTTVHTLLSTLFELKQFDLFDIYIDQLNHPLVISLLANYFYHNFETNLAVSFYNLLLEQNKMDDSGYINLAHLHINSGYSADAVPFLEEAIKLNPNGHHLFSLMLIHADNEDIRKRYRKQYTSLFAQHVKLPFIKQL

SEQ ID NO: 4850 - protein, 252 aa, Colibacter massiliensis
MSSLSVIILAKNEEKNIGDCIKSAKFADEILIIDDYSTDSTASIAKTLGARVVEHSLNNSWESQKNFAISITTGEWIFFLDADERISSNLADEISKIVQNNTYICGIIRRYNQFRHYTATHGSVRPDKVLRLCPKKGAHVVGRIHEQLEAPYEEKVLSGKLYHRTYENWEQYFRKFNQYTSLLAQQYVEQKKTIRFVSHILLRPLWAFIKIYLIQGGFRDGKIGFVLSMNHAFYTFTKYVKAYYLYRSDGEL

SEQ ID NO: 4851 - protein, 352 aa, Bacillus sp.
MIVKNEEETIARCLEAVKNLVDEIIIVDTGSTDKTKEIVSQFTDRIIDFTWINDFAAARNFAFSHATMDYIFWLDADDVVMEQDREKFLTLKKTLDPSIDSVTMHYNLAMDEKENVISSLRRNRLVKRQNDFQWHGAVHEYLEVWGNIFHSDVAVTHCSIHHDSDRNLRIYENRLSLGENFLPRDLYYFANELLDHQRIEPAIDYYKQFLATKNGWVEDYISACGKLADCYNTLGDHESELHFTLKSFEYDSPRAEFCCRLGYRFLQNNQLHQAVFWYKLATQLEKPTENFGMIKHACWTWLPHLQLCVCYSQLGNYVLANAHNEIARKHVPDHPSILHNKRFLEPILQKQQ

SEQ ID NO: 4852 - protein, 251 aa, Unknown
  Description of Unknown: Candidatus Woesebacteria bacterium GW2011_GWA1_43_12 sequence
MNPKKTNISVIILTKNEETRIETCIKSVSWADEIIVVDNGSTDKTREVVRGLGIKVIERHVSDFSSLRNAGRDVASGEWVLYVDADEVVSEQLQKEIMSVTGKQPFAGYEIRRVNYFLGHQWPGDEYILRLMRNDALVEWYGILHESARVKGTIGRLKNSLVHRTHRTLEEMVTKTNVWSGTEAKLRYDSNHPPIVWWRLVRVMVSAFFDSFIHKGGWRAGTVGWIESVYQAFSMFITYAKLWELQIKNVK

SEQ ID NO: 4853 - protein, 226 aa, Bacillus cereus
MITISLCMIVKNEEETLHRCLQSIEGIPDEIIIVDTGSTDRTKEIAKKWTPHVLDFTWRDDFSAARNASFQPATQDYILWLDADDILLPEDRQKLLLLKQSLHPQVDAVSMIYHVLFDENNNPITSTRRYRLIKRCKNVKWHGIVHEDLQLSAGFRYEESDIVVTHKKMQTASDRNLKIYEQAKKQGKTWTAHDIFHYARELQVHKRYQDALRMYERFLETDSISA

SEQ ID NO: 4854 - protein, 354 aa, Unknown
  Description of Unknown: Lachnospiraceae bacterium sequence
MSKVPISVCIIAKNEEKYIEECLRKLKPYGFEIVVADTGSTDATKEIASRYADKVVDFTWINDFSAARNFCAKQASNNWILALDCDEYIESVDIRILRVQLQQKPKQVGVIRMKNIQLRENDELGYSVDDLPRLYNRNYYRYDKPIHEQIIPIKGDLDSLDGFLMPMEVIHHGYAIKGDDMVKKQERNLEILYAGLKDEPDNPYYYFQIGCSLQVLKRYEEAAQAYEKGLSFEPSTDRTYVIEMITSLANVYSDMGRKADALALMDRYAESCNYANFVFCHANILLENDQPIKAVMNYLKATMMKDSNTLGERLLTCYERVIAIYQKTGNEDLAKPFEQKYLECRAERERIVNK

SEQ ID NO: 4855 - protein, 252 aa, Veillonella tobetsuensis
MSTITAIILARNEEQHIADCIKSIQCADEILVIDDGSTDRTVELAEGLGAKVIPHPLNNDWSQQRRFGISQASCDWILFIDSDERISPELNDEIRQAVQCREKKAYWLSRHNIFHHNSATHGSMRPDKVLRLMPTEGATVEGFVHETFISPFPQDSLKGKLFHYTYDNWTQYFNKFNKYTSAAAEKYHEQGKSCSFWKDIILRPHWAFFKIYILQKGFLDGKIGFILSLYHYMYTVTKYVKLYYLNKSNGIL

SEQ ID NO: 4856 - protein, 390 aa, Unknown
  Description of Unknown: Lachnospiraceae bacterium A4 sequence
MQTIGRHDRPILLATGHRKDYRIMAKIPVSVCMIAKNEEQYIEQCLRKLLRYNMEIIIVDTGSTDRTKEIAARYTDQLFDFAWCDDFSSARNYAVSKASNNWILILDCDEYVQEIDVAKLRTCMQKYPKNVGVMEIGNVHTVVEGGVPKERLQMDEIPRFFNRNYYEYHFRIHEQITPKKWDNYDEIVLETFHLPITVKHYGYDVPRAEMLKKQERNLKLLLNSLGETQGMDDYVYFQIGQSYYILGDYEKAIEAYDMCLEINRNPEKKFLNICLEAYAECLIKVGNGEDAYRLLDLNSAYLQTTRQRYLFGKAAHLCRDYETAVGFLTQITDAADFEQLGDDVYDAYTRIFAIFSETGQSDEFERYKEKLAEFGRQHGKQITFSGKGAQ

SEQ ID NO: 4857 - protein, 481 aa, Paenibacillus sp.
MNPRHKEISDLIKNEAYDSAESVAKLHVQKFPIDGQGWLLLGEALMKQDKGQAAQLMFNRALFLDPKAKWMPFMQRELQNVGHSEVVSEEIKQLLSVPKVTVSAAIIVKDEERSIGRCIQSILNAVDEIIVVDSGSTDRTLSTLQDYPQVKVFSLKWNDSFAELRNEALRHVSSDWVFWLDADEWLHEEDNDSIRLAAGIYNNLDIMIPVLQPCLINYVKKGHIEEYSVPRLFQTNRGIHFSGRIHEQIATEKEGIFTSNLLHKPTGIRLHHDGYRPEIKAQKDKLTRNLRLLELMTKEDPTNPGWWYFLGRETMSSEDSLRSIEYFEKAIELGRSYRQFGRIAEIYMLIGKLHTSQNRLELAEEFYQKALTVHPDYPDAHFLLANISMLKAQNLLAESLKHVREATNGFHTYRGAVAPDQDIHLWKADALRSDILVLNGHFAEGAAILQELKAKAPHADNIDRKLEFMKQQTQRIQQLFQ

SEQ ID NO: 4858 - protein, 290 aa, Runella slithyformis
MRPKTDLLKVTKQSFSDKTDKILIIDSGSTDKTVAIAEGLGAIVRHNSWVTYAAQFNFGIQNNPFQTRWLMRMDADEYVMPALAAEINDELNRLSEDTTGIYVKRRVMFMNQWIKHGGYYPIWLLRIWQRGKGMCEELWMDEHIKLFEGKTIQFKNDIVDHNLNNLTWWTQKHNLYAIREVIDLLDIKYNFANTDRVAPNLFGTQDQRKRYLKLKYASLPLFTRPFLYFFYRYFIKLGILDGKKGVIWHFLQALWYRFLVDAKLFEVYFRAGKEKQAIVTFFRNEYGKDI

SEQ ID NO: 4859 - protein, 468 aa, Unknown
  Description of Unknown: Candidatus Arthromitus sp. SFB-mouse-Yit sequence
MIIIDSIINSIDTDYFKFNLNFHKYVLHKLKTDNFPIDEKFENKLTKRIKLLSTINGTCPSILKFFINDDYINYKDDLTNENLIELINIFSDDTPIKLSVNLIVFNEERCIERSLNAVSTFADEILVLDTGSTDNTVKIIEEKFPNVKLYRDKWRKDFAYSRNLLIDKSTNDWILSIDADETPTDEFYLIKDVISIFNNFNSNEKHPLVFSPTIDSLGQKINTTKRIFNKKHEMKFDGKIHEEIVSKNESEINYIMLNLTLLHDGYHPEIFKNKNKAERNTEILEKMIKLEPNKIRWYYFLGREKNILGHDIDECIKILKSGLKLKHTQNSIENFYYNILTLLAKIAVSHKKYDLLKEVIDLMEYEIPNSLDSFYFQLILENDSVMSDKFDQINSMVKSIGDITNKVNTIDGSYSHVLHTLGIIYLSFRDYTRAFYYFNQITSPKNIEAIKSILLPLRAQIDDFLKNK

SEQ ID NO: 4860 - protein, 236 aa, Unknown
  Description of Unknown: Candidatus Fermentibacteria bacterium sequence
MKLSLVIIALNEEETIGRCIGSVPFAGEIIVVDSRSTDSTAAVAQSCGAKVLVHEFQSFSTQKQWAIEQASGDWVLTLDADEFLNDELAGEISSIVNSETVQSGFRLPFRILYMGRLMRFGPWSGERHLRLFRNGQASFPDSGVHEGLKLLEGTEGVLKNGYVIHESYSSLSDQMRKMLQYSTLWAGEEFGKGRRSGSFRIVFRPAWRFISAYLLRGGFLEGLPGLAASIISAYYV

SEQ ID NO: 4861 - protein, 305 aa, Pseudomonas oryzae
MSSVTVIILTYNEAMHLERAIRSVQLLASQIIIVDSFSKDDTVAIAERCGALVLQNPFVNQSAQFNWALENAPITGDWILRLDADEIIEPDLAVTISTQLPALPTDVVGVNLNRKHIFMDRWVRHGGRYPLLMLRLWRRGHGRVEDRWMDEHVVVKGGRTVILKGGFADHNLNDITYFTDKHNKYATREAIEVLNQRYGLFAKEKGLTTASASGQAALKRFIKEKIYNRIPFTLSALLYFLWRYIFQLGFLDGRSGLVYHFLQGYWYRFLVGAKIMEFEHALKGATSNTERVQILERLTGLKLTN

SEQ ID NO: 4862 - protein, 256 aa, Unknown
  Description of Unknown: Candidatus Nomurabacteria bacterium GW2011_GWA1_37_20 sequence
MQNLSVVLATFNEEKNLPACLDSVKNLADEIIIADGSSTDKTVAIAKKYGAKVIVVENLPNFHINKQKAIDLATKDWILQLDADERVTPELAQEIKEIKEIDNSINGYWVARKNWFLGKFLMKGGQYPDYTLRIYRKGKGHLPQVHVHEQAEVAGRVGYLRHALLHYPYKDFGSYLLKWDRYNNLLATQIKDNLRGKNFFIKIAYGVGYLIIKPTHWFLTTYVRHKGFVDLWSGFVFSFFSALRFPAAYLKYLKIL

SEQ ID NO: 4863 - protein, 361 aa, Lysinibacillus sphaericus
MVTISLCMIVKNEEDVIARCLESVKDLVDEINIVDTGSSDNTKKIVKQFTDRIFEFEWVHHFAQARNFSFQQATQDYILWLDADDVLLAEDQEKFKALKESLAPEIDAVSMNYYLSFDAEGKVNSLLRRYRLVKRDKQFQWIGAVHEYLEVSGHLYESDVAISHLPLHHDHQRNITIYRKLLQSGEALTPRDTFYYANELLDHNEIEDAIFYYELFLTSKRGWVEDNIQSCFKLADCYSTLNDKENNVSSILRSFEYDIPRPEACCRLGHHFMEQGKNQEAIFWYEQALTIKTKPNAPFLNTTFTTWLPHIQLCVLYDRLQQYELANTHNELARGYLPNDEKILHNKTYFEQLLKKMNDNA

SEQ ID NO: 4864 - protein, 784 aa, Unknown
  Description of Unknown: Candidatus Desulforudis sp. sequence
MPTRTLSLCMIAKNEADSIARCINSAKGFVDEIIVVDTGSTDNTKEIARTLGAKVIEETWNNDFSAARNISLEHATGDWILFLDCDEELDLASGPVLREAIQSITYEGYFVLVTNTTENNLQLTSPSIRLFRNRKSFRFEGRIHEQIAPAIIKQYGIRSIANINVTIIHHGYDPNTNNIKAKINRNLEILNSYPEEKRDGFFLYNLGTEYLRLGEQKLALENYLKALDLTKPGQAFGPILVKRTIATLIALNRYRVAIEQLQYYQTIYTDFNDLFYLEAFCHFKCGCFSKAKVCLERYSNMPPPPRWYPTENVYYLSSTKNLMPILETSVINKEYPGLSVCIIGRDESAQTYQCLQSVNEIAREIIFVDTGSTDRSPAIAYQMGAKLYSFPWNNNFADTRNFAVSLAGEEWVLILDADEVLPDQSRERIVDLIKDARHDGYLLRVCTFLDRNLSTTNCCFKGSCRLFRKDRYRFQGAVLEEIIPFIPGSGAGLTAADISIHHLHYLAPDTHIARKREWKLETIREGMAHDPRQRDYALGVECFSRQDFQSAASYFASSLGDTEWAGVPDFFYYFGMSLINTGNPARTLTVLERATIRYPDYTDLFYLQAIAHFMRGNIEVSEQLFKRCLEMGDAPWEKYLATPGTGQYKAKCSLGTIYAQKGDVNRALEIFLEAVGTPSAFEQAIESIVFIRDKLSVPIERFLEQNGLLNTPSVSTVSRCLAKMGRYEESLKYLALAGDLIKSETPPRNYAVITESIDLLLTRYLWHAVQPLPEDSPLRKLSLN

SEQ ID NO: 4865 - protein, 275 aa, Rhodopseudomonas sp.
MSPTKPTLAVVAIARNEIRDIAAFMANVDPVADEVIIVDDGSTDGTLEYLQGCGSKVRVLQRRLESAGGFAAQRNAGSALATADWLLHMDIDERIPPRLAAEIATTLSSTKFDGFRYRRLNFFLHRPFRAGGWQNWNNVQLGRRGRHRFVGAIHEQVEVDGGAAAIGQLAAEMWHLNDESFVERIGKNVNYAQPTAREIARRGPVRWWHLLFIPMWRAVKAWTWGGAWRYGEHGLIFALYVFAGTFNGYAVAWDDQNRIARDELEKRILDEGNGT

SEQ ID NO: 4866 - protein, 247 aa, Unknown
  Description of Unknown: Candidatus Roizmanbacteria bacterium CG_4_10_14_0_2_um_filter _39_13 sequence
MISTVILTKNEEKSLAKCIESVSFSQEIIIIDNGSQDKTISIAQKYATRIIEMSEKFNFSELRNRGLMEAKNNWVLFIDADERVSDELKSEILTISKNRKYAGYYIKRRDHWWGRTLRFGEVRHAYSLGFIRIIQKEAGIWSGVVHEVFQTNKEVGLLRGYIEHYPHPTLKEFISDINDYSSRRASELYNQDISISIVEVLCVPPLKFLYTFFIQWGFVDGPPGFVYSFLMSFHSFLVRSKLYMMKS

SEQ ID NO: 4867 - protein, 373 aa, Bacillus anthracis
MISISLCMIVKNEEVYLEKCLESVKGIPDEIIIVDTGSTDRTKEIALKWTSHVLDFEWDDDFAAARNFAFQQATQEYIFWLDADDILLLEDRKKILKLKQSLDQSIDAVSMVYHTLLDKHNNVITSTNRLRLLKRKKHFKWVGMVHEDVKTAEVYRCYHSDIVVTHTKKTGLSNRNLRIYEKAVKDVKKFTPQDLFHYARELQANKRYEEAIKYHKLFLEDENIGTELRIFTYHNLACCYFQIGNPEKEFELTVESFKYDIPQPVFCCRMGEHFIKQNLFQQAIFWYSLAIENGKLNQNNHIEQLIYQTWLPHKQLGMCYYKVGEYMRSYEHNKEVLKYIPDDNETLNNVRVLKEMLYGQGGILLENDELNIN

SEQ ID NO: 4868 - protein, 361 aa, Alkaliphilus metalliredigens
MITISLCMIVKNEEKVITRCLESIKDIVDEIIIVDTGSTDHTKAVVQRYTNKVFNFKWIDNFSIARNYAYSKATMDYILWLDADDVVLETDRMMLRQLKQDLDPSIDVVMMKYNVGFDEQGHTTLSYFRERLTKRANNYQWHEPVHEYLAIDGKIINSDICITHQKEYNSSPDRNLSIYEKVLSREGPLSTRGHYYYARELYYHERYDDAIIYFNRFLDSETGWIEDKICACYHLSLCYQYKNQKENMLQTLLRSFSYDEPRAEICCLLGSTAMEDANYHKAILWHQLATQVQKPQHTWGFMLHDYWGYIPNLQLCLCFYKLGKIKEAIYYNNKAAEYKPEDSAVVQNKRYFSSLTKRDIN

SEQ ID NO: 4869 - protein, 359 aa, Unknown
  Description of Unknown: Candidatus Dorea massiliensis sequence
MKTLSLVMITKNEELKIRRCLESVKDFVNEIIVVDTGSTDKTKDIALEFGAKIFDYEWNNNFSDARNLAIKQSTGDWNLILDSDEFITNLNIDKINNFINSKENTIGKIKVINLFKEDNEIKKSNAFISRLAPKGIYFEGSIHEQLDVSLPREVVDIEIEHDGYLNTNKFDRNIYLILNELKSNSSDSYLLYQAAKTYYSNNMYMNALPYFDKFYNTVNFDKDNFFNDGIILYIYNLIKVNQFEKGLEIIDNVFDLMNNSCDFYFACGVFFTELVSYNPENYMNYFNNIELCYLNALHLGEHAKFEIVDGTGTYLAAFNLGLFYELLGDSTKALKYYEISYSFNYSKALVTINRIKEKK

SEQ ID NO: 4870 - protein, 462 aa, Bacillus cereus
MGTNDYTFLKYNIAFFMFSLERIKHNNLISNKLLIDIEKRIALLTKICKYTHGLDNLVNNLDWNTKQYLNTLDEAVFITLLTENLKIPEVTISVNIITFNEERCIERCIKSIRGFADEIIVIDTGSTDKTINIIKTLFPEVRLYHEPWCEDFSLHRNSLIKYSTGDWIFQIDADELLQGDQADLKDFLRVFHNFPLPSLIVSPKIINHDNSELNFTKRIFRKKDNLQYFGLIHEELRCDIQQKGSDLIHVITNFVIEHDGYMMDIIQEKNKVTRNIFLQEKMIQIEPNNIRWFYFLAREKRTAKYSIQEVIEILNEGIKNSEIPEKEDPFLFMVLLLLAECYYEKSDLEELNNVTSKLVLLYPDHIDSMYYKLLNKIVQNSSNVSFFMEKYLEGLKTIQCMESNIDVQRCEIYRLMGSTYMQIGCYEQAFKLFNSIKNESLVNDLKSDFIFLKKYLDDFLEK

SEQ ID NO: 4871 - protein, 296 aa, Unknown
  Description of Unknown: Acidobacteria bacterium sequence
MFPFRCSARYPLPVTLSVVIITYNEEANIGRALESVMPLLSGGKGEIIVVDSGSTDRTVEIAKSFGAKVYVEEWKGYAGQKNSAIDKATGEYILSLDADEEVNSELADEIESTVRRRPAMHKVAQKTPDGHLAPLYVNGFWISRSNYFLRRWIKHGGFWPDRKLRLFRRGAARFKDALVHETLELQQSLGAGITATPRHLRGALIHHSYPTLSDYIDHMNRYSSLGAEMVAAKGKVGFSVHNIVLRPMATFIYNYFFRLGFLDGREGLLLHLHHAVYVYWKYAKAWELSRLSGEKS

SEQ ID NO: 4872 - protein, 362 aa, Dehalobacter sp.
MVTISLCMIVKNEEKTLGRCLESVGDIPDEMIIVDTGSTDQTKMIAARYQAKVYDFAWIDDFAAARNFSFAQATQDYILWLDADDVLLEDDGNKLRQLKETLNPQVDIVMMRYNLGVDDKGNAVCTFFRERLLKRSMNYTWQDPIHEYIKIEGNIINSDICVTHKKIERKTARNLEIFEKIISEGRILSDRNCFYYARELYINSRIDEAIQYYDKFLDTEGGLLSNYIDASIDMSNCYLSKNDRGNALKALLRSMEHDLPRAEVCCQIGHLYKTAEDYPKAIFWYELATTIKKPEESWGSVVHDCYGYIPCMELCACYFKSGNLAEAIRYNKKAGEYKPDDKLVLHNQKYFETLLGSVVSKN

SEQ ID NO: 4873 - protein, 305 aa, Providencia alcalifaciens
MNNDLSVIILTFNEELHISRCIESLKEITKNIYIIDSYSTDKTVEIAKNLNVTVYQNKWPGNHAAQFQWALDNCNIETEWVMKMDADEYVTNELKNEIKTYMHSVPSDISGIYIKRRVFFMGKWIKHGGYYPTWLLRIWRYSDGHMEQRWMDEHIKLSKGNVIHFNHDIVDDNLNNLTWWTEKHNNYATREAIDTLNAIYKFSESDGIEPKLLGTQEQRKRYLKLKYHKLPIFIRPFLYFIYRYIIKLGFIDGKKGLIWHLLQGFWYRLLVDCKIYDIKRRAKKLDAETLKLIIKKDYGVDWKND

SEQ ID NO: 4874 - protein, 492 aa, Paenibacillus sonchi
MDPRHKLLSDLILSEQYEEAEQSGKKHVREFPIDPQGWLLLGEALMKQGHGQAAQKLFNRSVLLDPKATWMSFMQKELQKVPLGEVSDELKQLLSVPEVTVSAAIIVKDEERSIERCIQSILNAVDEIIVVDSGSTDQTLSILRKFPQVKVYQMKWNDSFAELRNEALSHVHSQWVFWLDADEWLDEEDRGLIRLTAGIFSRLKGLIPALQPCIVNYVKDGTLREFSVPRLFPTDKGIYFSGRIHEQIATAEEGIFTTRVLHKPVGIRLHHDGYEPQIKAGKDKANRNLKLLEQMTEEEPTNPGWWYFLGRETMDSEGSKRSLECFEKVIEYGKDNRHFGRMAEVYMLMGKIHNSQSRLDQAEEYYRKALALHPDYPDAHFYLASIATLKAQKLLSTAMKHVQLAATGFHTYRGPVVPDQDIRHWKADALKSDIFVQNGQIAEGAALLRSLKLKAPNKKVISEKIKYIEKQKQQLLLQNLRLSNFERRDIGE

SEQ ID NO: 4875 - protein, 569 aa, Desulfosporosinus sp.
MEERPITISLCMIVRNEESNIANCLESVKGIPDEIVIVDTGSTDNTKEIVRQYTDQIYDFEWIDDFSAARNFAFAQARMDYILWLDADDILSEVDCQKFLNLKSNLTPFIDAVNMPYNLSFDEFGVVTYSFRRNRLVKRSSNFRWVGAVHEYIDVSGNILKSDICVTHTGTAEISERNLRIFEKCQAKDMVFTPRDLYYYGNELFEHQLYNRAVEVYQKFLNTGQGWVEDRLSACARLTDCFQQLGDRDKELEYNLKSFEFAAPRAEFCCRLGFYFLSAEKYEQAAFWYSLATKLEKSDIWGPVIQSCWTWLPHLQLCVCYDRLGKYELAYEHNEMARTFRPEDSQILHNKNYLEQTYGLGSAERKVSNHESAFESSKRGWSMNHLQIALKDQLPGLNWHEDFIVHLASLYRPKVYVELGLFQCALFNRVIPFAEQLIGVDITPEAGNYMQHSPKTHFMNAATQEFVKELQANPIKIDMLFIDANHSKEAVLQDFRDFFPYVAPHGLILLHDTHPSDEAMMQPNWSGTACQAVEILAQDTKDYELMTIPIGPGLTICRKRQVQLSWQEE

SEQ ID NO: 4876 - protein, 273 aa, Leptospira kemamanensis
MDGKRKRKLSVAIITFNEEKNIGDCIRSVESFADEIIVLDSLSTDKTKSIATSFPKVRFFEAPFPGHVEQKNKAISFCQNDWILSLDADERANDELQKSIQSFLEAETVSADGYKIARLTFHLGRWIRFSGWYPQRRYRLFQKENAEWVGENPHDYIALKEGSRGKVMKGDILHYSFTDFSHQINTINQFSSIVAYTRYAKGERFSLLKTILKPLGKFFEIYIFKFGFLDGIPGLWIALASSFSTFLKYAKMYELDKLNIERPSNVRKDYGKK

SEQ ID NO: 4877 - protein, 349 aa, Paenibacillus paeoniae
MIVRNEEDSLGRCLSSVKDAVDEIVIVDTGSTDKTKEIAASFGAVIYDFEWIDNFAAARNYSFEQATQTFILWLDADDVLEPEDLTRLKALKEKQELPYDSVTMNYNLTFDHNGNPVFSLKRNRLVRRSRDFRWIGPVHEYLAVSGYTYHSDIAVTHRKERHHTDRNLRIYLKRLEGGEEFSPRDQYYFANELRDHARLQEAADWYEKFLVSGLGWVEDDIGACMKQADCYGRLGQADRQIASLLRTLNYDLPRAEFCCQLGSVFLEQKRYQQAIHWFTQATKLEKPKDLMGSTDNATWTWLPHLQLTVCYDRLGERDKAIEHHRIAQGYNPKHPSVVYNEKFFSGSKG

SEQ ID NO: 4878 - protein, 234 aa, Unknown
  Description of Unknown: Candidatus Collierbacteria bacterium GW2011_GWC2_45_40 sequence
MKKSKRQTISVTLASYNNEDCIADCLNSVKGWVDEIIVVDGHSTDKTAEIARKLGAKVLLRENNPVFHIQKDIANREAKSDWILQLDADERITPVMQKEIIGILDGDYFGYDSWLSPLKSTINKFLPFFPEPYRLTKPAAAYWLPRKNFFLNRYLKNAGQYPDPVIRLFQRGKAELPAKDVHEQMIVKGSVGWLRSDLDHFATPNFSRYLLRENRYSSLQAENQFFQHPKLFIL

SEQ ID NO: 4879 - protein, 275 aa, Unknown
  Description of Unknown: Candidatus Pacebacteria bacterium CG_4_9_14_3_um_filter_40 _12 sequence
MSTLKKPSVTAVIIARNEEKMIAACIETLRWCDEILVINNGSTDSTNKIAETAGAKVILFTSSSFARVREEAIKHVETDWILYIDADERVTPTLAKELLVTIETGTASALTLQRKNYFFGHAFAHGGWQHDQVTRAFKRSALTGWSGDIHESAEWNGEELRIVSPLIHLTHRSVVDNLKKSAEWTPKEATAFIEAKTAPVFFKTILRKGVMEFWRRAIRDQGYKDGTAGLIESLVQAINRMWIYIQIWEFQQKPSIPERYAHLEEEISKKWKNDS

SEQ ID NO: 4880 - protein, 253 aa, Fluviicola sp.
MNHKLSATIITFNEERNINRCIESLLPIADEIIVLDSFSTDKTEEICTKNGVRFEKREWKGYSNAKNYLNSLANHDYIFSIDADEAPDKKLQESILKVKKQGFEGAYAVNRLTNYCGKWVKHSGWYPDVKTRIFPKKTSKWEGKFVHEKLIIDGSPPSHLLEGHLLHYSYYNYTEHRERADKYSKLTAQKLYAKGKRATAVKPFISGLGRFISMYFIKKGFLDGRAGWKIATISAKSNIYKYKELRRLQHEAN

SEQ ID NO: 4881 - protein, 303 aa, Bacteroides sp.
MSNSIAAIILTKNEEKHIGRCIHSLEGVCDEIFVIDSFSTDKTCEIAEELGAKVYRHPFENQAKQFNWAINVCSISSDWIWRVDADEYVEETLAKKVIEKIDALPDDINGIYVNKKIVFMGRPLLHGGWYPAQQIKIIRKGFGASEDKWMDEHLIVFSGDTISINGDQTDDNLNDLSWWTQKHNGYSDREAINMLLMEYGLDNQEKEVQPKFLGTGAERKRWLKLKYIKAPLFVRPFINFFIRYILKGGFRDGKEGFIWHILQGFWYRMLVDAKIYELKKRFDFDKERIKTYLIENYKQCANK

SEQ ID NO: 4882 - protein, 633 aa, Unknown
  Description of Unknown: Paenibacillus sequence
MSKPSISLCMIVKNEERFLARCLKSVQGLVEEIIIVDTGSTDNTKEIAECFGAKIYTFEWVNDFSKARNEAIKYAQSDYVLVLDADEYLESADQILLLLESLEKDIYFLSIKSFLRGGISTIHPVIRLFRNVPELKFFGRIHEQIIIPADSLFTQDHLEVMINHDGYMKDVITEKNKEQRNLKILLEDLEEQETGFGLFNLGIQYKMMGQYEQAIKTFEKAFPLSMEYSYICKLITSLIQCYMELEQFDKALVICHESIEAYPNYTDLYYLQGQIYESLHYINDASESFNHCLKIGDVRNHELMTFHGVGSYMALTSLAGISLRKGDMTQAIQKVTDSLGINKHYMPSIKLLLDITKNTSFKDAFEFISKTWEISSLDDLKEMIGVLYKLRHPLLYGFCELYNHNVDKSILAAGYLYSKRYNEAASIWYEIEQIVDVDELEDVMLCSILTKDKVLIQKYKHKFSLREKDYKLIIRCLEREELNNNHWAKDLEQLLVRFFEKLIQLHEFDTIDYFVSQMTSYNLQFSFAKILANYGFNDIAINIMDLQLPNVDRDALVWIADQLAAVGNYNESMRFYEFANEQESTFNVLESMYQICIKNNDSYKLFNLIQAMKNSTPKSKWANKLEHYNFLSR

SEQ ID NO: 4883 - protein, 294 aa, Ochrovirga pacifica
MNTPTITAIILTYNEEIHIKRCIDSLKKDVDTIIVVDSFSKDKTVAIAEENGALIYQNPFVNQAIQFNWALDHCEIKSEWILRIDADEYLESQKSIKSFLSKLASETDGILIKRKIVFLEKELLHGGWFPKFNLRIFRNGNGRCEERWMDEHIIVMGNVVESDIVLVDKNLNSLKWWIDKHNKYAEREVADFFWEQTKKESVSPKFWGTEAERKRFLKLAYINFPLFLRPIMNFLYRYIIRMGFLDGTSGFVWHVLQGFWYRFLVDAKIYELKLKYQGNQDKIKEHIKKEFQIK

SEQ ID NO: 4884 - protein, 656 aa, Paenibacillus riograndensis
MTQLSVCMIVKDEEALLSRCLESVKGIADEIIIVDTGSTDRTKQIAENFGAKIYDYVWSNDFAAARNESLRHAAGKWILVLDADEYLGSNDHSKWIEFLQKEKPQAQLAYTLPVINFTGEKDYQEEMTTAPVTRLFPNFKGIHFERPIHEQLTRGGKEKLLHKKISLEIYHTGYQIQRVTEKSKHERNMSIFNEMKKANKLSAYDWFTLGNQYRFGKEDEEALQCYERAAKGATAKEAWYSHCLMGLISLYFKNGRLDSSWRWTEKELYKYKDFSEYHTIKGVHFETLGFFDDAIASYLQAINTAEQRAKRNQEIWLVDPMYSFETPVQQLVDIYFRLNDNQQAIYWLSKLLNKNNRNPKVLLKLVEWLCQNEEPAAIIGFLDKIYDVRNEAECNLLFKISLVLGQAELVNYYEKYLTTLDNINILDQFRYVILTDKKEEWMSLPIPEVNNDVDWKLQIWVQMVVGALKWNSLQRLHEITRILDHDDITQLTSIVEKLFFENSSVEEGLLKHYSSSLFLVSKQLFLIKEFEKFDQFIQLCKSPGIINQLANYFYTLNLTDMAMNYYSILLSQKELDFNSLVNLGLYHANQGYYSDAVEFLNEAIDKQPKAKHLYYLLIQHAAREQKQYFIDKFNLQFPEYGGISFVHNFFNNAKKA

SEQ ID NO: 4885 - protein, 482 aa, Paenibacillus sp.
MDSEGGSVVKQPAISLCMIVKNEAVALPRCLRSVAGVADEIVVVDTGSTDETVQIAKNFGAKVVTAAWNGDFSAARNAGLDRARGTWILFLDADEELDAGDKEQLRICTNHTEYEAFFLQVHNHSGETAESFAATVNPIVRMFRNRPSYRFRGRIHEQIAASIMEQRPQAHFHMTTVKIHHYGYSGSVMTGKNKIRRNVELLEKELSEHPGDPFTHYNVAVEHMRMANWSSALAHLRESMSLAGPDTSYRHLLHKYESRCLLEMARYEDALEALDRGIARFPDYTDLYHMKGAVLNAAERKPEAKEQFLLALSKGRPPVHYNTDAGTGTYLSAFALAQICEELGEDNAAIHWYGEAFRHNPNWAAPLLKLIRICKVARQEDRLAVLLKERFLPDSEAAAVKVVRALTEENCHTAAAALLEVYPGAGRAAAADETSEEEQAYRQIRTLLGLADTHLSYLDRELPYSDVYRRVRRRLPFPMLDR

SEQ ID NO: 4886 - protein, 268 aa, Unknown
  Description of Unknown: Candidatus Kaiserbacteria bacterium CG10_big_fil_rev_8_21_14_0 _10_59_10 sequence
MNPDSIPATALILTRNSAATLRRALDSVEDFDDILICDGGSTDDTCAIAREFGARTIEQERTCLNEDGSIRNFACVRNAALKEALYPWVLSIDSDESASEGLVAEIRVFLAGNPPPGVCRTPARIILDGTPIFRSSNYPGYQVRFFHRDAGRYKKPLHERFTPHSNVPIRTLTSPWQYYIESRTYNADYGKDLPHHLAIYVEGYKNAPARKRMRGTYRALRAMLGIAIRAIYNNIVHPGPNTYPLSYEWVRIRYQWEIIKAIWRTLSK

SEQ ID NO: 4887 - protein, 308 aa, Unknown
  Description of Unknown: Proteobacteria bacterium TMED72 sequence
MATHQASIAVIILTFNEEDHVGPAIESVQGWAREIFVVDSFSTDETVNAALEYADHGVRVVQHAFENYSSQWNWALTNLPISADWTLKLDADERVPDDFKAEVLDVLQDADPELAGFYFQRRMIFMNKALRFGGNVSYDLRMWKTGSAQFDGRQINEHAMVDGATHSLKCLVDHHDTKSITEWWEKHNRYSSLEALSMIDEAQFDVIKPRFLGSPDERMKWLRRMYWGHPFRFLSALGLFLYHYVLKLGFLDGTRGFQVAFLRATYFYLTDLKLIEYRRTGKRPTIHWPTRGRPHPTLAKSLDGETDS

SEQ ID NO: 4888 - protein, 645 aa, Unknown
  Description of Unknown: Bacillus sequence
MRPFISACIIVKNEEEMLRNCLESIRSGVDEIIIVDTGSTDSTKKIAREFTKKVYDYEWENDFSAARNFAAAKASGDWIVAIDADECVDVENLKGAVKEIEEQKDQYNMYLVEITSFSGSLGESTTVNQMLRIYKNDGSICFKRAIHEQLQTVEGKPRINLSSLKLYHYGYLTNVVEKQDKKNRNVKIIQKDLKNENNKAFSFFNYGQELRRLKETEEALNNFVKAYSSKENVNEGWVRICLFYIVESLVILKRYEEALKIICDVEELWPMVPDFVFWRGEIYFAQKRFEDAKEVYLQILSQTHVYKEVVYHLDRKSFLPNERLGQIYELEKKYNEAIKHYIEAFNENPFSVRIIVKIIWILSKHYSSQEVYDFIVKQNMIRTDNIRIEVLKYVLNNGLTDLVDLFVSDMAGEDESLKASIKLKVRMITSNSMNDILKIGDIQSGIQKGLFDWVDLCILYEMTHDAYIKELFKGSDVVDIFDFVFGESEQTGGIKQKEYLDLLDRGILYNKVDFVEKLIALKHLTNHDVDAKIADILYKNQYEDIALEFYQLANENDITEQGYVNIIEWLINNENNEEAYRITLEAVEKFGEDFRFYHYLVELNMGNISMVKVKLPSIFSNSNWLNKKITQSNNINSQNGEIIVY

SEQ ID NO: 4889 - protein, 311 aa, Fibrella aestuarina
MNGLSVIILTHNEEKHIGRCLDSLRPLTTDIFIVDSFSTDRTVEIARSMGATVVQNPWTTYAVQFNYGITHTPFKGTWLMRMDADEYVLPELADEINQRLSTLPTDVSGVYVKRRVMFMDRWIRHGGYYPIWLLRLWRQGQGICEQTWMDEHIRLTDGPNKEPAKTIQFAHDLVDHNLNDLTWWTNKHNHYATREVIDLLNIRYNFDQTVRVTPKLFGTQEQRKRYLKEKYASLPLFTRPIAYFLFRYIGQLGFLDGRKGFVWHFLQGLWYRFLVDAKLMDVYNRAGRDKADLIDYFKREHGKDLTAGIRG

SEQ ID NO: 4890 - protein, 303 aa, Unknown
  Description of Unknown: Candidatus Gottesmanbacteria bacterium GW2011_GWA2_47_9 sequence
MKISVVISARNEESKLGRCLASVAWADEVVVIDNSSTDGTARIAREFGAKVFRRPNNLMLNVNKNFGFEKASGDWIFSLDADEEVTKDLAKEIQERVMSKEQSDSSGYWIPRKNIIFGKWITHGLWWPDKQLRIFRRSKGRFPCVHVHEYLEVDGSTKELTEPYVHYNYETISQFIRKMDTIYSESEVQKLIRTNYQWTWHDAIRFPVSDFVKVFFAQEGYKDGLHGLMLAMLQAFYSFVVFAKLWEQSKFEQKELTVGGIDGELQRNHREIRYWVLSEQIKETRSIIEKIRLKLLRRYGKSH

SEQ ID NO: 4891 - protein, 254 aa, Unknown
  Description of Unknown: Acidobacteria bacterium sequence
MLSVLIRAKNEEESIGRAIRSVKGLANEIVVVDSGSTDRTVEIAKSLGAKVFFKEWEGYPNQLNYGIGLCSGDWVLVLDADEEVSHELAESIRHTIKAPKHKVYMVSRRTYYLGRFLKYAWYPEWRVRLFERGRVRFEGEIHERAIFEGPVGKIKGDLYHYSYRNLMDQYEKTLMYAHKMASLKHKGGEKFRLYKLVFNPLWSFFKVYFVQLGFLDGVRGFLVAVSAFIYTFLKYKFLLELELAKDDKRCNTCI

SEQ ID NO: 4892 - protein, 305 aa, Flectobacillus major
MQQDISVIILTFNEEKHIARCIKSLLAFTDKIFIVDSGSTDKTVEIATGLGAVVQYNPWVNYAQQFNFGIENNPFKTKWLMRMDSDEYVLPELANEINTKLFVLATEITGVYVKRRVMFFDKWIKRGAYYPIWLLRLWQNGKGICEETWMDEHIKLTEGKHHNFDHDIVDHNLNNLTWWTQKHNLYAIREVIDLLNMKYDFREFESVEPNLFGSQEQRTRYLKMKYASLPLFTRPILYFIYRYFVRLGFLDGVQGLMWHFLQGFWYRFLVDAKIYEVYHRVGKDKKAIIDFFRTEYGKELNNLRK

SEQ ID NO: 4893 - protein, 273 aa, Leptospira levettii
MDGKRKRKLSVAIITFNEEKNIGDCIRSVLTFADEIIVLDSFSTDKTKEIATSFPSVRFYEAPFPGHVEQKNKAISYCNNNWILSLDADERANETLQKSILRFLEAEEIHCEGFKIARLTFHLGKWIRYSGWYPQRRYRLFRKESAGWVGENPHDFIELNTGSRGKVMKGDILHYSFTDFSHQINTINQFSSIVAYTRYAKGESFSLLKTILKPLGKFIEIYLFKFGFLDGIPGLWIALASSFSTFLKYAKLYELDKLKLERPSNVRKDYGKK

SEQ ID NO: 4894 - protein, 372 aa, Desulfosporosinus orientis
MVSKKITVSLCIIVKNEEKTISRCLDSVKDICDEIIIVDTGSSDQTKEIVKKYPVKILDFAWIDDFAAARNFAFSQATMDYILWLDADDVLRIEDQEKILKLMKNLDPYVDAVSMLYHYAFDQHGNVSFSFRRNRLVKRDKNFRWVGAVHEYLEVSGNILNSDICVTHKRMQGHSSDRNLKIFERRREKGESFSPRDLYYYGNELFDHRLYSRAVEVYQEFLQTGQGWVEDEISACGKLADCFKELGETEKQLEYCYKSFNYASPRAEFCCRLGFYFLNAKQYEQGAFWYKLAARLEKPIGNSGFMIEACWTWLPHLQLCVCYDRLGKHELAYEHNEIAREYSPENAQVLYNKKYFEEVLGIGTKKQEIGQV

SEQ ID NO: 4895 - protein, 252 aa, Unknown
  Description of Unknown: Candidatus Cloacimonetes bacterium sequence
MKNSLSVVIITKNEENNIKRCLQSVKWADEIVVVDTGSTDRTLEICEKYGCHIIETEWLGFGKTKQLGVNCAANDWILSIDADEEVTSELTEEIRQLLSKDNLKNGYRIKRTSFYLKKWIRYSGWNRDYPLRLFNRKYGNFNENFVHESVRIRGKIGKIDKVLRHYTYPNLTTYIQKIEHYANLRAEEAVKKGKRASVFNAIFHGLFKFLKMYLLNTGFLDGTVGLVLSINSAFSVYLKYLKIWERIENVKK

SEQ ID NO: 4896 - protein, 349 aa, Bacillus psychrosaccharolyticus
MIVKNEEQSLPKCLESVKDVVDEIIIIDTGSTDRTKELAKTFTDKIYDFEWINDFGAARNYSFSKATKDFILWLDADDVFTDENREKLRTLKKTLSLDIDAVSMLYHLTFNEDGSPSFSSRRNRLVKRENNFKWIGFVHEYLEVAGNIIPSDIAVVHQKERHASNRNLLIYEKALESGQPFSPRDKYYYANECNDNRKYEKAIYWYQYFLEEGLGWSEDNIQACGKLADCYLNLKRYPEAMDICQKSFLYDAPRGEICCRLGFLYLEQNDLVKAISWYKLATVVEIPEKSPFINRSCYTWLPNLQLCLCYSRLGHQEIARSYNEKAAEFLPNNSQIQYNQEFFKRYFGE

SEQ ID NO: 4897 - protein, 365 aa, Lachnoclostridium edouardi
MITISLCMIVKNEEGVLERCLESAKEFADEIIIVDTGSDDKTIEIAGKYTEKVYRFQWRDDFSAARNYSFSRAEMDYCMWLDADDVVTEENKRKLLELKKSMNPSVDVVMAKYAVSEDKKGNPLFSYYRERLVKNKKGFLWKGKVHEAIAPSGNVIYSDITIHHRKIGQGDTDRNLRIYEGMIAAGEFMDERSWFYYGRELFYHGKYEKAVQIFEKFLEGNGWVENKIEACLNMAECFKNMGEGEKELKALFQSFLFAPPRGEVCFAAGRYFQEQERWEEAIFWFESALRVKAPSEAGGFIRWDCYGYLPEINLCVCYDKLGDREKAYEYHLKSKARKPEAKEVEWNEKYFNREKRTNQTCSAHI

SEQ ID NO: 4898 - protein, 288 aa, Unknown
  Description of Unknown: Clostridiales sequence
MTDITVIILTKNEEKNIGDCIESINSFAKRIVLIDSGSEDKTIEIAQKYSVDIFSHPFENYAKQFNWGIDNTNITTKWILRLDADERFTPLLCKEIEKLTKDHMNDNVNGITLEAEFYFLGKKIKYGGSKKRKLMVFKTGIGRIENRKMDEHTILSKGCTISAKNRFIHYDFRNINYFINKLNWYATREMQDYFEISCQNSAEVNYDEKIAKTRKRKFEFYYKLPMFFRSWLLFIYFYIFKLGFLDGKEGFIYHYMYQRWYRCLVDAKIYEHLKTNASFEKTGDLKSY

SEQ ID NO: 4899 - protein, 350 aa, Bacillus sp.
MIVKNEEAVLSRCLSSVSTIVDEIIIIDTGSTDKTKEIAKKFTNLIYDFTWINDFSAARNFAFSKATKDYIMWLDADDIVNEENAKKLLKLKKTLTKNVDAVGMKYHLAFDENGNPSFSSVRNRIVKRERKFKWVGFVHEYLEVYGEIIQSDAAIIHHKDKEYSDRNLKIYENAIASGKDLSPRDKYYYANECVDHQLYEKAIEWYELFLSEGKGWYEDNIQACGKMADSYLFIEELEKAINSCLRSFSYDGPRGENCCRLGFMYLQQNDFTRAITWYKLATLVDVPTTSPFINQACYTWLPNLQLCLCYSRLGDQETAKKHNDIAATYVPNNPSVLHNQEYFRTYFKNK

SEQ ID NO: 4900 - protein, 784 aa, Ammonifex sp.
MSAPTLSLCLIAWNEADNIGRCLKSAEAFVDEIVVVDTGSTDCTREIAKAMGAKVIQVKWQNDFSAARNVSLENATGDWILFLDCDEELDAESRHELRKAIEHGSYEAYFAMVRNTTDTNIELTFPSIRLFRNRKSFRFTGKIHEQIVNSIVANYGLQAIGHSSITIIHHGYNASTTNVAAKVQRNLEILKSYPEEKKDGFYFYNLGTEYLRLGDKKEALTSYLKALKLTKPTQAYGPILVKRTMTTLMDLHRYRDAVEQLRYYQTIFKEFSDLLLLEAVCHLNCGRYSEARARLEDYLKMPVPPAWYATENIFQGSSAEDLVERVKALALDRGCQGISVCIIGRDEEELVAYCIKSVNEIAAEVIFVDTGSTDRTPAIAYQLGASVYRFPWNDSFSEARNFAIDKAKGDWILVLDADEVLPDESRQAIVDLIRDPDHEGYFLKVRTFLDRGLSPASCYVTGACRLFRNDAYRYRGSVFGDIISPIIDAGGSTAYTEITVNHIHCFANDEYIARKRQLKIDAIKKQLRSDLTKLNFALGIEYFQAQDFISAIDHFESVRASLDEAHMAKFYYFYTLSLMKTEHYRRLAEVLDEAISMFPDYTDLIYLQAVVRFVLGETEEAKLLLHRCLEMGDAPWEKYIASPGTGGFKAMCSLGTIYSQKGDTEKALNIFLEAAGIPGAFEQAVESIVFLKEKLPVPLERFLEVRGLLNSRSLSLAAKSLAKMGRYKDSLNYLALAGERAASEPPPRDFANITQAINMLLSRFSREVLDSLPKDSKLKNRLTV

SEQ ID NO: 4901 - protein, 353 aa, Desulfosporosinus acidiphilus
MITISLCMIVKNEERLIKRCLECVKDFVDEIIIVDTGSTDRTKEIAGDYTSRIYDFEWIDDFAAARNFCFSKATMDYIYNADADEVIDKENIEKFFFLKNTLNPDVDIVEMQYTNQLEKGSTYNFDTENRPKLFKRLRTFRWIDPIHEVINCSNNVITSDIKIIHKPEDSHSQRDLSIFIKCTGNGQVLNSRLHMMYARELFICGNDEDFYKAFAYFNMSLMSDSLKPEDKRLSCCVLARYYHLKSDVHNFFKVITKTLNGIVSSELCCELGSYYMTLEDYEEALYWYYLASSSASADLNIDYMNFIPNVQMCQCFIKLGNLTEALQHNTLAGFYKPNHPAVLANMQNLNKLS

SEQ ID NO: 4902 - protein, 274 aa, Leptospira perdikensis
MEGKRKRKLSVAIITFNEEKNIGDCIRSVLAVADEIIVLDSLSTDRTKEIATSFSKVKFYESPFPGHVEQKNKAIGFCSNDWILSLDADERANQTLIQSIELFLESESVYADGFKIARLTYHLGRWIRYSGWYPLRRFRLFQKNAATWVGENPHDYIELKPGSHGKVMKGDILHYSFTDFSHQITTINQFSSIVAYTRYAKGERFSLTKTIFKPFGKFIEIYIFKFGFLDGIPGLWIAIASSFSTFLKFAKLYELDRKQIERPSNIRKDYGKNE

SEQ ID NO: 4903 - protein, 254 aa, Sulfurihydrogenibium sp.
MKLTVLILTKNEEKNIERAIKSVLDIAEEIVVLDSGSTDRTVEIAKNLGAKVFFREFDTYSDQRNYGLSICNGDWILVLDADEEVSEKLRENIKRELENPKFDCYEVPRRTYYLGRFLKYAWYPEYRKRLFRKGKVRYEGKLHEKVICDGKVGRLEGDLYHYSFKNLYHQFIKNIEYARIMAEIMHSEGKKFKLYKLIINPFVIFFKLYFLKLGFLEGTRGLIIAFSGFLYVFLKYAFLYELKLKEKYKDKLWL

SEQ ID NO: 4904 - protein, 584 aa, Desulfotomaculum profundi
MNNTVTLAMIVKNEAGNLGDCLESVKDQVDEIVIVDTGSTDNTLEIAGRYTDKIYTYPWQGDFSAARNYAIARSGGQWILYLDADERLFCEPGQLKKTVIKDDQIEAYLLPLDYPINESTGEYNRFLVLRLFKNTKDYYFAGRIHEQVIIHKNEAVGFTQDIIIKHQAVSPKERNRKRGRNLTALKEACAAEPQNFFLQYYLGIEWLGLGKPAQALPFLESAYRNITDNHLHFRMPALRYLLTCLNALEKFDDTICLGQEAALRYPQYTDIYYLTGIALEEKAEYKLAVKWFEEAVKCGVPPVLYTHMQGAGSFLAYYHMGYCCQNMGRPDVAQTCYEQALHVNKSYYYPATSLFLLMLTHHGPRFTFDYFNEKGYLNHTPIALSIAELFFSYGYPGLAKKCLEGSEVSRHMTEEILFHLGRYRIYSENFQEGLICLDRIPGDSQFSNMAVTHRSVALLLTGCLKECRNLALTMWKNKQLRPTSRVLLGLCRFMQQGGMAIQGMQGNEEELVQCSLHLLDLCYHYLPDRPGDACKNLERLISHLETLLITSPKGIQKLEQFYQDKMNAVRELFDYKFQTGGVGV

SEQ ID NO: 4905 - protein, 270 aa, Unknown
  Description of Unknown: Acidobacteria bacterium sequence
MPEQNPSRSARETLSVAMVACNEEANVARTLSSVINLADEIIFVDSGSTDRTLEIASSFGPKVKIFHEPWKGFPRQKNSAIDKATGDWILLLDADESLTPELQAEIAAILSGQAETPRPAPVAYRIARRNYQFGRWIRHGGHYPDPKRRLMRKGAGRVEDCPVNEELQIPGLVGDLHSDLIHHAHSSIADYIEHANRYSSLGAEMKAPRGFSLLNIVLNPFFTFIYNYFFRLGFLDGAEGLLLHLYHSTYVSLKYAKAWELTRNSKKLEN

SEQ ID NO: 4906 - protein, 428 aa, Unknown
  Description of Unknown: Chloroflexi bacterium sequence
MAKRKHRRQKPGGGVDAPPVPEGTLQFSADSAPESWPSVSLCMIVRNEEANLADCIRSAGDFAAEVIVVDTGSTDRTVEIAKSLGARVKHFEWVDDFAAARNESMKDAQGDWIFYLDADDRLSPEEVTRLKNVVASGLADAYRCRVVSHVADAGQSLNIVYHTRLFRNHRNVWFSGAVHENITAAILRQGMTVAQTNVTIQHVGYAGGPEVLRQKARRNGQILQRAIGRHPDDLKLRYYLGVSLYQLADYRAAIGQFEAVIAHPPPTLNRDSQLYKAYLLLISAYTHVPAPEKARRTLQRALELFPERRHLWITAGMFYLSQDEPEAAISALEHATQLSPQSDAEGESWPPGVLQDRLRAAYQRQGMKAIQQENYPQAVWSFSRFVGLAAPPQQAEGFKLLALALQKCGRQDEAIASWQAAQELESAG

SEQ ID NO: 4907 - protein, 958 aa, Unknown
  Description of Unknown: candidate division KSB1 bacterium sequence
MKSNLPSISLCMIVKNEEKFLAQCLESVKDVVDEMIIVDTGSTDKTVEIAESFGAKVFHHPWQNSFSEARNYGLQFATCDWILQLDADEELRGDDIPAVKSAVQNREIDAVYVALMNKTPVGWTKHYSPRLFKRGRAKFVGDVHNQLVYPGKDIKTEIVIYHYGYNLSKEEMDKKFKRTEKLLRKQMSRDNTNPFNYMNLMRVLKSQHKYQEVVSLGKKSFVAAGRRMTDPIRQMIEYDMICSLIELGKFSEAEKRAKNILKKFPDNLDITYSLGHSLILQKRYKEALDVYKKFLEIHEKEKKTPGFSYLIIDTYTLDHKVWAIIADCEYELENYESGIRAAKKAIELSPDTAEYKIALARNLIKAGRKEECRILLDRMERENNVDEETYLKYFALCVKYPELGSSADVLQRAVRKYPDSDKLKSYLHSKTPAGKKKNEPTISLCMIVKNEEEFLEQCLKSVQDVVDEMIIVDTGSTDRTVEIAESFGAKVFHHEWQGSFSEARNYGLQFATCDWIFQLDADEELEREDIHLVKKAVNQDKFDAVYVALLNDSVNGWSKHYFQRLFRRGKARYEGIVHNQLICEGESAWSEIRIYHYGYNLSEEKMKKKYQRTESLLLKQIEQEKDNAFSHQNYVRILAAQKRYEDVLKAAENAFGLCKETMNQNNRQMISFDYSVALLNLDLLDRAENVCNEILEEFPENLDITYALANVKLKKGEYKEAVSLFNKFLKILEKKRKQPKYEGLIIETYSYDHRAWACLSDAYTFLSQFDDALKSAENALKINPDNYEYHVIYAKALVNMGQQEKALNYLKEIDKNKKPSVAFYSKWSSLSETLPLGEKQEILEAGLKKHPDSVELNSLYAHLFESSDPEKAETIWNRVLSFDTENCNAMLHLAFLFLQEKQNNKFHDIKEKFINKCTRPVYFKKLGALCIKAQDYGTAIEVLGKYLEFFPEDAETLA

SEQ ID NO: 4908 - protein, 303 aa, Unknown
  Description of Unknown: Candidatus Gottesmanbacteria bacterium GW2011_GWA1_44_24b sequence
MKHTLSVVISAYNEEKKLGTCLSSVAHLADEIIVIDNSSTDQTAKIAKSLKAAVYKRENNLMLNINKNYGFEKATGDWILNLDADEEVTEELKDEIQRILELEVSQAKKGYWIPRKNIIFGKWIQHGFWWPDKKLRLFQNRSGKFMCKHIHENIEVDGEMGELTHPYIHHNYDSVSQYLTKLERCTTSESIALREAQYQLSWFDAIRFPLSDFMKTYFAESGYKNGLHGLVLSLFQAFYSFVVFTKLWEMEQFPQESMGLPIVLHEFKRAGKEFSYWMITSRIKESPGILDKLILKIRRRLSL

SEQ ID NO: 4909 - protein, 304 aa, Alteromonas sp.
MISVIILTYNEELHIRRCIESLLPITKNIFVIDSFSNDKTVSICNELGAVVYQNPWKNYATQFQWALDNCPIQTEWVMRMDADEYIENDLQNELKSGLFISEIREEIQGIYIRRKYFFLGKWIKRGAVYPLNLLRIWRFGKGRIENRWMDEHIVLEDGGMTCQLNGHIVDDNLNNNRWWTEKHNKYADREMIDILDKKYNFFPLDESLLNDQKTNQAKIKRYFKEKIYNKLPIFVRPLLYFLYRYFLRLGFLDGKRGFAFHYMQGYWYRSMVDLRVFEAEQLLLSCQTNDERLAVLKELTGLEL

SEQ ID NO: 4910 - protein, 625 aa, Paenibacillus bovis
MRFTVSLCMIVKNEEEVIGKCLESIHKQINEIIIVDTGSSDRTIPIAESYGATIHSYKWNDDFASARNYSLQQAKSDYILILDADEYFEGEYDLQKELATAKDFYIFPIHNLLDNERYFIHSAIRLFKNSPELRYKNRLHEHLDLEGKEKQMQWSKVSVSIQHTGYQSNTIIEKDKNNRNLNLMMQETKEHPNSYNFYNLGKAYMAIEQYEESAEYFAKAITDSDNQTHQADLLKKWGESLLQLNRSNEALKILYDAVQKYPAHTDLLYVLAEAYYDEKYLKDAASTWIKCTELGNKGDFISEGVSDYLAYAQLAELYKQEDNLAEAYKYILKAITSKRSHMPALKKYFEIAYIYAFAEDDIKKDLDISYKITRVEELQNLLDVLYTMRHYLFSGYLKSYNISPEKNVLAISYQYSKQYDLAKNSWYEVEHIPEENTIDILTLAFLLKDEKLVKSLQNVGEIGPSDIRILLQLLHNESIQMEELSSSLETLIFQLVNNLIYMKEFEAFQTVLQLLMGKDFEVKYQIGSMLNGHGYYEAAIDILVQAYHLDSENIQMIGLLGDICLRAGYFDDAEYFYTNLIERSPVYASYERYYRLYERKKDESRMQEIKQFIAAHYPMATWSQE

SEQ ID NO: 4911 - protein, 253 aa, Geovibrio sp.
MSSNLPLSVSIISFNEEDNIGRTLESVMGFAHEIIVVDSHSTDKTVEIAEAFGAKVYDEDWKGHVKQKNSAIEKCTQEWILSLDCDEVVTPELENSIRETVASGEKDGYIMNRRTFYAGKMLAHSWQPDNKLRLVKRSANPRWGGYDPHDVLEIEGTKGKLNGDLIHYSYRDINDHFQRLLKYAKTAAMSYHKNGRRFSMFRLIFNPPAAFIKKYIIRGGFLDGFHGLLVAVSSFIYVFLKYVFLWEIERNEG

SEQ ID NO: 4912 - protein, 296 aa, Unknown
  Description of Unknown: Candidatus Jorgensenbacteria bacterium GW2011_GWA2_45_13 sequence
MNKNLTVIVLTYNEELHLARCLTSVKTLASEIVVVDSFSTDKTQEIARTFGAKVTTHEFKNQADQFNWALDNVSLAGEWILRLDADEYLLPELAEEIKARIGNVGSSKDHGSFDDQNIVGFYLRRRVIFMGRWIRHGGYYPTLILRLFRNGKGRSEVREMDEHIVVSEGQTQTFENDFVDENLRSLHWWTAKHNDFSTREARERIKEEEEHMEIQEDPLGSQTERKRWWKMAVYMNLPLFWRAFGYFFYRYFLRLGFLDGKEGLIFHFLQGGWHQFLIDAKIYEQEKGQSYKAEEE

SEQ ID NO: 4913 - protein, 331 aa, Clostridium chromiireducens
MDITLCMIVKNEEKYIKDCLDSAFKLVNSAVIIDTGSTDKTKEIIKEFGEKVKLMEYAWNNDFAKARNESLKYADGEWILVLDADEILNIDKDNVINTINTTIAEAFNIPLTNVLSERNKQNSYVYMRLFKNKGYKYYRPVHEQINISIDKSENLNRKDIEIIHYGYMQKCIDEKNKIERNLDILFNELSKEPEDSFINYHIASTYSANMDYSKALQFYVKSYECGLKYGFGKYYYILVKKMCQCIYVLGDYNLCIQFTNNLLLDSRLKEFVDLYFLIAECYFKLKKYGKAIEYAKKCLEIGERDDYPTLNGRGSFLVEVLLSDIHKEMNK

SEQ ID NO: 4914 - protein, 315 aa, Spirosoma rigui
MSDVSVIILTHNEEKHIARCLQSLHLFTREIFIVDSFSTDRTVDIARSMGAVVVQNPWVNYATQFNYGIAHTPFQSTWLMRMDADEYVLPELATEINSRISTLSTDVAGVYVKRRVMFFDHWIRHGGYYPIWLLRLWRRGQGICEETWMDEHIKISMPGNAPLKTIQFQHDLVDHNLNNLTWWTQKHNNYAIREVIDLLNIKYDFDDTQRVEPRLFGSQEQRKRYLKIQYASLPLFTRPFLYFLYRYFIRMGFLDGRRGLMWHFLQGGWYRFLVDAKVFEVYYHAGRDKQAIVNYFRSEYGKDLSPKQPRPLGQS

SEQ ID NO: 4915 - protein, 383 aa, Paenibacillus sp.
MGGISVKRQCTVSLCMIVKDEEATIERCLESARDAVDEIIIVDTGSTDRTKELCLPFADRVLDYEWQDSFAEARNYGLRYATGDWIIWLDADEVLESGSPLRLGDRLEGLREAIILVEVVNYYGTAPADGNFAYTLAHHRIFRNHSGFLFRHAIHEQLNVGEVMAEGTTLTMLPVRVHHYGYMDDAPGAQFKSERNIALLLQEKAKQDACLNPWLEYHLASEHYRKGRYATALQLLNEGIVGFIQSGMPPPSLVYKLKYATLLAMGEVRSMWPAIDKAIEIYPDYVDLHFYKGLVLFNLGQTKEALQAFEHSVQLGDACSMHLTMKGAGSFFAWFYAGQCYEKLGDRTNAAHAYEHALALNKDLKEARDRLDALDEERSGGAA

SEQ ID NO: 4916 - protein, 362 aa, Falsibacillus pallidus
MMTLSLCMIVRDEEKVLGRCLDSIGNLVDEINIIDTGSTDGTKELASRYTDRIYDFKWIDDFSAARNFSFSKATKDFILWLDADDVLPEGEQEKFSALKIFLREDIDAVSMPYILARNEEGMVTQSVRRNRIVKKSNGFRWFGSVHEYMEVGGNVISSDIHIVHNSQKTGVSTRNLDIYEKMLGEGRSFTPRDLYYYANECLDHKLYERAIEYYQKFLDTREGWVEDCISSCAKMADCYLALEDPENAIDQILNSFKYDIPRADQCCRMGFIYLSKDQLDKAVFWYELAASLDYEAAKAKGGFLNHNCYTWLPHLQLCVCYFRLGQIEKSKHHNQMAKAYEPTNRMVLYNEEYFQSLTEQEE

SEQ ID NO: 4917 - protein, 365 aa, Lachnoclostridium sp.
MASISLCMIVRDEEDVLGRCLESAGELVDEIIIVDTGSKDKTKEKALQYTDKIYDYSWQDDFSAARNFSLAKGTKDFLMWLDADDVISADDAGKFKRLKEKMESDTDMVMMPYITAFDESGKAVFSYYRERIFRNRRGFAFRGRVHEAVTPAGKIVYWDAAVEHRKVHPGNSTRNLRIYENMERSGEYFDSRSLYYYGRELIGHKKYEKAIRILEEFLGREDAWVENRIDATRRLADAWYAKDNDKNALKALLKALEYDVPRGETCCCLGRHFQERGQYEQAVYWYTQALAAKKNMMSGAFIEEDCYGFLPAISLCVCHDRMGDLEQAEYYNEMAGKFRPDSPYYLQNREYFRGVKDKQNQNTHI

SEQ ID NO: 4918 - protein, 363 aa, Bacillus sp.
MIEISLCMIVKDEEIVLERCLKSVANVVDEIIILDTGSTDKTKEIAGRFTDKIYEFEWVNHFAKARNKAFSYATKPFILWLDADDVFKADDVQKLQELKRNITPRTDAVSMDYHLGFDGSGGVTSSIRRFRLVKAENQFKWHGAVHEYLEVFGNLEHSDIAVTHLSLDNGHDLTRNLEIYEEMKRNNETFSPRDLLYYANELTDHSKFEEAINHYIQFIKQKKVGIEDVIRACNKLADCYSNLGIVEKARDWSFRALEYGKPKPETCCRIGHIFFEKQLFPEAAYWYEQAVTNKETNGYFRNIACETWIPHLQLAVCYDKMGLTEKGNEQNELASTYLPNDERVAYNRTYFTERLALLERIID

SEQ ID NO: 4919 - protein, 269 aa, Unknown
  Description of Unknown: Candidatus Omnitrophica bacterium CG11_big_fil_rev_8_21_14_0_20 _63_9 sequence
MDTPAILSAPAAPGRIKRPKLSVVILTRNEEPRIARCLESVRWADDIVVVDGLSTDRTVEICRQFGARVIPHAFSGSFAEERNLGMRHATAEWVLQIDADDVVTPAFRTAVEVLLQGASQHAAYKFRRKSYLMGRFMRYGGWYHYLPNLVRREDVRYVGDVHERPVVEGTIGVLDADIEHYPCEDLAAFISRHNRYTSLQARELSQQPFGRLALIQRLVHRPWKTFWKCYVKKQGYREGAHGVLFAYLYAWFELLKWAKCLELRVTKIS

SEQ ID NO: 4920 - protein, 359 aa, Paenibacillus baekrokdamisoli
MVTVSLCMIVKNEEKTIGGCLSSIAKAVDEIVIVDTGSTDQTKAIVSTFTDKVYPYKWIDDFAAARNFAFRQATKDYILWLDADDILKEEDCNKFMELKKELDPSVDSVTMVYNYAFDEYGNPTSRFRRNRLVKRENDFKWIGAIHEYLDVKGNIVNSDISVTHCRIHRKSDRNLKIFQNRLMRGETFTPRDLYYYANELLDHQKYNKAITYFDKFLATGKGWVEDEISSCGKLADCYNKIGNTEKELESVFRSFRYDSPRAEFCCRLGFHFLNLNRYESAIFWYKLGAGLKPPEDDWGFSNPTCSTWLPHLQLCVCYDRLGNHEAAYEHNELARSYRPNDSSILQNKKYLDALLQKDQ

SEQ ID NO: 4921 - protein, 375 aa, Paenibacillus sp.
MLLSLCMIVKNEQDVLERCLESVKSAVDEIIVIDTGSTDRTKAIALSYQAQVYEYAWSNDFSAARNEGVKRAAGKWILVMDADEYFAAGDADKLRRFLETAEPSPHLIYSINVINFVGKSKEQAAITSGEIPRLFPNGYGIEYYRPIHEQLRSQSGELLSSLAPVSLFHTGYLEEMVNSKAKLDRNAGIFKELKNKQGFSAYDYYTLGNECAVGKDFQKAVYYYERAIKKQSKLINSSWFPHCVISLIHSYLVQNRMFDAWKLTEEKLSAWKDYPEYAFYKATILHHLGFMEEAEMTYVQTIETAASKSKESQVFWLESAEFASTIPMRKLSSIYEWQKKMVRGRSLFNQASHAGLIRLQRSESPAQNHDKIRYH

SEQ ID NO: 4922 - protein, 370 aa, Desulfosporosinus hippei
MSDSSITISLCMIVRNEEATIGRCLDSVKGIPDEIVIIDTGSIDLTKKIVQKYTDKIDDFTWVDDFAAARNFAFSKATMDYILWLDADDIFVDSDRDKFLKLKESFNTSFDVVNMPYLLAFDQSGLATFSLRRNRLVKRNKNFRWIGAVHEYLEVYGSILNSDICVTHKGIGGHDSDRNLKIYEKRKAKREAFSPRDLYYYANELFDHQLHERAIESYKDFLNTNQGWVEDNISACGKLADCYQKLEKPDKQLEYILKSFQYAPPRAEFCCRLGFYFLTGEQYEQGAFWYKLATQLEKPISSWGPINEACWTWLPHLQLCVCYDRLGKYELAYEHNEIARKYRPDNTQILYNRKYLEGVFIKNGIKNSNG

SEQ ID NO: 4923 - protein, 360 aa, Clostridioides mangenotii
MIDISLCMIVKDEEDVIGRCLDSVKDIVDEIIIVDTGSTDKTKEIVEKYTDKVYDFKWIEDFAAARNFSSSKASKSYIMWLDADDVILQKDKVGLLKLKKSLSSTIDMVMMKYNVAFDADGKPIHSYFRERIFKRKNNYRWVGEIHEVIVPSGNIIHSEVAITHKKEGHKDPKRNIRIFEKMIKDGKKLGPREQFYYSRELYYNDRYEEAIKGFEDFLDSGEGWIEDCISACKDMSTCYYLIKEDKKALYSLFRSFEFDEPRAEICCDVAKHLFDRAQYKQSIYWYKVALSKDINEIKQGFKFNDCYDFIPSIQLSVCYDRLGDVEKAIFYHEKSKKLKPNNEAVLYNENYYNSLKNKKK

SEQ ID NO: 4924 - protein, 254 aa, Unknown
  Description of Unknown: Cytophagales bacterium CG12_big_fil_rev_8_21_14_0_65_40_12 sequence
MREPVKISGVVITHNEEKNIGRCLNSLIGICDEILVVDSYSTDRTKEICLKLGVRFIQNAWNGFLAQKNFAQDKAEFDYVLQLDADEVLSPALEKSILGVKANWQFDGYYFNRFTNYCGKWINHSGWYPDAKLRLYDRRKGKWEGLDPHPSVHLIGAAQHIKGDLLHYSYTSYEDHINRSANYALQAAKAMHQLGKKPSNFKLVFSPAFKFVQTYLLKQGFRDGFEGLIICKTSAYYTFLKYMYLKLITKGKTV

SEQ ID NO: 4925 - protein, 382 aa, Paenibacillus alvei
MQSPTLSICLIARNEEDVIARCLQSIRSIADEIIVVDTGSTDRTIDICREYGARVLTHEWQDHFAMARNFGLEQATGDWIMWLDADEELAKEDRDEVKALLPTLDKDIYSIHLINFIGDSINENDTYHISHTRLFRNNKGFKFQFSIHEILNIKDVLPNQDESQIETLPIKLYHYGYLNDVTHAKNKNERNIALLHKARAANEPNSWLEYHLASEYSRMKQYDQAFHYINLAIIRFLSEGLAPPSLVYKLKYSILIETGSIEGAWPAIDKALILYPDYVDLHLYKGVILYQLGKFEQALESFHNCIQLGDEQLNHLTLRGSGSFHAYYYKGQCYEQLNNLHEAVNAYRAALQFNPAYEPANHALHTLLAAHPEWSEHHSAIT

SEQ ID NO: 4926 - protein, 359 aa, Geobacillus jurassicus
MIVKNEEDVLARCLDSVQHLVDEIIIVDTGSTDRTKEIAGRYATRVIDFPWNDDFSAARNFSFSHATMDYIFWLDADDVLLKEDQEKFLTLKHTLPSDIDSVTMIYSLASDEHGAPISSVRRNRLVKRSNHFKWHGMVHEYLEVWGTILNSDITVIHKPVYHHSDRNLNIYEKQLAQGKEFSPRDLFYFANELFDHQQYERAIQYYEQFLQTKKGWVEDCIAACGKLADCFYALGDEEQALRYVYQSFEYDSPRAEFCCRLGYYFLQRKQYRLAAFWYHLATQLTMPSDSWGFFHHACWTWLPHLQLCVCYFYLGEYELAYKHNEKAREYAPDHPDVLHNQCLLESILSAKSTFHSTDE

SEQ ID NO: 4927 - protein, 1994 aa, Syntrophus sp.
MDWNEFDPGIQALQSGVLRDLNEELHEMTDHNDIHHPAAVAAGLSGGNPVTYDAARLNGRPVEPCADASAADEGVRISGVSTEASSKSADARKARGTSFLIGRKPAIRVLAAGSKYASGSARRGYDYVWWNLFDALNRFENIEAHFYDCAAEARRSGIEAMCGQLGNIVLKEKPDILFYGGSSDGFAEFVRSCLKRITGSTDTQTVLWMNDQEERQGGGLALSEACADLIVTLSPDSAQRYAAAGFGRKIMMSQWGFNPFTYALPFSPRSRGISFCGTAKGDRSEIIRKMRQHGLAVGTFGPDWQEDLTLPLADMVRIFRQSRINLNLNDIGDFAARQIKKRTFEVPGCRGFLLTIPAGHLDAYYEPGREVAVASSLEELIDKCRYYLVHDKEREEIARRGYERTLAEHTWSHRLKDMFECLGFAAIPGESAPAGTRNPYPGVSDFPGGEEAASPGCSDPRGCTEESVTPEEREIETSIIVLAFNKLEYTRQCVESILHYTNGSYELLLVDNGSADGTFEYFERVKDFHPDTRVIRHFQNRVVEEIGIHVFSLARGKYIACVANDAIVHEGWLENFIRQMESAPDIAMVGPRSNNVSGPQMMPTEYDTVEAFHAFADEWCRRHKGSNFVIHRVVGVANILKKSVLERIGGFDPDLPTNGREGGYGFSDDDFSLRLTLAGYRMLVANDVFIHHFGSVTTRQDRPDLFGAPQNVNKEKYRRKLQQNDRVSVGADGVIKVRPYRLDEEIPVDERTAIRTPRVCFVEKGRGGKKSRAEYGYAALARKYNGDIIPGRGETISALILKALEKNEFDFLVLIDSRLAPSPEILSALTEYALCYPDVAVMVPTGNYGALTHAHKPDSAPEVERIPYADLSLCVINLNVVRPLRMALARCENEEEWPWFFQRRIRGESYFIAKANSLEVNGDWTRYAHPYDALRLPEQLLDEKKYAEAGAIYRDDLSRDPDFAEACYQLASIAVKQRRLEEAIDHARRALQADPHHIPSLVLLSGIFLEQGDFQNAADTVSQANFKQPGNPEVKKIVSRYEEQFKRHPEAFQENPDGAATFPTRRETVKGSVSIVIVTRNRLDFTKKCVNSIRRHTRRPYEIVFVDNDSKDSTMKWLKRQVKENKDCRLIENRENVGLIKGRNQGINAAQGEYIVLLDQDALVSRGWLDSMLQCLNRCSAAGIVGPMTNRGGGIQQVLDDSYRSVDFLDKYAAKFMERYRHRRIPCRCVAGFCLLFKRSVVEKIGLFDETFESGHFEDEDYCLRAALADYRNYIAGDVFVHRLEGGKSHGDRQILNKKWELGPASPEGKKLAVLKATELAGDLYQKGKMGQAVDTLINCIKLIPDSKEVYFELVRLFMESGQFSEAWDVVGTMPEAVKNDLKGLQYAGYTQEGLGLDGEAAGYAERILLQNGSCPEALNLKGVLAYKSGAKEEAVDYFREAVEVDPGYGEASTNLGVLLWGIDEKEEGLACLRRGFMLSPTVPDSSSLYYSAISSLGLFRNAEAEFREAVSLYPQNKNLAFLYIDILLQLGKLKEALLKIEDALALFGIDEGVLNAAMAVRDKIGPSKIENPSKKSTLSLCMIVKNEEKHLAACLRSVRDIVDEMIVVDTGSTDRTMEIARVFGAKVFEVPWTGDFSAARNASLAQATGDWIFVLDADEVLSPRDFKELRTLIETPSSSPAAYLITTRNYVEKFGIIGWTANDGQYPEEMGAGWIPSAKVRLFKRRSNIRFSNPVHELVEYSLHQAKIPILRSSIVVHHYGKLDTEREGMKSREYYLLGRMKYERDPKNMKYVYELAKQAQLLKKYDEAARLWLELLDLLRENPESAGYKTIAAISCGDPLPEIYIQLASAYIMLDRCDEALELARKAMKESRIKLPAYVNVYAYCEMIAGSLNAASSALEELLRDMPDYPPALSLMAVIHCLEDKEEQARELSRQLRLKGIPLSATLKHISEKLSSYGKKDEAELILKWMAGASGSYCKNSHGLEAAQINGS

SEQ ID NO: 4928 - protein, 643 aa, Paenibacillus pinisoli
MSKLISLCMIVKNEDDVLDRCLNSVKDIMDEIIIVDTGSTDSTKDIAYRYTDKVFDYEWVDDFAAARNQSIQHATGKWIFVMDADEYMEAHDAKLLRDFLSKETPSEDRVYSVSILSFLGQERSYSVNEGLVIRAFPNHCHLQYARPIHEQIVSTKKLELKSINMPCRVFHSGYTQETISNKNKHERNLSIFNKMKNQSRLSAYDNLMLGNQQVMMGNYEEGLEYLQLALSKKRELGTAYKQVLFTMMNVYMNTNNLIEAWNFMDEHLVDYEKNYPDILALRGIIYYHLGFTQDAKKTLLTCVENAELLAAQNKPISISSPDLGVRLPLKYLALICEQEKELSSSVYFLTKYLRVFNDGDALTRMVRILALKDNAKQISGFLDHLLSHMKDELRAPLLCKISISLGLRDLADHYYQQLSATEVLSLADRLRYALLMNQEEDFKQIWFTGLPSEQEDPASLNHLALAALVWNKPEWIQWSNNTKEETSYMQAIEGLLLGNSSGMIKNEGYLFTLLGGLYTTNYLDMFDKILDQVESPAVINSLANMLYTIHHDDAALQCYSYLDANNALEYSSCCNLASHHTNLKNTGQALRYLELAIKQDPSQKQLFIQFCLLSNDPAEKRIKKEQLIRLDSNYKNLPPFIAL

SEQ ID NO: 4929 - protein, 304 aa, Vibrio sp.
MLDCSMSSSISAIILTYNEELHIERCINSLINSVDNIYILDSFSTDRTLEIASKFSNVKIKQNRFINHAIQFNYALDAFDIDTDWVMRIDADEYVDRDLSSFLLNSLDGLPADVTGVTVNRFMTFMGKLLEHGGMSDYWMLRIWRNGLGRCEQRWMDEHIILSNGSTIQATGRLVDDNLNTLSWWAHKHVDYSTREAIDVLTNATSGNSDVVDSKLFGTSAERGRFLKGVYNKVPKFTRPFVYFTYRYIIRMGFRDGKQGFLWHILQGFWYRMMVDAKVFEIQSAVNTNSDLKQVIKNKYDYEI

SEQ ID NO: 4930 - protein, 378 aa, Clostridium frigidicarnis
MSITISLCMIVKNEEETLERCLESAQSFVDEIIIVDTGSTDSTKEIAKKFNAVVYDFKWIDDFSAARNFAFSKATKEYIFWLDADDYITNENIKKIEELKVTFDNNVDAVSMNYSLSRDAKGNTTYSLKRNRLVKKSKDFKWIGCIHEYLEVFGNIIHPDISINHGKMKPHGNRNLEIFRAMEKKNIEFSVRDNFYYANELYYNGLFKEAIIQYENFLDTGKGWVEDKKTATANLIQCYNLTNKKEKCMEIILKSFEFDIPRADICCRLAEQFMEKQQYNQAIFWYKVAMGCIHEKDNLGIDHKDYYTWIPSIQLCVCYSIIGDYDAAYYYNEMTAIYVPNSPKVEYNRNFLNGKFKELGKVQPDLDCKLIDRRHRFF

SEQ ID NO: 4931 - protein, 293 aa, Unknown
  Description of Unknown: uncultured bacterium sequence
MKIKRQTISVTLATYNEESNIAACLDSVKDFADEIIIVDGRSQDKTVEIAKKYGAKILLRENNPIFHIQKAIANREAQSDWILQMDADERVTPGMKKEIVGILEGTYFGYDSWISPLKSSVNKYLTVFPRPKKLTEPAPAYWLPRKNFFLNRYLKNAGQYPDPVIRLFQKGKAVLPAKDVHEQMVVHGVTGWLVSDLDHYATPHFSRYLLRENTYSSLKAHQLKEAGVKINIFNTLNYLFFKPLGTFCSLYFRYRGFMDGFPGFVFSLYSGLHHAFSYMKLWELYKDEEYGTN

SEQ ID NO: 4932 - protein, 352 aa, Bacillus thuringiensis
MISISLCLIVKNEEQTLNNCLSSVRGIPDEIIIVDTGSTDRTKEIAKKWTSHVYEFEWIDDFSAARNASFQYATKDYILWLDADDVLEQEQSRKLKQLKESLSEGVDAVSMKYLMLNSEERGITSYTTRLRLVKREKGFKWKGIVHEDLAINQAYTSLQSDICITHTKKGNTNMPSSRRNLEIYERHIAKGYQLNVSDMFHYARECKIHKEYEKAIQYFEQCKNHPEISLENTIFVYHQLATCYAMVQKPQNELELTLQSLSLDIPYPAFSCRMGEHFLRKGHLEAAIFWYTTAYTQPLLERYAWSVADQAYHTWLPHQQLALCYQTLGEQEQAIFHEQQAKEYQNISSDSF

SEQ ID NO: 4933 - protein, 369 aa, Desulfocucumis palustris
MIMKEISISLCMIVKNEENTIARCLDSVKDIVDEIVIVDTGSTDRTKEIVGGYTDKIYDFTWIDDFSAARNYAFSLASTDYILWLDADDVILEPDRLKFLDLKKTLDPLMDAVNMPYLLAFDQHGNVTFSLRRNRLVKRSRNFQWIGAVHEYLAVGGHILNSDISVVHKEEARDSDRNLNIYERRLAGGEEFTPRDFYYFANELFEHQQFERAIEFYEKFLNTDMGWVEDRIAACAKLADCFHRLGDPKSEHAFLYRSFEYDTPRAEFCCRLGHSCLQAGRLKQAVFWYKLATELEKPVDSWGHMYHACWTWLPHLQLCVCYDRLGEHELAYKHNEIARTFQPENVSVIHNKIYLEGVLGKEVKEEKNS

SEQ ID NO: 4934 - protein, 361 aa, Lysinibacillus sp.
MVSISLCMIVKNEEDVIGRCLASVKGLVDEINIIDTGSTDNTKQIVKQFTDRIYDFEWIQHFAAARNFSFQQATKEYILWLDADDVLLEEDQVKFKALKESLSLDIDAVSMNYNLSFDHEGNVSSLLRRYRLVRRDKQFQWIGAVHEYLEVGGKLLDSDIAVSHLPLSHDHNRNINIYKQLVESGEPLSPRDTFYYANELLDHEQFEDALFYYETFLVSKLGWVEDNIRACFKLADCYSHLNDKENNLSSILRSFEYDIPRPEACCRLGFHFLEQAKNYEAIFWYEQALVIKQKPNTPFQNKTFTTWLPHLQLCVLFDRLQQYELANAHNELARAYLPNDEKILHNKKYFDRILNKENETS

SEQ ID NO: 4935 - protein, 284 aa, Unknown
  Description of Unknown: Blastocatellia bacterium AA13 sequence
MPTKKSDARIAAQLGDSVSPNEKPRRRISATIITLNEERNIADAIESLSFADEIIVVDSGSTDRTLEIARGLTERVYVKEWRGYSAQKNFAAAEALHDWIFSLDADERVSPDLATEIDAFKASPDQPASAYEMSRLPNYLGGWVRHSGWYPDRKVRLYDRRKARWVGDFVHEELQVDGVVKRISGDLLHYTVRTVSEHVQRSDRYTTLAAEEMLARGRTPSILAIALAPPVTFFRSYVLKLGLLDGIRGVAIAFFAAYYVFLKNLKSWRKANETRTDSDNHDNH

SEQ ID NO: 4936 - protein, 625 aa, Paenibacillus sp.
MSKTISLCMIVKNEEQVLGRCLESVKDVVNEIIIVDTGSTDMTLDIARKYTDKIYSFEWVNDFSAARNESLKYATSDYILVLDADEYLEVGADFQKDLEKNCDYYLFRIRNEISWDRNFTFAAIRLFKNHISLKFENRLHEHLNIINGTAEYTMGESNLLINHVGYTDGKMLEKDKHKRNLPLMELEVAENPTAYNLYNMGKTYFAIQEYKKAVDFFKKAYPLSKDRVFLPELLTKLAYALAEINQMEDALSILADAVMMFPKETEMRYILGMIYQKAEYYRDAEVCFRKCIELGDQGSLITEGSGGYMAHMRLSELYEEIGQLEDSHREAVFVLNLKRNFAPALQQYLNLMLKLKVSTENIQSGINQHYTLKSVEDLQQLLDIMYGVRSPLLEKYLTTYNITVQPNVLATSKIYSKNYMEASLLWNEIADKQNENGQDLLLLAFLLKDVSNLVHIQNLLNLSNKERNALEKMITDQDGKYSLTPVIESRLLDICCKMIILQEFEQFQLLVEKMIEIKSESRLSIGKLLSDYRFDELAIDMLITMFKDQPNNVQLVRLLGDLCLRNGYMEDTQLFFSKLLTMDSQYSSYERSFKLYEKQEDTISCRTIKEEIKNRFRNVLWVREA

SEQ ID NO: 4937 - protein, 311 aa, Runella sp.
MNDVSVIILTHNEEKHIERCIQSLLHFTDKIFIVDSGSTDRTVAIAESLGANVMHNPWVTYAVQFNFGIHHTPFKTDWLMRMDADEYVTPELGQEIKESLAALNNDTTGIYVKRRVMFMNQWIRRGGYYPIWLLRLWRRDKGICEELWMDEHIKLSEGTTVQFKNDIVDHNLNNLTWWTQKHNNYAIREVIDLLDIKYNFTEANRVIPKLLGTQDQRKRFLKLKYASLPLFTRPFAYFLYRYFVKLGFLDGKKGLIWHFLQGLWYRFLVDAKIYEVYHRVGKDKQDIIEFFRNEYGKDLSAVQNRPVEVRQ

SEQ ID NO: 4938 - protein, 252 aa, Unknown
  Description of Unknown: Moraxellaceae bacterium sequence
MSKISVVIITLNEELCIGRAIESASQIAEEIIIVDSGSTDKTLEIIKSYDIVKVFHNNFIDFSSQKNFAISKASCEWIFVLDADEYFDKNLENQLKSKLFKNEKIYASIRKNWFMDGWLSESFGKDMQHRLFERKKENIYQNKVHERLKSIGNLEIIELEGCILHEQKRLSINNIISKQIKYTDYDIMGKYKNASLFLLLSKSFFKLINTLILKRIVFKGKRNILWAFVIFSYDLLLVMKKIEIDINNKGKS

SEQ ID NO: 4939 - protein, 249 aa, Unknown
  Description of Unknown: Candidatus Woesebacteria bacterium GW2011_GWC2_45_9 sequence
MNISAIILTKNEGKNLGECIRALTFCEEIIVIDDYSSDKTVEIARGLGAKVFQRSLDGNFAAQRNFGLEKATNKWVLFIDADERVSHELKEEMEKEVPAPNNSHLGYFLKRDDYFFGKKLKFGETASVSLLRLARKSAGKWMRSVHEVWEVQGRTKTLKNPLEHYPHQSLREFINDINFHSGLHAEANHQEGKHSSLVKILFWPKLHFFKNYFLRLGFLDGTEGFVLALMMSLHSFLAWSKLWIYERKN

SEQ ID NO: 4940 - protein, 310 aa, Spirosoma radiotolerans
MTDVSVIILTHNEEKHITRCLQSLLPFTNKIFIVDSFSTDRTVEIARSLGATVVQNAWVNYATQFNYGIEHTPFETTWLMRMDADEYVMPELAGEINQRLTGLPANVGGVYVKRRVFFLNRWMRHGGFYPIWLLRLWRRGDGFCEQVWHDEHIKLTKGESIQFAHDIVDHNLNNLTWWTQKHNHYTILEMINLLNYRYQFDQAETVEANLFGTQDQRMRFLKEKYASLPLFTRPILYFIYRYFIRMGFLDGRPGFVWCSLQALWYRFLVDAKLLEVSIRVGTDKDAIINYFLTEYGKDLRPNRPERVGQS

SEQ ID NO: 4941 - protein, 364 aa, Bacillus sp.
MLSISLCMIVKNEEEVLEQCLNSVFHLCDEIIIVDTGSTDKTKEIAEKFTDKIYDFKWIDDFSAARNFAFSKANMDYILWLDADDVLRKEDQKKLEALKLSLDPSVDAVSMNYILEFDEYGNPSFYFRRNRLVKRINNFKWIGPVHEYLEVSGNIFSSDIAVVHRKSDKAGSDQSVGRNLRIYEKRIKAGEDFSPRDLYYYANELKDNNQYKKAIIYYREFLATKKGWIEDNIRACLYMAESYAILGDKDEEVEILLKSFTYDVPRSESCCRLGDHFKAKKDFQTAVFWYNTAVLNKPQTPQGFHNESYSTWYPHLSLCVCHWELGNVEKSIEHNEIVKEFRPNDPQVLFNKRFFEDYLSKNKT

SEQ ID NO: 4942 - protein, 266 aa, Bacillus sp.
MIKEDKMSISLCIIVKNEERSLERCLRSVLNVVDEFIIVDTGSTDQTLDIVDRLSGQPEFGSKIKLFHYEWCGDFASARNYAVEHARGDFILQLDADEYLHPDDVELIKPSLKKMCKDIRKVYFFYMKIINETIDGRLQTTPESILRLWSNRSKIRYSRKCHESIDDSLKLVSNKQGFNINFRIMHDGYDTTLPSFVDKRKRNIALLNEMIAEDPYDQLSLYYFARDYSYFDKSKSINLLKRIEPLLDSPHKENARALIKEYSKQL

SEQ ID NO: 4943 - protein, 299 aa, Pseudarcicella hirudinis
MQDLSVIILTLNEEKHIERCLKSLFAITDKIFIVDSGSTDRTVEIAEALGAKVAKNTWVNYAQQFNFGIENNPFKTKWLMRMDCDEYILPELASEINEELSGISEDVSGLYISRRVIFMGKWMKRGGFYPMWLLRIWRSNQGICEESWMDEHIKLFQGKTIKLKNDLVDHNLNNLTWWTQKHNLYAIREVIDLLNIRYNFRNFETVEPKLFGTQEQRTRFLKVKYASLPLFTRPVIYFLYRYFIKLGFLDGVQGLMWIFLQGLWYRFLVDAKIYEVFHRVGKDKEAIREFFKTEYGKNI

SEQ ID NO: 4944 - protein, 299 aa, Unknown
  Description of Unknown: Flavobacteriaceae bacterium CG_4_10_14_0_8_um_filter_31_99 sequence
MEKTTITAIILTFNEEQHIARCISSLKNSVDEILVIDSYSNDKTVELAESLGAKVYQNPFVNQAIQFNWALDNCILKSDWILRIDADEYLDIKLNYNLREELKRYSIDVNGIFIKRKIIFMNQPLLHGDWYPKWNLRIFRNGFGRSEVRWMDEHIVISRGISKQLEINFIDENLNSLTWWIEKHNKYSNREAIDYFLQVDKNKSQTVKLNLFGNDTERKRWFKEKYNTMPLFIRPFFIFSYRYFYKLGFLDGKSGFVWHILQGFWYRFLVDAKIFELKLKFNNDHDKIVAYIKQKFDIN

SEQ ID NO: 4945 - protein, 630 aa, Paenibacillus sp.
MRNLMMKSPSISLCMIVKNEERCLERCLNSVQNIVSEIIIVDTGSTDRTIEIAKQFTDKIYSFEWINDFSAARNFALDHATGEYILHLDADEYLYEGTECLQEELDKSYYFLRIRNELGQGRAQTHLFVRLFRNQPSMRYEGKLHEQINLDTNGHLPFGFMDCVIYHDGYMDEVVKDKNKSKRNMDIIKAAIKTSPTSFNYYNLGLQYVHEKNYKEAVEAFKKSFSLANNQTFTPRMLILLFNSLLELKQYKQAMDVAADSTLLYPDSPNMEYGLGNVYQKMGFAEDAKLCFERCLEIGEEAGVQEYNHEEGSGSFLANSKLCEVFLEEGDREKAQQYFLAAVKEAPDLLYLVKLFADLNPNVNGKDFLASMLKIFPFSNPIKIRQYMSVLYDRRHIATYELIKCYHVNIEPEIQTWVDMVEHNYDLAAKRWEQITELKPFAKRDLLMLSFIRNEFLIARFKGDFGLREKEWKWWKKFIEQGIDDGTELSGDSEELWTWLCGDIVQLQEFEWLEKLVNNTNNAKLRYLIAKELSNRGFVELALEIIVESKHQKDNKLIYTLVSHILMQLGQFDDAIYYAEQVYKIENSYNNAYVLLSLLQKAGSLDRGESLLNNLKTNGIKSRWLDGLVS

SEQ ID NO: 4946 - protein, 594 aa, Clostridium sp.
MKNSISLCMIVKDEEEYLPRCLKSIKDIVDEIIIVDTGSKDKTVEIAKSFGANVYYFKWTNNFSEARNESLKYATKDWILILDADDEVYSEDQKNLKSLLDSSLDENIIYYFQTINYCGDVIDDNFTTMNLNPRLFKNNKGIHYEGEVHNQLSYPENIQHAICDFIKIHHYGYMNKVIKNKDKKNRTITLLKNQLEKNPDEPFANFNLGTEYAGLNDYKNALKHFYKSYEKFDPQNGYSFLLILRIVIANYQLKDFDNALKFINIGIEYYPDFTDLYFFKSLIFKDLDMPILQIKALKKCVELGEAPPQLRCYYGTGSFKAYYELGNAYFNLKDYDTAYNYYIETMKSKNDFITPLYNIAHILKIRNTPLEDFKKIMEDFLPDSLNSKLILINLFFNEDYYDTALEYIEKYEQYSTITENLNFIKAKCLLMTGKFNECICLNNVEENNSYYVPLSMYKVISNILINNYNGALSILNNFKEDNLSNHDKKHFKVYSQLLKLFTKEALLDISNEENESEYLNIILEILEILLVNNKFNEFKIAVNLLNLINNKFILLAFGKLYYKYGYIEHSKNELIRSIKEFEVYDKESLKILMN

SEQ ID NO: 4947 - protein, 395 aa, Risungbinella massiliensis
MIVKDEEETLASCLESVKYIVDEIILVDTGSTDRTKEIAQNYGANIYDFPWTDDFSAARNYGIQKAQGDWILWLDADEKVEVKDAAMLRDILYCSNYDLLAVNLINFIGEKEDKSHFYQIAHHRLFRNHMGFCFENRIHETLNITNVLSETDQKKRVGIVPIRVYHTGYLQTSVEKKGKFERNLTLLKRELGEKEHSPWIHYHIASEYYRVQEYAKAFQHVNQSIRDFLTAKSTPPALLYKLKYSIMLSLGSIEGAWPSIRLAVSLYPDYVDLHFYMGYILLARGEYKEALASFQKCLEIGEGNLEYLCLYGLGSYQAMYYCGLCHQKLGEPSEAIKCFLQTVVVSPNFQDARKALRICLKNQGFTLDSFLDQYYSNEDAQKYQKLISDTDKNKS

SEQ ID NO: 4948 - protein, 352 aa, Anaerotruncus sp.
MIVKNEERVLARCLNSALRAVDEIITVDTGSTDKTKEIAARYSDKVFDFEWCDDFSAARNFAFSKAERDYILWLDADDVLLPPDLEKLIDLKQSAEKSVNAFYMRYNTAFDELGNPTFWYYRERLIKNNAGLKWRGRVHEAIACPQPVEYCDIAVTHKSVKTEYSNRNLLIYEKQLALGEPLSPRDEFYYGRELYYNKQYEKAASVLEKFLQSGRGWLENNIEACRVCAHSKKALGDFGGALSALLGAFFYAPARAEICCDIGNLFLEQRQYDKALFWFRSALSLNENAEKGGFVNTDSHGFLPAIGLCVCYDALGDYESAEKYNEIAGGYRPASSAYLHNKKYFEQKAGNR

SEQ ID NO: 4949 - protein, 364 aa, Solibacillus kalamii
MHTVTLCMIVKNEEEVLYQCLNSVKEICDEMIIVDTGSTDKTKEIARQFTEKVIDFKWIDDFSAARNFTFGHATMDYILWLDADDILLIEDLKKFKILKTNLDSAFDAYSMIYNIAFDEYGNPTFSYRRNRLVKRVKNFKWVGPVHEYLDVHGTIFPTDIAITHRKTDKKNQSIQSDRNLKIYEKRLEKGEEFTPRDLFYYANELKDHAQFLKSISFYEKFLATKKGWIEDEIRACINMAMCYRNLGNAEKEKESLVMSFIYDLPRPEVTCRLGDLYTNKRNFKKAITWYRLALEIEEDDHQGFRQIAYSTWYPHLQLCYCFWEIGDVELSLKHHEKAKIYRPNDSNVKKNEEFFRTYFKNRSE

SEQ ID NO: 4950 - protein, 362 aa, Hungatella hathewayi
MATVSLCMIVRNEEDVLGRCLESVKDIVDEIIIVDTGSTDRTKEIAGRFTNTVYDFPWIDDFSAARNFSFSKATMDYQMWLDADDVIEEEDRKKFQQMKEELDGSTDVVMMPYQVAFDQKGNPTMTYYRERLLKRSRRFLWQGAVHEVITPAGTILYGKAAVCHRKLHPSDPDRNLKIYETMKEHGGITDPRHQFYYARELFYHGRYEEAAAMFLTFLEEGRGWIENNISACLDLSHCYARMGKREEALQALFRSFRYDLPRPELCCEAGKWFMEQGGSDKGNLKQAVYWYLRAKDQKTNEESGAFVNPDCSDFIPDIQLCVCYDRLGEREKALEYHEKSKKKKPDHPAVLFNEAYFAGKGM

SEQ ID NO: 4951 - protein, 361 aa, Unknown
  Description of Unknown: Lachnospiraceae bacterium 28-4 sequence
MIPISICIIAKNEEQYIGECLRRLSLYDWEIVVVDTGSTDHTVEIARTYTPNVYHFNWIDDFSAARNYSIAQASNDYILVVDCDEYLENDDMAAHTISSLPQMISPYQIGILDRFSPSAELSTSGESTSVIHERIARFFNRKFTHYKGTIHEQLVSKTGKASEFIPIPLAFYHIGYQSMDIKKAKASRNISMLEAELEKKRDDPYILFQLGQSYFGLSNYEQALPYFEQALSMEVNEQEEYVQTMVESYGYCLIYLKLFKKALELEGVYSVFSRRADFVFLMGLVYLNNAMFEDAVREFLKAATIADYAAVGVNSYLAYYNAGVIHECTGNIPEAAMLYKKCGDFAPALQRLTQLTDPRCD

SEQ ID NO: 4952 - protein, 361 aa, Sporosarcina psychrophila
MITISLCMIVKNEEEVIGRCLDSVCELVDEINIVDTGSDDRTKEIVNKYTNRIFDFQWIDDFSAARNFSFQQATMDYVLWLDADDVFTAEDQEKFKLLKQSLQPTIDAVSMNYHLSFDHEGNVTSLLRRYRLVKKVNEFKWIGAVHEFLSVSGNLFDSDVAVTHSPLSHDSERNITIYKKLLASGKTLSPRDTFYYANELMDHSDFETAVLYYEEFLDSKLGWIEDNIRACFRLADCYHKLNDKNKELSSTLRTLAYDVPRPEACCRLGYYFMEQFKNHEAIHWYSQAFLYENHQQIGFQNTSFSTWLPNLQLCVLYDRLKQYDKAYHHNELARKYKPNNDSIMKNKTYLDEVIKNNQEKI

SEQ ID NO: 4953 - protein, 444 aa, Clostridium celerecrescens
MKPVIRLSQCMIVKDEEKNIRQALNWGKGIVCEQIVVDTGSTDKTVEIAEAMGAKVFHFPWEHDFSAAKNFAIEQAKGNWIAFLDADEYFSDEDVRKILPMLKRVEKNSTHPARPHVIRTLLVNLDDSGNRINTGVQYRIFRNIPKLRYRSRIHEYLDLTDGSQLFSWDAMETLAVFHTGYARAICIEKKKEKRNIFMIRKELEKDPENSMMWSYLGDSLLADEKLEEAEEAFFRATENPDAVMEIDRRNLSFAFWLKTKYIRNSGSEEDFMEVYQKAKKRGCDTPDVDYWAGQWFCRQGSDEKTRLYFEQALQLLDEYKGNDPLDMSGRLTFVYQWLFFFYAKYNRSSEMIRYGVFTLRAEPYEFSVLKEILLLLKREPGEETTASATFGFLSKLYDLSIFKNKIFLIKVSEQAAFPALENKLSLLLSEQEREFVAKSGDIFR

SEQ ID NO: 4954 - protein, 292 aa, Unknown
  Description of Unknown: Nitrospirae bacterium sequence
MWRRLRVEALAAIGGSTRVSTVRCCGVAFEANTRPTVAAIVIAKNEERNIQACLQSLAWADEVLVIDAESTDKTAELARAAGARVIVRPWSGFGAQKNFAMEQAQADWVLIVDADERVSQDLRDEILRVLQYDGSNVTAYRVPRRNYYYGTWIRGAGQYPDRQTRLVRRECGRYNYLPVHEHLEVNGFVEDLRGHLDHYTHPTVVSHEAKIERYSSLAAEERLRRGKTDAAWYHLLFNPIWTFFKVYLLRGGYRDGLPGFLVSGFSAAHVLLKYAKLWERAHVKAPSAVSER

SEQ ID NO: 4955 - protein, 283 aa, Unknown
  Description of Unknown: Candidatus Beckwithbacteria bacterium CG10_big_fil_rev_8_21_14 _0_10_34_10 sequence
MFLTLILLEKDGKRYNKNMKTAVVLAKNEEKSIKTCLLSLKGFEEIIVIDDNSSDKTREIAKKLGVRVYKRKLNNDFSNQRNFGLKKAKGDWIFFLDADEKIDNKLKREIFKAIRDPQTNSGFSFKRKDTFLGKELKFGETASLRLTRLGKKNSGFWTGKVHEVWKVKGKIGKLYNPIIHQRHIGVSGFIKRINFYSSLRARELYEKGVKTNAFLIIIYPLAKFFLNFFVKLGILDGKQGFIMATLMSAHSFLVRSKLYLLWKNKGVEDPPIPPLKKLYKQYG

SEQ ID NO: 4956 - protein, 305 aa, Spirosoma fluviale
MTDVSVIILTHNEEKHITRCIQSLLPFTHKIFIVDSFSTDRTVEIARSLGAQVVQNVWVNYATQFNFGITNTPFQTGWLMRMDADEYVMPELADEINRRLHSLPASVGGIYVKRRVFFLNRWMRHGGFYPIWLLRLWRRGDGFCEQVWHDEHIKLTKGEPIQFDHDIVDHNLNNLTWWTQKHNHYTILEMINLLNYRYQFDKAETVQPRLFGTQEQRIRFLKEKYASLPLFTRPILYFIYRYFIRLGFLDGKAGFVWCSLQALWYRFLVDAKLMEVNIRVGTDKEAIINYFRTEYGKDLRPARPE

SEQ ID NO: 4957 - protein, 359 aa, Unknown
  Description of Unknown: Anaerobacterium chartisolvens sequence
MITVSLCMIVKNEQDTIARCLESVKDIVDEIIIVDTGSTDKTKDIANAFTSKIYDFEWIDDFSAARNYSFSKAEMDYIMWLDADDVILEEDRIKFIKMKEILPQDVDIVVMQYNTGFDHMGNVIMSFYRERIFKRIRNFKWNDCIHEYICLTGNITCVNICITHKKIHSEAGRNLRIFEKLISQGSELSVRNLFYYARELLYNGKTDDAIVYFNKFLDTEQGWVENKINACDDLAKCYLMKNDRKNALKAMLRSFGYGIPRAEICCQLGYYYMHDNDYKTASFWFELATRLEKPEYSLGFVLHDFWGYIPNIELCVCHFKLGNIKESLKYNNKAAEYKPDDPSVLYNKSFFKSISCNEL

SEQ ID NO: 4958 - protein, 306 aa, Siphonobacter aquaeclarae
MRPNPDLSVILLTHNEERHIERCLKSLLPVTDKIFIVDSGSTDRTVELATALGAVVVSNPWVNYATQFNFGIRNTPFQTEWLMRMDADEYLLPELAGEIREKLGNVSENVSGVYVKRRVMFMDKWIRRGGYYPTWLMRLWRRSKGHCEELWMDEHIKLSDGDTTRFDNDLVDHNLNNLTWWTQKHNLYAIREAIDLLNVRYNFDDGAIVTPTLFGTQEQRKRYLKIRYATLPLFTRPFLYFVMRYFFQGGFLDGTKGLVWHFLQGFWYRFLVDAKIYEVYHRAGRKKEDIAAFFWTEYGKDLTGKR

SEQ ID NO: 4959 - protein, 316 aa, Clostridium sp.
MVSFSLCMIVKDEEAVLSRCLDSLHDIMDEIIIVDTGSTDKTKEIARKYTDKIFDYKWCNDFADARNFAASKATGDYIYTADADEYLDAENRDKLCQLKKIMLPEIEIVQMLYHTPAGLSTVYNFEEEYRPKLYKRLRTFTWIDQIHETLRIDPVVYDSDIVIEHRPLTNHAPRDFAAFERIAVDGKRLSKKLHHMYAMELFRSGSDDDFLKSENLFKRTLEEDGRTIDEVKEAFCVLARCYRVKGDIVSFMECALKDAATSSCAEICCELGMYYESVGNISEAVMWYHNALTETESILDIRSSQEIPKEALERLE

SEQ ID NO: 4960 - protein, 357 aa, Clostridium bornimense
MNTISLCLIAKNEEEVIGRCIESVIDIIDEIIVVDTGSTDNTIEIAEKYGAKVYNFTWIDDFAAARNYSFSKASKEYIFWLDADDILIPEDKEKLKELKDSLDSTVDAVSMNYVLAVDENNNPVSSLRRNRVVKRKNNFSWIGKVHEYLEVYGNVISSDISILHQKNKPYTDRNLRIYEGMLKNNDEFSPREQFYYANELFDHGRYDEALDMYRKFVDGKKGWVEDVKSALSKIADCYNYKEDKDMEMKALLEAFEYDMPRPDFCCRIAYRFIEQNKYREAIFWYKAAIDTKPDEDNMALINHAYYTWIPYIQLCVCYANLGDFNTSNYYNEKAAEYIPDHPSVLQNREYLKDKINK

SEQ ID NO: 4961 - protein, 370 aa, Paenibacillus lautus
MISISLCMIVKNEEDSIDRCLKSVQDIVDEIMIVDTGSTDKTKEIALQYTDQIFDFEWMDDFAAARNYAFRLATKDYIFWMDADDVLKDEDRKKFIHLKGILDPSVDFVTMDYHLAFDEFGNVTLSVSRNRLVKRENKFQWIGAVHEYLEVWGNILNSDVAVTHNRLHHDSDRNLRIYESRLLSDEEFSPRDLYYFANELVDHRMYEQAICYYEKFLDTGKGWVEDNISSCGKLADCYHELGNRERELESSLHSLQYSSPRAEFCCRIGYHFLNHGDIRTAIFWYKLATQRKQTGDNWGFINPVCSTWLPHLQLCVCYDRIGEYRLAYNHNEIARSYRPTDPRVTQNKRYLESVLGMYEGIKVDGGDLHE

SEQ ID NO: 4962 - protein, 303 aa, Unknown
  Description of Unknown: Microgenomates group bacterium GW2011_GWB1_40_9 sequence
MKPTLSIVVSAYNEEKSIGRCLASVKELADEIIVVDNESQDKTVAIAKKFTKKIFSATNQLMLNANKNKGFEKATGDWILNLDADEEVTLDLVKEIVSLIRSNPTSNGFWIKRKNYSFGKWIQHGLWWPDKQIRLFRRGRGQFPCVHIHEYIKVDGSVGELVEPYIHYNYETVHQYLTKIDRTSTSEAITLSELNYELMWYDAIRFPASDFIKIYFAQGGYKDGLHGLVLSLFQAFYSFCTFAKYWEMKKFQARDISLKEVSSELKNRKKEIQYWILTSRLNQSSPIMKIFLRVKRKLISIHA

SEQ ID NO: 4963 - protein, 310 aa, Spirosoma pollinicola
MTDVSVIILTHNEEKHITRCLQSLHPFTNKIFIVDSFSTDKTVEIARSLGATVVQNAWVNYATQYNFGIEHTPFETTWLMRMDADEYVMSDLADEINLRLSGIPATVGGIYVKRRVFFLNRWMRHGGFYPIWLLRLWRRGDGFCEQVWHDEHIKLTKGESIQFSHDIVDHNLNNLTWWTQKHNHYTILEMINLLNYRYKFDQAETVEARFFGTQDQRMRYLKEMYASLPLFTRPVLYFIYRYFVRMGFLDGRAGFAWCFLQALWYRFLVDAKLMEVNIRVGNDRDAIINYFRTEYGKDIRPKQPEQVGQS

SEQ ID NO: 4964 - protein, 356 aa, Bacillus toyonensis
MQKSITISLCMIVKNEEQAISRCLESVKDITDEIIIVDTGSTDKTIELVKKYNAKIYNFKWINDFSAARNFAFSKATKEYILWLDADDIIEHTNREMFLNLKSTLNTEIDAVSMKYNLSFDTEGNSTFSVKRYRLVKKNKNFQWYGFVHEYLEVYGNLIDSNISITHKKEKAFNNRNLNLYQKQLAKGKKFSPRDTYYYANECKDHQLYTVAIEWYTKFLDEKKGWVEDNIQACLKRGECYLKLNNIEKAFYSSLQSFIYDTPRAEICCQLGYIFLEKQEYNKAIYWYETAINISKPTNAPFIQESCYTWLPHLQLCICYFHIKDNQKSIYHNEQAAKFIPNHPSIKHNREYFSKL

SEQ ID NO: 4965 - protein, 273 aa, Unknown
  Description of Unknown: Candidatus Levybacteria bacterium GW2011_GWA2_37_36 sequence
MQTITAVIPAKNEEKNIERCITSVLWCDKVLVISTGTDGTAEIARGLGVNVIEKNKSDKDDFEEVQKNLNLAIKTCSTDWIFRVDADEVVTPELQEEIKDIIGQSQIKSDKIGKETDSIRLNPVSSDYIVAYGIPRQQNFLGTFLKGGDWAYDRLVRLFRPKFCRYDPIVKVHEQFKVNGKIGYLKSSLLHYSHPDKKTLFKKFDSYTTLEARELKETKLSAFFKLIFIPPYIFLRWMIYHHGYRDGLVGIQAGSMRAYYDFLLYSKYLKSNK

SEQ ID NO: 4966 - protein, 361 aa, Desulfosporosinus acididurans
MNNSNITISLCMIVRDEEQTISRCLDSVTGIPDEIIIVDTGSIDQTKEIAQKYTNFVFDFEWIDDFAEARNFAFSKANMDYILWLDADDIISGSDRDKFLILKKSLDPLIDVVNMPYILDLDEYETVAMSLRRNRLVKRSKNFQWFGAVHEFLKIDGYVMNSDVCVTHLGIRDDPNRNLRIFEKQMIKGNPLSGRDLFYIGNELLSHRLYHRAVEIYQKALQQEDLWVENKLSACQRLAGIYHHLEEKDNELQFLFKSFEYDVPRAEFCCHLGNYFLENGQYEKSIFWYNLATKLERPGENWGPAEHACWTWLPHIQLCLCYDRLGNYSLAYKHNEIARGYRPQDPRILYNKKYFEDILSP

SEQ ID NO: 4967 - protein, 307 aa, Larkinella sp.
MSSISVIILTHNEEKHIGRCIASLLPFTDQIFIVDSFSTDQTVQIARSMGAVVAQNPWVNYATQFNYGIRHTPFQTTWLMRMDADEYVMPELAAEIDTKLTTLPADVSGIYVKRRVMFMNRWMKHGAYYPIWLLRLWRNGQGICEETWMDEHIKLSTGRSIQFEHDLVDHNLNNLTWWTQKHNLYAIREVIDILNIRYNFDQSIRVEPKLFGTQEQRKRYLKLRYASLPLFTRPVVYFLYRYILRLGIIDGRPGLMWHFLQGLWYRFLVDAKLYEVYHRVGTDKGAIIEFFKTEYGKDLLAERPGQH

SEQ ID NO: 4968 - protein, 302 aa, Unknown
  Description of Unknown: Candidatus Microgenomates bacterium sequence
MKKISVVISAFNEEEKITECLESVKWADEIILVDNESTDKTVEIAKNHTSNIISRKNNLMLNVNKNFGFTKASGDWILCLDADERVSSELKNEIKLTIEKDTEVMGYFIPRKNIIFTKWIKHTGWYPDYQSRLFKNGKGKFAEKHVHEMIEIEGKTEYLKENLIHYNFESISQFLHKHINIYAPNEVDNIIAGGYKFDYLDAIRFPIKEFLSRFFAREGYKDGLHGLVLSLFMAFYHFIIFAYLWEKQGFPSVEKNNFLQEMRGEFKKINKDIMFWFSNEQTKMIKNPLIKILHKVRKKLLK

SEQ ID NO: 4969 - protein, 340 aa, Butyrivibrio sp.
MVTVSVCMIVKNEEECLGRCLKSLQGIVDEMIVVDTGSTDKTKEIAKECGAKVYDFKWTGDFSEARNYSFSLATCDYIYAADADEELDEENRQRFLKLKEDIEELDIDIVQMYYCNQLSFRTVYNYDRELRPKLFKRVRHFVWEDPIHEQVSLEPVVCNSDIEIIHRPRENHAGRDLASFRKAVDDGRYLSKRLHNMYARELFMGGTDDDFIKAKEFFEKSACDTNRGVDEIKEASCVLAHVAVLEDDAPALLKYSLKDATTEMSSEMCYELGEYYYGKKDYDEAIIWFFNGAYECESILDIKKSKELPRLALAKCYRALGNEEQAADYEREAAECEKGE

SEQ ID NO: 4970 - protein, 293 aa, Unknown
  Description of Unknown: Acidobacteria bacterium sequence
MTISVVIITFNEEANIGRTLESVMPLVRDGRGEIIVVDSGSTDRTVKIANSFGAKVFVEAWKGYAAQKNSAIDKASGDWVLSLDADEEVETELINEIGEHALIRSANPDIRSREWCLTMENAQRGFDTRLQNLKGKPAGYWIPRKNFFLGRWMKHGGFWPDPKLRLFRRGYGRFKERAVHETVKVEGPTAKFKHALIHHSYPSLADYIGHMNRYSSLGAEMAGAQGHRGFSVVNIVLRPVATFANNYFFRFGFLDGHEGLLLHLYHAAYVSWKYAKAWELAKADSSRTEVRSE

SEQ ID NO: 4971 - protein, 254 aa, Unknown
  Description of Unknown: Bacteroidetes bacterium sequence
MIRLSVIIISLNEERNIRRCLLSVKALADEILILDSFSTDKTKKIAESYGATVIQKQFEGYVAARRDVESRAANDYILAIDADESLSEELHKSIVELKKNWIKDGYYVARKTNYCGRWINHSGWYPDRKLRLYKRGSGEWTGKYVHEKYMLFPDKTTGILKGDMLHYSYYKEKEHWARADKYANLAAQELFENGKTTSVFQTYFKAVVKFMRDYVKNLGFLDGKKGYTICKITAWGTYKKYAKLLELNKTRKNS

SEQ ID NO: 4972 - protein, 591 aa, Unknown
  Description of Unknown: Candidatus Brocadia sp. sequence
MNNTRQQTMTDKGRQAVLNNNRPTLSACMIVKNEEKFLSQCLASIKGAVDEIIIVDTGSTDKTVDIAHSFSANVYHHPWNNSFSEARNHSLEYARGDWILQIDADETLEQTDIPLLHTLINNDSYNVIYVAIYNELPGGCAKHYFQRIFRRGKAHFEGIVHNQLIFEGKALQSEIRFYHYGYNLSEQEMQKKYTRTGDLLRQQLAGNPGNLFIMANLVRNYRNEYAFDKVIDFAENGLKISASQTDLVSKNQRQRMSIDLAHAFINKNLIDKAELVCKKALIENPDSFDILLVMGEVFMKKGVFHDALPCFKKYLILKEKENKEPTFFLLSSDFYQYEHTVYNHIGECYKHLGLIHEAIVAYKKAIELNSRDPLNYANLINLYISQDRLIDAKDLTFAAIKSGIANHLIYHLLGKIYAAEGKMNDAIDACKQSLRMDNTNIPTHAYLINLLIQINHLDEASKILKDMLSLYPEEFTFLCLLERITYKQGNKESLVSFVRNILQSNPSDHNIYLHLGSLCMEVEEYADAIEAFERYLRTSSKVDASVIADIAVCYAKQGMREPALFGFQTALKLDPNCKCALQNLAALKANA

SEQ ID NO: 4973 - protein, 362 aa, Lysinibacillus endophyticus
MLTISLCMIVKNEEEVLEQCLSSVKDICDEIIIVDTGSTDKTKEIAYQFTDKVFDFEWIDDFSAARNFAFSKASMDYIFWMDADDIVSEGDQEKFKKLKAELPDNADAVSMLYHIAFDEYQNPTFSFRRNRLVRREKNFKWHGAVHEYLEVAGNIVASDVAITHRKKDKRKGQVPSDRNLKIYEKRLERGDTFTPRDLFYYSNELKDHGQYEKAIEYYNKFLDTKKGWVEDQIRACINMATCYRMLGNTENEIEALIKSIMYDVPRPEVSCRMGDLYKERRLYEKAIIWYQLACQVNPEDIPGFRQESYSTWYPYLQLCVCHWHIGNHELAVEYNKKAKEYRPNDPSVLKNEEFFKEYFAEK

SEQ ID NO: 4974 - protein, 289 aa, Bacteroides neonati
MIIKTDLTVLVLTMNEEKNIINCIDSVKELARRIVVIDSGSTDNTISLAESLGAEVFHHEFENYASQFNWGLDNTNISTKWILRLDADEVITHDLAKEMAEEMEKHKDDEVNGMQLKLKQCFLGKWMKYGGTYPFIKLMLFKNGIGRIENRKMDEHTILSSGRSILLKNDVLHYDFRDLTYYIHKHNWYAIREAQDYLENKMGNSVDALEEGSLKGHRKQKVLYYKLPKFFRAFAIFIYRYIFQLGFLDGKEGFIYHVLEDFWYRFLVDAKIYEYQQTGNKIENTGALK

SEQ ID NO: 4975 - protein, 307 aa, Siphonobacter sp.
MTPSYPDLAVILLTFNEEKHIERCLKSLLPVTDKIFIVDSGSTDRTVELAQALGARVAQNPWVNYATQFNFGIQNCPFQTKWLMRMDSDEYILPELAREIAQTLPNVASEVSGFYIKRRVMFMDQWIRYGGYYPTWLLRIWRSGKGHCEELWMDEHIKISEGEMLRMNHDLVDHNLNNLTWWTQKHNLYAIREAIDLLNVKYDFGDVEIVTPRFFGTQEQRKRYLKIKYASLPLFTRPFLYFLFRYFIKMGFLDGKRGLIWHFLQGFWYRFLVDAKIFEVYHRAGISKEAIARFFLTEYGKDVLEKR

SEQ ID NO: 4976 - protein, 355 aa, Unknown
  Description of Unknown: bacterium 1xD42-87 sequence
MKGEILFPLSVCIIAKNEEKHIGECLKRLSAYGFEIVLTDTGSTDRTLAIAKKYTDRIYHYDWCDDFSAARNFCMQKASHYWILSLDCDEYIENLDPSALRRCMEEYPNHTGRILIRSRFLRGDEISYEQTRVSRLFDRRYFLFAGAVHEQLERRDGGVKSVYDAPVTILHVGYDETEADMQEKSRRNISLLQAQLDMEGPDPYLYFQLGQSYRRLGDAEKAFESFDAGLSMEVDPVLDYVKTMVESYGYTLLDLKRNQEALGLTELYDVFSVRADFVFLMGLIYMNNGLFDAAIAEFKKAATMEDFSVDGVNSYMAYYNIGVIYECTGRLEKAREYYKKCGGYAPAEKRLKLLS

SEQ ID NO: 4977 - protein, 253 aa, Unknown
  Description of Unknown: Bacteroidetes bacterium CG_4_8_14_3_um_filter_31_14 sequence
MISLSVVIITFNEEKNILRCINSVKNFADEIVVVDSYSTDSTKDICLQHSVKFIQHKFEGYIEQKNFAILQAISNYILAIDADEALSPELEKSIIEVKNNWNFDGYYFNRITNYCGKWIKHCGWYPDKKLRLFVRSKGMWAGNNPHDRFEMHEGTTTSFLKGDLLHYSYYSIFQHIEQSIKFSEIAAKADYNNGRKVSFIGLIFKPSWKFIRNYFLKVGFLDGYYGFVICKISANASFLKYLKIRELKKKSFK

SEQ ID NO: 4978 - protein, 312 aa, Runella sp.
MKSDISVIILTHNEEKHIERCLRSLLVFTDKIFIVDSGSTDRTVAIAESLGAKVVHNPWITYATQFNFGIENTPFQTKWLMRMDADEYVMPELANEINQTLAGLAPTITGVYVKRRVMFMNQWIRRGGYYPIWLLRLWHRDKGICEELWMDEHIKLSEGETVQFKNDIVDHNLNNLTWWTQKHNNYAIREVIDLLDIKYNFAEAERVIPKLFGTQEQRKRYLKQKYASLPLFTRPFAYFLYRYFIKFGFLDGKKGLVWHFLQGLWYRFLVDAKLFEVEFRVGKDKQAIIEFFRNEYGKDLSSVQNRPVSVRQ

SEQ ID NO: 4979 - protein, 1065 aa, Bacillus massiliogabonensis
MKTSIIILTHNQLDMTIRCLESIRSNTSEEIELIVIDNASTDGTIHYLKEQKDIKAIFNSENAGFPRGCNQGVNHASGENILFLNNDTVVTPNWLENMLRVLYSNEKIGMVGPVSNFCAYPQQVPVTYNGIHEIEEFAQKREQAYKGQSLPYPRLVGFCLLIKKIVLDEIGLFDERFGLGNFEDDDLCLRAKMKGFELMIALDSFVHHEGHATFSQTGIDLEGLLNENWNKAREKWGNDIYSLLLDQEPPMTISLCMIVKNEEGSISQCLNCIKDIVDEIIIVDTGSTDRTKELVRDYTDLIYDFEWIDHFSEARNFSFSKATKDYILWLDADDILLEEDQKKLLNIKNTLNPSIDSVTMLYHLGVDSSGNPSLSYRRNRLVKRSNNFQWHGAVHEFLEVRGHITNSDVVVIHTGTHQDSTRNLRIYEKRIENGEAFTPRDLYYYANELLDHKQYNKAIDYYLTFLNSNKGWVEDNISACGKLADIYYHLGDETKEREYVFKSFEYDTPRAEFCCRMGFQFLKKNEYQKAIVWYKIAAELERPKDNWGFFNESCWTWLPHLQLCICYYHLGDYEKAYFHNEKARTFNPYDEKILHNKQFFDDLLKKHPIPSIELENEDSGKRISFISCVKDPLKYQKSQAFIHSLTIPEGFEIQFKSLENMNSIASGYQQMMQNSDAKYKVYLHEDVFIINNNFLVDILSIFKRHPLLGMIGVVGAKTMPKSCIWWESLDTYGKVYDSHTGQMELLSFSEVTSEYESVQAIDGLIMITQYDLPWREDIINGWHFYDTCHSFEFLKAGYDIGIPKQLSPWCIHDCGIRNASTGYEDSRKEFIHHYSNCLNTELGNKWIFHKPVFEYEKDHMYITQESAWSGHRHFAYDLVRFLKPATIVELGTQWGASYFSFLQAIKDEGMNTMCYAVDTWEGDPHAGYYDNTVYEAVSKITDQLYAKNSSLIRCRFDEALNEFEDESIDLLHIDGYHTYEAVSHDFKTWLPKLAKQGVILFHDIAVQRDDFGVHLFWEELKSQYSFIEFKHSYGLGMLFPKGYRLDFQHVFSIVNRLKDSYEHSS

SEQ ID NO: 4980 - protein, 289 aa, Unknown
  Description of Unknown: Chitinophagaceae bacterium K23C18032701 sequence
MSLVTVIILTYNEELHIERCIRNLQKISSHIVLIDSCSTDKTCAIATSLGAKVYENPWPGSHSIQFNWALENCTFDTEWLMRMDADEYLTDELIDEINRTLPATPSETGGFIIKRRVIFLGKWIKRGGFYPHRLLRVWRNGYGKLEERWMDEHVVLSKGNIAHLQYDMVDHNLNNLTWWTQKQNNYANREVLDLVDIQNRSTAAANVAASLTGEQFSRKRWLKEKAYSRIPLFVRPLCYFFFRYILLLGFLDGKAGLVFHFLQGFWYRFLVDAKMLELRMAGLKRSEKK

SEQ ID NO: 4981 - protein, 876 aa, Thermincola potens
MSSPRLSLCMIVKNEEEFLPRCLASVAEIVDEMIIVDTGSTDRTKEIASSFGAKVFDYEWQGDFAAARNFSLSKATGDWILIMDGDDELAPEAKGKIRDLLHVGQEIQGYRMPVISFLGESPGGPCSTVHHVRIFRNLPKYRYTGALHEQLPMEIYARCPETPYKIYHYGYLSRIVEKKDKTNRNLVLAEQELAAEPQSLFKQYNLGAELVRAGNFTRGAKLLKAVTDEVTGWEAYAPSAFQKLALCYVEQKKLNAALSTAKRGWQKCPWDLSLLYLQGVILMAKGKTLAAVKIFEECLALNDRVRSIVYQGAGDSLALGSLSSAFVQLGRPWAAFECAAEAYRINSNYSFALQAVIAYLWQVADRNEARYYLTERRIMPEHIADRLLASWPDNQVGKNIIVPFSKKPLISLCLITKNEADNLRNHLGRLTAIADEIIVVDTGSTDDTVRVAEKFGATVTTMTWNDNFSLARNKALSLARGKWILSIDADIDISLSDCGKIRRIAETGKADAYRFTVLNHLGGNAPAMRDKKILLFRNRKNFKYTGAVYEQLLLKKNGKKPVRVEDSDVQVHHHGFNRDLAGFQAKRERNIKILQKEINKGAGPYLAYCLASEYMQTNRYREALAELTKTEKLCSTKEPYYPDIIRKIALCLFKLKDYSGAKRVIKAGLKKLGSALQDQYSLLSSIYLIQKQYNKAEKILQKLFQTPSNAATFNYAWELNREQSYVDLAQLYLEKDKWAEAIVLCLQVLYRTPDFVPAANLLSKILKQRSRPKNVEIFLERYFNLKSNEGLVSLAAQFIALGWPGLSLKLLNRIDPAWADREPTVLKLKLKAYTSMLKNVLTRARESYPGDQNLRRAWSMWERWQKTNTEWFNNSV

SEQ ID NO: 4982 - protein, 359 aa, Unknown
  Description of Unknown: Clostridiales bacterium sequence
MATVSLCMIVKNEERVLARCLESVRECMDEIIIVDTGSSDATKEIAARYTDKIYDFEWIDDFAAARNFSFSKASMDFAMWLDADDVFLEADKNAFIELKNSIPDNVDVVMLRYHTAFDEEGKPVFSYYRERLIRKGTVSFWKGRVHEVIVHTGRVMYSEVAVTHRSVKTGYNDRNLRIYEKQEKAGEPFSPRDWFYYGRELYYHKHYEKAIQILQDFLSSEKGWAENKIEACKILSYCYQETGDSLSALGALTVSFRYDVPRAEICCEIGNYFMRLQNFRVAAFWFELALRAPREDRSGAFVAEDSHGYLPCIQLCVCYDRLGDYKKAEEYNQLAGTYRPSSPAYLQNLKYFESRGLHT

SEQ ID NO: 4983 - protein, 277 aa, Unknown
  Description of Unknown: Carnobacterium sp. 1290_CSPC sequence
MVSDITVIILTKNEEKNIEDCLKSLKNFAKRIVIVDSGSTDKTIEIANKYNVDVYFHDFENYAKQFNWGIDNTNISTHWTMRLDADERLTPELCLELENLMNINKNTTINGITMEAWLYFMGKKIKYGGPKKRKLMVFKTGIGRIEDRNMDEHTILKKGDSIAAKEKFLHYDFKNLTFFIDKLNWYASREVLDYFDYINQDLDENLKDKAILSTRKKKFGFYYKFPMFIRSWLLFIYFYIFRLGFLDGKEGFIYHYLYQRWYRMLVDAKIYEKIQKK

SEQ ID NO: 4984 - protein, 310 aa, Pseudomonas sp.
MTTEFFAVDVCVIILTFNESRHIARAIDSIRPFAKEIIVVDSYSDDGTVELAKALGATVLQNKFINQAKQFQWAMDNAPINSKWIMRLDADEVVESDLVAEIKAKLPALSERVVGVNLKRKHIFMNKWVRYGGRYPLLMLRLWRVGYGRVEDRWMDEHVVVLGGEITTFEGGFADHNLNNLTYFIDKHNKYAVREAIEVISQRLNLLIQDKALNKNSASFQAAFKRFIKVNIYNRIPFTVGALLYFLWRYFCQLGFLDGRSGLVYHFLQGFWYRFLVGAKVMELELEIANLTDKQEILTELSRLTGHKLN

SEQ ID NO: 4985 - protein, 379 aa, Bacillus toyonensis
MITISLCMIVKNEEKSLEQCLQSIEGIPDEIIIVDTGSTDKTKELAIKWTPHVLDFEWKDDFSAARNFAFQQATKEYIFWLDADDILIVEDREKLLELKRNLDKSIDAVSMIYHALLDKHDNVITSTNRLRLLKRKKNFKWVGMVHEDVSTFSNYNCYNSDIVITHTKKIGSSTRNLSIYEKAVKEGKKFTSQDLFHYARELQINKRYEEAIKYHELFLAGEDIGTELRLFTYHNLACCYFQIGDSEKELELTVESFKYDTPQPVFCCRMGENFIKQKQFKQAIFWYLLAIENGKQNQNHHIEQFIYQTWLPHKQLGLCYYKIGDYRSSYKHNKEVLKYIPDDNETLNNVRVLKEMLYEQGVVLPDSDEWDVNYSQESI

SEQ ID NO: 4986 - protein, 314 aa, Siphonobacter sp.
MTPTPSPLSPTVPDLTVILLTFNEEKHIERCLKSLLLVTDKIFIVDSGSTDRTVALATSLGARVIQNPWVNYANQFNFGIQHCPYQTQWLMRMDADEYILPELAQEIRQTLPTLPASVSGLYIKRRVMFMDQWIRYGGYYPTWLLRIWRSGKGHCEELWMDEHIKLSEGETARMDHDLVDHNLNNLTWWTQKHNLYAIREAIDLLNVKYDFGNVEIVTPKLFGTQEQRKRYLKIKYASLPLFTRPFLYFLFRYFFKMGFLDGKRGIVWHFLQGFWYRFLVDAKIFEVYHRAGTSKEGIAQFFLTEYGKDVLGKR

SEQ ID NO: 4987 - protein, 312 aa, Unknown
  Description of Unknown: Candidatus Shapirobacteria bacterium CG10_big_fil_rev_8_21_14_0 _10_38_14 sequence
MKKLSVILATFNEEKNIKDCLESVHQLADEIIIVDGSSTDKTVEIASSIGRSASGRKKPEIKILIKNNPPMFHLNKQLAIEKAIGDWILYLDADERVSPKLRQEINQKINAKTKFNGFWIPRKNIIFGKWIRHTGWYPDYQLRLFKNGQAFLPCQSVHEQPKLTGEADYLENFLIHYNYRTISQFVTKLNYLYTENDKKVFLAEGKKISWPDALRWPTAEFLKRFFKQEGYKDGLHGLVLSLLQSFSALVTFAKIWENQEFKKIEPENFLVKIEKEFGPIIKEFKYWFLTSRIKQTKSFFKKNFYRLVRKSP

SEQ ID NO: 4988 - protein, 302 aa, Flectobacillus sp.
MQQDISVIILTFNEEKHIARCIKSILPFTHKIFIVDSGSTDKTVEIAERLGAIVQYNPWVNYAQQFNYGIENNPHKTKWLMRMDSDEYIMPELSEEISNKLAGLDDQISGIYVKRRVMFFNKWIRHGAYYPIWLLRIWRNGRGVCEETWMDEHIKITEGITQNFSHDIVDHNLNNLTWWTQKHNLYAIREVIDLLNMKYDFRDFESVEPKLLGSQEQRKRYLKMKYASLPLFTRPFMYFIYRYFFRLGFLDGTKGLVWHFLQGFWYRFLVDAKIYEVYQRVGKDKNAIVDFFQKEYNKNLRS

SEQ ID NO: 4989 - protein, 356 aa, Bacillus jeotgali
MKTLALIMIVKNEQKKIKRCIDSVKDFVSEIIIVDTGSTDNTRDIALEKGANVFEYEWNHNFSNARNFSISKSTCDWNLVLDADEYILSGHHLLNDFINKSDNEIGRINILSKYLVNEQEQIESSYVSRVFPNNGIFFTGRVHEQLDTDLPRVNIPVEVSHDGYYQTDKTERNLPLLLDELSVSPNDDYILYQIGKQYYLKQEYIKANSYFDLSYKKISNNVNYKNKMVIDYIYSLIKSGNFELGLQIIEEEKNNLLFSTDFHFICGVFYMELVFSNVNKYINFFPYIEREYLTCLNIDKNKKQEMVMGTGSFLALYNLGTLYESTGNISKAIDCYKKSWEYMYQPARKRIEALRN

SEQ ID NO: 4990 - protein, 348 aa, Paenibacillus sp.
MATISLCLIVKNEEQNLDHCLSSIEGIPDEIIIVDTGSTDRTKEIAAKWTQHIYDFEWIDDFSAARNESFKYATKDYILWLDADDILTPEDKVKLEHLKNTLTEEVDAVSMNYEIPQDNSRKFISNTTRLRLLKRTKGFIWKGIVHEDITTEDSYHLIKSDITVTHTKTGSAPDATPSRRNLDIYERHLARGYSFNVSDMLNYARECHSHKQFKQAIHYYELCKDHPEIPLENRVFILHKLATCYVYNNQPEKELELTLEALSMDVPYPAFSCRMGEHFLKTGNLEAAIFWYTSAYSSPPGERYAWSAIDNVYHTWLPHQQLSLCYQALGDMSQAKHHQQWAEFHRKG

SEQ ID NO: 4991 - protein, 260 aa, Grimontia hollisae
MSQAQRATISAIIITKNEEHILPECLASLDWVDEIIVVDSGSTDNTVAIAEAAGAKVYVNAEWPGFGKQKQLAQRYATKDWIIAIDADEVVSPALKQSLLKLLENPPAETLVEVNELTWVFGRFLRHSGWYYSHVRVYPREYTQYDDALVHEKIIRPEGAKTLVLDGDLLHYSYRDLNHYLVKSAHYAKAWADARQARGKKSSISQGLLHALGCFLKMYVLKRGFLDGKQGFLIAVLSAHSTFVKYADLWIRANDSRAVK

SEQ ID NO: 4992 - protein, 256 aa, Unknown
  Description of Unknown: Candidatus Curtissbacteria bacterium GW2011_GWB1_40_28 sequence
MKKIKISAALAIFNEEKNIVDCIESLKGFANEIVVVDGSSKDRTSELAKKLRAKVIKTTNKPMFHINKNLAIDNCKGDWIFLIDADERVSKELAIEIKEITSKNPKENGFWINRANWFLGGYLTKGGAYPDSVIRLFRRGKGRLPEVSVHEQVKIDGGIGHLKNDIQHFADPTFTRYLYRADRYTDQTAQYLTKINSGRGPWPVFYNMILKPILTFFDIYFRHRGYVDGFRGFIWALFSAAHHFYAYVKYWETTKK

SEQ ID NO: 4993 - protein, 319 aa, Agathobacter ruminis
MMTFSLCMIVKNEEAVLARCLDSIQDLMDEIIIVDTGSTDRTKEIAAQYTDKIYDFAWVDDFSAARNFAFSKATCDYIYSADADEVLDIENHQRLAMLKQYLLPEIEIVQMHYLTRNEYNTTQNYMDEYRPKLYKRLRTFTWIHPVHEVVRLDPVVFDSDIEIIHLPQSMHNKRDFHIFKNTFEQQGALSPEVFNMYAKELFISGADWDFTEALTIAKSACDDPATPEEMVQEAQCILAHAYLVENKIPEFFDLAFRTLHDFPCSEICFEIGEYFRLRGDCEEAGNWYKMAIEETEPVIDIRRGGTLAEERLRELHKTH

SEQ ID NO: 4994 - protein, 247 aa, Unknown
  Description of Unknown: Candidatus Roizmanbacteria bacterium GW2011_GWA2_37_7 sequence
MISTVIIAKNEEKHIAACIQSVSFTDEIIVIDNGSSDKTTDIAQHLSARVIDMSDIQDFSKLRTRGIEEAQNNWILFVDADEILSTELQSSIIKEIQNPKYVIYYLKRRDHWWGRVLRYGEIQSAYSKGFIRFIRRGTGQWSGAVHEVYKTSKKAGHLSGFIDHYPHVTLHEFVDKINIYSSLRAKELHVYGSSSTILEILFMPFLKFVYTYGVCLGFLDGPSGFVYSFLMSFHSFLVRAKLYMMKS

SEQ ID NO: 4995 - protein, 356 aa, Oceanobacillus jeddahense
MIVKNEEEVLRQCLESIKNICDEIIIVDTGSTDKTKQIAGEYTDKVMDFKWIDDFSAARNFAFKQATSPYILWLDADDVLQEADQKKFKKLKDELDESVDAVSMLYHIAFDEFDNPTFSYRRNRLVKRDRNFKWIGPVHEYLEVYGNIISSDIAVTHCKRDKSDPNTANDRNLKIYEKRLERGEEFSPRDLFYYANELKDHSFYQKAVIYYREFLATRKGWVEDEIRACINMAACYRVLGNPEKEIEALALSISYDVPRPEVSCRIGDLYKGRNLFRKAIIWYRLATEIETDDHQGFQQQSYATWYPHLQLCVCYWQAGEKELAEAHNQKAKYYRPHDSQVKYNERFFKEYKEKNS

SEQ ID NO: 4996 - protein, 348 aa, Bacillus manliponensis
MIVRDEEGTIARCLNSVKEIVDEMIIVDTGSVDRTKEIASEYTPHIYNFEWIDDFAAARNFSFSKATQEYILWLDADDVLPGDSRESLKALKKELDRKVDSVSMLYHLTFDVNGNPSYSSRRNRLVKRECNFKWFGKVHEYLAVYGEILRSDIGITHEKEKEWTNRNLKIYESAVARGEELSPRDVYYYANECVDNQKYEEAIVLYEKFLNDGLGWKEDNINAAGKLGDCYEKLEQWQKAIEACIRSFHYDIPRGEICTQLGSIYMVQEKYKEAIYWYKTATEVPVPTDAPFYNPTNYTWVPFLQLCVCHSRLGQQEKAYYYNELAATYVPDHPAIAYNRNYFKSLFE

SEQ ID NO: 4997 - protein, 363 aa, Lysinibacillus macroides
MISISLCMIVKNEEDVIGRCLASVKDVVDEINIVDTGSTDNTKQIVEQFTDRIFDFEWIQHFAAARNFSFQQATKDYILWLDADDVLLEEDREKLMALKKSLAPDIDAVSMNYHLSFDPEGNVDTLIRRYRLVKKEKQFQWIGAVHEYLEVGGRLFDSDIAVSHLPLTHDHSRNISIYKQLIESGTTLTPRDTFYFANELLDHGQFEDAIYYYELFLTSKLGWVEDNIRACYKLADCYSHLHDNENNISAILRSFEYDIPRPEACCRLGYHFMEQGRNYEAIFWYEQALMIKQNPNAPFQHKSFSTWLPHLQLCVLYDRLQQYELAHAHNELASSFIPNDAKILHNKKYFQRILKQQQEDVSS

SEQ ID NO: 4998 - protein, 367 aa, Sporomusa sphaeroides
MTESDKNAQLPITISLCMIVKNEEATIERCLLSAEGIADEIIIVDTGSTDKTKEIVSKFTDKIYDFEWIHDFAAARNYAFSQATQEYILWLDADDVFLAADRELFLNLKTTLSREITVVSMLYNLGFDQYGKVAFQRRRNRLVKRERNFRWVGAVHEYLEVYDRSFNSEIAVTHQPLSHDADRNLKIYELRLQKGEKFSPRDLYYFANELLDHRLFDRAIEYYQKFLETKQGWVEDNISACSKLADCFYNLNDIENQLKYIYQSFQYDVPRAEFCCRLGYYHLINNQLKQAIFWYKLATQAEKPADSWGMVNFKCQTWLPHLQLCVCYSRTGQYQFAFEHNEIAGTFIPEDPRIHQNRTYLKNLLKI

SEQ ID NO: 4999 - protein, 627 aa, Paenibacillus phocaensis
MDKPTVSLCMIVKNEERCIERCLNSVAPLVDEVIIVDTGSSDRTLELVNKYDAKLFYYEWDNHFANARNYAIEQATGEYILQLDADEWIDDPVHELNQRLDKEIYYIPIRNDLGGGLAEVHKFPRLFRNIPELRYEGALHEQINITTNWHRSSAVLSQVTIHHDGYLNQIVNSKGKKERNLKILYAEIKDNPSAFNYFNLGQQYFTMGEYRKAVDAYKKAYNYGGEFTFTKRLLLGMIQSLMLVKQFKDALSIANDSFQLYPDYVEFKYYEGLIYQEIGYLPDAQECFEECIKTGDSDPSVHFNTYEGTGSYLANARLAEIAYMNFNFEQSEAYLNQAISQAPRVMGLLKSYLDFNRNIDARKIFDQITVLWPQNQEVLQQLIYALYQLRHPAIHYFLDRYNVDCDQEVMAFINMVAGDFAAAEEYWTNKQECKEENLRDVLLLSVAQKNKQLLDRYLGTISLRHEEKRALLAFCEMQDIKCGEFSREFREMVYILLSDLLKIQKYEFLDYFTKQFSTPQMRLVLAQVLYDYGFYEILLEVLVQGSNQEDKFHINLLAAKTLRHLNSWEDSLYYYQEAYKIKPNSEVAFHICNLAIHLNDVDTIKFILGKMMDWDVVSTWMKHQLFN

SEQ ID NO: 5000 - protein, 228 aa, Unknown
  Description of Unknown: Microgenomates group bacterium GW2011_GWF2_47_9 sequence
MKTMLSAIIVTASRKNAARAIKSCAFADEVVVIEKPSISDYAAARNEGIKKSRGEWVLFVDADETVPPELAKEIAHKITSTIYTSYYLKRLDTFLGRTLYHGENGALKIIRLAKRTAGTFSRPIHEVWQVKGRIGTLHHPLIHYPHPSLAVFLDKINRYSSLEAEYRHSRKIKSSLFHILFFPPAKFIKNYLLLAGFLDGMPGAVMAIMMSLHSFLTWTKLYLLPKGR

SEQ ID NO: 5001 - protein, 428 aa, Bacillus sp.
MQNKFPSEFHKQCLKHITKCDSTIFDNLLKGFALNSDLLFSANLMVRNEEDCIERCLNSIIPFFDEIVIVDTGSTDKTIEIIESINSSKIRLYYHKWNENFSEIRNYMLEKSTGDIIFTIDADEFISDNINVYEFKKTISYIISILDDEVVISPTIIDSTKEKYDSLARIFKNSSSFYFYGCVHEELRRIDNIPLKAVSLDFTLFHDGYESKKIIGKNKSDRNIVLLKKTLKMERNNFRWSFFLMRDLYIFKKFDDELLFLANNCIKKIQTGNTNTKPYERAAYVYIALIFIHFGKIDECENIVKLLNSSYPNNADSLYIEMILDEKKLISANKKIEERMFCLKTVENSDSILNIRKAVLISRFFSVKLQLLNFGNFFPLLYEVDGELAQKIIIETEKMVNVLQEECMKVEDSDIYYTNLINDGCYSG

SEQ ID NO: 5002 - protein, 360 aa, Paenibacillus sp.
MIVKNEEKTLARCLSSIAPAVDEIIIVDTGSTDATREIAADFTDRVESFTWVDDFAAARNFAFSLATKPYMMWLDADDVLEVSELHKLKALKHQLDDTVDSVSMDYHLSFDEYGNVVNKLRRNRIVKRERNFQWIGAVHEYLEVYGNIIHSDVIVTHKSLGHDSDRNLTMYENRLRRGEVFTPRDLFYYANELKDNGRYDSAIRYYDKFLATGKGWIEDNILACGRLADCYHELNEPRNMMDSVLRSFYYDKPRAEFCCRLGYYFLQRDELQMAVYWYKQALHVEHTDTTGWGFANIACSTWLPQLQLCVCYDRLGDYESAYRHNEQAASYRPEDERMIANREYLSQRLSKKDEGGIVLV

SEQ ID NO: 5003 - protein, 372 aa, Sporomusa acidovorans
MPDSAKQSHLPITISLCMIVKNEEATIERCLRSVEQIVDEIIIVDTGSTDKTKELVRQFTEKIFDFEWIDDFAAARNYAFSKATQEYILWLDADDVILDQDCQKLLELKATLSREFEVLTMLYYLSFDTDGNVLYQIRRERLVKREKNYQWIGAVHEFLAAKGSQLDTEIAVAHKPVKHDSDRNLKIYERRQLQGEEFSPRDLYYYANELREHNLYNRAIEYYQKSLATKQGALEDNIAACASLADCFYELHDGENELKYIYQSFQYSTPRSDFCCRLGFHHLNNNQIKQAIFWYTLATQLKTANSSWGLVNNQCATWLPYLQLCVCYSRLGDYQLAYEHNEKAAKFIPDNPMIHHNRKLLQSKLNIEPSKE

SEQ ID NO: 5004 - protein, 248 aa, Unknown
  Description of Unknown: Flavobacteriales bacterium sequence
  MOD_RES (190)..(190): Any amino acid
  MOD_RES (227)..(227): Any amino acid
MHEISAVIITLNEEKNIGRCIDSIRDVADEIIVADSFSADKTKEICETKGVQFFQREWEGYSKTKNWANEQARFEYILSIDADEELSNELKNSILQEKEKGLGGIYEFNRMTNYCGKWIRHCGWYPDKKTRLFPKEGAVWEGGFVHEDINFVRHPDKKWLKGDLLHYSYYTTQDHIERIEKYSELAAQAXLSQGKNPSIFKLVFSSFFKFFKTYFIALGFLDGIAGXNIAWYSGKAVYLKYKKARANG

SEQ ID NO: 5005 - protein, 312 aa, Unknown
  Description of Unknown: Comamonadaceae bacterium SYSU G00088 sequence
MHEPITALILTFNEEKHIDRCLRSLSGVVSQVVVIDSGSTDRTVEICREHGVEVYTNPWKNYSSQFNWGLDHCDIRGAWCLRIDADEYLSEPLRGALRDRVAAGLVPDAVTGLYVHRVMVFMGRAIRWGGCGGLYMLRLFRTGRGRCEERWMDEHIVLDGGATGRLPGELIDQNLNNIGWWVAKHNGYATREAIDLLNLKYRFDTCSAHNAIGGHSQAARKRWFKERVYAHLWPGLRASLYFLFRYFGLLGFLDGYPGFVFHFMQGFWYRFLVDLKVGELERRAKRTGVPIEEVVMIEYGIRLCRSTDSPCR

SEQ ID NO: 5006 - protein, 362 aa, Lysinibacillus sphaericus
MVSISLCMIVKNEEDVIGRCLESVKDLVDEINIVDTGSTDRTKQIVAQFTDRIFDFEWIHHFAAARNYSFQQATMDYILWLDADDVFLEEDQEKFKALKSSLSPTIDAVSMNYNLSFDSEGNVDALIRRNRLVKKEKSFQWIGAVHEYLEVGGELIESDIAVSHLPLTHDHSRNITIYKTLVESGETLSPRDTFYFANELLDHGQFEEAIYYYELFLTSKLGWVEDNIRACFKLADCYSNLNDPENNFSAILRSFEYDVPRPEACCRLGYHFMEQYKNYEAIFWYEQALIIKQNPNAPFQNKSFSTWLPHLQLCVLFDRLQQYELANAHNELAGSFIPNDAKVLHNKKYFEQTLKSNQTDCQ

SEQ ID NO: 5007 - protein, 306 aa, Unknown
  Description of Unknown: Candidatus Levybacteria bacterium GW2011_GWA2_37_36 sequence
MNKKNTLSVVVSVFSGEKVLDECLRSVSWIKEIIVVNNSSTDKTLEIARKYTDKIFTRPNNLMLNVNKNFGFSKASSDWILSLDADERVTPELKAEIESRIKNYESGINGFWIPRKNIIFGKWIEHAGWYPDPQLRLFRNGKGKFPEEHVHEMVKVEGDVGHMKNNIVHHNYESISQFLNKVSTIYGPNEAEQLIKKGYNFDWRDAVRFPVKEFLSRFFAREGYRDGFHGLMLSLLMAFYHLIVFAYIWEKHNFKQINDGEILAETKKEIAKASKDLFFWFSKEEAKFIKNPLKQIFHKILRKIKP

SEQ ID NO: 5008 - protein, 358 aa, Clostridium symbiosum
MATVSLCMIVKNEEKVLGRCLDSAKEIADEIIIVDTGSTDRTKEIAAEYTEKIYDFKWNDDFSAARNESFRKATKDYCMWLDADDVIPEREQQKIKKLKEQLTPDVSAVMMKYVTAFDDTGKPAFLFDRERLLKNGDGYLWGGRVHEAVAVRGKVLYSDAVIEHHSIKKEYSDRNLRIYERMIEEGEELEPRHQFYYGRELYYHGRNEDAVRIFETFLRDREKGAWLENLVDACRFCALCFYRMGKREEALEKLFWTFSYDVPRPQICCDIGKHFLDENRLKEAEFWYRQAMQTSYEPIPGAFVEPEYREFIPAIQLAVCLDRQGKYVEAARYNELASYYKPDSEAVKQNRIYFEGLK

SEQ ID NO: 5009 - protein, 362 aa, Paenibacillus sp.
MITISLCLIVKNEENSLGRCLGSVHDLVDEIVIVDTGSTDRTKEIAASFNARLFDFEWIHNFAAARNYAFDQATMEYIFWLDADDVLEEKDRVLLRELKATPDFDYDSVTMHYHLSFDASGKVTSSLRRNRLVKRSCGFRWHGIVHEYLAVGGRIMDSAIAVTHRKDVPHTSRNLDIYRNQQKAGVPFSPRDQYYFANELRDHGHYAEAAGMYERFLSGKQGWVEDNINGCYKLADCYAHLEEKEKQLASLLRALTYDKPRAELCCKLGDWFQQAGNWEVAIHWYQTATMLKLPENSWGAIDHAAWTWLPHLQLCVCYDRLGKRDKAYLHHELCKMHVPDHPSVKFNEAYFQKLGYPHQGGA

SEQ ID NO: 5010 - protein, 275 aa, Unknown
  Description of Unknown: Acidobacteria bacterium sequence
MTLSVVIITHNEEANIGRTLLSVQPLVSDGKGEIIVVDSGSTDGTVEIAELFGARVFVEKWKGYAAQKNSAIEKATGDWILSLDADEEVDEDLRGALRHYILGDSTTTVKDGVPNYQTSWFATTITGLLIHRKNYFLGRWIKHGGFWPDPKLRLFRRGAGRFEDRAVHETLQVPGGGRQFPRGALIHRSYPTLSDYLDHMNRYSSLGAEMVNAKGPVRFSAFNIVVRPAATFIYNYFFRLGFLDGREGLLLHLYHAAYVSWKYAKAWELRNNRSV

SEQ ID NO: 5011 - protein, 258 aa, Unknown
  Description of Unknown: Candidatus Woesebacteria bacterium GW2011_GWA1_39_21 sequence
MVNNKQISAIVIAKNVEKKIGKFLESLRWADELVVIDTGSTDKTKETASKHNAKVYTFAKGSFPDWRNYGREKANCDFLFYLDTDEVVNDELKSEILETVKNWPAGVACFAIPRKNVIFGKVMMHGGWYPDYVIRLFEKGRLIRWVGDLHEQPQYRGGLKYTKNTIIHYKENSLAEMLEKTNKRSEIEARLMFDANHPPMTVLRFMTAMCREFFFRFVKNAAFLDGRKGIIMGIYQVYSRFISYAKLWEMQMKNEKKD

SEQ ID NO: 5012 - protein, 265 aa, Leptospira fletcheri
MPLPISACIITLNEEDNISRCLSSLKFVDEIIVLDSGSKDRTKELAENFGAKFVFREFDDYVGQKNHVISLARNAWILSVDADEEISPDLEAEIREVLGGREPDEDGYSIPRLTMYMGKWIRHGGWYPNRRVRLFRKSKGRFIGEKVHESVKLDGKMGKLKNPVLHYSYQNLFDHVNFINSYSELAATEKFAKGKRSGLFLALAEAGYKSFWMYFVRCGFLDGRRGLILAVMGFYYNFLKYTKIFEMFLAEQIGKNTKKKGSKQD

SEQ ID NO: 5013 - protein, 370 aa, Unknown
  Description of Unknown: Peptococcaceae bacterium BRH_c4a sequence
MKKISISLCMIVKNEENTIARCLNSVQDIADEIVIVDTGSTDRTKEIVGRYTDKIYDFPWIDDFAAARNHAFSHATMEYILWLDADDVLSELDRLKFLTLKKNLDPLMDAVNMPYHLSFDQFGNVTFSLRRNRLLKRSRNFKWTGAVHEYIEVNGPILNSDIAVTHKGEAHDANRNLNIYEKRLARGESFTPRDLYYFANELNDHRQYERAVVYYKKFLDTGEGWVEDQISACGKIADCFQNLGDHENEHAYLYRSFEYDIPRAEFCCRIGFNNLQAGRYKQAVFWYKQATELERPLDSWGRMFPACWTWLPHLQLCVCYDRLGKYELAYKHNEIARTFRPEDPKVIYNKNYLEGVLGIGASKKNEIPNE

SEQ ID NO: 5014 - protein, 253 aa, Succinivibrio dextrinosolvens
MNKLPLSVIILTHNEEDNIRDCIESALFADEILVLNNDSHDKTVEIAQSLGAKVIERDLNNDFSAQRNFGIENAKHDWIFMLDADERITEELAHDIKICVEVNKDICYQVSRENHFMQGKVLHGVLRPDNVERLFKKEGSFYEGIIHERLHSPYPKQKLKGRLIHYPYKTWEIHLDKTNRYSTLLAQKYHDKGKTCGFASIMFKPLWAFIKMYIIHGGFLDGKLGFEFCVAHYFYTMEKYLKLYSLNKYKGRI

SEQ ID NO: 5015 - protein, 355 aa, Clostridium sp.
MTPVSICIIAKNEEKNMDKFLSSIQKSMKNYPHEIVIVDTGSSDSTLEIIQKYNVKLFHFEWCNDFSAARNYSLQCASFQWVLVLDCDEFITHIDVSCFDKLSRNFPKSVGLITRNNHCWSGNNDRIYTDEVNRLFHKNSFHYEEIIHEQLVSNDGQPYQMLQVPITVDHVGYIGSSDELHAKALRNNQLLFKMLEKNPNDPYVYFQIGQSFNLIDDSENAYKYYKKGLEFDIDPSLEYVHLMILGYGESMLELGKYQEALTLESVQDVFDVSPEFACLMGRIYRLNGQYINAMKEFLKATTYSTADLEGSNTYIPLYQMGYINELMGQTEEAKKLYQNCGNYPAALERLTLLLK

SEQ ID NO: 5016 - protein, 273 aa, Unknown
  Description of Unknown: Rhodospirillaceae bacterium sequence
MGDLGKTISAVVIAENEAGIIKRCLDALSFCDEIVLVDGGSTDGTQDIAKACGARVIEHSSSEKGIHFNKNLGAEEAKNDWILSIDADEVVSQKLAEEIRNVAERAAVTGNECFRIPRKTYFLGKWIKHSGWWPGYVIRLWKKGHTEWPLEVHGVPQANGPMGTIQNPLDHFSYESISDWVRKADHFSGCEAEEAINRGEAIEGRRLLMGLTIYPAAAFLRKMTVGQAYKDGIHGIVVAGSAAFAAWLRAAKAWEVNETGRHHNLGGREKLDR

SEQ ID NO: 5017 - protein, 252 aa, Veillonella atypica
MATVTVIILAKNEEQNIRDCIETVQFADEVLVIDDGSTDKTIEIAESMGARVIHHAMNGDWGGQQTFGIKQAKSKWILFLDADERISKELANNIIKAVQKDEPKAFWMQRRNKFHHNKATHGVLRPDYVLRLMPAEGSYVEGYVHPAIITPYEEDKLKGPMYHFTYDNWHQYFNKFNNYTTLAAEKYKDAGKSCSFIKDIMIRPAWAFFKVYILDRGFLDGKMGFILSVNHYFYTMIKYVKLYYLLKSNGKL

SEQ ID NO: 5018 - protein, 640 aa, Unknown
  Description of Unknown: uncultured Sporomusa sp. sequence
MKISACMIAKNEEKVIARCIESYREAVDEIIVVDTGSTDQTVAIAKSLGAKVFYFQWIDDFSAAKNYALSKAKGDWIVFLDADEYFANGTGSNIRPFLKKLDKDFGGVACRMHNFNEVSGKITSEITHIRIFKNAKHLRYINPIHEKLNYRRQGAKLQVYVADRQELIIHHTGYSTNISKEKAERNLALLLKQLDGDTAAKPEYYYYIADTYFALEEYDKVIRYIRLFLATGDKIANLNTRAHGILIDAMKNLKYPSNEIREEVAIAAGKFPQNPFFRFYQAQFLYEDKCYDAAWLEVRQARQLHETYKDIEMNLMPANLGSLYNMLGAISEFKGDYGAAVGYYLDALKWDKYEATAFDRLIKLVRTQPLAEIVAFLNTVYDLDKEADLDFLATSLINQAVPQVLAYYTALREKKYPKQDYVVLQMLVANRHYDKAFVAISECYERDKDERLALVAAAAASLSGNRDYIARVVQQLPPTYGKILEAYQGDSILFDKDDKAAFIKLVRIFILWADDEARQKLLSLADRFPDNMNAAVGYLFLQEGHYQTSLIYFNIAVQNSLHAGVLVHPILYYNQAYCLHRLNNPIAAATAFVKAYEAGYRANDIYEYLQWNVGKLDDGSLKARIEEILRTEVEKNAIVH

SEQ ID NO: 5019 - protein, 583 aa, Unknown
  Description of Unknown: Candidatus Brocadia caroliniensis sequence
MMDKERQTARDKNRPSISACMIVKNEEKFLSQCLTSIKGAVNEIIIVDTGSTDKTVEIAHSFGASVYHHPWNNSFSEARNHSLKYAKGDWILQIDADEALEQADIPLLQKLINDDLYNVIFVAIYNELPGGYAKHYFQRIFRKGKAHFEGIVHNQLIFEGKALQSEIRFYHYGYNLSGQDMQKKYKRTGDLLRQQLAENPDNLFILANLVRNYRNEYDFDKVIALAENGLEISSSKTDLVSKNQRQRLSIDLAHALLNKNQIDRAVLVCKKALTENSDSFDILLVLGEVFMKKGVYHDALPCFKKYLILKEKENREPAFSLLSSDFYHYEPTVYSHIGECYRHLGQIHEAIVAYKNAIKSNNKNPLYYSNLIDLYLSQDSLNDAKDLAFAAIKSGITNHLTYLLLGKIYALEGKIDDAIDACKQSIRIDNANIPAQVYLINLLIEGHLLEEATETIKNMLSLYPEEFAFLCLLERVKYRKGNRESPLSFVKNILQSDPSDQLIYLQLGDLCMEMEQYTTAIEVLEKYLKNTSSADAKVIANIAVCYAKQGKLKPALFGFQAALKLDPNCRCAVQNLAALKIHA

SEQ ID NO: 5020 - protein, 253 aa, Unknown
  Description of Unknown: Candidatus Woesebacteria bacterium GW2011_GWA1_39_12 sequence
MKKLRTLSAVVLTKNQEKNIVECIKSLTFCDEVLVIDDNSIDKTIYLARSNGAKVFSRSLNNDFSSQRNFGLEKAKGEWVLFLDADEKVSDELQKEILRELNLKDNPYTGYYFRRSDFIWGRELKFGETGNIKLLRLAKKGSGKWKRKVHEVWQIEGRIKTLRNPLIHHPHQTLSEFIADINFHTNLDISAKIQEGKRSSLLKIIYWPIAKFKLNWLLRLGFLDETQGFVIAILMSFHSFLSWSKLWQNQKKN

SEQ ID NO: 5021 - protein, 343 aa, Celeribacter ethanolicus
MDRLPRQPSADPETARKISKGTPMTETLTALILTFNEEKHIERCIRSLDGIAERVCVIDSYSTDRTVEIAKSLGAEIVQNAWHGHAAQFQWGLNTLGICSDWTLRIDADEYLDEELRESMSAWLAAPQSTINGVYLRRQIVFLEQPILHGFFYPLNILRLWRSGEGRMEQRRMDEHVILKSPNTTVLKGGDLVDHNLNDLSWWIAKHNTYATLEMISRVEARHIKEASEEVLTGQAARKRWLKEQVYARLPATLRASFYFAYRYVIGRGFLDGKAGFFFHFLQAYWYRTLVEAKYFELQQRAKTAGLTPYAMLQKEGVFPSENEAAVYREGKMEGKNGETAPS

SEQ ID NO: 5022 - protein, 361 aa, Desulfosporosinus hippei
MITITLCMIVKNEEDTLDRCLQSVGDVVDEVIIVDTGSTDRTKEIAGKWTTNVLDFAWIDDFAAARNFSFSNATMDYILWLDADDILLPEDSQKLSRLKQFMSPELDAVSMMYHCDFDDQGNVTLKVRRTRLVKRAKNYPWKGVVHEDLVIKDGTCYDSDIVVTHRKNHASYDPDRNIKIYERLIAQGKEFAPRDMLHYAMELHQHRSYQKAIEFYLQFMEMKEISDEDRIYGCSKLADCYHYLENRKKEREYIFRSMEYDTPRSEFCCRLGYYFLEKSQFSQAAFWYKLATELSATNNLWAIQNHASRTWLPHMQLGLCYYQLGEYELSYHHNKIALSYRPTDQSIISNVKLVEEIINKK

SEQ ID NO: 5023 - protein, 256 aa, Unknown
  Description of Unknown: Planctomycetes bacterium sequence
MKPRISATIICMNEEKHIRACLESVAWCDEIVVVDSGSTDKTVEIAKEFTPKVIHHDWPGFVGQVNFALSQATGDWVLCIDADERCSPGLKEAIQRVLPELDGLGGFELKRHTWYMGRWINHGGWYPDWKARFVKREGTQCVGHEPHYRLVPVGPVQKLDADIYHYTYDNFKDQLRTVDKYSDVVSKDMQDKGDTFRLLKAVFHPWAKFMGCYFWKLGFLDGWAGLVIAVTSAFYVFAKYVKLRERVDPQGTRSLP

SEQ ID NO: 5024 - protein, 288 aa, Pedobacter sp.
MLDRSLSIIILSFNEEKNIEACLQSILALNCPIFLVDSGSTDQTLGIVEKYPVQVFHHPFENYGAQRNWAFEHLPIQTPWILNMDADHRITPELAIELLQIFSNTISEEIKGFLISRRTLFMGKWMKYGGHYPVYHAILFRKGFGKCEDKLYDQHFVVEGTCETIKTDMIDTLTDSLQSFTERHNRWSTLEAEDQFYGYAAKNTAQLVQAKANGNAQQRRRYAKSLYEKFPLFIRPFVYFIIRYFIKLGFLDGGRGLIFHFLQGFWFRFLVDAKIYELKKKRLGEMKR

SEQ ID NO: 5025 - protein, 305 aa, Pseudovibrio sp.
MRPDISSQSKIISIAEKRAQQGAATTDGRADEKRIPLSVFIIAKNEEERIGRTIASCIQWADEVIVIDSGSTDQTVTVAQRMGARVLHNDWNGYGLQKRFGEDQCRHDWILNIDADEVVTPALRDEILGLFQTSVLANYDFWEVDIRDVWPHEETAARHAFSHKQIRLYRKSIGRFSASSVHDTVRPPSTAKIGMLKGHMDHRSIPSITFHYDKMNRYSTMQVQEMRGRGRRLPRYRLLFEFPLAFLKGYLVRGYCRYGWWGLIASTNYAVSRYLRLAKFVEAELMEQSGRPAKHPSPSAQHKKA

SEQ ID NO: 5026 - protein, 251 aa, Sutterella sp.
MLSALICAKNEINNIEACIQTLAFADEVVVIDDHSTDETVSKARSCGAKVFVRSMNGDWSSQRNFGINRCNGDWVLVVDADERVTQELADSVLEKINKGEKKAYEVRRNNCFRFNKATHGILRPDWVVRLFPKDNSEYIGLVHEKLETPYSKEKINDGVLLHFTYDNWDSYFGKFDRYTRLMAKQNYSDGKRAHFFLDIVLRPVWAFFKVYFLNMGFLDGRLGFIFSVNHYFYTMTKYVRLYYLDKNDGKL

SEQ ID NO: 5027 - protein, 605 aa, Clostridium tyrobutyricum
MKISACMICKNEEKNIEKCINSYKKIVDEIVVVDTGSEDNTVYLAKKLGAKVYDFKWIDDFAAAKNYAIDKAIGEWIIFLDADEYFDKDSSYKIENILKSINNKEYDAVGCKLIDIDDCEKKIIDTFMQIRIFRNNINIRYKNSIHETLSKEHGNLELISYYDELKIYHTGYAQSISKIKARRNLKLLKREANKQVNNKNLYRYFCDCYFSLGDYENALKYAELHMNSDIKLVGYQSRILKVIIDSMWKLKKPKKEIEDKIKYGIRTFPNHPNFYCSYAFFLIDEKRFEEALNNFLLTVKYNSSYKGIEVNLVTGIISTVYEKIGFIYNLKNCEEKAIEYFFKSLEFNKYSKDTFESLYNLIKKEKTEDIILFLNSIYDINSEKDIHFIVDQLVRIKPRGVLAYYTNIWYRKFKNEDISMIFMLLSEKKYETAFKLFLKAYSNKYENSDALFSIISSMLLNNVDRIKYLSDMVRPSLKRILKNYIDEENVIYKEDIEDYISILRELILLDNSNVLNKYLKLSNRFSINIDNKIGAVFMNNLLYEQALQYYKSYNDFNENKNTLMNIGYCSYKLRNYKKAYIYIQRAIEMGYNENDAFEILNWIKV

SEQ ID NO: 5028 - protein, 310 aa, Spirosoma panaciterrae
MTDVSVIILTHNEEKHIARCLDSLLPFTDKIFIVDSFSTDRTVEIARSMGAVVVQNAWVNYATQFNYGIEHTPFQTAWLMRMDADEYVMPELASEINQRLNTLPDPIGGVYVKRRVFFLNRWIRYGGFYPIWLLRLWRRGDGFCEQVWHDEHIKLTKGEPIHFDHDIVDHNLNNLTWWTQKHNHYTILEMINLLNYRHQFDQAEKVQPRFFGTQDQRIRFLKEMYASMPYFTRPILYFVYRYFIRLGFLDGRPGFVWCFLQGLWYRFLVDAKLLELDIRIGNDKEAIINYFKTEYGKDLRAIRPQQVTQS

SEQ ID NO: 5029 - protein, 367 aa, Paenibacillus macquariensis
MITISLCLIVKNEEKTLDRCLSSVSNLVDEIIIVDTGSTDLTKTVARKYTEKLYDFKWIQDFAAARNYAFAQATKDYILWLDADDVVKEEDAIRFKVLKETLDPSVDSVTMKYLLGFDSFGNVTSSNRRNRLVKRSNHFRWIGAVHEYLEVSGNIFNSDVAVTHSSIHHDSDRNLNIYEQRLSKGEQFSPRDLYYFANELLDHRMYERAITFYEKFLDTKEGWIEDNISACGKLSDCYNGLNNKQKELESALRSFQYDSPRAEFCCRIGYHFLHKGQINNAIYWYDTATKLEPASNNLGFQNLSCSTWLPHLQLCVCYDRIGNYQLAYEHNEEARKYRSDDPSILQNKTYLEAILCKTEEAPPGESL

SEQ ID NO: 5030 - protein, 654 aa, Pelosinus sp.
MSTRISLCMIAKNEEHNIGRCLRSVKGVVDEIIVVDTGSSDKTCQIAQGFGAKVRSFIWNDNFSDARNASLDLATGDWILFLDADEELAKKSRAILRQAVLQPGVEGYFIKIVNVAGNDSCPETNADTVFRLFRNRPDYRFRGAVHEQICNVIIEKKGQVQFPFIEDLIINHYGYLNSEIEGKDKKRRNRALLEKELINNPDDCLVRFHYAVELFRMGENLSAAQEFERISTIVNPKEVIYGPRLMRYIALAYYGANELPTALTAVQRGLALFPDYADLYYYGGALYYQLKEYGLSYEYFQKAIEALDQPVYYATGSGIQGFRSYYYLGQIAEKFCNEEEALRYYIESLRDNSSFPAALESIMGILQPRENPDYTKYAIGKICDVSVPQAKLLMGNLLFRYAAYGLALEYFEDVPETLVTNELLLYKAICLMQQRRGLEALTVLELIERSDSFNPNVKFNKLLCFWLEDNRQKVWEFGGELLSSGLTEDTATVVELLRNSHADKTPKVLGREGMTPILEALSRALDLGEYNRCTLLLSGISPQSLRNYYLTLGELFYRYRHLELAEQYLCQYIEENSGGERAYFLLAEIKQSQGAYFAAIDYYQQAMQFAPQEPKYYVKLIKLYEKVRSELLKQATEKYPQFPILATLLEETRA

SEQ ID NO: 5031 - protein, 272 aa, Rhizobium sp.
MQHSFPISAYVICLNEEPYIGSCIESLAGFAEIVIVDSGSTDGTASLVQSFIDRGWPIKFMYEPWRGYAGQKQFALEQCTQPWCFNIDADERLDDDLRSVLPDLIDAPLSVVGWRFARRPYLIGYGYTPANVRERKNLRLIRNSMGSYDLAQKVHEGIVAKGQVQNSKRGSLLHYRPLIMDEQILKENRYSTLKADQKIEEGARPKLYKIWFSPLVYFGRLYFHNGLWRCGTPGFIEAATGGVYAFLTEVKIYQRFTLLRRQNFDNSNSRGV

SEQ ID NO: 5032 - protein, 365 aa, Bacillus cereus
MITISLCMIVKNEEANLEQCLQSIEEIVDEIIIVDTGSTDRTKEIALKWTPHVFDFEWSNDFAAARNYSFQQATKDYIFWLDADDVLLPQDRQKLLELKNSADGTMDAVSMIYHTLFDEHNNVITSTNRLRLLRRSKNFKWTGMVHEDVNTSGNYSCYSSDVVVTHTKKDGFSNRNLEIYEMAVKEGKKFSAQDLFHYARELQVHKRYEEAVQYHNLFLASKDISTELKVFTYHNLASCYYQLGEFEKELELTLETFKYDTPQPVFCCRMGEYFIKKEQFRQAIFWYLLAVEDGQENEKNQIEQHIYKTWLPHKQLGLCYYRIGDYKHSYIHNKKVLTYLPDDQATLSNLENLEEVLSEQGVQIP

SEQ ID NO: 5033 - protein, 300 aa, Prevotella stercorea
MGNTIAAIILTKDEEKHIERCIRSLQGVCEEVFVIDCYSKDNTKAIAESLGAKVYEHPWKNYATQFNWGLHNCPITADWVWRIDADEYLDKGLGENVKKAISECGDDVNGIYVRKRIDFMGRPLMHGGWYPSYHLKVWRRGHGECENRWMDEHIRIFDGRAVTIEQGDQVDANLNNLTWWMEKHNGYATREMADMLMMEYGLDASAQEVVPKFFGTEEQRKRWLKVKYIKAPLFMRPFINFMIRYVLKAGFLDGKEGFIWHFLQGFSYRFLVDAKIFELKKRFGFDKEKIKEYLIDTYMK

SEQ ID NO: 5034 - protein, 373 aa, Paenibacillus sp.
METPVISLCMIVRNEADCIGRCLSSVSPYVDEMIIVDTGSTDDTPAICKEYGAKVLDYTWNEHFAEARNFGLHQARGQWILWLDADEELGEGGELLKQLATEAEYDLFSFELNNYYGTEVDEHHIIQISHPRMFRNGLGFQFRNKIHEALNVEEVFGSGSQMLQRMGNAPVTLWHYGYLESQVQVKDKAKRNLQLLQQALSDNPEDPWLHYHMASECYRLKKLNESFQHTNRSIVAFLSNRLTPPSLLYKLKYSILISVGSYDGAYPAIEKAIMLYPDYVDLVFYKGVVLMQLKKFEAALEAFEQCLEIGDSNLAHLTQKGLGSFQAWHYKGMCQELLKNNPEAKKCYEQALMIYPQHAESIEALNKLKLKSK

SEQ ID NO: 5035 - protein, 359 aa, Bacillus toyonensis
MITISLCMIVKNEEKVLERCLQSVKGIPDEIIIVDTGSTDRTKEIAEKWTPYVYDFKWIDDFSAARNESFRHATKDYILWLDADDVLLEKDKMALQSLKSSLHSEIDAVAMKYHAHFDNQGNVISSAYRFRLLKREKQYRWIGVVHEHIPITERDNTYQSTIVVTHQKENPKRSVRNLNIYEKYVARGGTLTSHDLFHYGRELASNHRYEEAVDIFHQFLDSPHVSDEMRLFIFNELASCYYFLQNIEQEHQITLQSLSYDMPQPVFCCRLGEHFLRQGKVEVAIFWYQLAIQIPVSYSWSVDKNPFRTWLPHKQLGLCYEMKEEDRQALKYYQQVLEFLPDDPEAKQKIQYLQQKMKA

SEQ ID NO: 5036 - protein, 245 aa, Ferrovum sp.
MSLSVIIIAKNESHDIVKCIESVSFADEIIVIDGGSSDDTVAKAQACGAIVHVNSHWQGFGFQKNLALHHATQEWVLSIDADERVSPELKEEIQQVIARQSFTVFRIPRSSSYCGHFMRHGGWWPDYVVRLFKRGDATFSLDRVHERLESDKPLGTLRHPLIHYTYDTLEEVIAKTNHYSTLGADMLFDKGRKASLTIATLKGLWAFIRTYFLRAGFLDGGFGFLLAVSNAQTTFYRYAKLWLKR

SEQ ID NO: 5037 - protein, 355 aa, Brevibacillus sp.
MTKLSLAMIVKNEEKHLERCLQSVRNIVDEMIIVDTGSQDRTIEIAHSFGAKVVHYKWNHNFSEARNVSINHASGEWILILDADEFVLGGQKEKIESFISGKKAVGRVSLISKFEHNGEVRYSTSFLSRLFPRGVFYEGFIHEQVVTDLPHLKTGIEIFHEGYYKTEKSNRNLPILLRQLEVNQSDPYILFHIAKNYKNMGLAEKALEYFVSAYNYRNRNEGYTPLLIVEYLQTLLEARRFSEGLEIINNESDYLSAYPDFHFAVGMFYLDYVSQDVMNRLHFLDDVERSFLTCLEIGDVSNFDSVNGTGSYLALYNLGVLYEVTGDIEKAILCYEDASRFNYAPAEERLALLEI

SEQ ID NO: 5038 - protein, 251 aa, Unknown
  Description of Unknown: Bacteroidetes bacterium sequence
MIRLSAAIIAFNEEKNIGRCIESLLPVADEILVLDSFSNDKTEEICKSYGVRFERMAFKGHVEQKNHAISLATHDHIISLDADEALSDELAVSIKQIKANWQSDAYQMNRLTSYCGKWIRHGGWYPDRKIRIFRRGTGQWGGENPHDRFMPDNPSAAMFIKGDILHYSYYTIEGHLEQVNKFTTIAAQSAFKAGRRSSWLNILFNPKIKFLKDYFFRFGFMDGYYGLVIAAISAHATFIKYIKLKELQKNN

SEQ ID NO: 5039 - protein, 304 aa, Bacteroides finegoldii
MLDITAIVLTFNEELHIKRCIESLSDIVKQICIIDCFSTDRTIEIASHYQNVQVLQHKWENSYSKQFNWGLNNAPIKSKWVLRMDADEYLTDELKAEMMTKIPNLSDDVTACSIVLRHVFMGRILRRGMPVYRQMRLFVYGAAECEARLMDEHIQLTRGRMIELNGEFADDNLNNLSWWAHKHVNYAIREAVDLLDIEYDLTGAARLEKQLTTDALIKRKRKHSYAKKPLFWRSFAYFLYRYIFRFGFLDGKEGFIWHFMQAWWYRALCDAKVYEIKKACGDDKKKMIDLLKEQYNIDLKSVIE

SEQ ID NO: 5040 - protein, 355 aa, Bacillus toyonensis
MVTISLCMIVKNEEGVLNRCLQSVKGIPDEIIIVDTGSTDATKKIAKKWTKQVYDFKWIYDFSAARNEAFSYATKEYIFWLDADDILMPEEVQKLHVLKNALNLHIDAVSMNYHADFDTQGNVTGSVIRNRLFKREKQYQWTGVVHEHIDVAPTDTIWASDVVVTHRPKNNERSVRNLDLYERYLKRGGTLTPHDLFHYGRELSMHERYMDAITVFEQYLETPEIVTDIRLFVLNELASCYFFIQDIQKEEQISVQSLLYDLPQPIFCCRLGEAFLRKGIFQTAIFWYEIALQVPVTYSWSMDKIAFRTWFPHKQLGVCYEQLDELEKAIHHYEQVLTYLPEEESQRKLQKLRKK

SEQ ID NO: 5041 - protein, 415 aa, Paenibacillus nuruki
MGNVIDAIFIVLQVMLAVIGVYQFSFSLFGIVKRKKRPDHAPQKSFAVLVAAHNEETVIGALMENLKNMDYPAELYDVFVICDNCTDGTADIVRSHGMNACVRTNPAERGKGYAIEWMLRELWSMPRQYDGIVMFDADNLADHRFLTEMNNDMCEGARVIQGYIDTKNPEDSWITAAYGVSYWYINRLWQLSRHNLNMANFLGGTGMCFENELLKEIGWGATSLVEDLEFTMRCAEKGIYPRFSYDAKVFDEKPLTFKASSRQRLRWMQGHFTVARRYFFPLLWKSVKEMSIIKFDLALYSVNVYIVLVTFLMTAAMWIDTAILGGPHIATIYNYLPMWVAITAIGANVVTFILAMALEKVKSWKVYLYLLLFPIYGLSWWPITFYAFFTQNNKQWSHTQHTRVVRLEEVQSKQG

SEQ ID NO: 5042 - protein, 275 aa, Unknown
  Description of Unknown: Desulfobacteraceae bacterium sequence
MKINLTAIILTCNEEKNIQGCLKNLNWVSRIVIVDSGSTDHTTKYAEEFGCDVYRNPWKGFANQRNWALQEVGINTEWIIFIDADEVVTSQMREEITAALKSRDCNAFYLCYKVIFLGKWVKYSSGFPVWHPRIVRNGFVHFRESITGHGETWEVNGRAGYIQEPYIHYCFSKGITSWFEKHNRLSTMEMEVSISDRKPFLKCIMGLLNQDSHKRRQSLRALSYYMPFRPFVRFFYQFILKGGILDGKAGWAYCCLYLAYEIMISVKILERKYSG

SEQ ID NO: 5043 - protein, 355 aa, Unknown
  Description of Unknown: Lachnospiraceae bacterium MD335 sequence
MSKIPISVCIIAKNEERYIEGCLQHLKPFGFEIVVADTGSTDRTKEIAEKYADKVVDFEWIDDFAAARNFCAEHASNNWILALDCDEYMDSFDIAKVRILMQRFVKSVGRFQLKNLLKGNDGRDRFTVDDVIRFYNKKRFKWENAIHEQLVHIHDSEDMKYHCFDVPMEVIHHGYNISAEEMQEKQLRNLRLLEKQLESDPDDSYTWFQAGQSHFLLHDYEKAVEAYETALSIETNIRRYFVEILIESLAKAYINLDRPQDAIALLLKYGEQFKTAKYSAVLSDAYLQNKDVLKALMNYIRTVSLEDRDTLGDGLLVCYSRIIDIYRGMGQHDMADMYTDLHEKCRLERERIINK

SEQ ID NO: 5044 - protein, 255 aa, Hydrogenobaculum sp.
MLARKISFVILTKNEEKNIKRALESIKDVADEILIVDSGSTDKTIDIAKSYGANVIFNEWVSYPSQVNFGISKAKNDIVFVLDADEELSSELKASLKDFLSSDYEIGLVTRRSFYMGDFLKHVWNNEKLIRVFKKDVCKYTGELHETVVCSSNKTYELKGYLNHYSFKSLKDQFERTLKYAKISADIMCKKNKPFHFYNLIVNPIWIFFKFFILKSGYKEGVKGLIIAFSGMFYVFMKYAFLYECYKSKEKDLWK

SEQ ID NO: 5045 - protein, 295 aa, Xinfangfangia sp.
MPQPETLTAIIMSLNEEQHITRCIESLRPVAERIVVVDSFSTDRTIEIAQRLGAEVLQNRFVSHAHQYQWALDRLGVTSAWILRVDADEYLETVLQQSILEFLADPGAVNAVFLRRKIVFLGRPILHGFFYPLKILRLYRTGQGRMEQRRMDEHITVDTPVCRTLDGDLVDDNLNCLAWWSSKHIGYARKEAWEIIACRQGGQSAPPLSGAARRKRFLKNRVYNRLPSALRSTLYFFYRYVIGLGFLDGKAGFFFHFLQAYWYRTYVDATLYEIERQAAAEGLSAYQMLRRDGIL

SEQ ID NO: 5046 - protein, 304 aa, Bradyrhizobium sp.
MVNLAIIILAYNEELHLARALEGVVGIAKEIFVIDSGSKDRTREIAEVYGAVVIEHPFVNYAKQFQWALENAPITSDWVMRLDADEIVEADLATEIVEKLPTLPREVVGINLKRKLIFMNRTIKHGGRGTLVLLRLWRRGYGRIEDRWMDEHMIIHGGRTVTFEGGFADCNLNNLSFFTDKHNKYATREAIDALNQRLGFMKRDDSLSIEASSHQAAVKRFVKEKFYNRVPFQLSALAYFLYRFVFRLGFLDGKEGAIYHVLQGFWYRFLVGAKLEELSRAIRGHRTPSEIRDTLTRLTGLTLH

SEQ ID NO: 5047 - protein, 257 aa, Unknown
  Description of Unknown: Flavobacterium hydatis sequence
MSQNVIVPKISVLAFCFNEENNIKKLIENVSFAHEIILIDNNSTDKTVAIAKELGATVIIQTTDNKAQQQNLAINQAQNDWILLLDINEYISPELKDEILTKISDPKSNPLYYIKQTLFFFKKKIEHGEFNNKKRIFLFDKKRHSFSSNEESNPSITLFGGSNLLKNRIDSYAYKSFDEYNYQLSLLSKKEALELYAKNVKPNFYHFLMKPFFSFMNQYFIRLGFLDGKEGYILAYINSFAVLKRYLILWLAHNKME

SEQ ID NO: 5048 - protein, 294 aa, Unknown
  Description of Unknown: Candidatus Woesebacteria bacterium GW2011_GWA1_41_7 sequence
MSKLMPNKTLKLSVVLATRNEEENIGRCLASVKDIADEIIVVDEYSTDKTREIAEKYGAKVFTEPHHDIFHITKEKALDKAVGEWILQLDADEVVTPELASEISSVVNSQSLTINHQPLEINSLFTRHQKLIEDRDGKIGKPTGEIVGYFIPRRNMFLGRPLIHAGVYPDGVIRLVKKGFAHFPQKSVHEQISLNGDVSWLSKDLLHYDSPTLKKYLMRLNRYTDLHAGELKNRKAPKNPFYFIYYCLFRPFLVFINLFLRHLGILDGARGFLWSFLSATHFPIAYFKYITGKV

SEQ ID NO: 5049 - protein, 342 aa, Paenibacillus senegalensis
MIVKNEEHTLDKCLSSLNGIPDEIIIVDTGSTDRTKEIAAKWTKHVYDFEWIDDFAAARNASFQYAAKQYIMWLDADDILKPEERDKLEKLKASLGEEIGAVSMKYEIPQDDSGIIMSHTTRLRLVKRDLGFQWHGIVHEDLAVDVPYRYLNSDIIVTHTKTRNVQGPASRRNLDIYERHLARGRELSISDMFHYARECNVHKQYDKAIHYYERCMDSPEVSLENKVFILHKLATCYVLANQPEKELELTLRALTMDIPYPAFSCRMGEHFLKKGHVEAAIFWYRTAYLQPLAERYAWSVVDNAYHTWLPHQQLALCYDVLGDSEQARFHRKQAEAYRSARQ

SEQ ID NO: 5050 - protein, 365 aa, Brevibacillus laterosporus
MATISLCMIVKNEEKSIARCLRSVKGAVDEIIIVDTGSTDKTIKEAKAFTKKIFHFKWVNDFSKARNFSFQQATMDYIMWMDADDVLEEIDRKKLQLYKHKIDPNIDVIIMPYHTSKDEFGNVILPYSRERIIKRTHKHSWVGMVHEYIEYSFGRSFKIDIAVTHRPRQQKNHQRNLQLYENAIADGILLTPRDKYYYANELKDHERYEEAIEIYQKFVNKELPRVEEPELLMEHICFCYERLHLPEEEIRYALKSLEYGLPRAEACCRLGYYWLQKNQPKRALFWYDLATTLTKPKSWGFRKEACWTWLPHLQLCVCYDRLEQFEQAYKHNELARAYRPADPIILGNRAYLTNRLEEVGIPIPS

SEQ ID NO: 5051 - protein, 367 aa, Bacillus jeotgali
MQTISLCMIVRNEEEVLEGCLNSVYPICDEIIIVDTGSTDRTKEIAAKFTDKVFDFKWTDDFSAARNFSFSKASMDFILWLDADDILKEKDFLEFKKLKKELHEAIDGVAMKYDIDFDDDGEPTFSYRRNRLVKRSKQFRWIGPVHEYLEVSGNIIPADIAITHRKSDKKRQVNSSDRNLNIYEKRLKNGEEFTPRDLYYYANELKDHGQYQRATIYYHEFLATKKGWVEDEIRACLNMADCYKKLGDYEKEMKALTSSMNYDVPRPEVSCRIGDIYKNKNQYKKAVIWYRLAVEVEIESDFGFTQKAYSTWYPHLQLCVVYWQLGEIEKSIEHNNLAKKYKPHDRQVLYNEKFFNDYLASEKKGKS

SEQ ID NO: 5052 - protein, 309 aa, Rudanella lutea
MLDLSVIILTHNEEKHIGRCLESLRPMTDKVFIVDSFSTDRTVEIARAMGAVVVQNPWVTYATQFNYGIQHTPFQTAWLMRMDADEYILPELAEEITHRLPALAAQVGGVYVKRRVMFMDRWIRHGGYYPIWLLRLWRRNQGICEQTWMDEHIKLSPINGAPAQTVQFANDLVDHNLNNLTWWTQKHNQYAIREVIDLLNIRHNFEQAERVTPSLTGSQEQRKRYLKERYASLPLFTRPILYFLYRYFVRFGFLDGRRGFVWHFLQGLWYRFLVDAKMLEVYRRAGNDREAIIDFFKTEYGKDLRAGVR

SEQ ID NO: 5053 - protein, 627 aa, Paenibacillus sp.
MKNTVSLCMIVKNEALFIERCLKSVKDEVDEIIIVDTGSTDDTIALAERFGARIYHFPWKNDFASARNYSLQQATCPYILVLDADEYLDESSHIQDILHSQKKGYSIRVRNQLEDGMVKTTSILRVFQSSPSIRFTGQIHEQIMLDSSEIEETGFLIHHVGYRKDVYALKNKAERNIRILLEEVASSPSAYAYYNVGKQYLVDGENELALEFLIKARNEMSYQESIDVLGMEIDYNLADCYYRLHQPEYGIPVLNRTIQQWPEYTDLYFMQARLFEQMGYWKDAEQYFKKCISLGDMDGEVAREGVGGYLAHFLLSRLYESQGNLQGALEHAFHALHLKKDYMPCLENYISLAQKAGVAFEVQKECLNFCYPVKKVDELTTLIGLLYKYRHPLLQEYITQYGIHNDIALTACGLQYSGQYEEARLKWCEVDGLHKNNLEDVILLSLLIDGERMMEKIRTIPLLTEQQIKTIISVIKKENLSQDRVDAFLGQVLLTLCERCIRLGEFDCFEYVSGLIRSCGLDIQYQLALLLDQSGFKDVAFDFMVSVFESQERTAEIEQFVGSRCLERGYREDAKHIFLQLAHTAPSYDVYLSLYELLLLEEAPSQARELLSDMKNRFPLSAVIQSL

SEQ ID NO: 5054 - protein, 369 aa, Ureibacillus thermosphaericus
MPTISLCMIVKNEEEVLANCLSSVEDICDEIIIVDTGSTDRTKEIASKFTDKIYDFTWIDDFSAARNYSFSLATKDYILWLDADDVILPEEQKKFKKLKKNLNSNIDAVSMNYIAATDGNGNPTFHYRRNRLVKRSKGFKWIGPVHEYLAVHGNILEADISIHHKKREKKVDTQSIGRNLRIYENRIKNGEEFSPRDLFYYANELKDHKQYNKAIIYYQEFLDGKKGWIEDNIRACIYMADCYARLGEKENELMALFKTFNYDEPRSEACCRIGDIFQARKDFKTALFWYQLAVKMKHKKTGGFHHTSYTTWYPHLALCVCYWQLGNVEESIKHHELTKQYIPNDPKVLYNEEFFQSYLKNQNRKDSVK

SEQ ID NO: 5055 - protein, 272 aa, Unknown
  Description of Unknown: Microgenomates group bacterium GW2011_GWC1_41_8 sequence
MCHGIIVTETIFPPFSMKKNITLSVALATFNEEKNITRCLNSVKKLGDEIVIVDGGSTDKTVYLARNFTDKIFVTDNPPIFHINKQKAIEKCNGQWILQLDADEEVTSELADEITRTVHAHNDINGYFIARKNFFSNQWMKKGGMYPDYVIRLFRNGKGHFPCKSVHEQIVIDGNVGYLKEPMNHYPYATFQEYLKKADTYTSLTAQELEKNKTSISVISYLKYVVIKPLHTFINLFFRHRGFMDGRRGFIWALFSGLHHAQAYVKYIKNKR

SEQ ID NO: 5056 - protein, 365 aa, Unknown
  Description of Unknown: Flavobacterium sp. ov086 sequence
MVTISLCMIVKNEEDTLANCLNSVKEIVDEIIIVDTGSNDRTKEIAYSFTDKVYDFEWINDFAAARNFAFSKATMDYQLWLDADDIIIEKDKAAFLDLKKTLSPEIDIVLMNYNYVVDNNNNPIYSFHRERLLKRLNNYQWNDPVHEYIEYRDNYLISEIAVTHKKIDAFSDRNLKIYEEQLRKNLPFSSRSLYYYARELRDHKKHIEAIKFFNKFLDTKQGAPGDNINACLEIGKIYKVLGDNDNALKYFFQSFSYDIPRAESCCEIAAIYKENQDYRKAIYWYEHILTLEIPNDASIIMVDSWNFVPAIELAVCYYNNGDIEKAVYYNEMAGKFKDKHESVLHNREFFKKERSKDFFYKEYKH

SEQ ID NO: 5057 - protein, 594 aa, Clostridium homopropionicum
MKNEVSLCMIVKNEEKYLPQCLKSIKDIVDEIIIVDTGSTDRTVDIAKSFGAKVYYFQWNNNFSEARNESLKHATKDWILILDADDELYTKDQENLKDLLTKQLDENAIYFFETLNYYGSTIDDNSITVNLNPRLFKNNQGTHYEGEIHNQLVHSENKYNLIYKFVQIHHYGYMENSISSKNKRNRNITLLKKQIEENPDDVFAYFNLGTEYAALNDERTALEHYYKSFENFDPLNGYSFLLILRIAILNHKIKDYNTSLKFINIGIEHYPKFTDLYFLKSLIFRDTNMPMYQIKALEKCIELGEPSPDLKCFYGVGTFKAYYELGNAYIKLKDYDTAYNYFIEAMKSKPDFIEPIYCIGHILKIQNIPIDDFKKIIEKFFIDSPKSNFIIANLFYNEQYYKTALEYIEKCEKANISTTDLLLLKAKCLVMTGYFNDCINIKCIDEKNSSYLYLNMYKIISSILTNNNVNALSLLSNFKEDTLSGHDKKLLRVYTQFINLFIKKPTLIISEEENEADYLPIILEICEILLINDKFDELAIAVNLLNLVNNKFVLLNLGKLYYKHGYIDLAKKEILRSIKELEVYDKEGLEILMH

SEQ ID NO: 5058 - protein, 252 aa, Unknown
  Description of Unknown: Bradyrhizobiaceae bacterium sequence
MISPKLSLIVITKDEEACIGRCLGSVPCADEIIVIDSGSRDRTVEIAQSLGAKVIVTPDWPGFGPQKARALALANGQWVLSLDADEWLDPSAIAPLLAAMAGATPPAAYRLSRRSRFCGKIIKHSGWSPDYVTRLFQRGQGRFSDDLVHERVIVDGDVRTAAFRIEHDSITSRADAEDKIVRYSSAAAAQMFSRGRRAGSAQASLHGVAAFIKAFVLRAGFLDGAAGWDVANYNRRYAYEKWRRLAELSRSA

SEQ ID NO: 5059 - protein, 396 aa, Hafnia sp.
MKIIIIVVMRFQEAGMRKDYSHLTITAAVIVKNEERCIARCIDSLLPVFDEIIVIDTGSQDATLAILSESKYCQTVKLFQTTWDDDFSKPRNLAIGKAHGGYIFFIDADECVISSKDEVLNEFYKIDALTYKDKIVLCPTIQDHNGNESKSVRRAFINNRKFYFFGVVHEELRLTDNTPPFDAHINVTLSHDGYRSDVIAAKNKKVRNNMLNEKNLVLEPNNLRWAYFYARDKLESTCLNEIYVFLENKIKVDKDIRITRGNIREDNYTFSILDIMVQAKLRLMDFDSDFESLIELMNEFIPYNSNGIYYSLVSDIFRWKVNVRHRVKEIIEYKKDVRIVNNDMLHSGGLHLDSILAIYLYEMGMAQQAKKLLISVKSSGFQTELSENYLNTMLNK

SEQ ID NO: 5060 - protein, 368 aa, Bacillus tequilensis
MKRPKLSVCMIVKNEERHIVRCLESVQHIADEIIVVDTGSNDRTEDICRSFHAKVYHHKWEQDFSKARNAGLQHVKGEWILILDADEELDHDTGSLLPSLLTDDSLPSLGCMKVVNYTGKQWDENEAFEQRQFRLIRNQRNITFTGRVCERPEGEEASAAFSLPCIIHHYGYLEQEAQRKHKRNMSLLNAALLTSSADAFFLYHKAAEYDRGNEQDKALRLSVDSISKCKRKKQIPPPAFYYLKYKLLIDTKRYEEAARDINEALAHYPDYCTLHYYKGIIMYQLKKVREAITAFEACLQADSDNYPYIQVKGAADFRSSCWLGVCYAELHQPMTAVLYVKKALKANPKCSRAQRLFTELTKDQAVHA

SEQ ID NO: 5061 - protein, 593 aa, Unknown
  Description of Unknown: bacterium (Candidatus Blackallbacteria) CG13_big_fil_rev_8_21_14 _2_50_49_14 sequence
MLRPRSSPIPENLPGYHERERSLKQVLIAHDYLSALALCRFQLETLLAPEPLISLHIALMGLGWPVLAERLRVLGHLLFPQRFLPIEPSAQPIETDAPDWLCSWLAPQTPMRLSVCMIVRNAEDTLVTALESIADLADEIIVVDTGSQDQTLALAAAFSPQVKVLQTVWQDDFSLARNLSLRAAQGDWILVLDADERLEPEGSSCLRKLLAFGVMGWNLFVFQQKHLRDQAENSFWVQVGRLFRAHPDLRFHGLLHEQLHRFSFPWYLHQIYLPQVILEHSGNLSAQVEKHQKPLRNLLLDRALALPEYQTPYLWFQKAHVLLEQTVPPALPEARDWLEKALPPSVAGISKIPVSATWSLAPPSLALFYLLKCLYLQQEIPALAQTALNYAEWNLWAEGRALAGWGLSKNDQIVRAKPILGSFFEPGLPALRTDLSLFLRLTLEGLLECALAEQDAWLALAYLKQLLKLRPHPALETIQARLFRLLKLSESDMLSTLRALIAAAYQAENWFELIRYFFVALQWGLPWEADFFVFLLIALQKTGYLQLCAYLARTGSHRFQEPSIFACFCRQSFSRDPDLAELPGQWQWYQLLN

SEQ ID NO: 5062 - protein, 249 aa, Unknown
  Description of Unknown: Tenericutes bacterium sequence
MNLSLVIITLNEEDSVGRCIGSVTFAGEIIVVDSGSTDATVAVAESNGAKLLFHEFQDYSTQKQWAIKQASGDWILSLDADEYLNDELAAEISSIVNSDTAHSGFSLPFRIQYMGRLMRFGPWSGESHVRLFRNGHACFPNAGVHEGLKVSEGTTGDLGKGYVIHESYSSLSHQMEKMLQYSNLWAEEEFTKGRRSGLFKIVFRPAWRFLSAYLLRGGFLEGMPGLVSSIVSAYYVFLKWTILYEMKRH

SEQ ID NO: 5063 - protein, 256 aa, Unknown
  Description of Unknown: Candidatus Gottesmanbacteria bacterium GW2011_GWA1_34_13 sequence
MEEKVNLSIVLATHNEEKNIGECLRLVKNWCKEIIVVDGGSGDKTVTIAKNLGAKVLIVPNLANFHINKQKAIDLATSDWILQLDADERVEEKLKLEIIQVIKNGTFDGYWIPRKNHFLGRFLMKGGVYPDYTMRLYRRGKGKLPQKDVHEQAYVEGEVGYLKTPLIHMSDVNFQRYLLRWNRYTDLIAGDLLTRQFNLVITGINYLIIKPIFWFLNIYVRHKGFMDSWQGFVFAFFSGLRFPMAFIKYLNKKICA

SEQ ID NO: 5064 - protein, 279 aa, Unknown
  Description of Unknown: Candidatus Pacebacteria bacterium CG10_big_fil_rev_8_21_14_0_10 _56_10 sequence
MTHSVAHPSPVSITAVVLARNEAAMIANCLATLKWCDEIIVVDNGSSDDTVALARQQAGVRVVAAQSGSFAELRQLGAKRAKTDWLVYIDADERVTPALADEIKQQLSDSAVQALQFKRDNIMYGRRMRHGNWQKDLVTRAFRRASLQGWSGIVHESPRYQGDTCLLAQPLIHLTHRSTSENLRKTISWTALEAELLYRSELAPVGFLTMLRKGVIEFVRRAWWWGGWRDGSPGLVESLVQGINKILIYIQVWELQRRPTLPEVYDRVEQDVARQWRQR

SEQ ID NO: 5065 - protein, 357 aa, Clostridium beijerinckii
MITVSLCMIVKNEEDVIANCLESIKDIVDEIIIVDTGSQDKTKEIVKKYTPKVYDFKWIDDFAAARNFSFSKATKDYILWLDADDVILPKDAENFKALKKTLDPSIDSVTAKYNIGFDEYGNVTASYRRNRLVKRSNNFKWYGFVHEYLAVGGNIMNSEIAVTHKKLKQTPKRNLEIYQNKLKEGVDFTPRDILYYGNELYDHKMYDESLKYYNKFLDSKQGWFEDNIRVCGKICDYFQSIDNVEEGRKYAYRSFEYDTPRAEACCKIGFSFLHEKKYKQAAFWYEEATKLEKPKDSWGFFNDACWTWLPHLQLCVCYDRLGDKKLAYEHNEIASKFRPNDERMLYNKKYFQGLGFN

SEQ ID NO: 5066 - protein, 301 aa, Polaribacter sp.
MKSSNTISAIILTYNEEQHISRCIASLKNTVDEIFIIDSYSKDNTVAIAENLGAKVYQNAWVNYATQFNWALEHCDIQSEWVWRIDADEYYESKKKIYLKESLANLENDVTGVYIKRKIIFMGKELLYGGWYPVWHLKIWRNGKGFCENRWMDEHIKLTEGTTKQIDLVQVDENLNDLSWWTDKHNGYASREMVDLLDTQYQIFSTSSVTPKLFGTGEQRKRYLKLKYLKLPLFVRPFMYFFYVYVIKLGFLDGKSGFVWYILQAFWYRFLVDAKIYELKKEFNNDEKKIIAHIKEKYQTK

SEQ ID NO: 5067 - protein, 1160 aa, Thermoanaerobacter siderophilus
MKKVLIGTTVRQKPEILKEYLLSLKNLKKQNLKVDYCFIDDNVDPVSKSLLKEFKDNDSIIFILDSKKIDIEYIKDSNTHYWNEELVWKVAENKNMILNMANDKGYDFVFFVDSDIVLHPNTLEHLVSLNKDIVSEIFWTKWEKNSIELPQVWLSDQYNLFYKNRERNVTNETISRQIDEFLNLLKVPGVYKVGGVGACVLISRRAILKGVSYDEIYNISLWGEDRHFSIRAVALGFELYVDTHFPAFHIYRDEDLTRLEKYKKYIKKYKNHIFLPGDRIVKKSHNKLTLSMIVRNEASRYLSNVLRQAAQFITNAVIIDDASTDDTENVCKEILKDIPLIYHKNEYSKFSNEIELRKQLWELTISTNPDWILCLDADELFEGKIVKEINNLINQPVYDVIAFRIYDFWNDKQYREDKYWNAHKRYWPMLVRYQPFFEYRWKETPLHCGRFPVNIIELPIMKSNVRIKHFGWAREEDRINKYKRYLALDKEFKYGIKEQYYSILDKNPNLVDWIEEENTESNQSLSLCLITKDEEKNLARCINSVKDIVDEIVVVDTGSKDKTVEIAESFGAKVIHAKWEDDFSKARNIAIENATGDWILFLDADEEIRKDDVSRIRLLLNDDTVEAYIFKFINYGGTNIANGLTEVHYNFRLFRNNGKLKYIYPIHENLRNVEENRLPIFKKADVTILHYGYLLETRIEKNKTEKYIKLISKYLEEHPDDKFQHGNLAVEYYNAKEYHKALKHLLIATKGMNVNSPIATRLIRYLIATYTALKDYDTALKIANDAKAFYIDIPDFKFLEGMIYAEQKRYEKAIEMFKECVAMGEYNGDFITMGGTGSYRAKYMAALCYEKLNKLNDAVREYIEILKENPSYQEVFIKFFDVLIKNEPPEDVYRFFEKHVDTKNPVNNAILAKLYINLGMFEMAKRYIDNINIDIEGLNSLKGSVYLGLKDYKKAIEYFDMEYGKAKEEATYQKVLCYILLKEMDKAKNLLWEISESSDKKLYMTIVGEMKAKFDDIKDSYFALLDLLISLKEFDLYNDVLNLYVNKFSREEYEKYGQLMIKYGLEELAVEAYIRAANLNSQNSEVYRYLAERALEQGMYDEALSLAANAFNIDRIDVDNYVLIYKIYKTIGKHDEAEEIDRMIKEIYPEINLKDRTGLY

SEQ ID NO: 5068 - protein, 358 aa, Viridibacillus arvi
MVTISLCMIVKNEEEVIGRCLTSVKDIVDEINIVDTGSEDKTKDIVKEYTDRIFDFEWIEDFAAARNYSFQQATSDYILWLDADDIFTDENREKLKILKETLKPSIDAVSMTYNLSHDAEGTVISSLRRYRLVKKDNDFKWVGSVHEFLAVSGNLFDSEVAVSHMPLSHDRNRNIQIYEKMLKDDQPFSARDTFYFANELKDHARYEEAITQYDSFLESKLGWIEDNIRACFNLADCYGFLEDKEMAFKSSLRSLQYDVPRPEACCRIGFHFMEQNKNTEAIHWYEKAISYKNELKLSFQNKSFFTWLPHLQLCVLYHRLNQLKKSYEHNEMALKYNPTNQTIINNKKYFEDNVNLEE

SEQ ID NO: 5069 - protein, 303 aa, Prevotella stercorea
MQRDSRISFVVLTYNEEKHIARCINSLLPFAKEIWVIDSFSTDRTIEIAEGLGAKTVKHPFENQAQQFNWAIRNCEIAGDWIWRVDADECISEECGRKVTEAIATCDEDINGIYVNKAIVFQGHKLKHGGWYPAPQIKVIRKGYGESENKVMDEHLIITSGRTIYVDGDQTDENLNDLTWWTDKHNKYASREAVNMLMMQYEMDADAEGVEAKLFGNDAERKRWLKVRYARMPLFLRPFLYFLVRYIVKLGFLDGKLGFIWYVLQGFWYRFLVDAKIYEMKRDFGFDENKLKAYLNGLCQTSR

SEQ ID NO: 5070 - protein, 258 aa, Unknown
  Description of Unknown: uncultured bacterium sequence
MKKLSVVLAVYNEEESIGRCLESVKDLVDEIVVVDGTSNDRTVEIARRFGARVKITTNKPNFHINKQMAIDMAEGSWILQMDADEVVSPRLASEIKSKIQNPKSEINGYWMPRKNYFLGRFLMKGGQYPDYTLRLYKKGKGRLPQKDVHEQAVVEGKVSYLENALLHYPYKSFSFYLLKWNRYNDLLAGQIREELGNKNKIERIAYAIAYLFIKPSHWLLTTYLRHKGFMDSWQGFVFSFFSALRFPVSFIVYLTSKS

SEQ ID NO: 5071 - protein, 324 aa, Unknown
  Description of Unknown: pseudomallei group sequence
MSHSLFTAPPRSNRLADLTAIILTFNEEKHIERCIRSASEVARCIFVIDSFSDDRTVAIAESFGARVRQHEFVNHAAQLDWALDNLPLNTEWVMRVDADEVITPTLAEQIRAKLPLAAKNVNGFLVCRYPTFMGTIIRHGGFPQWSLRLWRKGTAEIERRWMDEHMVLTTGESERLQGEYIDDNLNNITWWTNKHNGYATREAIDLLNRKYEFLPKLADAGKLASQARLKRWLKDHFYLHLPLGLRAFLLFFYRMSLRLGFLDGMGGGFAFHFLQGFWYRFLADVKVREVERRMHSDNVDCVEAIKRELGIDPICATENNCKSA

SEQ ID NO: 5072 - protein, 288 aa, Unknown
  Description of Unknown: Candidatus Hydrogenedentes bacterium sequence
MTERRRGPSEEKSSNGNAGCPERLPITAVVITENEEERIEACLRSLRFCAEILVVDGGSVDRTVERARPFADRIIEHSASEVGLNGNKNLGAEEARHEWILSVDADEIVPLELADEIRDVLKDPQYDGYEVARRTYLLDCWIRSCGWWPGYVVRLYRKEKVSWPPGVHETPSVPGGAGRLKTPLEHYSFPSIGLYLRKLDHFTRCEAREKWERGERLTAGNAPWHLFFKPMIVFVKKYLFQRGFFDGLAGFFVSVSAALAVFFNYIRLWEIQRTGKIPSQGGRGRSDG

SEQ ID NO: 5073 - protein, 255 aa, Unknown
  Description of Unknown: Fastidiosibacteraceae bacterium SYSU SYW-5 sequence
MMNVMASKDTLGVVVITKNEEKNIARCLQSVKWANEIIVIDSGSTDKTVEIAESFGAKVIIRHWPGDGPQKYFGISQLTTKWCLVLDADEEVTKELAESIQKTIQSGKNTCYKLHRRSFFLGKIIKYGDWGRDWIVRLFIREKHEYTQDIAHSKVNVKKSQASALKGKLIHHTQEDIYLSIKKYNDYSTLSAQMMAKKGKRSSLLKAMLRGHLAFIRSYVLRLGFLDGARGYMIARNIAFGAYLKYLKLTYDIKP

SEQ ID NO: 5074 - protein, 250 aa, Unknown
  Description of Unknown: Candidatus Levybacteria bacterium sequence
MRISAIIIAKNEEKRIAKAIASISFVGEIIVIDNDSNDSTKKISESLGAKVFSFSGDNFSDCRNFGLEKSTGEWILYIDADEIVTDELMQNINFVIQSENLISTYKIKRKNFYLGNNEWPRIEIMERLFRRKFLKKWVGVLHESPIFEGNIAILDGFLLHYSHRNLSEMLVKTLEWSQKEAKLRYDANHPQMKWWRFPRVMIPAFYKSYISQGGWRVGSVGLIESIYQSFSIFITYAKLWELQEKHGVEK

SEQ ID NO: 5075 - protein, 284 aa, Unknown
  Description of Unknown: Bacteroides sequence
MTDITAIILTKNEEVNIERCIKSLSGVADRICVVDSGSTDKTIEIAESLGAEIFHHEPFNHYAAQFNWALDNVGIKTTWVYRIDADEVVTPELAAEIVDACNEHRNDDVNGFVMKFLIAFMGKFLKHGGMYPFYNLTIFKFGKGRYENRAMGEHVILSEGRSLDLKNDCLHYDFKSLDAWINKHNWYATREVADYFSTRAIGQVDPNSLYHEAKKTSKLRDGLYYRMPKYLRAKLYFWYRYYIKLGFLDGKAGYVHAFLQAYWFRFLVDAKIMEQEIKSSHDKK

SEQ ID NO: 5076 - protein, 645 aa, Paenibacillus sp.
MDKLISLCMIVKNEEKTLSRCLDSVQGLVDEIIIVDTGSIDTTKQIAKRYTNQVYDYEWTNDFSAARNESIRRATSEWILILDADEYIERDDIDVLRHYLPTIKNESISRIALTIPITSFVGGGHNVAEGYVARIFPNNSGITFIRPIHEQLSCDSGELEYRSFSFYVYHTGYTQETMLEKNKSQRNLKILEQYSSNHKLEPYDYYTIGNEYKMIKDYENAYINYMNAFKGLSSATPWYVGCLISLIDCLFGLDRMKEVNELIESKLVQWKQYPEYFAIKARWFNQLGFYDEARVQYEEAVQIAEKLSMQNIPFWLISSDYGRIIPFNQLVQYYSRKQDLSQTVFYLIKVLNDRPYHYLSLIKLINLLVQTESIDAILQLLYKLYPNRNSVEIGLLFQVSLEVGNLSLSNHFFGISQEMSIDISPSQMLQFAVLTGDQDKYIQIMKNLDLSSDMKLDIILPLVIASVRWREPDYLLVIANDPTFYQLYILASACINEEELIISPTDEEVDMLMRLFIELFNYKLYEEYDLLLKRVSSSMLINSLANYYYTHHHLELALDYYSILLDSDELNAEGYEHLAHLHLNQGEKDDGLKFLGKASELRPDDIVLYTNMWLNCKDSLTRLKYKNELFRKFPHYVGIPIFNIK

SEQ ID NO: 5077 - protein, 275 aa, Leptospira brenneri
MEGKRKRKLSVAIITFNEEKNIGDCILSIEPIADEIIVLDSLSTDRTKEIATTFPKVKFYESPFPGHVEQKNKAIGFCSNDWILSLDADERADKTLVNSIQVFLESDSTVADGFKIARLTYHLGRWIRFSGWYPLRRFRLFRKKAATWVGENPHDYIELKPGSVGKIMKGDILHYSFTDFSHQITTINQFSSIVAYTRYAKGERFSLAKTILKPLGKFLEIYIFKFGFLDGIPGLWIAIASAFSTFLKFAKLYELDKKHIERPSNIRKEYGKNEK

SEQ ID NO: 5078 - protein, 369 aa, Marininema mesophilum
MIVKDEEDILDRALQSVKGFPDEIIIVDTGSSDNTMEISRKWTEKVFAFEWVEDFSAARNYTFEQATMDYIFWLDADDVVNSNNLKKLIHLKRTLNPSFDAVRMDYHTTFDSYGNVTTTARRIRLIKRKSPFRWIGVVHEDLSWEGKGGNPTILESDIIIIHKKMKPSTEKRNLQIYEKHLAKGLTLTTQDIFHYAQELKGDKQYEKAIGYYEEFLRKKNNSSSWRTFTYNQLATCYHLIGDTKKELEITLQSFAEGLPLPEFCCRLGEHFVKKKEYDAAIFWYELAVNVPCDKNIQGSTSETFRTWFPNKQLALCYLQLGQYSKVYRHYKKALSFRAGDEEMLRNLKLVKELMDKKKEKKRTGRKKKR

SEQ ID NO: 5079 - protein, 627 aa, Bacillus sp.
MKPYLSACLIVKNEEDMLRRCLESLKGGVDEIVIVDTGSTDKTKEIAKEFTDKVYDFEWTNDFAEARNFAGSHATGEWILALDADECVDLENVAAAIEEIKSHNNKFDTYTIDIINFVGERGERSVINKMARIYKNDGTVHFEGAIHEQIVSLKNQRNLAESLLKVYHYGYLSNVVEKKNKRTRNMNIIKKMLQSEKENGFTYFNYGQELRALGKTEEALNAFISAYKYKGDIYKEWVGICLFFIIESLVELKRYDKALVIIKDAEKVLPTAPDFPFWKAEIYFRQKRFDDAREVYTNIVMERQTYKDIVYLVESQALLPYLRLGEIYKYERLDQKALQYYVEALNENSSSLEAIANVIKILSNYHTPKEVYEFLNSRCIIKADDIRIEILKLILDLGLGELALLLTNDFTTQEQLMVSTLQLKAKMILGQELLQFTTEELMYGVKTEVIDVADLAVLYEVTNDARVQNVFENSKFKHVFYSIFNEKKQGKKMKQVEYLPILDKALRFQKPEFAERLISYINIFPKQVYAKVADLFYENGYEEIALEFYELADENHVTKQGYVNIIEYLLAQGNGEEAHRIALEALKKFKKDFRFYKYAIELGQTEQRSIVTKSLQEFPDSNWLKLK

SEQ ID NO: 5080 - protein, 363 aa, Paenibacillus prosopidis
MITISLCMIVKNEEQVLSRCLDTVKDLVDEIIIVDTGSTDRTKEIAANYTTHIFHFDWIDDFSAARNYSFRHAAGDYILWLDADDWLQESDQEKFKALKQTLDPNVDSVCMDYYVAFDPLGQPTAVIKRNRLVKRSRQFQWHDPVHEQLEVEGRIIFADIAVSHGRVHTNTERNLSIYEGLLAQGGILSSRQLLQYAMELTANGYYEKAIGIYQTIISDPTSYFEDKLQSCDRMAHCNHELGNKEQELQSLLKTFNYDIPRADYVCRIAYYFQENSDFEKAVCWYQLALKLEKPKKRLFGMNTMAWTWFPHLQLVACYGKLGQLEQAYEHNEIALSYAPNDPNVLNNKKLLEAALRKRRSEDA

SEQ ID NO: 5081 - protein, 371 aa, Unknown
  Description of Unknown: Candidatus Woesearchaeota archaeon CG10_big_fil_rev_8_21_14_0_ 10_44_13 sequence
MASISMCMIVKNEEKFLGKCLESVKGLADEIIVVDTGSTDRTIEIAKKAGAKVISYEWNDDTAAARNAGLKEAKGDWILILDADEIIGKESFEPIRKLTGMDFDAFYLVQMNYTNNTKDINFVPARKTPYSMDFSGFFPVEIIRLFRNSKGIEFTSIVHERLNESIKRLGLKTARTDIPIHHYQSLKGEAEMKRKQLAFLRLFEKKIKEFPDDEKMYHDMGIIYYNYENDEKKAVECFEKAMKLNPKYLAPMFSLAAIYSRKKDNAKAKGMYEKILAIDQKHAQTHYNLGNILAEEKNYRDAIMHYTESAKLKPNPLVFNNLGNIFVILARWDAALLSYRTAIQLNHPRKEQLQKKADEIERMIEKKKEKN

SEQ ID NO: 5082 - protein, 285 aa, Unknown
  Description of Unknown: Candidatus Daviesbacteria bacterium GW2011_GWA1_38_7 sequence
MKLSVVLATFNEESNIGDCLSSVKDIADEIIIVDGSSTDKTVEIAKSFGARVVVTENHPIFHINKQKALDLAKNIWVLQLDADERVTKKLSEEILKVVNMADEEIDKYQNTIKKRKLFIKHQKLLENRDGKIGEDTNEYCAFFIPRLNFFLGRYLRYGGVYPDGVIRLVKKNKAFFPCKSVHEQIVVKGKVGWLQNDLLHLDSPTFKRYLEKNSRYINLIVDEFRRDNVSKDIVQAFKFIVYKPIEWFLVTQIRHKGILDGFQGIVFSFFSALRFPRAFMRYLKS

SEQ ID NO: 5083 - protein, 625 aa, Paenibacillus polymyxa
MMKTISLCMIVKNEEQVLERCLESVKNIVHEIIIVDTGSTDATLDIARKYTDKIHFFKWINDFSAARNESIKNATSDYILVLDADEYLEADADLNKDLSRDCDYYVFNIKNKMSLGMSFNHTAVRLFKKSLDLHYENRLHEHLNIPDNHIKFTNGVASNVIHHVGYADEMLLEDKKMNRNLPLMELEVKENPNAYNLYNMGQTYFGIQEYEKSTNYFKKAYPLSKNRVFLPELLTKLAYALAEMKQIDEALSILTDAALLFPKETEMHYILGVIYQRAGYYRDAEACYRNCIKLGDQGYYVTEGSGGYMAHLRLSELYMQTGRLEDSLKEVIRVLELKTNFVPALQQYLRLVPKLNMKSEDVQNGLKKLYKLDSVEDLQYLLNNMYGMRSPLLDYFLTRYKINVQPNITACAKIYSKKYEEARLLWSQLDNKEEENGKDLLLLSILLKENIFLKDIQYLLNLSNKEMEIIKQMVSGHRGKVALTTVLENILLEICQYMIILEEFELFQAVAEKMIAVKRETKLKLSKILSDYGFDELAIDLLIEVFKEQPNDVEMVRLLGDLCFRNNYLQDAQLFYSKLLTLDPQYSSYERSLNYFEKINDDDAFYKTKSEINKRFPRAFHYEQE

SEQ ID NO: 5084 - protein, 308 aa, Unknown
  Description of Unknown: unclassified Pseudoalteromonas sequence
MVNCKNLTIIVLTFNEELHIKRCLESFLSLNARIIVVDSFSNDKTCHIAKSFGAEVFKNPFINQAQQFQWAIDNCNISSDWVLRLDADETVDNVLVENINSFILKNGNGHNGAIFNRKHIFLGKWVKYGGRYPLPMLRLFRRGTAHIEQRWMDEHIVLDEGSSCLLKGGFADDNLNSVSWFIDKHNKYASREVVDIMLKRLLPNSDSKINAATSLSIKLKRFFKQSVYMRLPYFVRPFVYFNFRYFLQLGFLDGSRGFAYHFMQAFWYRTLVDLKCIEIEKEWNNTNTNNEKLAILERLTGYSLDKYK

SEQ ID NO: 5085 - protein, 279 aa, Unknown
  Description of Unknown: Acidobacteria bacterium sequence
MQVSVVIITYNEEANIGRTLASVQPLVADGKGEIIVVDSGSTDRTVEIAQSYGAKVFVEEWKGYAQQKNSAIDKAAGDWILSLDADEEVDSELNEELTPHRGDNLPRASGEWRFTTEQSRNPECLNGAPVAFLVRRKNYFLGRWIKRGGFWPDSKLRLFRRAEGRFEDRAVHEDVRVNGPRKLIARGALIHHSYPTLSDYIEHMNRYSSLGAEMVVAKGKVRFSFSNIVLRPLFTFIYNYLFRLGFLDGREGLLLHLYHAVYVSWKYAKAWELSRKKPD

SEQ ID NO: 5086 - protein, 422 aa, Unknown
  Description of Unknown: Lachnospiraceae bacterium JC7 sequence
MKEKIRLSQAMIVKNEEKNIERALRWGKDIVTEQIVVDTGSTDRTVELAEKMGARVYHFDWIDDFSAAKNYAIEKCSGNWIAFLDADEYFNSEDAGKLMDYIRETEENGGEGIFTLLVNLDEHGNVGTSASHIRIFKNLSDLRYKRRIHEQLVHSDGHNIRVLDATQELTIWHTGYAGETGKEKQKSNRNLNLILKDIEDYPENYEMYLHLGNEYYGREMYPEAEKAYAVYIEHLPVEISGTDVDAANAFLYHIYALLQQDKDAGTILAAYDRAVQRIKENADIPYIMGRCLYDAKFYGEAMECLREALDRLEKYGTLNKSQNAMQNVNSIYEMLGEGSLKTGDIKSAVKYASALISVNKYSVSGLVVLLRAFKGNGTDQVPVKDVMPYLSKIYDLKNEKDKGLLMAAADAVAYEGMSEYLL

SEQ ID NO: 5087 - protein, 313 aa, Spirosoma sp.
MTDVSVIILTFNEEKHLARCLQSLQSFTDKIFIVDSFSTDRTVEIAQSMGAVVVQNTWVNYATQFNFGIANTPFKTGWLMRMDADEYVLPELAGEITQRLPTLAADISGVYVKRRVMFFDRWMRRGGYYPIWLLRLWRRGQGLCEEIWMDEHIKLADQQGSPAQTAHFQHDLVDHNLNNLTWWTQKHNQYAIREAIDLLNIKYNFEDAKRVTPKLFGSQEQRTRFLKLQYASLPLFTRPFLYFLYRYIIRLGFLDGRPGLMWHFLQGLWYRFLVDAKLYEVYHTVGHDKQAIIDYFQSEYGKNLKPGRPHPVG

SEQ ID NO: 5088 - protein, 366 aa, Bacillus sp.
MNYPITISLCMIVKNEERVIERCLSSVKTIVDEIVIVDTGSTDRTKEIVKTFTNYIYDYKWIDDFSDARNFSFSKATKDYILWLDADDIITEENREKFLLLKQNLSFDVDAISMAYHLTFDNEGKPNFSSRRNRLIKREKQFKWYGIVHEYLEVSGNILDSDVAIVHKKESAHSDRNLRIYEKAIEDGKQFSPRDKYYYANECMDHNMYEKAITWYQAFLDEGNGWIEDNIEACGKMADCYIHLQKWPDAINSCLRSYNYDAPRGENCCRLGFIYLQQNHIKQAISWYELATVLKIPETKSPFINRACYTWLPHLQLCLCYSILGDYNKAQKHNDLAASFVPHNPKVQHNQNFLSSILKRGKEKDD

SEQ ID NO: 5089 - protein, 248 aa, Unknown
  Description of Unknown: Candidatus Woesebacteria bacterium GW2011_GWB1_38_8 sequence
MISAVILTKNEEKNIKSCIDNISFCDEIIVIDDCSIDKTTEIAKNMGAKVFLRMMNKDFSAQSNFGMQKASGDWILLIDADERVSNELKQEIQNSLNNDRTVYKFRRIDYIWGRWLKHGESGTTQAVRLVKRNSGKWIRRVHPYFRTTKDVALLSNPIFHYPHQNVRLFLESINRWSTWHAIANQEECKQSSLVKILFFPLGHFVKNYLFRLGFLDGLAGFVYAVMMSLHSFLAWSKLWIQQKNFKIN

SEQ ID NO: 5090 - protein, 254 aa, Unknown
  Description of Unknown: Candidatus Omnitrophica bacterium CG11_big_fil_rev_8_21_14_0_20 _42_13 sequence
MSAKLTVVILTKDEEDKISRCIESVKWADEVLVIDDESMDRTREIAKGAGARVIVNKSNGNFDNQRNIGIDNASGEWILQMDADEVVTDKLGSKIVEAISSPEDFAAFQFRRKNYFLGHFMRYAEQYHYWLRLFRKENGRYIGADIHEKLKIDGKTGVIEADMEHFAFTSISQFIARQNHYSSFEAQAMFVREGALPEKVIRYNIKIKPLKIFWKNYIKKNGYKDGMHGLIWCVLLAFRHIMIWTKYWEIIKQK

SEQ ID NO: 5091 - protein, 638 aa, Paenibacillus sp.
MGKPGILIGSPIRQKPEILKQFLRSLGDLITDGFDVEFYFVDDNDDPASRVLLAGFAEEHPGSFIQAHEPPTVPYVRNDNTHHWPEELVWKVAGMKDGIIEYARSKAFDYLFLADSDLVLHPHTLLQLANAKKDIVSTVFWTKWQPDSPEMPQVWMSDHYTLYENRGGEKLDDQEIARRTHEFLNKLRVPGLYEVGGLGACTLISRHALEAGVCFRKIPNLSLWGEDRHFCIRSAALGLSLFVDTHLPAYHIYRDSDLAGVDAYRQASSPAIRKERSVTVSLCMIVKNEEEALERCLSSVKDLVDEIVIADTGSTDKTREVAASFGAVIVEFPWIDDFAAARNHVFSKATKEYIMWLDADDIILAKDRQLLAETLYTLNPAIDSVTMPYNIGVNANGKVSYSLRRNRIVRRERGFRWIGAVHEYLEVFGNIVHSEAAVTHRKEKAYTDRNLQIYRKQQAAGKDFSIRDLYYFANELRDNQLFEEAAVYYKKFLATGLGWVEDQINACLKLSACYSRMYEQDKALQALFRSFHFDKPRAEACCRIGKFFYDQSPKRLDQAIYWYELATVLPKPKGALAFVEHDAWTWLPLLNLCLCYDQLGQYEKANEYNNRALAYNPEHPSMLHNKKYFEGKFAKEAQ

SEQ ID NO: 5092 - protein, 359 aa, Unknown
  Description of Unknown: Thermoanaerobacterium thermosaccharolyticum sequence
MDDSITISLCMIVKDEELSLDRCLSSIKDAVDEIIIVDTGSTDSTKNIAKKYTSKIFDFKWIDDFSTARNFSFSKATMDYILWLDADDYVEPLDLEKLTKLKNNFDQSVDSVTMKYVLAKDSNGTPSFISIRNRLVKRSKNFKWIGAVHEYLEVYGKIYDSDIHIVHDKIKNTPNRNIEIYEKMIKSKKDFSPRDMFYYANELADHKRYAEAIDYYNMFLDSKRGWIEDILYSLGKLADCYEALGDLTRRDDVLFKSFEYDIPRPDFCCRLGYKFLQENKIRQAIFWYELATKVEKPNHGFVNIACSTWIPHIQLCICYYRLGDIEKSYMHNEEARKYNPNNPMVLQNKTLLESILNKR

SEQ ID NO: 5093 - protein, 254 aa, Thalassospira lucentensis
MADKAPRLSVVMCAHNEEERLPSCLAHLTFADEIIVLCDKCTDRTEEIAREFGAKTIVGSWDIEGERRNRAIAEATGDWIFEVDADEHVNEELAKSIRKAMETDEFDRFVIPVDNYIGRRLVRYGWGASFGTSAVWRLFRKGCKKWGPQRVHPSIELLGRAGPRLDGALLHYVDRNISDMIKRLNSYSSARAADLRASGNIGSFANNFRRIFSRFFRCYVSRKGYKEGGMGFLIALLAALFPLLSYLKARYDDE

SEQ ID NO: 5094 - protein, 253 aa, Brumimicrobium glaciale
MEHKITSTIITFNEERNIARCIDALAPISDEIIVLDSFSTDRTIEICRSKNVRIEQREWKGYSNAKNHLNQLATHEYIFSVDADEAPDEILQNAIFFIKKEGLIGVYEVNRLTNYCGKWIKHSGWYPDVKIRIFPKSTSQWEGAYVHEELVVEGNPVAKNLAGHLLHYSYYSQKDHRQRADKYSELTAIKMHEKGKRVGPLKPYISAVGRFVAMFFIKKGFLDGKAGFTIARISALSNIYKYKELRRLQHENS

SEQ ID NO: 5095 - protein, 657 aa, Unknown
  Description of Unknown: Desulfitobacterium hafniense Y51 sequence
MYTLASILDFKRSQIPNRREDGKMKISACMIAKNEEKVIARCIESYRKAVDEIIVVDTGSTDQTVAIAQGLGAKVFHFDWIDDFAAAKNYALDKAKGDWIVFLDADEYFAHSTGGNLRSFLRKLDKTVGAVACRMLNMDEVSGKVIDEITHIRIFKNDKQIRYIRPVHEGLVYHREGAQLQARLADRRELMIHHTGYSANVSKEKAQRNLTMLLKLMENDTLANPEYYYYIADSYNTLGDYEKVVTYIRLFLATGVKLTNLNVRVHSILINAMLNLQYPAHEVMEEVESAIAIFPRHPLFYFYKAKFLHDDSCYEAAWVEAQRARQLHDTYEDIEINDLPTNFGNLYNMLGAISEFKSDSGAAMGYYLDALKLDKYEALAFSRLMKLIRTQPLEEIVAFLNTLYDLDNEADLDFLAMSLVNHAVPQVLAYYTSLREKKYPKEDYVVLQMLVANGRYDKAFATLLDCYIKDGDERLALVTATAAALSGNVVYMLQAIEQLPSAYANILKAYQGERVLFDEEDRAAFMKILRTFILWADDAAKQKLFELADQFPDGLAVIGYQFLQEGHYQESLAYYSAAVEQALAAASFAVHPLLYYQQGYCLHRLNNPVAAAEAFVKAYEAGYQANDIYEYLRWNADKLPSGSRLKEKVLKIIYRIQ

SEQ ID NO: 5096 - protein, 362 aa, Bacillus sp.
MGGISISLCMIVKDEEDSLSNCLASVRELVDEIIIIDTGSKDNTKQIASAFTDHVYDFEWIDDFSAARNFAFSKATKEYIFWLDADDILTEENQEKFSTLKKELPPHFDSVMMFYHLSFDGNGNPSFSSRRNRLVKREKNFQWIGFVHEYLEVTGLTFQSDIAIHHKKEKSFNDRNLRIYKKLLQSGIDFSPRDKYYYANECNDHGLYDDAIKWYRKFLEEGKGWSEDNIQACGKLADCHIQFKDWVSAVQSCLKSFEYDTPRGEICCRLGYIHLEQHDYERSIFWYNLATQIEIPETKSPFIERNCYTWLPHIQLCVCFDRIGKLEESKRHNELAADYFPDHPSIDYNRRYFKSIEKKEKS

SEQ ID NO: 5097 - protein, 486 aa, Enterococcus faecium
MTDRYFLSILFDCIKNKVSKSQSILHNMTEACIRGDQMKKVDKYISNEWFDYDRVKNADCNLYLYNQHENLIGTWIKILQELHFSEELFLKTERLSKQTLFLKDTAEVSVCIISKNEEKNILRCIDSIYNLADEIIFVDTGSTDHTRDLIEEVADTKFKIFDYEWSNDFSAARNFSIEKATKEWILVIDSDEYILPKEIIKIKLLISMFDRYEKKENIRISCAIKQSNGVITHSQSRLFRNNGLIKYFGLVHEELRINKKINSLINIESGVSVFHDGYSDTVSTHKEERNTNLLLKMMKIEPTYIRWTYMYCRDSFKILPELNIKKLLLPFILKNYDEGLVKENIQNTRYTNLILLLILKKSFMEEEEQTINKCISILEARIPNSSDIMFYKLMKTQQEIFYQQVDLLKTAIRYRKRRITDEFSQIGSNLLHFDLFISSILFDIKSYENSFSYFETLNKKDYFKNLEIPFEYKLLSAVFKGEKYES

SEQ ID NO: 5098 - protein, 361 aa, Lysinibacillus sp.
MVSISLCMIVKNEEDVIGRCLASVKDLVDEINIIDTGSTDNTKEIAKQFTERIIDFKWIHHFAAARNFSFQQATKEYILWLDADDVFLAEDQEKFKSLKESLNSNIDAVSMNYHLSFDSEGNVSSLLRRYRLVRKDKQFQWIGAVHEYLEVGGNLLNSDVAVSHLPLSHDHSRNINIYRQLVQSGEPLSPRDTFYYANELLDHGQFDDALFYYETFLTSKLGWVEDNIQACYKLADCYFNLKDKENYLSSILRSFEYDIPRPEACCRLGFHFMEQFKNYEAIFWYEQALVIKQNPNAPFQNKTYTTWLPHLQLCVLFDRLQQYELANAHNELARSFIPNDEKVLHNKKYFEGILIKEHKDS

SEQ ID NO: 5099 - protein, 357 aa, Lysinibacillus parviboronicapiens
MVTISLCMIVKNEESIIERCLDSVQHVVDEINIIDTGSTDRTKEIVQNYTTRIFDFIWCDDFAKARNFSFQQATKDYTLWLDADDVLTTEYQQKLLQLKKSLNPNIDAVSMDYYVQLDEDGEIEISEKRYRLVKRSRNFQWQGAVHEFLHVKGKLFHSDVVITHLPLKKDRDRNIQIYERLMAAGHSFSARETFHYANELKSHQRFLEAINHYNTFLDLDLGSAEDKIQACLNVSDCYQHLRDSKQAIQSLLQSLLYERPSPETCCRIGHLFMEQFKNETSIYWYSQAIQQSSTTLGTQRRAYSTWLPHLQLSKLYDRLGLYENAHEHNEAARRYKPNDKRILDNEKYLYSRLNKGK

SEQ ID NO: 5100 - protein, 299 aa, Teredinibacter turnerae
MSTVSAFVLTFNESLHIERCISSLSRICKKVYVIDSYSTDNTVDIAVSAGAEVFQNSWVNHANQVNWAIKNLPIETEWVMRLDADEYLTEELAEEMKLAIKQNGGHTHYYIKRKVIFMGRWIKHGGYYPTWLLRLWRHDSSASCESRLMDEHIKVQVGSSGHLREDIVDCNLNDLTWWIQKHNRYATNEAIEVFKALFKFNDDNIKPSLFGTQERRKRWFKSLYAIFPLFVRPLCYFVYRYFLLAGFLDGKQGVVWHFMQGLWYRFLVDAKIFEIKLKCGDSETLIKKYIFEKWGVKIE

SEQ ID NO: 5101 - protein, 362 aa, Anaerocolumna jejuensis
MPTLSLCMIVKNEEEYIRAALESVKDVVDEIIVIDTGSSDNSREICALYTDKVYEAEWRKDFSAARNMSLEKASGDWILWMDADERLVIKEKEAFKELLEGDREIYWVKLLHLIDSEGEEKEYYISYHNRLFKKKEEFYFKGSIHERLVTESGIMPEPGDTGNCMEILHYGYNTAHMREKALRNLRICLKEREKDKDNPWLDYYIACELYRLGNIKDALELVNHGILGFLSQGKLPPALLYKLKYDILLTNGNLESVCEGLSKAVNLYPDYVELHFYRGSALLKLNRYEEAKKEFSYCVLLGEDNGNYLIRSGSGSFLAYFYMGEACLKAGEKENACEAYEQALLNNPGLEEAKNRLEVLRT

SEQ ID NO: 5102 - protein, 249 aa, Turicimonas muris
MSVVILAKNEEKNIEDCLESCKFANEIILIDDGSSDRTVELAKKFNAKIFERSLNGDWGSQQSFGINQTTQPWLLLLDCDERITSSLYQSIKDVIGTGEKKTYLIQRENHFKHYHAQHGTLRPDWVQRFFPNEGIRVEGFVHPKIISSFPEKKLQGRMIHFPYENPDQYYRKLNQYAKLSAEKYFKEERKLSFFRDIVLRPAWAAFKVYFINLGFLDGKIGFIFAANHYSYTLQKYIRYYLLRHSGGKF

SEQ ID NO: 5103 - protein, 302 aa, Chitinophaga sp.
MDLAVIILTYNEEKHIGRCLESMRRVSDEIYIVDAFSTDETVAIAESYGAKVFQHKWVNYAQQFQWGLDNCGIKAPWVMRMDSDEYLEPGLIREINHKVHQLPADVSGVYIRRKVLFKGKWIKHGGFYPHNLLRIWRNGVGSIEQRWMDEHIVLSQGKTVQFKEHIVDYNLNAIHWWVNKHNNYAIREMVDLLNIKYRLLDADKRLLEMESTQAKRKRFLKERVYSSLSPGMRASFYFLYRYVLRFGFMDGYHGFVFHFMQGYWYRLLVDVNLEEFERKLNGDKGKEKMLAVLKEDYNIVLN

SEQ ID NO: 5104 - protein, 642 aa, Bacillus kyonggiensis
MKPFLSLCMIVKNEEKVIERCLSSVAHLIDEIIIVDTGSTDHTKEIVAKYTSNIYDFEWNNDFSAARNYAASKATGEWIIALDADEYIDEENFKDFIQELIEDDAHFDAYSAKILNFAGKFGENLVQNFHDRIYKNNGDISYYRNIHEQFKNNKGKPLKNKNSSLLIFHSGYLNQTVYEKGKSERNKELLDREMSNGGNKAFDYFNYGNEYCSIGDYENALESYLKAYKMKADFRLSWVSTTLVQIIICLMNLKRYNDALNVIKDAENMYSTSPEFSYLKGEIFFLRGQLEDAKRMFLQIINNEDKYSHIILRPDLKNQRPHIRLGEIFLHQEDYNGAIYHFTSVLNINKYHEVGIKKVVFILNKFHTVEEISGFLISKELVNNKNVKSYVRACFEVGNPSLASCLLDRFHEENKLLSKVALLKKQLIKHEGYTEDFSEILQNEVIKSLNEANWINIIDFYLLRELKSEDEKLPSFLAPFEKNKSFQSLMNLLSGEAPDGNIDEELLLFSLQTLLSYKKSSLCDVILSNIQNAEKNVISKIAALLFSHGYKVEALQLYDKGDWNHFTEQDFINIINSLMETNNKPNAIEFAKYAMMIFENDFRFYIYILENAENYNLLVTTLEKAKNIFRDSFYLENFKLLG

SEQ ID NO: 5105 - protein, 301 aa, Arcicella aurantiaca
MQDITVIILTFNEEKHIERCLKSLLTFTDKIFIVDSGSTDKTVELAESLGAKVTQNQWVNYATQFNHGIKNNPYQTKWLMRMDADEYVLPELSEEINQSLHNTPAEISGMYIKRRVMFFDKWIRHGSYYPMWLLRIWRNGQGICEESWMDEHIKLFEGKTIQMKYDLVDHNLNNLTWWTQKHNLYAIREVIDLLNIKYNFRDFEAVEPKLFGTQEQRKRYLKVKYASVPLFTRPVFYFFYRYIFRLGFLDGKQGLMWHFLQGFWYRFLVDAKIYEVYHRVGRDKQAIKDFFKTEYGKDLEK

SEQ ID NO: 5106 - protein, 264 aa, Unknown
  Description of Unknown: Candidatus Woesearchaeota archaeon CG10_big_fil_rev_8_21_14_0_ 10_44_13 sequence
MKKQKLSVVIAVKNEEDNMGRCLDSVRWADEIIIINNGSTDKTAEICKRYTKNIYSYPKKALIPQIQNEGIKRATKEWVMILDADVVVPAAAKSEILDKITRGNNDGYYLYHKHYCFGKFLSHNNTNDIMKLFRRDKGRFECEAAHCHIKIEGRIGSINSPLLHYAHPDISTQVKKSNLYSSQDAEMIFRTGKGGLLNKRIRKINIYTLLIEPVMFTFYMYFFNRLYKEGLRGVILSILMGNYLFMERAKVLELQFKAISSKQG

SEQ ID NO: 5107 - protein, 282 aa, Unknown
  Description of Unknown: Microgenomates group bacterium GW2011_GWC1_44_37 sequence
MASFNNEDCIADCLNSVKEWVDEIIVVDGTSSDKTAEIAKKMGAKVLIRENNPVFHIQKNIANKEAKSNWILQLDTDERVTPAMRKEIVGLLEGKYFGYDSWLSPLKSSINKIVRLFPEPIKLSQPAVAYWLPRKNFFLTRYQKHAGQYPDPVIRLFQRGKAELPAKDVHEQMVVHGTTGWLVSDLDHYATPTFSRYLLRENRYSSLKATQMKAAGVKINFFNTLNYLFFKPFGTYFSLYFRYRGFLDGFPGFVFSLYSGLHHAFSYMKLWELYKDEEYAPR

SEQ ID NO: 5108 - protein, 368 aa, Cohnella phaseoli
MITISLCMIVKNEEQVLERCLASAAPLVDEIIIVDTGSTDRTREIALRFTDRLLHFAWIDNFSAARNYSFDAATQDYILWLDADDVIAPDNQQKLLELKRTLSPDTDSVSMIYELSRDEYGNVAHSLRRNRLIKRSNRYSWQGAVHEVLIVGGHIVTSDIAVAHCPLTDADPGRNLRIYSQREAQGLPLTPRDRLYYAHELLEAQQYRQAAAHYERFLDEGEGWIEDEVTACSKLADCYHALGEAEQEWNAICRAFRYDTPRPEFCCRIGFSLLHRGKYEAAAHWYRLAIELPAQEKWALENHACRTWLPHLQLCVCYDRLKLHDLAYAHNEIARTYRPDDAAILQNKAYLEPLVSRQDSASDNQEAG

SEQ ID NO: 5109 - protein, 361 aa, Bacillus cereus
MVTISLCMIVKNEEKVLERCLQSIKGIPDEIIIVDTGSTDCTKEIAKKWTPHVYDFKWIDDFSAARNESFRHATKDYILWLDADDVLLEQDKTALQTLKHSLQPQIDAVSMKYHAHFDTQGNVISSAFRFRLLKRERQYRWIGVVHEHIPVTEQDQTYQSNIVVTHQKENPQRSVRNLTIYEKYVAGGGTLTSHDLFHYGRELISNHRYEEAVDVFHKFLDSPDISDEMRLFIFNELASCYYFLQNIEQEHQITLQSLSYDMPQPVFCCRLGEHFLRQGKVEGAIFWYKQATQLPVSYSWTVDKKPFYTWLPHKQLGVCYEMKKENRQALKYYQKSLTFLPDDTEVQQKIQHLKKQMKKKK

SEQ ID NO: 5110 - protein, 253 aa, Unknown
  Description of Unknown: Candidatus Roizmanbacteria bacterium CG_4_9_14_0_2_um_filter_38 _17 sequence
MVKKVTISVAIAVYNEESNLARCLKSVKDWVDEIVVVDGGSSDKTVEIAESFNAIVIHTDNPQIFHVNKQKAIDACKGIWILQLDADEVVTAELKSEILEKVETGVDGYWIPRKNYFLGHWLKKGGVYPEYTLRLYRNGKGRLPCKTVHEQAQVDGEVGYLKSDLLHYPYANFAGYLAKAEAYTSLTARLWKDQSIKINPITTIKYMIAMPIYTFFNIYIRHLGVLDLFPGFVWALYSALHFPQAYIKLWRNK

SEQ ID NO: 5111 - protein, 603 aa, Clostridium chromiireducens
MSLSLCMIVKNEESTLGRCLESVKNIVDEMIIIDTGSTDDTIKIAERYGAKIFHYEWDNSFANARNYSLSKASKDWILIMDADDELRSEDKDKVIKLINDDNKLNAYFGETLSYSGDSSDYNIYSNLNIRFIKNGKGYKFSGAIHEQIIPGTEDAKKQAFLGIADIKFYHYGYLNKTVNEKNKRKRNMDIIEKILKENPDDTFMLYNMGVEYSAKGDYAEALKYLKKAYRNFNPSLGFGAKLLLKMISCNNVLQQFDECLTLIEEGLKYYPSCTDFEFYRANIFYIKKKYYSAIESAKKCISMGEPPILLREVSGVATYRPYYLLGIIYSTIDDYDESYKCYDEVLKTNPKFSDAIYRISEIMTIKNMCLDEMQKKLESYFDNLNQETNLLLSKIFYIQNKFDIAYNYAKKAESLNKDLLEVNFYKGLYSFYLGDYKEALENLYKINDGENHNNAIYCSILCELFIKNYEQADNLINISRKFNEPEETMVYETFISIIKEDKYIQLADDKENSKKFIKPIFNLLEVLLRANCFQGFKKAVKLLNLIDDDSIFMLLGKLYYKYGYFSFAYKEFIRSINLHEIIDADALRMMQTILLSQNESKIN

SEQ ID NO: 5112 - protein, 361 aa, Pseudogracilibacillus auburnensis
MITISLCMIVKNEEEVLAGCLNSVKEYCDEIIIVDTGSTDETKKIASKFTKKIYDFKWIDDFSAARNFAFSKARMDFIFWLDADDILLENDQKKLRNLKKSLNTDIDAVSMNYILQFDEYGKPSFYFRRHRLVKRINNFQWKGQVHEYLEVGGNILQADIAVTHRKNKKNKDQQSSDRNIKIYEKRLEKNEKFSPRDLYYYANELKDHRQYNKAIQYYQKFINCDQGWYEDKIRACLYMSDIYRVKKEHENECKLLLQTFKYDKPRPETCCKLGDYFLRKKLYYPAIYWFETAVRTKYKNPQGFHHEAFSTWYPHLSLCFSYWRIGNKEKSIYHHEIVKNIRPNDPKVLYNEQFFNGTAKK

SEQ ID NO: 5113 - protein, 322 aa, Unknown
  Description of Unknown: unclassified Bacteria (miscellaneous) sequence
MVSISLCMIVKNEERVLARCLDSLMPAMDEIIIVDTGSTDATKEIAGRYTEQVYDFKWTGSFADARNFAASKATKEYIYTADADEYLDEENQAKLKQLKMILLPEVEMVQMLYCTSAENNTVYNFEKEYRPKLYRRLRPFVWIDPIHETLRIDPVVYDSQIEIMHCPEGNHASRDLQALLQAGKRKERFSGKLHHMYAMELYHSGTDKDFTDAIPVFEKTLSEDNRTMDEVKEAMCVLARAYRIAGNLPKFFGFALKDAVTSSCAEICCELGKFYEGSGDTEEAILWYQNAATETESILDIRTSQDIPREGLKRCGVEETDG

SEQ ID NO: 5114 - protein, 354 aa, Bacillus sp.
MIVKDEEDVLERCLLSVKNLVDEIIIVDTGSTDRTKEIASRFTHKIFEFEWVNDFSIARNFSFSKATKDYILWLDADDVIDEKNQEKFLQLKQELSSLVDSVMMPYHLMFDSEDMPIYSTMRNRLVKREKGFAWRGIVHEYLEVHGNIIHSNTSIHHKKLKAYTDRNLRIYRELVQKGEMLSTRDLYYYGNELCDHAFFEEALMVYEQFLQTKKGWIEDEISACINMAHCYANLNNNEEQIKSLFRAFLYDKPRAEVCCQLGQAYFDLQKWNQAIFWYNLATTLESAPQFRGLSYREEAWTWLPHVQLCVCYDKVGNIEKAMQHHRIAVEYNPNHPAVIHNEKYFSKLVEAGGV

SEQ ID NO: 5115 - protein, 282 aa, Unknown
  Description of Unknown: Cytophagales bacterium TFI 002 sequence
MKLPITAIILTFNEEKNIRQCLRSIHGQVDQIIVVDSYSTDNTLEIIAEFEGVELNQHEFVNYSVQRNWAFDNLTIRNEFIFNLDADHRPSNELFSELSEIFRNGISNEINGFMASRKTMFFGRWVKYGGHYPIFHAIIFRKGHGYCEHKEYDQHFVIEGPSITLKNDIEDTITSSLGEFTLRHNRWAELEAKEAIKLLDESKKVKADKNGNEMEKRRYLRLKYYSYPLFWRVFAFYFYRMIIKGGFRDGVQGLLFHTLQGFWFRFLVDAKIWEMKNIKNDD

SEQ ID NO: 5116 - protein, 247 aa, Unknown
  Description of Unknown: Candidatus Roizmanbacteria bacterium CG_4_9_14_0_2_um_filter_39 _13 sequence
MISTVIIAKNEEANIASCIKSVLFSDEIVIIDNGSIDDTVSIAKKMKARVVEFPLEKDFSNLRNRGLEEAQFEWILCIDADERVSEILKHSILSELASPRYSSYFLKRRDHFWGSIMKYGEVRNAYVRGYIRLMKKGEGKWSGVVHEIYQDSKPSGFLEGFIEHYPHGSLSEFIRDVNQYSSLRAEELHKKKKTTNMIEICIVPIFKFFYTYILKFGFFDGHAGFVYSFLMSFHSFLVRSKLYMMKS

SEQ ID NO: 5117 - protein, 622 aa, Unknown
  Description of Unknown: Desulfobacteraceae bacterium sequence
MKRGINMPGKGSISACMIVKNEEKYLPSCLRSIGDYVDEIIIVDTGSTDNTVSIAESFGARVYHHPWENNFSKHRNQSFSYALGEWIFYIDADEELLPGSGEALLEAGRAKEDVDAVAVVLECIFDRGQSRAYNNAIRFFRNHRGLYYKGRVHNYIVGVKKSICAPIHLFHHGYNLDKKTSLLKFQRTTGLLKLDIQEDPENPRAHHFLSASYLSEDMFQEAAKEASEAIRLYEKRHSLSPNYLWSLYIASSANFSSGRIEEAEFYARKALAVFPNHMDSHYMLSLVAYGNKNRAMFERHMEGYLKAKDAFEKNPISFGETVNNTFGSEWIMFLFRGFFLLDEGKEQEADEALKRASSLCLDQFFFHFKLGEFFRMKRRWQAAERELCKALQIKQDEPRAIYALSTVYGEQRRLGDRKALLEKILRIDPQFKDARFNLALVHMELGEFERSLALFREVLDGDPAHQRAGINEALCLRGMGRYEEALERSLQIEARDRDELLTLVENVAQCYEALGKAESAVEWFQQMTEIAPRDPAPRVHLSKLYLGMNQVEPCVLQCDRLLSLLDLNHNRILNSVKDLGGLFQEAGKQLRLLNRPELGELSLQVAKTLQDFPPADTGEERV

SEQ ID NO: 5118 - protein, 301 aa, Sphingobium sp.
MPTLSVIILTFNEERHIERAIASVRSIASDILVVDSFSTDQTIELARNAGARVLQNRFVNQAKQFQWALDHGDVRSAWILRLDADEVIEPDLAEELMRDLPSLPEDVVAVNFKRKHIFMGRWIRHGGRYPLVLLRLWRNGHGRVEDRWMDEHIVTWGGRTVTARGGFADICLHDLSFFTAKHNSYATREAVEILNARYGLFGQDRERNLGSAQARVKRFIKTNIYNRMPLFAGPALFFFYRYIIKLGFLDGREGLIYHFLQGYWYRFLVAAKVVELEQGLKQCGANTDRLDRLRQLTDLKL

SEQ ID NO: 5119 - protein, 252 aa, Unknown
  Description of Unknown: Veillonella sequence
MATVTVIILAKNEEQHMKDCIASAQFADEVLLIDDGSTDKTVEIAESMGARVVHHAMNGDWSQQRRFAVEEARSEWIFFLDADERISPELQREIQDVLAKDDKKAYWIERSNVFHHNKATHGVLRPDYVLRFMPKEGTNIEGFVHETISSTYPEAKLHGKMYHYTYDNWHQYFNKFNNYTTLAAKKYKENGKSCSFVKDILIRPSWAFFKVYILDRGFLDGKMGFILSVNHYFYTMIKYVKLYYLLKSNGKL

SEQ ID NO: 5120 - protein, 319 aa, Unknown
  Description of Unknown: candidate division KSB1 bacterium sequence
MKELLWKAKKYKNIYLIMGKVDHSDLSLCMIVRDEGENLKRFFENTKGYFGEIIVVDTGSTDDTVNIARKYGAKVYFKEWNDDFSEARNESLKYATGKWIVVLDADEFIDRDNYNKLLEYLNSGEGIAYYLNFRSQVPESKAGSVFINSHPRVFKNGLGIYYEGRIHEQIIVSVMKAGGKILPTCVMVEHYGYQKDETTRKRKIERNINILKKEISEKPECGINYYYLGEEYSLLFDWEKAINFYENGILKGDLSSFNRSVLHQNLGSAYLNTGRLDKAIKEAEVSIELNDTLFTPYLIIAEAYFKKGNFNGVIWHLKK

SEQ ID NO: 5121 - protein, 391 aa, Enterococcus faecalis
MKLNLGLILSYPDVYKNILEKDYTITKFPNISVCIMVKNESRCIKRCIESIYQLSDEIIIVDTGSTDNTIEIVSSYSKTRIFKKYWNDDFSEIRNFMIKNAKNEWIFQIDADEYINEKDISNYKEIISILDVANITPKVVSPKILDYDNNETYSTFRIFKKEPKLKYHGLIHEELRYNNTTTFPTISIDLAINHDGYRPKIICDKDKYSRNYRLLKKMIQIEPRNIRWYFFLVREALLFNEKSKIIEKYIEQALDITSENNEYKAGILIKYIELKLDSDPNFALDIINQYINIFPNCIDFIYYKLLLASRNAFEIVSSENKNSINELREIDNQYSFIDSNGSHIFEVLGWNYFLLGDLEIAQFFFKQIKNPNIQKSVNDKQEFIKKFLEGE

SEQ ID NO: 5122 - protein, 642 aa, Bacillus sp.
MKKTSLSVCMVVCNEEHYLTRCLNSVKNLADEIIIVDTGSTDQTVTIAEAFGATIINYTWNDDFSEARNRGVNEATGDWILILDADEELDILCHPKLVDLITTSNAEGYYLNFINYYGKFDKAHYFTDRACRLFQNHFHIQFRGKIHEEITSSMNELKLQIKESDLTIFHYGYLDDMITLKKKNTRNVRIIEKALQVTPENIRMKYALGVEHLQASQNSQALNTFVELLEQLPPTSDYVPDLLLKTVHLMRLFHQDSKALLLIEQGLTYYPDFPDLLDVKADLHLFLNQYESAKNTLLRSLNSYRDNSNYSSLSGSGSYRSAYILGTIYEKLLEPTEALYYYEVALDFHPAYIPAWSRWVLGHLFFSSSSEMMNKLTSWKEQLTKEQWIVLIRSLTYNGKFHFLEEIWGLVPLDIRAELISTIKPLSVSIKLFIEGHKQEALAALHSEKRELKMEEILFQWAIVYEENQDGIDLLNTYSSKYLVLRNLNEVLEHGQQSDEHKYALYLAKLMLIETQCWKGYLRLINTTQALTSEDMLYPLSHFYLILASPQWFIKGIVKQLTSILLHLNEREKLTLSILLLKLKNYHGAKEILNSLITHSPTNPLPRITLSYLYYLLAKQHGSSEKLVDENRLIAIAFHLSS

SEQ ID NO: 5123 - protein, 284 aa, Unknown
  Description of Unknown: uncultured bacterium F39-01 sequence
MQPADLDLIILTLNEELNLEYCLRSVQGLPKNIFVVDSGSTDKTVEIAERYGAVVVTHEFITQAEQFNWALDNLPLKSQWILRLDADEVLLPELRDEIAATLPGIRSDVTGLYLKRRMMFLGRWIRHGGYYPTWILRLFRKGKARSEQAELNEHIVLLEGTSERLKNDFVDHDHEGLASWTNKHEGYASRHARFLNGLKNGHDDTFIQPQIFGPQAHRKRWLVQNVYGPAPLFGRAFLYFAYRYFFRLGFLDGVPGLIFHYLHGCWYMFYTDAKVYEQRTKQNI

SEQ ID NO: 5124 - protein, 364 aa, Paenibacillus solani
MNSISLCMIVKNEELVIERCLTSIADIVDEIIVVDTGSTDRTKEIVQSFTKSIFDFEWIDDFSAARNFAFSKATQNYILWLDADDVLLEEDRNKLKSLKEALSPTVDSVTMLYHLSSDEYGNVTFSLRRNRLVKRERAFRWIGPVHEYLEVYGHVINSDIAITHLSSDQDSDIGRNLRIYQNREIAGESFTPRDLFYYANELKDHRQFEKAIDYYERFLHTEKGWIEDIITTCGKLSDCHHELGNKQLALESSIRSLHYASPRAEFCCRIGYHFLENHHYDTAIFWYKLAIQLDLPPDYMGFHNPSYSTWLPHLQLAVCYDRIGSYMLANEHNETALAYRPEDKTMLANQAYFRNKLQELESQS

SEQ ID NO: 5125 - protein, 500 aa, Unknown
  Description of Unknown: Ignavibacteriae bacterium HGW-Ignavibacteriae-2 sequence
MLSLSMIVKNEEKYLKDCLESVKDVADEIIIVDTGSTDGTLGIAETFGAKIYKYDWENDFSAARNFSLSKCTGKLILYLDADERLHPDSKKIINKIKKTDKPNGYNCKIINLDEVNNRPSVMTYIRLFPNNKNVSFSGKVHEQIETSLLKNNYKIEESDISILHIGYSIGREGLKIKAKRNLIILLNEYEKNKSSYYAFHLGQTYNILEHKEEAMRFFKIAVKDKNIKKEYLSTSLRVLAVYESEMGNLEQAVTFIEKAIYYDKDQPLNYMVASNFYKKSGDIKRSILFIEKALGINRESSKNNYKSSQNILLDDYLIICTGLLLSIEGSDNTSKKYFSNELINLSNQKPGLKAEINFLLILLEGKAALTNIRDIKEYTNDSNLELVIKLLTLSSDIQTVGSLFESLAEKHYDSAYVLKEYAMYSLKMGDTKKAEKLFDKAIELNTNDPSVYFYLVSLYIQSNRIDKLRGVLNKAQELFANNPAVISQLNKLRQKLSQII

SEQ ID NO: 5126 - protein, 358 aa, Paenibacillus agaridevorans
MLGISLCMIVKNEEESLGRCLSSVRDVVDEIVIVDTGSTDRTKEIAASFGAAIYDFEWIDHFAAARNYAFDRATQPFILWLDADDVVEPEDRARLKTLKEENDEDFPYDSVSMNYHLTFDHKGNPVFSLRRNRLVRRSLGFRWIGPVHEYLAVFGRILHSDIAVTHRKERLHTDRNLRIYLKRRDAGETFSPRDQYYFANELRDNRRNEEAIEWYGRFLDGGKGWVEDNIGACMKQADCYGRLKNSKGQLASLFRSFGYDTPRPEICCELGSVFIRQERFEQAIYWFRQALTVERPAGNMGSTDHATSTWLPHLQLTVCYDRIGNRAKALEHHRQAMTFNPDHPSIRYNENYFNKTKT

SEQ ID NO: 5127 - protein, 360 aa, Unknown
  Description of Unknown: Lachnospiraceae bacterium A4 sequence
MSKIPVSVCIIAKNEEKYIGECLKRLEPYGFEIVVTDTGSTDQTVEIAKQYTDKVFEFEWVSDFSAARNFCVSHASNNWILALDCDEYVHSIDVPSLRRIMQQYPRALGEIQMKSLVQSRGVTSYAVDVVRRFYNKNYYFFEGAIHEQLQAKDEKQRGKAFEEITLPMEVIHHGYNLTPEEMKKKSERNLTMLYQALETDPNNTYMLYQAAHAESMRGNYLEAIPLYERALGMIDTVTCEFERLMIMALGVDYVRTGQFQKAVALMERYADQCKTAKYMFTHANVLLDSGDHLRALLLYIKTIMMPDADTLGVNKLHCFENIIRIYTEMGNTEMAALFQQRYEECRQENDKIVTGTPSGE

SEQ ID NO: 5128 - protein, 254 aa, Unknown
  Description of Unknown: Candidatus Curtissbacteria bacterium GW2011_GWA2_41_24 sequence
MKKIKISAALATFNEEENIVDCIESLKNFADEIVVADGSSTDRTRELAENLGAKIIKTTNKPMFHINKNLAIDNCTSDWIFLMDADERVSKELVGEIKGIISKNPKENGFWINRRNWFLGGYLTKGGAYPDSVIRLFRRGKGRLPEVSVHEQVAIDGEVGYLKNDILHMADPSFARYLYRADRYTDQTAQKLREIDPGRGPWPVFYYMVLKPLVTFFDIFVRHRGYVDGFRGFVWALFSAAHHFYAYVKYWERR

SEQ ID NO: 5129 - protein, 460 aa, Caldithrix abyssi
MKKQTLSVCMIVKNEERFIADCLKSVQAVADQIVVLDTGSTDQTVEIARGFGAEIHHFNWRDDFGAARNASIKYATGDWILWLDADERLLPESVPALKKVLKPEKKAVAYVVNIRNVMADGKTFKLSTGHRLFNNRKKIYFEGRVHEQIVYSLARNGGEERPSEIQLLHLGYALSSEEQSKKDRRNRQLLLKMVEEQPHNAYAHYTLGQNYNLSGEFEKALKHYLIALEKNRFQPSLQRQLLNNISEAYLKLNDLANARSFALKSAQLQEDQIGAYYLLYKIAQQQNQPDEAIKWLQTLREKNLAAQHGRLKLENDVLLSDADVLLSLGELFIKNEQLKRAQMCFDEIFQYGDNNRAYVNRIVDIWAQNRHFARAEQFLEAHLSSNDGQFLELKGLLQIKQENYIGAIQTYTLLFQLQPNNLDIIKRLAGLFYKIGEKEKAESLIKMAADLNALTQKARV

SEQ ID NO: 5130 - protein, 508 aa, Unknown
  Description of Unknown: Candidatus Melainabacteria bacterium HGW-Melainabacteria-1 sequence
MIVRDEADCLAACLDSVLPLAPELVIIDTGSVDQTRDIAKAYGAKVIDYDWHDDFAAARNVSLAAANGDWILVLDADERLESDSLPLLQAFLKQNPEPALINLRLISRQSNGQVLTVYHLVRLFANRPSLRYRQAFHEYLADTGELRLPQHFRSDLRIEHIGYQAEICQAKDKASRNRRLIEKMLTLEPHNQIWRHYSANAWYTQGQTQRALNEALSLLALGQSQPEIRNSFYYPRSLIEALIACRELRQTQLGLELAAANQTRCQNMPDFWFVRGTLFRQLGDDAAALNCFEICIGFRDQEASFDFQYTPAVLGPQSLMQILQIHRVRLYDPERSTPRSTALAACLQAANRALNLDAEQPLTWLAYLLEAVWLSAEEQACAPLRIWQQHLTSLQSAHQQLTHAARQLLSRLTEPDWRERLLAMPGQSEALVGLAEHCDGFWQAEMTSLICHLAYVISGDTRWPQLMATVYQADGQRTQARQWLAEALLLQPGNLDLQHCLEQQLAAN

SEQ ID NO: 5131 - protein, 251 aa, Veillonella sp.
MNTVTAIILARNEEQHIAECIKSVQFADEILVIDDGSTDCTVSLATDLGATVICHSLNGDWSQQRRFGISQAHGNWILFIDSDERVSPELAADIRKAVQGELRAYWLRRFNLFHHNKATHGVVRPDKVLRLMPRDGATVEGAVHETFISPYPQSILSGKLYHYTYDNWHQFFDKFNKYTTAAANKYKEQGKSCNFLGDIIVRPMWAFFKIYILQRGILDGKIGFLLSVYHMMYTMTKYVKLYYLNKFNGQL

SEQ ID NO: 5132 - protein, 360 aa, Unknown
  Description of Unknown: Anaerolineae bacterium sequence
MAKPLLSLCMIVKNEEANLPHCLDSVKDVVDEIIIVDTGSTDRTKEIALSYGAKLYDFEWIDDFSAARNFSLEKATGEWILVLDADEKLEKRTAKKLRELAKVSDVDAYVMIQQNFRSSQIQPVLDFQTIRFFRNCSYYRFRGRYHEGVHHSIQEHNGKIALDRQELVILHDGYLQNTAQGELRRKRAIRHLKAILDDDPHDVWAHLKLGMELYHDGDKDEAYNHLIKLFQSGSTVDLKHLPPIDTHEALVHLAQLAIYRGDFTLAKRCGIASRPLTQIFEFCLYSEFAYIVGSLGEIEILYRDGKQVGEEEYFELASIMSKISDLRKNYYDKLETAHKNLLDYLHNKCLLLASKSSGGK

SEQ ID NO: 5133 - protein, 262 aa, Unknown
  Description of Unknown: Alphaproteobacteria bacterium sequence
MSGKPPISCYIRTKNEERLIGEVIRAALPAVDEVVLIDSGSTDKTIEIAEAAGARVVREQWHGWGKQKRLGEDAAKHAWVLDIDADEIVTPELAAEIRALFANGEPAFPVYQLMMATAPPVGKPWMDYNLVDRRKLYDKRVIRIPDHAMDDQFKVPSGMKVGHLKARLLHRSFTELAQLEEKFNRHSSAAARDTKLKPFWLVGLRLLFGKPFYFLNQYARRGLWRAGWYGFMVANIAAHGRWLKDAKMMEIHLRKRETKTGD

SEQ ID NO: 5134 - protein, 358 aa, Clostridium chromiireducens
MITISLCMIVKNEEDVIANCLESVKDIVDEIIIVDTGSQDKTKEIVGKYTSKLYDFKWIDDFSAARNFAFSKATKDYILWLDADDVVLPEDAEKFKILKETLDPSVNSVTAKYNIGFDEYGNVTATYRRNRLVKRSNNFQWFGFVHEYLAVGGNIINSEIAITHRKLKQTPKRNLEIYQNKLKEERVEFTPRDILYYGNELYDHRMFDEALKYYNQFLDSKQGWFEDNIRVCEKICDYYQSIDKVEYGRKYAFRSFEYDTPRAEACCKIGFSFLHEKKYKQATFWYEQATKLEKPKDSWGFFNDACWTWLPHLQLCVCYDRLGDHKLAYDHNEIAAKFRPDDSRILYNRNYFKSIGIG

SEQ ID NO: 5135 - protein, 301 aa, Paenibacillus vortex
MSKPSISLCMIVKNEERFLARCLKSVQGLVEEIIIVDTGSTDNTKEIAECFGAKIYTFEWVNDFSKARNEAIKYAQSDYVLVLDADEYLESADQILLLLESLEKDIYFLSIKSFLRGGISTIHPVIRLFRNVPELKFFGRIHEQIIIPADSLFTQDHLEVMINHDGYMKDVITEKNKEQRNLKILLEDLEEQETGFGLFNLGIQYKMMGQYEQAIKTFEKAFPLSMEYSYICKLITSLIQCYMELEQFDKALVICHESIEAYPNYTDLYYLQGQIYESLHYINDASESFNHCLKIGVCKEP

SEQ ID NO: 5136 - protein, 370 aa, Lucifera butyrica
MSALPISVSLCMIVKNEEQNIARCLSSVYPLMSEIIIVDTGSTDKTKEIVSQFTNKIYDFKWIDDFSAARNYAFSLANGDYTFWLDADDVLIPEDYNKFHQILMALNSDVDAVSMLYNLAFDERGNVTCQLRRNRLVKTTKRFRWVGAVHEYLEVYGNVLNSDIAIYHKPHTHDAYRNLCIYEKRLLNGDTFTPRDLYYFANELSDHKLYNRAIEYYEKFLATKQGWVEDNIAACGKLCDCFYAIKDSNNQLKYIFKSFEYDVPRAEFCCRLGYYFLEQNVINQAIFWYRLAIQVGKPPNPWAVTNCACYTWLPHIQLCVCYSRIGEYVLANQHNEAAAVFNPDFPAVDHNRKYLQQFIASDKQSNDRNM

SEQ ID NO: 5137 - protein, 1269 aa, Unknown
  Description of Unknown: Thermoanaerobacterium thermosaccharolyticum M0795 sequence
MIEELLIEKLNRLKIEDDEKILLDLSLLNASVGNNEVAKLYLNEFKSRKKDGNIDNDIMISSVLIDYIYDDKFHLKWNNYRRERNQNEKKMFAVTASICQGNVLEIGCGNGDLSSYISMYGNRVFGIDIDPIAIEIARYKVWNYGLSDCFFTVEDANEIKLPDSYFDTVVLAEVLEHVEKPEKVIREAIRLCKNNGKVLISVPNGYKIPSPDHINIFNIDLIVKLLKSLGVAENNINFDNRVPSEWIFCWFYNKKDENKYSNCLNIIDLESYFLPPHPLEDLNKAGKVSVILPTFNGESYINESIDSILKQTYKNFEIIVIDDGSVDKTFKKLKPYIDKNQIKYLYQENLGKPVAVNKGIDISNGDFIWIFDDDDTAFPRKLEVQMRNFLRNPNIDLIHTGSIYTDSDNRLPLMVWEPSKIDQMDLLKGKLHGCLFHGGSVIVRKKCYSEVGMWDERLIRAQDYDMWIRMIRRFNIYRISIPTVTYRQHKKLRGSKSNPVPYEKIAIATKEYEKIIMDKIYNNIPLDEIFPEIKENPDNEGLKVSALIERAYAMAKRELFEYTLSDLKEAFDLAIEKYPVALTYRAIYFINKFNEMISNIPVDNIKHIISYFTLLINNHDVSNFPRKMNLTLSLCLITKDEEKNIARCINSVKDIVDEIVVVDTGSKDKTVEIAKSFGEKVKVINAKWEDDFSKARNTAIENATSDWILFLDADEEIKKEDVEKIKPLLYDDTVEAYMFKFINYSGASVSSGLSEIHYNFRLFRNNGKLKYVYPIHENLKNIEEDRAPIFKNADVTILHYGYLSEIRIEKNKTQRYIDMISKYLAKHPNDKFQQGNLAVEYYNAGEYNKALKHLLIATKSMNLNSYATPRLFRYLIMTYIALKEYDTALRVINDAKRYYEDIPDYKYLEGTIYFNQKRYEKALEIFKECALMGEYKGQFVTMGGTGSYRAKYMIGQCYEKLGKLNDAVKEYMEILKQYPNYQDVFIKVFDMFVRNEKPEDVYEFFRKHVNTKVPLNYIVVARQYINIGKYDIAKQYIDSIDIDLEGLNNLRGIIYMGLKDYENAIKHFEMEYGKAKEEANYREALCYIILKDIDKAKDLLWKITDSSDKKLYMTIVGEMKVKFDEVKDSFFNLLDLLIKLKEFDLYNEVLNLYVGLFTREEYERYGQMMINNGLDDLAVEAYIKAADLNSQNTEVYKYLGQKAYDQNMFNEALSIVGRAYNIDKTDVDIYRLIYKIYKALGQDESADEVNEMVKSMYPEVDLSESYALT

SEQ ID NO: 5138 - protein, 1459 aa, Unknown
  Description of Unknown: Flavobacterium pallidum sequence
MKKLSVCLIVKDEEEVIERCLSSILPIADEIIVVDTGSVDNTKAICEKFGVKLFDFKWCDDFAAARNFSFEKATKDYILWIDADDVIKPEEAAKLQSLKQNLTADVYYLKYDYAQDAHGNSNCILDRERIVKRENNYRWKYSIHEVIDCKQAFAKIHTDIIITHQRTSNGMEHDRHRNLSILEKAIRLPEYAHDARMQYYLGKEYQENGQFEKAIQSFKIALGINTGWIEDHISAQIKLAQCHLALSTTGKEATLNKSLASHHAKQAVKTDSRWAEAYFILGQMAFEEKSYEEAVFWFEKCVQPLPDVMSPVNNKYYGLFPYTQLMFCYDALKDYAKASHYNELALSVKPDDSGLLYNRTYFSNMANKLLDSFPTKALHFCNGVFRKEKYLNCSHTANEHVDFVIDPERLLFKDNTVSEINEEYYLSYLPIAKTETILAEWFRVLSPGGTLRIREHDLNACAEKFSGSKTTAEKNWYRHILYGFQNDDDSLHPNLSKKSGFSKQEWIQMISRTGFETEFVDSKDIHATPSIEMHLTKPKVTLQKIGWIAGNPLPDVNFPTYRIRAYNINKALRKTGFSSDLIHDLSDFGVADYQMLAFFRAINETDYNLMKHYKTLGKKVVFDVAEDLFDYQSEFPFYLPMLELADTVICCSDKLAEKISAYNQHVEVVEDAIENENTFKKDYENDGLLKVGWVGMPDNLHHPEALRPLIEACGYELVIISKGEKADLEWSESGWQQQLLQCDIAIAPIDAEKQPCKSNNKVSAYMALGLPVIASPLHAYQKIIRHGENGFIAENIPDWENTMRLLKDPSLRKKTGTAGRQSVLRFRPENMALKLARILVPEAYNSKAIDIIIPTIYNPGHLKVCVESVIACTQSPFHITVINNGIYNEMHDKCVKMIAADNLNFSQSINLGIKHTSAPYICIMNDDVIVSDGWAEPMKKSLSDPNVGFCNPLSNCEYGILHHHQMEVNGIKLLHHNNALIGLKVAEKQNPDISIRPESIQTYVPPFERKTVLVAWVAFYCTITTRKVIESIGLLDEQFNNGSEDVDLCHRAKKMGLQSVVNEESFVFHFGGTSTDKYRAEPGRMGETQKVIAAKYAAPLLVIYTGFSFEPWNAETIAKEGIGGSETAAAKMAKEFSLLGYRVVVFCHCVNLEGHFDGVEYQDLSCFNRFIDMHYMDVFILSRHIDVMQHKIRAVKKYFWVHDVWAKGTNFGDGDLVRKYQKEFDGIFCLSNWHKSFFQKTHGIDDSNMIVTQNGIDISNFGGSVVKEKNRFIYSSSPDRSLDVVLDLFPKIRKVLPDATLHIYYGFENFEKSLQYSSNPAQKTLYEKIKSGMQQEGVFYHGKVGQKDLAKAFLKSDIWLYPTQFTETYCITALEAQMAGALCICTAVGALETTVGDRGILISESPSDPDYHTRIVDKIIAIQNNPEKKQELILKAKAWAKEQSWANVAKKWNSFFSLQ

SEQ ID NO: 5139 - protein, 254 aa, Unknown
  Description of Unknown: candidate division WOR-1 bacterium DG_54_3 sequence
MPEISVVIATKNEERNIRDCLESVKWADEIIIVDDASSDKTVEVCKVYTDKIFINDSKGSFHKNKNFGLEKAVGDWILSLDADERIPEDLSKEIRIAVKDERKVGYYISRKNFFLSKWIRGCGWYPDYIIRLFRKGVTKWPLEIHDVPMIKERDKVGYLRNSMIHISYTSLEQYFDKSTRYTTRLAQEEYEKGARITKTNFLILFLAKPLAWFFRKYFLMRGYRDGFRGFFISVSSALTIFMTYAKLWEMCRRD

SEQ ID NO: 5140 - protein, 346 aa, Paraclostridium bifermentans
MITKNEELKIRRCLESVKDFVNEIIVVDTGSTDKTKDIALEFGAKIFDYEWNNNFSDARNFAIKQSTGDWNLILDADEFITHIDLNTIYNTINSTSNFIGQIKILNTFEQDGEIRKSIDFISRFIPNQVYFKGSIHEQINSNYPRIKLPICIEHDGYLNTNKFDRNINLLLNEFKSNKNDLYLSYQIAKTYYSNKMYTEASYYFDIFFNNISFYNSNFIYDGIVLYLYNLTKLKDFKKGLNVIDSVFDDMKNCCDFYFICGVLFTEAVAYNTDKYINYFQYIDKCYINALNLSESNGLEIVEGTGNYLSAFNLGLFYELSKNQNLALKYYKLSASYRYMPAMNKLK

SEQ ID NO: 5141 - protein, 446 aa, Enterococcus faecalis
MYSENFIANDWFNVEVFNKNKYTLTNQENKDVTELWLQILKGLKFPNELKETVSYSKNLKELSLKTHAEVSVCIIAKNEQDSIRKCINSIYEFSDEIIFIDTGSIDLTKKIVKEIASEKVKIFDYTWQDDFSDARNYSIQKASKEWILIIDADEYVSSDELTKLRLLIDMLDRFKFKDSLRVSCAIYQLDNVITHGQSRLFRNNNKIKYYGLIHEELRNNKGLDPIFNVESEITFFHDGYKEILRKEKCERNIRLLAKMLEKEPDNVRWAYLYCRDSFSINANIDFEKILLPFLIKNMDESISYENILLTNYTHLILFLITKKYIIDGKSSLASKCIEVLEKMLPNSSDVTFYKFLNKQHSLYEQQFEFLKEVIQFRKNNEYDQYSQIGCNLLHYDLLISGLLFDVKSYDYSYQYFLKLDLANYFSELEIPDEYKMLINKYRENES

SEQ ID NO: 5142 - protein, 348 aa, Geobacillus vulcani
MIVKNEEQNLGRCLQSIKNIVDEMIVVDTGSTDDTREVAYSFGAKVFNFAWRQDFSAARNYALEQSTCDWNLVLDADEYVVNDCGREIRHFLENGCQRIGRIKRIDEFIQNGEKRHAQSYLSRLLPKGVKYTGKIHEQVDSTLPRENINVEVYHDGYIQTNKTERNLELLLQELKKHPEDDYILYQIGKQYKLLQQFVRSEIYFEKSHSLASSYAWYRHSLVVDYLYVLMANRSFEKGLQLIAMEQEKLQDLPDFHFACALFYMEAAFCNSDQYAHLFPFIEKSFVRCLEIGETDNYDRVRGTGSFLAAYNLGVFYEVTGQTEKAISFYKRAANEGYEKAVERLNMLI

SEQ ID NO: 5143 - protein, 328 aa, Bradyrhizobium arachidis
MTDIHAIILTLDEEKHIARCIESIRSQCASILVVDSGSKDRTREIAAGLGAEVIENPWINYATQTNKAISACAGKTGWLMRIDADEYLTPESAAGLHDLLDRQPRDVGGIVVRRQIVFLGRRIKWGAIEPSWQLRLWRAGQGSCEQRWMDEHIIVTGRVVRSNIDLVDENLNSLDWWTSKHNRYASREVIDILASRGLLGENMDIQRHSASWQAKLKRFVKERVYEKLPGGVRPLLFFLYRYVARLGFLDGKQGYYFHVLQGFWYRTLIDAKLDEVMALAKRRRIPVSEAVRLATGFDPNVAVPAPAQPLPRIVAAEGERSRERAVAH

SEQ ID NO: 5144 - protein, 342 aa, Butyrivibrio sp.
MITVSLCMIVKNEEDKLATCLDCLKDLVDEMIIVDTGSTDRTKEIAESYGAKVFDFEWTGSFSDARNYSFEQATCDFIYSADADETIDEENQERFRQLKEDIDELNIDIVQMYYCNQLSHNTVYNYDRELRPKLFRRIRKYVWHDPIHEMIKLDSTVCNSEVEIKHNPTEDHGQRDLAAFRRAIREGEYISKRLHNMYARELYMVGTDEDFMLAKEFFEESIEDNGRDLDQIKEAACVLAHIAVIDGKAEEILKYSLKDLTTIPSSEMCYELGSYYRNKGDLVEAIVWYYNAAYETSPILDIHRGGDMALHKIAECYREMGNLEQAEDYENEANHWVVPDPS

SEQ ID NO: 5145 - protein, 357 aa, Bacillus sp.
MKKSITISLCMIVKNEEQTISRCLESVKDIVNEIIIIDTGSTDKTKEIVKKYNAKIYNFKWIDDFSAARNFAFSKATKKYILWLDADDIIEQKDQKEILHLKSTLDTKIDAVSMKYNLTFDTEGNPTFSVKRYRLVKRNKNFQWYGFVHEYLEVYGNLIDSDISITHKKEKIYTDRNLKLYQKHLASGKKFSPRDTYYYANECKDHQLYEIAIEWYTKFLDEKKGWIEDNIQACLKRTECYLKLSNTEGALYSSLQSFIYDNPRGEICCQLGSIFLEKNEYDKAIYWYHTALKISKPTNAPFLKEPCYTWLPHLQLCICYYRINNNEKSIYHNEQAAKFVPNHPSVKYNIDYFNNLK

SEQ ID NO: 5146 - protein, 761 aa, Ethanoligenens harbinense
MFSAKYAIMVLRGECMKAYTRKKGDVKISACTIAKNEAKNIARCINSYKEFVDEIIVVDTGSTDDTVRIAEECGATVLHFDWCDDFSAAKNFAIEAASGDWIICLDADQYFSENCGTQVRRVIENAERKGKNCVMAREVNLDDASGRQKSEVGVIRIFRAGLRYRFPIHESIFSPQGLEIATVPKLQFFYYHTGYSSDRFEGKLARNLRLLQKELETHPEPTREAALHAYMCDCYSGMNRHEETRAEARAYLEGRRKTGVRMLGLEAKPYINSINSLEKEEGPLEELDEWISMLERDFPGYPDAAYARARYDYRRRMFAQALEQFDRAVKRSAVYDGADCDSVGAEMERIDYFRGLCKWALGDAVGALDLFADLSRHAKNNAAMLRMLAIVKPMGDLHADAFAQDFFLSLDDAVKPQMLGAVMMYYMSKPATFGYAYMRDRQGAKDIDATLSGFIQAGNGDYLGASNFFYLNAVGAKNKDSAMRALLCAVLAQNADALEHAKSVAPPCQQAALGVADAPVAEDDIPQIASLVVEADRLRGGALSAQIARTAAEQLGTGLAQAFAEQLEKSFAYSAALAAVEAAPLSPETVFLRGYYTCRLGRMGEAEDLLRLAKAQGADGPAADGMLESAEKRLRAFRADKQPDMAAEQARVAAHLERGDFHTAQAALAVLRDLAEPDAPWYSMAAVTAYYLGQDERAALIVRAGLLRFPDDADLLYNAGDIYSRMGLKKCSKIYYEQALERCGDEALREQIRAALVSMPA

SEQ ID NO: 5147 - protein, 583 aa, Unknown
  Description of Unknown: Candidatus Brocadia sp. BROELEC01 sequence
MIDKERRAALNNNRPTLSACMIVKNEEKFLSQCLTSMKGAVDEIIVVDTGSTDTTVEIARSFGANVYHHPWNNSFSEARNHSLKYARGDWILQIDADETLEQSDIPLLHKLINDNSYNVIFVAIYNELPGGCAKHYFQRIFRRGKAYFEGIVHNQLIFEGKVLQSEIRFYHYGYNLSGQEMQKKYKRTGDLLRQQLTENPDNLFIMANLIRNYRNEYDFDKVIDFAENGLKISASQTDIVSKNQRQRISIDLAHALINKNLIDKAELVCKKALIENPDSFDILLVLGEVFIKKGFFKDALPCFKKYLILKEKDNKDPSFFLLSSDFYQYEHMVYNHIGECYKHLGETREAIVAYKKAIELNNKNPLYYSNLINLYISQNSLSNAKELTFTAIKSGVANHVIYYLLGRIYAVEGKINDAIDACKQSIKMDNTNMPAHSHLINLLIQTNRLDEATIILKGILSLYPDEFTFSCLMERIKYKQGDKESPACFVRNILRSKPSGRDIYLQLGDLCIEMEQYAAAIEVFERYLEISSDTDATVIANIAVCYAKQGKLESALFGFQSALKLDPNCVVALQNLAALKTNA

SEQ ID NO: 5148 - protein, 252 aa, Thermocrinis minervae
MLSVLIRTKNEEENIARAIKSVLDIADEVVVVDSGSTDRTVQIAKSLGAKVFFKEWEGYSQQLNYGLTLCQGPWILVLDADEEVSAELRDSIRKELKKPRYDAYYISRRTFYLGAFLKHAWYPEWRLRLFKKGTVKFEGALHERAIFNGRAGKLKGDIFHYSFKDLRYQYIKTLEYARIVAQELRKKGRKFRLYNLLLNPVWAFIKVYFLQLGFLDGIRGLSVAFSALVYVFLKYLFLWEMEHVERKDEGRT

SEQ ID NO: 5149 - protein, 299 aa, Vibrio breoganii
MKVNKVDVTVLVLTYNEEIHIERCIQSLKPFAQRIIIVDSYSTDRTVDLSKNLGAEVIQNKWPNNHSKQVNWALGNIIITSEWVMRVDADEYITQELGKEIAVNLRTPGDYSGYYLLRGHVFMGKKILWGGSAKTKMLRIWRTGSAKCEDKIMDEHMIMNDPQSKIGIFKSRFWDHNLNSLSWWTEKHNSYSTKEALMQMKLEASNEDFSSLNQYLKSHVYQSFPVWARSFIFFLYRYIFRLGFLDGFPGLAWHVLQGFWYRFLVDCKVRELKYNKPENVTIERWVEQRIEDIEKGDIK

SEQ ID NO: 5150 - protein, 260 aa, Vibrio harveyi
MITAVILTYNEEKHIKRCIESLIPVVDKICILDSFSTDKTLEIASKYQIVEFKKNSFLNYATQFNTALDVFDIETDWVFRIDADETIDSQCSNWLKFELQNVQQSITGIYLNRYMTFLGKTMTYGGMSTYWALRIWRNGYGRCEQRWMDEHILLSTGDTIYAPGKLIDDNLNNLSWWSHKHVDYSTREAIDILLKESLDNKLQIRSDFFGSSSERIRYLKSIYNAVPLFVRPFLYFFYRYILKAGFLDGREGFLWCLLQG

SEQ ID NO: 5151 - protein, 269 aa, Leptospira ognonensis
MRKLSVAIITFNEEKNILDCIHSVESFADEIIILDSFSTDKTKELASSISKVKFFENPFYGHVEQKNLAISHCKNEWILSLDADERADNVLQTEIINFLSNSEDESTQGFQIARLTYHLGRWIRHSGWYPQRRYRLFKKQSAKWVGENPHDFIEITDSKFGKTMKGNILHYSFSDFSHQLTTINQFSSIVAFSRFSKGQRFSLIKSILKPLGKFVEIYVFKFGFLDGIPGLYIALSSSFSTFLKYAKIYELEKGVIERPSNIRKDYGKK

SEQ ID NO: 5152 - protein, 368 aa, Bacillus subtilis
MISISLCMIVKNEEAVIGRCLDSVQEIADEINIVDTGSVDKTKDIAARYTDRIFDFKWIDDFAAARNFSFQQATSDYILWLDADDVFTKKDQELLLDLKRTLDPDIDAVSMKYHLAFDEENNVTSSLRRYRLVKREKSFKWIGAVHEYLEVYGKLHHSDAAVSHLPLSHDADRNLRIYEKMASSGKDFSPRDLFYYANELCDHGKMEQAIEYYLRFLQTKQGWIEDNIRACNKLADCYHSLGLKEKELSWVLHTLVYGPPRAETCCRLGYSFLEKNDFQSAVYWYEKAIENKGAENLAFQNRACATWLPHLQLAVCYDKLGQHQLAYQHNESALQYRPHDSRMLANKKYFEDILKMQTGSGGEHHGNQ

SEQ ID NO: 5153 - protein, 270 aa, Algoriphagus boritolerans
MNIPVTVIVSVKNEEKNLPSCLTQLSEFDEVFIIDSGSTDRTPEIVKDFGYTLVNFEWNGKFPKKRNWALRNLSFRNDWILFLDADEQVTSEFIKEVSLKILSTDDVGFLISYHNFFMGKKLRFGDKMTKLSLFRKGAGEYEQIEEDSWSYLDMEVHEHPILKGKIGVLKSPLIHNDYKGLEKYIERHNAYSTWEAKRYLQLKRDRKVNLTFRQKLKYGLLETGFLPYFYFIGAYFFKLGFLDGIEGYYLAQYKKQYFFQIQTKLKEFKS

SEQ ID NO: 5154 - protein, 545 aa, Unknown
  Description of Unknown: Deltaproteobacteria bacterium sequence
MKLSLCMIVKDEEDNIRECLKNIRKAVDEIIVVDTGSSDKTPVIAEELGAKVYHFRWCNDFSAARNESIRHATGDYIIYIDADDRISEDDAEKIADLRNKFPKKKDIAYSLKIMLPSPEKILNSAYQVRIFPNLPDVRFEYPIHEQIVPSLKRKGIRGLFTDIVIEHKGYEDYTLLRKKAKRNLRILKELLSKDPDSWFAHYFLAQTYEVLNEKELCEFHIKNSLTEECKKLDPNWFIGASLKYSQLLTEKGDRKAAIELLRKLEEEFPDHDIVRFFIAEMDMEEGNYREALNRYITVRPEKLSLVTIPISEDKIRYKYYLHIGQCNEAVEYNRLAMDAYKKAYELAYTSEFKKEALIKIIRLFIKMDKLGEAIPYMEKYAELHPSARSYNLLALGYMKEGLYEMAENSLKDAISIDPRYWKAILKLAELYIQTDKFPKAEEILNELLENRSIDKQHRLTVLLMLAFIHVSRVDLEGFLHNTDLILKHLNIRASVGSFQDLYYIYERISEQFGGLSQIWIESIKKYLNMLSAGGSFSYAHSVTQA

SEQ ID NO: 5155 - protein, 305 aa, Methylobacter sp.
MNKPDISVIILTHNEELHIERCIRNLLPIAREIFIVDSFSTDKTVQIAESLGAKVFQRPWKNYADQFQWGLDNCPVQTSWVMRMDADEYLESPLIDEIIRKFPVLPNDINGIYLKRKHHFLGRWIKHGDRYPLVLLRIWKTGQAHIENRWMDEHIVLDSGKAITCAGDFVDDNLNTVEWFIAKHNRYASREMLDILNHKYQLFSRDESIAEAESGQAKLKRFVKETLYNKLPLFVRPLLYFFYRYILRLGFLDGPEGFAYHFMQGLWYRCLVDLKCLEAERILKGADSREEKVARLTELTSLQLK

SEQ ID NO: 5156 - protein, 367 aa, Bacillus subtilis
MKRPKLSVCMIVKNEERHIARCLESVQPIADEIIVIDTGSNDRTEDICTSFHAQVYHHRWEQDFSQARNASLQHAKGEWILILDADEELDPDTGSLLPSLLTDSLPSLGCMKVVSYTGKEWDENEAFEQRQIRLIRNQQNITFTGRVCERPEGEEESSIFSLPCIIHHYGYLEQEAQQKHKHNMSLLNMELLTSSTDPSLLYQKAAEYDRGNEHDKALRLAMDCIKEYKRKKQIPPPAIYYLKYKLLIDAERYEEAERDIHEALRHYPDYCTLHYYKGIIMYQLKKVREAITAFDTCLQTNNENHQYVQVKGAADYRSSCWLGVCHAELRQHMTAVLYLQKALKANPKCIRAQRLLSELTKDQAAHA

SEQ ID NO: 5157 - protein, 644 aa, Hydrogenophaga sp.
MFNKLIKVTGIFSEAMRDAALFLRFNSYSPFVDKSKRAFYKIIIEAHTIEKGLSLKDPKLLFGKDKIRFVMAALSRYDIQHSSVPVHMSLGALEAYVNFHARAGISDPLLDEISGYLKAWESKLPKPWKGGTRDYSFNGQSPSNLQHLMASRSSIRTLQSAPLNPDLIFEAIALAQLAPSQCNRQSSRVHAYQDPTRIRELLALQGGSRGFAESVGNLFVVSSEICAWGGPGQRNQAYVDGALFAMCLMFACRSMGWGACPLNLAIDHKTESAIRRVGGIPAGERLIMMIAFGEPIAPETRVAFSREGLRRKSPPCMHEAFPMSITAIILTYNESRHIGRAIRSIQMFTDQICVVDSGSTDGTTDIAKQLGAEIYTHPFVNQAKQFQWALDNLDVQGEWVLRLDADEIIEPDLAREIAEKLPLLPTEVAGINLKRKHIFMDRWVRHGGRYPLLMLRIWRRGQGRIEDRWMDEHMVVWGGRTVTFGGGFADHNLNDLTYFTDKHNKYATREAIEVLSQRLDLFARDEALNTKSTSFQASFKRWAKENVYNRIPFTLSATLYFLWRYIFQLGFLDGRSGLIYHFLQGYWYRFLVGAKLMELERAVANLSDKAAICAELSRLTGYKLVAQTEPTEVGAQTSAQKARA

SEQ ID NO: 5158 - protein, 570 aa, Bacillus sp.
MKNSISLCMIVKNEEDFISNCLNSVKEVVSEIIIVDTGSTDRTIEIAKQHNATIIEEEWKNDFSLSRNIGLEHANGEWILFLDADEELCSESIEELKKWIVYPDADAYFFRVYNHFGEKGKEASVNPTIRMFQNRPEYRFSGAIHEQIADSIQRFNPEARFVMTSVCVDHYGYQPTIRDQKNKTTRNITLLKEELQSNPNNPFHLYNIGIEYLQLSDFENALRCFKKSRELVDPKVNYTHLLYKCEARCLGALNRIDEAITCCNAGIEAFPEYTDLHHYKGSYFMASGDFPSAKESLTRAIQLSEPKYYHTEAGIGTFSTHYLLGLVNESLSEDNEAIDHYYCSYQYLPTSHRPLYRIFQLLRSTERQNDLLTLLTSKIQLDSKEQRQVILNILLRTHCYSTAEQLLTLWLEENNSSIADQDLWRQIKEECRLLDTSYQNKEKNSPKPLLINEQLSRLFLLQNSSETNLPSDIHPRLDGHSLTSILNTERIARILYSQGFHRAFQQYIEKWKEEHATKEMKFQTHSVLQIVQTLSFNAEHHFDKVLKNHPSFELIRAAKMTLPFEEGLIE

SEQ ID NO: 5159 - protein, 357 aa, Anaerospora hongkongensis
MITISLCMIVKNEEDVIGRCLTSVQNIADEIIIVDTGSTDKTKEICGAFTPKIYDFAWIQDFAAARNFAFSLATMEYILWLDADDVILEEDRKRFLQLKETLNPAVDSVTMPYHLSFDQNGQVTSSLRRNRLVKRVKNFTWLGAVHEYLAVHGHIINGEVAITHQPLSHDANRNIEIYDKRLAAGEDFSPRDLYYYANELRDHQRTAEAIEYYQRFLATKQGWVEDNIAACGKLADCYAGINDRANSFRYMLESFAYDTPRAEFCCRLGFHHMLDAKYKQAAFWYELATRLEKPSENWGTINHACWTRLPHLQLCVCYDRLGRYQEANTHNEAAAQYIPNDPKIAYNRQYFQRMFDK

SEQ ID NO: 5160 - protein, 363 aa, Bacillus subtilis
MKRPKLSVCMIVKNEERHIARCLESVQPIADEIIVIDTGSNDRTGDICTSFHAQVYHHSWEQDFSQARNASLRHAKGEWILILDADEELDPDTGSLLLSMLTDSLPALGCVKVVNYTGKEWDENEAFEQRQIRLIRNQQNITFTGRVCERPEGEGESSTFSLPCIIHHYGYLEQEAQHKHKHNISLLNTELLTSSTDPSLLYQKAAEYDRGNEHDKAVDCINECKRKRQIPPSDAYYLKFKLLIDAERYKEAERDIHEALRHYPDYCTLHYYKGIIMYQLKEVREAITAFEACLHTDNAHHKYVQVKGAADFRPSCWLGVCYAELRQHMTAVLYLQKALNANPKCVRAQRLLSELTKDQAAYA

SEQ ID NO: 5161 - protein, 308 aa, Dyadobacter sediminis
MIDLSVIILTHNESKHIGRCIKSLLAVTDKIFIVDSFSTDDTVVLARSLGATVIQNPWVSYSFQFNFGIRNNPFNTRWLMRMDADEYISAELADELNNTINSIPEDVSGLYVKRRVMFMDKWIRRGGYYPIWLLRIWRNGHGTCEELWMDEHIKLSSGSTAQLQNDIVDHNLNNLTWWTQKHNNYAIREVIDLLNIKYNFDNKETVTPGFWGSQEQRTRFLKIKYAGLPLFTRPFIYFVYRYLIKAGFLDGVKGLIWHFLQGFWYRFLVDAKIYEVYYKAGKDKQQIISHFRTEYGKDLKNPNQSVRV

SEQ ID NO: 5162 - protein, 308 aa, Dyadobacter beijingensis
MVDLSVIILTHNESKHIGRCIQSLLQVTDQIFIVDSFSTDDTVAIAESLGAVVVQNPWVSYAFQFNFGIRNSPFQTKWLMRMDADEYITPELAAELNASLTQVPETVSGLYVKRRVIFMEKWIKRGGYYPIWLLRVWRRGLGICEELWMDEHIKLSSGTTAQLQHDIVDHNLNNLTWWTQKHNNYAIREVIDLLNIKYNFDSKETVEPSFWGSQEQRTRFLKIKYAGMPLFTRPFIYFTFRYFVKLGFLDGTKGLMWHVLQGFWYRFLVDAKIFEVYHRVGKDKEAIISHFRTEYGKDLRSPNQSVRI

SEQ ID NO: 5163 - protein, 250 aa, Unknown
  Description of Unknown: Proteobacteria bacterium sequence
MSTLSVTVIAKNEEASIARCLESVSFADEIILVDSGSTDRTIEIARSLGAKVTQTSDWPGFGAQFNRAIDRATQEWIFSLDADEWIEAPLAREIQKVIGDTSSVTGYRVPRRSRFCGNVVRHSGWWPDYTPRLVRNGHGRFSEEIVHLHLIINGTIGHLTNPIEHDSITSWEDANDKIERYSTAAAIQLASRGRRAMPTTAPLRGAAAFLKAYLLRAGFLDGRTGLMVAEYNYRYTYQKWHKLARMSKQS

SEQ ID NO: 5164 - protein, 272 aa, Bdellovibrio bacteriovorus
MVSSRESFDKTLIQRESGWVTKLPISLVIITFNEEAHIERCIRSCPFVDDVVVVDSFSTDRTVEIATKMGARVFNEKWKGFGPQKAFATAQAKNPWILSLDADEALSPELAAEIIAKFSGLDPEAGFLVPRRSYYLGRWINHGGWYPDYQLRMFNKDKSQWNSAALHEKVEVKRQLKFQHDLHHWVFDDVADQVQTNNRYSSLGAQGLADKGRRFSYFNLLTKPATKFVETYFFKAGILDGLPGFLISVSAAYSVFLKWAKLWEIERVQKRS

SEQ ID NO: 5165 - protein, 459 aa, Unknown
  Description of Unknown: Candidatus Chrysopegis kryptomonas sequence
MNKPKLSLCMIVKNEEKFLPGCLESVKNIADEIIIVDTGSTDKTIEIARRYNAKIFHLDWKNDFSIARNESIKHSTGEWILVLDADERLNPNQETKLKKYLNSNFDALYVKVINLGKDGKPDVINEYPRLFRKKDWIKFEGRIHEQITPSILRNCGKIAKTDITITHLGYAQSDEIMSKKYERNLNLLLEEIKENPDNAYAYYHIGIIKILTGEKENGIEWLKKAISIQKEKSNLGDSLLASIYNIIGKYELQNERYQEAIDYFVKSSKLAPTQLTSYYLSGIAHAKLSNFHIAKNFFEIALKNLKAISNGKSLDVSLENMVEENEIHFKLMICYFKLGNYQRMKEHLLKVIHDEILYKATIDFLVEEYKLGVGNAINVLKEISTIKPSFEIFKILSGIYQINGELEDAVKNLEIALNFKDDDDEIRYNLGMCLVGLRRFDEAIRVLSDFKVRENSKFF

SEQ ID NO: 5166 - protein, 284 aa, Unknown
  Description of Unknown: Cyanobacteria bacterium QS_9_48_30 sequence
MLLSVIILTKNEEANLPTSIASLQKLDAEILIVDSGSSDRTVEIAQQTGCQVFEHPFENYAQQLNWALQNLPITTPWIVRLDADERLTPELVEELNRILPQTPDDITGYQVKRRVFFMGRWIRHGGYYPTWLLRVWRTGVGTCEQRWMDEHIVLSEGKIASLRHDIIDENQKGLSFWIDKHNRYADREVKDMLNVATESDELLANNEQHSQASQRRWVKKNFYARSPLFLRAFLYFLLRYTIGLGFLDGKEGLIFHFLQGFWYRFLIDAKIYELQKKNMLIDEQ

SEQ ID NO: 5167 - protein, 366 aa, Paenibacillus sp.
MITISLCLIVKNEEKTLGRCLSSVKDIADEIIIVDTGSTDSTKQVAGEYTDRIEHFTWIDDFAAARNFAFSLATKSYIMWLDADDVLKEKDQQKLINLKRNLDPSVDSVSMEYHLAFDEFGNVTSKLRRNRIVKRERAFQWIGPVHEYLRVYGNIIHSDAAVTHSSLHHDSDRNLNIYEKRLAEGEVFSPRDLFYYANELKDHGEFDAAVRYYDKFLATGKGWLEDNIAACSRLADCYNKLQEVRSMVDSIFRSFHYDNPRPEFCCRLGYHFLQQREPKLAIFWYKLALSAERNDHSWGFENLACSTWLPHLQLCVCYDRIGQYEKAYEHNEKAAQFRPSDERILANRSYLSTRLGKDFDKTSVKP

SEQ ID NO: 5168 - protein, 366 aa, Clostridium isatidis
MIVKDEEATLERCLNSVIDFVDEIIIVDTGSTDNTKKIAKNFKSKIFDFEWIDDFAAARNFAFKKASMDYILWLDADDYIDDINREKFKLLKESLNKNVDSVTMDYSLIRDAAGNTSFSLKRNRLVKRERNFQWIGRVHEYLEVFGNIIDSDITIMHDKLKAATDRNLKIFLKMAEDKLPFSPRDRYYFSNELYYNGRYEEAIRNYELFLSENKGWIEDNKAAYNNLIRCYRIQGNDEMAINTILRYLKEYKPTGEICCSLADIFSSQNKIEEAIFWYEAALKCEPGERHLGFNNKAYYTWVPALSLVVCYSKLQNYEKAYYYNELAGLQGGDMNKINYNRRYFQHKFLELKKELPKLKLDLRFDI

SEQ ID NO: 5169 - protein, 370 aa, Bacillus sp.
MRGGRDLVNENITISLCMIVKDEEQTIARCLESVKEVVDEIIIVDTGSTDQTKEIVKEHTPYIYDFEWIDDFAAARNFSFSKATKDYILWLDADDILMETEKDKLLQLKENLDPNVDAVSMSYYLAIDEKGKPTYSSVRNRLVKRIQNFQWIGFVHEYLAVYGNIMKSDIAIMHKKEKEHTDRNLRIFENSLREGRTFTPRDIVYYANECFDHNKYEKAIELYKQFLDGKEGWIEDCIHACGKLADCYKQLQKSEEALQACFHSFQYDIPRGEICCRIGHIFMGKEDYKQATFWYEMAINVPFQNSTRFIDYASYTWIPHLQLCVCYSRLGDNEKANYHNEQAAVYVPDHASVKYNQEYFRNLLKEDTQK

SEQ ID NO: 5170 - protein, 367 aa, Sporomusa silvacetica
MPEYAKQSHSPITISLCMIVKNEEATIERCLQSVDQIADEIIIVDTGSTDKTKELVSQFTNKIFDFEWIDDFAAARNYAFSKATQEYILWMDADDVFLSQDLQQLVELKATLNREFDVVSMLYNLTFDQFRKVISQLRRSRIVKREKDFRWIGAVHEYLEVSGNHLETTIAVTHKPLGHDSERNLKIYERMQLKGEVFSPRDLYYFANELRDHKLYNQAIEYYQKFLATRQGWVEDNIGACARLADCYYQLQDVENELKSIYLSFQYDTPRADFCCRLGFYHLNNNQLKQAIFWYKLATQLDIENSSWGLVNYRCATWLPHIQLCVCYSRIGDYKLAYEHNEIAAKFIPDEPLIQHNRKLLQEQLGN

SEQ ID NO: 5171 - protein, 260 aa, Unknown
  Description of Unknown: Candidatus Gottesmanbacteria bacterium CG1_02_37_22 sequence
MTKNTISAVVLYKDEEDTIDRCIRSLSWCDEIVLIDDYSTGKKLIQIKESFPSVKVFKNHLNDDFASQRNYGLTKSSGLWILFIDADELVCEKLKLEILSIIKNNHIYRDEVNGYFIPRLDNIFRKKLKHGETAKIRLLRLGRKGKGIWKGKVHEVWEIEGEKGLLEYPISHYPHPTISAFLKSINRYTDIRARNLYVMGKKTNIFSVVVYPLGKFIYNFIFRLGFLDGMQGFVVSIFMSFHSFLVRSKLWMLRHNNDNE

SEQ ID NO: 5172 - protein, 377 aa, Desulfotomaculum reducens
MAKTISLCIIAKDEEQNIARCINSAKDYVDQIIVVDTGSTDYTVELAEELGAEVYHFIWQDDFALARNKSLEHATGDWILFLDCDEELDPDTAPLLKGVIENENFNGYSLKIINMFNNQPGTRFLGFRMFRNSPLHRFECPIHEQILPSVIRNSSRDKIGQSDITIYHYGYDIDEAANKNKIERNLRILHKAHQDYGNTGFIPFYIAVEHQKMGDYQKALDYYTLSLGRSDINENYVPSMIRSMVTCYINLQQYQEGLDFADKFLKVFPNYTDLVYLKGILYSHLDNIPQALECMNQCIAMGPPPINLFSVHGIADEKPKSFIQNITEGLIRQGLELFIQGNKAQAYTALDTAFQQLKKTPDEECYTQMIETMISFL

SEQ ID NO: 5173 - protein, 373 aa, Ruminiclostridium sufflavum
MITVSLCMIVKNEEEVIERCLSSVSDLVDEIIILDTGSADKTKAIISKFTDNIYDFQWIDDFAAARNSAFDKATMDYILWLDADDVMDDINRNRFSALKESLETDVDSVTMEYQLSFDEYGNVIFSLRRNRLVKRANKFRWIGPVHEYLEVGGKIYNSDVSIAHKSLHHDSDRNLRIYEKRLSKGEKFSPRDMYYFANELMDHKKYKRATQYYKQFLGTGKGWVEDNISSCSKLADCYHYLGDYDNELDAVLKSFRYGGARAEFSCRLGYHFLQDKDLSSAIFWYKLATMLKPTREQAGFQNQSFYTWLPYLQLCLCYSQLGEYKMAYLHNEVALQYRPNDQRMLQNQKFLEEILGPEVPGINNTEGKDDTPE

SEQ ID NO: 5174 - protein, 359 aa, Bacillus sp.
MSSISLVMIVKNEERVLGRCLDSICDLVDEIVIVDTGSEDRTVEIAGKYTKHIYSYEWTNDFAAARNFAFQKAGKEYTMWLDADDIIFPEDREKFLHIKESLSHKPDSVLMPYVLGRDPYGQITSSLKRNRLVKTSRGFQWKGAVHEYLEVHGTIIEVDICITHLSVKSKKTDRNLKIYEQLEQQQKQLSPRDLYYFGNECFEHGLLEKCLKLYREFLDTNAGWQEDCIAAIDRAAEALLQLGRTEEAEELLFESFKYDIPRANISCKLGYIYFSKSLYHQAIYWYKAAAECDLERVKETGALVNYAYYTWLPHIQLCVCYDKIGKKELAYCHNEMARFYNPTNNLVLQNKQYFEKIIT

SEQ ID NO: 5175 - protein, 376 aa, Paenibacillus odorifer
MALSKWGFDLTSSLYSGTRKVTVSLCMIVKNEEHTLGRCLSSVRELVDEIIIVDTGSSDGTKELAASYGARVYDFEWVNDFSKARNYAFSLATQEYLLWLDADDYLQLEDAKAFQSIVSELPWDIDAVSMHYYLDCDKDGSVTSSLRRNRLLRRNCEFRWIGVVHEYLEVAGNVFYAELGITHDRKHTQSSRNLLIYEGMLKAQTRFTPRDLFYYANELYDHGQWQRAIKQYDAFIVMPNGWLEDKLLASRRAGDALSQLGLFQEAKLKVLQAFALSPPRAEACCQLGSYELIEQRFENAAFWYKLATEVPKPTELNARVDLPAWTWLPHLQLCVCYDRLGQYEQAHYHNEIAGGYVPDYPSVMVNRDYLKQYITL

SEQ ID NO: 5176 - protein, 296 aa, Unknown
  Description of Unknown: Candidatus Roizmanbacteria bacterium GW2011_GWC2_41_7 sequence
MQKISVVISAYNEEEVIESCLKSIAWADEIIFIDNSSLDKTASIAKKFKAKVYSRPNNPMLNVNKNYGFTKATGNWILNLDADESIDQELHQEIHKILQSKQSEYQGYKIPRKNTLFGKWIKHAGWYPDYQTRLFRRGRGTFAEKHVHEHIQVTGETGTLSGHIIHHSFRTVSQFIKKHDLYSSNEAENLMKDGYHFDTFDIIKLPRREFISRYFAREGYKDGLHGLALSLLMAFYHLLIFLKLWEKQQYAEQSLKVSDVEKELNAVHDEMGHWFLETSESKSLSKIISAKLKRLL

SEQ ID NO: 5177 - protein, 300 aa, Unknown
  Description of Unknown: Flavobacterium sp. sequence
MTTPISTIILTFNEEKHIERCILNARRFSKEIFVVDSFSTDNTIEIAKRLGAIVYQNKWEKNYARQFNWGLTHLPVTSEWVFRLDADEYLSDELIDELSEKMPALDRQISGISFERKMIFMDKMITRGMPQMHMLRLFKIKDGHCEDRWMDEHIVLTKGKTARFEGSFVDHNLNTLGWWIAKHNGYAIREAVDLLLLESSIHIVDAEQEKLTSIDAMVKRKNKLRYSRLPLFWRSFAYFIYRYIFKLGFVDGKVGFIWHFMQGWWYRSLVDAKIFEIKKHCGQDESKLKNYLSTNYQIEI

SEQ ID NO: 5178 - protein, 304 aa, Unknown
  Description of Unknown: Cytophagales bacterium sequence
MLDLSVIILTHNEEKHIGRCLESLRPITDNVFIVDSFSTDQTVEIARAMGATVVQNPWVTYATQFNYGIQHNPFQTTWLMRMDADEYVLPELAEEIAHRLPTLPDTTSGVYVKRRVMFMDRWIRYGGYYPIWLLRLWRRGQGICEQTWMDEHIKLTAGQPINFANDIVDHNLNDLTWWTQKHNNYAIREVIDLLNIRHNFDQTERVEARLSGSQEQRKRYLKERYAWLPLFTRPVLYFLYRYFVRLGFLDGRRGFVWHFLQGLWYRFLVDAKLMEVIRKTGHDREAIIAYFKSAYGKDLRAGVR

SEQ ID NO: 5179 - protein, 296 aa, Unknown
  Description of Unknown: uncultured bacterium sequence
MLSSVKYINMKLSVVLATRNEEENIERCLESIKSIANEIIIFDEYSTDRTKEIAEKFGAKVFLEPHHDIFHITKQKAIDMAKGDWILQLDADEVVSPELSMEIQGIINHEVTSSAYNQSPIIKQNKLFDRHQKLIEQRNGPIGKQDGEVVAYFIPRRNMFLGKPLIHAGVYPDGVIRLIRKGKAYLPAKSVHEQMVIDGKVGWLNGDLLHFDSPTLSRYLNRLNRYTDLKAQELKSSKTPKNLWSFLQFTILHPTYYFLLLFIRHLGFLDGVNGFLWSFFSALHFPIAYFKYITNK

SEQ ID NO: 5180 - protein, 363 aa, Amphibacillus xylanus
MNEISLCMIVKNEEEVLRECLSSVKEIVDEIIIVDTGSTDKTKEIAREFTDKVIDFEWIDDFSAARNFAFSHATKDFIFWMDADDILLKADQDKFKKLKEELNESVDTVSMLYHIAFDDYGNPQFSFRRNRLVKRSNNFKWKGAVHEYLEFGGRVIKSDVAIRHRKKDKKNVNVQSDRNLKIYENRLRKGEEFTPRDTFYYANELRDHRQFEAAIQFYQKFIDMEQGWVEDKIRACINLAACYRELGDLENEIEALIKSIVYDVPRPEVSCRLGDLYKERKLYNKAIIWYQIAIQANVEEIQGFRQESYSTWYPYLQLCVCYWHTGQKELAVEYNNKAKKYRPNDQAILNNEKFFEEYFSNKS

SEQ ID NO: 5181 - protein, 301 aa, Citreimonas salinaria
MHLTVVILTKNEERHIERCIDSVTSFATDILVVDSGSTDRTVELAEAAGARVLSNPWTNYATQLNWGIDRVGLDAEWVMRLDADEIVQPDLAEEIRTRLSGLPPEVDGVYVSRHMTFLGRPIRWGGVFPVRMLRLFRNGRGRCEMRWMDEHILVEGAVANFRGSILDDNLNSLTWWIEKHNSYASREAVDLLNLEYGFIPHETVADLSSGQQAGVKRWLKEKVYTRLPGGVRAFMYFFYRYVVRLGFLDGKEGAAFHVLQGLWYRYLVDAKIYEVRKEIRAGDGDPVAAIRRVLNIDLTAS

SEQ ID NO: 5182 - protein, 343 aa, Synechococcus sp.
MKSPLLSLCMIVKDEAHQLGRCLESVQPYADELIVVDTGSTDDTVKIAAEFGAKVFEFAWGNDFSAARNHSLDQACGSWILVLDADEVLRVETPDFKAQLQDRPEIEVYTLTRQEFATQSQFSPFRITRLFRNQSYLRYAEPFHEQLVSLRPEIPQVEHLPGLVIDHYGYGPDVMMSKIKSRNIPILEAIRASRGLSLTLLFALSDLYEATDQAAAAQACQEELFERILPHLLDNAPITNFPALPEALYRLGCKLLELEDWETVRLIGQRGLAWYPHYPPLNYLAGLFLNSLQFPLGASAYFQNCLDLGQTQTYDQSFPFNQAYMGQFAANMLSQCHPELSLQ

SEQ ID NO: 5183 - protein, 362 aa, Bacillus patagoniensis
MVEISLCMIVKNEEAVLERCLKSVENVVDEIIILDTGSTDKTKEIAARFTEKIYDFKWVNHFAKARNKAFSYATKTFILWLDADDIFKADDAKKLKELKKKITPKTDAISMDYHLGFDGNGGVTSSIRRFRLVKAENQFKWHGAVHEYLEVFGNLEHSDIAVTHLSLDDGHDSTRNLEIYEQMKRNNETFSPRDLLYYANELTDHSKFEEAIKYYIQFIQTEKGWSEDVIRACNKLADCYSNLGIVEKARDWSFRALEYGKPKPETCCRIGHIFIEKQLFPEASYWYEQAIVNKETVGYFQNIACETWIPHLQLAVCYDKMGLTEKGNQHNELAGKYLPNDERVAYNRTYFTKRLALLETDN

SEQ ID NO: 5184 - protein, 630 aa, Unknown
  Description of Unknown: unclassified Paenibacillus sequence
MSKTISLCMIVKNEEQVLGRCLESVKDVVNEIIIVDTGSTDMTLDIARKYTDKIYSFEWVNDFSAARNESLKYATSDYILVLDADEYLEVGADFQKDLEKNCDYYLFRIRNEISWDRNFTFAAIRLFKNHISLKFENRLHEHLNIINGTAEYTMGESNLLINHVGYTDDKMLEKDKHKRNLPLMELEVAENATAYNLYNMGKTYFAIQEYKKAVDFFKQAYPLSKDRLFLPELLTKIAYALAEINQMEDALSILTDAVMMFPRETEMRYILGMVYQKAEYYRDAEACFRKCIELGDQGSLITEGSGGYMAHMRLSELYEEIGLLEDSYRELACVLSLKKNFAPALQRYLNLTLKLNMSSQDIQTGIQQHYTLKSVDDLQQLLDIMYGVRNPLLDYYLTTYNITVQPNVLATSKIYNKKYREASILWNEIADKEIENGQDLLLLAFLLKDVSNLVHVQNLLNLSNKERNALEKMIIGQDGKYLLTPVIEGLLLENCRQMIILQEFEQFQILVERMIEIKSEIRLNIGKLLSDYRFDELAIDMLITMFKAKPNNVQLVRLLGDLCLRNNYFEDAHLFYTKLLALDPKYDSYERSLNYYEKVIDVEGTMKIKREMEKRYPYASHVKKTNEEQK

SEQ ID NO: 5185 - protein, 368 aa, Paenibacillus sp.
MITTLPISACLIVKDEEMYIEQCIQSLKPVVNEIIVVDTGSTDQTLAKLEQNSINVFHYEWNNSFSEARNYAISLASEPTILVIDADETLDPSTVPSLNEYLSHSRNLPASVNIVSKLDRYRNVNSRITRLFPNSEDYRYHGMIHEQLYYKGNSINEVKTTNVVLHHFGYDEAEVKKKQKINRNLELLEKQLKSEPESTYLRYQIGQTYYVGGHYHQAIENFDEVLQLISSQDTIPSFLPTVFLSYGYCLHNTSQYPILDRLLNDAFEFFPDYTDLYFLYGVSLIQRGNLKDIEVIKETFEHCIAMGEVTNPIYESVEGVGSYRSYYNLGVYYEATNQVEIAINCYNESAEMNFEPARIRVENIKKHR

SEQ ID NO: 5186 - protein, 344 aa, Lachnotalea glycerini
MITISVCMILKNEGAVLERCLESLLPIADEIVIVDTGSTDKTKEIAARYTDKIYDYEWQNDFAHARNYSFSKAQMEYIYTADADEYLDRVNIERFLTLKRAMLLEIEIVQMKYTNQLQYGTTYNYETEYRPKLFKRLREFVWINPIHETVNLEPIIFDSDIEVIHMPVKSHATRDFSNILKIIESGRKLSKKLFIMYAKELFIAGSDQDFLNAKNYFECSLEEETKGVEELKAAQCVLTKCARLTKDYNMILKNSLKNIADGKASAEVCYEIGEYFYEVEDYIEAAIWFYNAAFETECELNIHYAGDYPLKRLTEVYRILGNYSLEEEYAKLLDEWILPQSPDV

SEQ ID NO: 5187 - protein, 304 aa, Methylomonas koyamae
MHGLTVIILTYNEQLHIERCIKSLPPIVRDIFVVDSYSTDKTIEIAESLGCKVLQNTFVNQSVQFQWALDNCPIQTDWIMRMDADEYLLPDLADEISTRLPNLAEGINGIFLKRRHYFLGRWIRHGDRYPLILLRIWKTGQAHIENRWMDEHIVLDSGKSVIFEYDFVDDNLNTVEWFIAKHNRYASREMIEVLNNKYQLFGHDDSIQESQTGQAKVKRIIKEKLYNRLPIFVRPVLYFLYRYFLRLGFLDGKEGFAYHFMQGLWYRCLVDLKCLEAEQLIKDADSRQEKIARLEKLTGLKLGN

SEQ ID NO: 5188 - protein, 637 aa, Anaerospora hongkongensis
MKISACMIAKNEEKVIARCIESYRAAVDEVIVVDTGSTDQTVAIAKSLGAKVFHFTWIDDFAAAKNYAISKAKGDWIVFLDADEYFVEGTGGKLRTCLEKLDKAFGAVACRMINIDEVNGKTISEIVHVRIFKKDKQLRYVNPIHEALHYRDKDGNINAYLADKGELLIHHTGYSATVNQVKARRNLELLLKQVDDNIAAKPEYYYYIADTYFTLDKWDKVITYIRLFIDTGAKLTNLNVRVYNILIDAMMELGYSLNEIMREVNIAITQFPQHPLFHFYKGKLLYDDKCYDAAFTELRQALQLHENYQDIEVNSLAVNLGTLYNLMAVISEFRNDAGTAIEYYLETLKLDKYDATAFDRLLKQIRSQPLQDIISFLNTLYDVEYEADLDFLATSLVNHAVPQVLAYYTSLREKKYPKQDYVVLQMLVANGHYDKAFAALLECYSRDGDERLALVSATAAMLSGNGAYMEKASEQLPSAYAKLLKAYRGDIILFAEEDKAAFLNLVRTFIFWAGDDAMQKMLNLIDQFPNGMGISVASLFVQEGYYQAGLQYYDYAVQRSVYAGIQVHSGLYFNQGYCLHRLNNPVAATEAFLKAYEAGYRVNDIYEFLRWNIGKLDADSLRVRVNEILQHSSEVEP

SEQ ID NO: 5189 - protein, 319 aa, Clostridium sp.
MTTFSLCMIVKDEEEVLSRCLNSLCDIMDEIIIVDTGSTDRTKEIAKKYTDKVFDYKWCNDFADARNFAASKAVGDYIYTADADEYLDNENKEKLRQLKKIMLPEIEIVQMIYHTPAELSTVYNFEEEYRPKLYKRLRAFTWIDQIHETLRIDPVVYDSDIIVEHRPLTNHATRDFKAFERIAADGKRFSKKLHHMYAMELFRSGEDKDFLKAERLFKRTLEEDGRSIDEVKEAFCVLARCYRLKGDAVAFMECALKDAATTLCAEICCELGVYYESIGNVSEAVMWYQNGLTETESILDIRSSGEIPKLALRRLGMDV

SEQ ID NO: 5190 - protein, 382 aa, Paenibacillus ferrarius
MSRPTISLCMIVKDEEELIAACLNSVKDWIDEMIIVDTGSTDRTVEICQSFGAKVLAYEWNNHFADARNHGLAHATGDWILYLDADEELAPLGDYDLHAQLRQEHASILSLHLINYIGEVPNEDEAFHIAHPRFFRNYRGLKFKYPIHETLNVDEIYENQDLSAIMGHVPLKLWHRGYMDSITQQKNKYERNMTLLLQEANEQSSNPWTQYHMASEYYRVHRYDKAFEYVNLSIVRFIQSGRMPPSLLYKLKYAILFNTGSIDGAWPGIDKAIALYPDYVDLHFYKGVIFYLKTWYAGALDVFQHCLVLGETMGQHLTLRGTGSFHAWYYIGLCSENLGNSQQAAQAYEAALRLSPTYTLASDALLKLRIGRANKEGTESRG

SEQ ID NO: 5191 - protein, 361 aa, Clostridium botulinum
MKITLCMIVKNEEKNIERCLESTLKIVDDAIIVDTGSTDRTLDIIKTFGEKIQIINYNWENDFSKARNLSIKNANGDWILVLDADEELICDKEKLISKLKDTNLNSFNVTWINVLDNKGELDSFAYNRVFRNKGYRYYRAIHEQLDVNEKESGILEEEIFKIIHYGYTKESMEKNNKISRNLKILLDCYNNDSEDPFVCYHLGATYASSRDYRNALDYFIRSYELGLNRGFGAYYYELIKRMSECIYLLHDYKLCIDFITQLLSKEDIRNFTDLYYIAGSCFYKMKDHENAKKMFNKCIELGESKNLPTFTGRGSFLSELMLARIYVDKNDSKNAKMFYLKVLEAKQSLSKDIIKEIYRYI

SEQ ID NO: 5192 - protein, 262 aa, Unknown
  Description of Unknown: uncultured bacterium sequence
MSNALSLSYVFITYNEEKNLGRALESIKDTADEIIVLDSGSSDKTVEIAESFGANVLHNKFVDFASQKNMAISHACKDYIFVLDADEELSEDLKRWVEDFRGGKLEPFHYNAAGFFVARKSSFLGRWINHSGWFPDYTLRIIKRGAGSFKKARVHESFEVHGDKIKIDKNNFMWHYTYQSLEQYFDKFNAYTTLAARDLHDRRLRPSPVRIIFNPLFGFIKQYFIKLGFFDGFHGLVLAVLSAFYVFVKYCKHYFLSAEGKR

SEQ ID NO: 5193 - protein, 287 aa, Syntrophobotulus glycolicus
MSDVTAIILTMNESKNIGDCIKSIQNFVSRIVVIDSGSSDNTVEIAKSLGADVYFHEFENYAKQFNWGLDNTNIATKWALRLDADERFTHELSEEAKQAIAEHNDDDVNGFVLRLRVFFLGRWMRHGSVYPFRKLMLFKFGIGRIEQRNMDEQTTLSCGKSIELNNDALHFDFKNLNYWINKHNWYATREMQDYLEMKINKNIQQISDEHIKNRRRQKLIYYKFPIFIRPLFYFIYIYFIKLGFLDGKEGLIYHFLRIFWYRFLVDAKIYEHEKIGGEIERTGALRS

SEQ ID NO: 5194 - protein, 351 aa, Tumebacillus permanentifrigoris
MIVKNEENTIACCLDSVKDLVDEIIVVDTGSTDRTKEILRSYTDKVFDFPWIDDFSAARNFAFRHATMDYIFWLDADDVLLEDDRKKFSSLKDTLNPHVDSISMIYSLATDEHGSVTSSLRRNRLIKRKNHYRWHGAVHEYLEVWGNIINSDITVTHTKVHHNSDRNLRIYESRMARGEKFSPRDLFYFANELVDHQYHEQAIEYYQKFLETGQGWVEDMISACGKMADCFQHLGDHERERQSIFKSFEYDTPRADFCCRLGYQFLNKNQYPLAVFWYKLATQLDKPVEKWGLLNHACWTWLPHLQLCVCYSNLGQYKLAFEHNEIARKYVPTHASVLHNKSFLESIFEQK

SEQ ID NO: 5195 - protein, 301 aa, Bacteroides stercoris
MHHNSIAALILTYNEEKHITRCINSLKDVCEEIFVIDSFSKDKTVEISKILGAKVYQHPFENQARQFNWAIKNCPITSDWIWRVDADEYIEPALAEKVVISLPHVSLDVNGIYVNKKIVFMGRSLLHGGWYPAQQIKIIRKGYGTSEDKWMDEHLIIFSGTTISIDGDQTDENLNDLSWWTQKHNNYSNREAVNMLLMEYGMNNQGEEVASKLFGTDAERKRWLKMKYVRAPLFLRPFINFFIRYILKAGFLDGKQGFIWHFLQGFWYRFLVDAKIYEIKKQFDFDDERIKQYLIENYLTK

SEQ ID NO: 5196 - protein, 373 aa, Sporomusa malonica
MSEFAKQSQSPITISLCMIVKNEEATIERCLRSVKQIVDEIIIVDTGSTDKTKELVSQFTNNIFDFEWIDDFAAARNYAFSQATQEYILWLDADDVFLDQDRQQLLDLKSTLSREFEVVSMLYNLGFDQYGKVTSQIRRRRLVKREKNYRWLGAVHECLEAYGTQLETTIAVTHQPLGHDSDRNLKIYERRLLKGEVFSPRDLYYFANELKDHKLYNRAIEYYQRFLATKQGWVEDNIGACGSLADCYYQFNDVENQLKYIYISFQYDTPRADFCCRLGFHHLNNNQLKQAVFWYKIATQLDIANASWGLVNYPCSTWLPHLQLCVCYSRIGDYKLAYEHNEMAAKFIPDDPRIQHNRNFLRSQLGNENKQDT

SEQ ID NO: 5197 - protein, 658 aa, Paenibacillus sp.
MKLLSICMIVKDEERVLERCLSSVQDLADEIIIVDTGSTDKTKEIAKKYTDKVYDFKWCNDFSKARNESIIHATGQWILVLDADEYIAAEDHQDWRDFLHKEELLPHLAYTLPVINFTGEKEYEDEITTAPVTRLFPNNMGIMFERPIHEQLTRGLQGDLYYKAINLNIYHTGYQISRILEKNKHERNMGIFEQMMADQELTSYDWYTLGNQYRYAKDAIKAIECYEKAMRDVDRNEAWYPHCLMGLVSLYYSQDQLNRSWELTEKRLIRYNQYPEYYTVKGIHYETLGFFQDAELQYLKAIDVAEKRAQKNQDIWLIDPMYSFDSPVQQLIGLYFRLNDNKNAIYWMSKQLNKNNKNPGHLVKMMEWLLQNEDEESVIRFFEKIYVSPTEGEYLLLFKVSLVLGNKGLVSHYKKLVSIDVGLSLADQLKLSVINNDSARMHALLNDITVITDDEELVWLQVIIGTLVWKDYSLLEKLSRKLDNNRLSSASKVILGVFGQNEVSNDTVIETDILFAIARQLFLTQEFEIFDQLVNGVNNSDVINRLANYFYDVNRVELAMNYYSALLTRNELNGMSLENLGYYHANQNYRDDAYEFFNAALEDESAKRHIYKTLISLAPNEEKMKVVNDFNNRFPDFKEISFVEEFFNNEIKLVNNTV

SEQ ID NO: 5198 - protein, 368 aa, Massilibacillus massiliensis
MTTLEENSAKPMTISLCMIVKNEEATIERCLGSVAKAMDEIIIVDTGSTDTTKEIVRQFTNTIYDFTWIDDFAAARNFAFQQATQEYILWLDADDVMLTDDLEKLLTFKQSADKTVDAYTMNYNLSFDTNGNVASKLRRNRLVKRTNHFQWIGAVHEYLAVGGKIVNLDISVTHKKEKSDTYDRNLKIYENRLANGEEFSPRDLYYYANELNDHQRYEEAIVYYKKALATKACWIEDNIAICGKLADCYSALGDDENKLNYTYRSFNYDTPRAEFCCRIGYHFLSLKQYQQAIFWYTLATNLQKPKDSLALLNNSCWTWLPHLQLCVCYANIGEVPLAIQHNKIAEAYVPDHPSILHNNKYFAQLSAN

SEQ ID NO: 5199 - protein, 300 aa, Unknown
  Description of Unknown: Candidatus Woesebacteria bacterium GW2011_GWB1_38_8 sequence
MKDHHSPLTVHQSLKLSVVLATRNEEGNIGRCLESVKNLADEIIVVDEYSTDKTREIAEKFGAKVFLEPHHDIFHITKQKALEKATGDWILQLDADEVVTPALARQVSLVVNHHSPFTIHHSPKKELFARHQSLIEQRDGKIGKSTGEVVGYFLPRKNIFLGKPLIHAGVYPDGEIRLVKKGKAYFPQKSVHEQIIVNGKVGWLGEDLMHYDSPTLKRYLTRLNRYTDLKAQELTQDHIGKNPWSFLLFTVYYPLFTFLKLYFRHLGFLDGVSGFLWSFFSAMHFPIAYFKYLTTNYNRK

SEQ ID NO: 5200 - protein, 356 aa, Lysinibacillus fusiformis
MSTISLCMIVRNAQCTIERCLDSVQHLVDEMNIIDTGSTDRTKEIVQNFTSRIYDFSWCDHFAKARNFSFQQATKDYILWLDADDVMTKENQHKFSQLKQSLFPSIDAVTMDYYLTLDCDGEVECSERKFRLVKRANHFQWEGAVHENLRVSGQLYHSDIAVTHLPLTKDIHRNISIYEGLIKNGHSLSAIESFHFANELKLHHRYLEAINQYNLFLDSNLGTTDNRIEACLHVGECYRRLHDDQQAQQAVLQSFLYDRPKPEACCRMGQFFMEQLKHKEAIYWYSQALQQAPADTMTIQKRAYSTWIPHLQLSLLYRELRLFENAFQHNLEAQKWKPNHQEIINNEKYLLSQLKI

SEQ ID NO: 5201 - protein, 251 aa, Unknown
  Description of Unknown: Candidatus Roizmanbacteria bacterium CG_4_9_14_0_8_um_filter_34 _12 sequence
MSITAVILAKNEEKLIGQCIKSIDFCDEIIIIDDFSTDKTKSIAENAGAKVFQHKLNDNFSQQRNFGIEKANSDWVIFIDTDEILNEDLKEEIKNIVSRDGDLSSYRLRRRDYFWNHEMRFGEIIEARNNGIIRFIRKGKNRWFGNVHEKYIADNRIGRLNGFINHYPHQTIKEFIISVNFYSTLRAKELYKQDKIMNIFQLIFFPFGKFIYNYFFRLGFLDSSAGFVYSFMMSFHSFLVRAKLLQYTLYD

SEQ ID NO: 5202 - protein, 288 aa, Unknown
  Description of Unknown: Flavobacterium sp. sequence
MTDFSFIILTFNEEVHLPRLLNSIKDLKAPIYILDSGSTDQTITIAQDFGAEIKINTFENHPKQWDFALKNFTIQTPWIIGLDADQIVTPSLFSHLEKFKDSNYTGTNGIYFNRKNYFKGSWIKYGGFYPKYLLKMFRNGIGYSDLNENMDHRFIVNGETMIWNNGHLIEENLKENQISFWINKHNRYSDLIAQEEVERMNNLRSQSNRADFFGNPDERNAYLKKLWWKLPLGLRPFLYFGYRIIFKLGILDGSTGILFHFLQGFWFRLIVDVKIKEILKSKNVNSLN

SEQ ID NO: 5203 - protein, 265 aa, Terriglobus roseus
MRPTISVAMIATNEEKNLPRTLAALQGWVDEIIIVDSGSKDRSPQIAVEYGAKHSYNRDFRGHAEQKNIAIAQCTGDWILLLDADEVVTPELATEIQSTVATSAFNAFWIPRLNIFITRWMRHGGLFPDEKLRLFRRGMATVDESIGPHGTPQYNADKGHLRAHLEHYGYPDFANYLDHMNEYSTGTVVALSRRKSKTSSAALLFQSIANPFFGWLKNYIFRGGFLDGAEGLIFHLNHAVYAHWKYVKVWEARKHAATTAAQPRP

SEQ ID NO: 5204 - protein, 299 aa, Unknown
  Description of Unknown: Cytophagaceae bacterium BCCC1 sequence
MSITAVILTFNEEKHIERCIASLKPICERICIVDSYSTDTTLEICKRLDVEVFQNKWENNHSKQMNWAIENCHITSKWTMRMDADEYVLKELQIEINSKIETLQSNIAGIELKRRVYFKNKWIKHGGFYPIKLIRIWKTGKGYSEERFMDEHIVVNSGEIICLEHDIVDENLNDINWWTAKHLNYARREAVDFLSNKYSFGLNTEKDINITKQAERKRKLKDNFYYKLPYGLRPMIYFFLRFIVQLGFLDGPKGWIFHFLQAFWYRIVVDINIYEIEKACEGDSRKIEEFIIKKWGINF

SEQ ID NO: 5205 - protein, 253 aa, Unknown
  Description of Unknown: uncultured bacterium sequence
MLSAVVIVKNEEKNIVDCLDGLSFCQEIIVVDDYSTDKTIEILERQSLENSKIKVFKRRLDNDFSAQRNFGVEKTAYDWVIFVDADERISEELASEIKENLSLPDFGGFLIPRIDFMWGKELKHGETGNIKLLRLFDKNKGSLKGKVHEVWETKNKVGVLINPIKHYPHPTISEFLKEINFYTTLRAEELHRKKVKSNFLTILLYTKGKFFVNYFLKRGFLDGTPGLVHALLMSFHTFLVRGKLWLLWQKRAS

SEQ ID NO: 5206 - protein, 366 aa, Geobacillus sp.
MITISLCMIVKNEESVLARCLDSVRHLVDEIIIVDTGSTDRTKEIAQGYGARIIDFPWNDDFSAARNFAFSHATMDYIFWLDADDVLLSEDQEKFLSLKCTLPSDIDSVTMIYSLARDERGTTISSVRRNRLVKRSNHFRWHGMVHEYLEVWGKILNSDITVLHQPIHNHSDRNLKIYEKQLAQGKELSPRDLFYFANELFDQQQYERAISYYEQFLQTKKGWVEDCIAACGRLADCFYALGDEKQALRYVYQSFEYDTPRAECCCRLGYYFLKKKKYRLAVFWYNLATQLTIPSDSWGFIHHACWTWLPHLQLCVCYFYLGEYELAYKHNEKAKEYVPDHPDVLHNQCLLESILSIHSTFPQTDQ

SEQ ID NO: 5207 - protein, 584 aa, Desulfotomaculum nigrificans
MKDTVTLVMIVKNESQNLGTCLDSVKNHIDEIVIVDTGSTDSTLDIASRYTDKVYTYPWNGDFAAARNYAIARAGGDWILSLDADESLICAPGQLKELVRRKNNIDAYMLPLLYPVAECTGEYNQFLVLRLFRNKKGYQFRGKIHEQVVVHNNEVVEIADDIVIKHNMASPKERNRKRGRNLAALKKAYLEDPTNYFLQYYLGIEWLGLAKPDKALPFLQNAYRNLTDDHLLFRAPTLRYLLICLNILGQLDEMICLSLEAALKYPDYTDIYYLGGIALEEKKEYKIAVKWFDQAIQCGVPPSIYSHMNGTGSFLALYHMGFCYEKLGMPENAQACYERALHENNQYIYPAGNLFLLILKKRGPRYTLEYFKEKGYLNNLRLALTVADLFFLAGYPDLSERCLGRCSVSSDKSEEVFFQLGRYNIYSGRLKKGLNYMEQIPEGSDFFIDGQTHKAVALLLMGRFNDCRSLGLQMWKNKLTRTTARVILSLSRSMQDGQSPDASTKFIGADLIRASLNILDLCYHYLPGKSTEGSHLTQIINILESIIRRSIPMGDRALQEYYQDRTNSLREFFDYKFGNGGIRT

SEQ ID NO: 5208 - protein, 507 aa, Unknown
  Description of Unknown: Candidatus Kryptonium thompsoni sequence
MPKLSLCMIVKNEEKFLAGCLESVKNIVDEIIIVDTGSTDKTIEIANSYNAKVYHFEWKNDFSLARNESIKHATGDWILILDADERLNPGQEMKIKKYLNLNFDGLYVRIISTDKNGELYVTEYPRLFRKIDGVKFERKIHEQISSSILKLGGKLAKTDITITHLGYSQDDETMRKKYERNLRILLEELEENPDDAHTCYHIGITKTLIGEQEEGIKYLKKAISIPREKSNINDSLRAFIYNIFGNYEFKRGNSSQALNWFTESIKLAPVQVSSYYHGGLVHLKDSNFILAKNFFEKALKNLHSILKGKPSDLTIEAFIEPGDIHFKLAICYFKLGNYHKLNENLAEILPNEKLYEAFLNFLVEEYKEGNKNVTQVIKYISKLKPSFHVFKILSGIYQVEGELENAVESLRNALKFKDDDEIRYNLGTCLAGLKRFDESIKVLVDFLNRRNSPFFESALKVLVLSYIGEGNFYDALSCYKLILERNPEDEAIKLRVHSIAQKLANPH

SEQ ID NO: 5209 - protein, 256 aa, Unknown
  Description of Unknown: Candidatus Woesebacteria bacterium GW2011_GWA1_43_12 sequence
MITAIVLARNEEKNIERCIKSLQWCNEIIVIDDESSDRTVELASKLGAKVFKRALKDDFAAQRNFALEKAANSWVLFVDADEVVTTELSNEIMEKVKKVEYKGFKVKRIDYLWGKKIRHGDIARFNYVRLGRRGVGKWRRRVDEVWEIEGKIDQLNNPLLHYPHQSVAEFLQEINFKSSLNARQFYEEGKSTNLVDWFKPLATFFRSWIFKLGFLDGMAGFNIALLMSFHSFLVRSKLFLFTKSGGQTLNVKSTGL

SEQ ID NO: 5210 - protein, 365 aa, Brevibacillus laterosporus
MATISLCMIVRNEEKSIARCLRSVKGAVDEIIIVDTGSTDKTIKEAKEFTKKIFHFKWVNDFSKARNFSFQQATMDYIMWMDADDVLEEIDRKKLQLFKHKIDPSIDVVVMPYHTDKDEFGNVILPYFRERIVKRTHKHCWVGMVHEYIQYSFGRSFEIDIAVTHRPRQQKNYKRNLSIYENAIADGVLLNPREKYYYANELKDNERYEEAIGIYQQFVNNELPRVEEPELLMEQICFCYEKLQLPEQEIKYALKSLEYGLPRAEVCCRLGYYWLQKNEPKKAVFWYELATTLPKPHTWGFRKEACWTWLPHLQLCVCYDHLQQFEKSYKHNELASAYRPADPAILGNRAYLTNRLKDLGIAIPT

SEQ ID NO: 5211 - protein, 340 aa, Butyrivibrio sp.
MVTISVCMIVKDEEANLSRCLNSLKGIADEFIIVDTGSTDKTKEIAESFGAKVYDFEWTGDFSEARNFAFSKASCDYIYSADADEELDEENRERFLKLKEDLLKLDIDIVQMYYCNQLAFRTVYNYDRELRPKLFKRLRRFVWEDPIHEQVAIEPVICNSEIEIIHRPAENHAGRDLESFRKAISEGRYLSKRLHNMYARELMMAGTKEDFIKARSFFEDSLKDNNRTIDEIKEACCVLAHIAVIADDTKTLLKCSLKDANTEMSSEMCYELGEYYYGQKDYDEAIIWFFNAAYECESILDLRKSKELPRLALAKCYRALGNDEQAADYEREAAEVEKEE

SEQ ID NO: 5212 - protein, 367 aa, Bacillus cereus
MMVLNKQRPTISLCMIVRDEENTIGRCLDAVENIVDEIIVVDTGSIDRTKEIVARYTSNIYNFPWIDDFAAARNFSFSKATQEYILWLDADDVLLEDAQEALKQLKEELDSNVDAVSMPYYLVMDSNGKPLYCTKRYRLVKREKQFQWFGKVHEYLAISGEILNSDVAITHKKEKKVTNRNLKIFQNAVAAGEELSPRDLFYYANESMDNEKYDDAVLLYEVFLNQEEGWHEEKIYACGKLGDCYAKLGDWEKAIESCTKSFRYDIPRGENCTRIGYIYMEQEKYNEAIFWFKLATEVPLAKDSPFHSPASYTWLPYLQMCICYSKLGDQEKAYYYNELAASFVPNNAAIEYNRKYFRGIFDEQYKV

SEQ ID NO: 5213 - protein, 283 aa, Rhodovulum marinum
MSKRKLPVTVAVPVKNEEANIARCLERLGRFEEIVIIDSGSTDRTREIAEGFGARVVDFQWNGEFPKKRNWFLMNKPIATPWVLFLDADEYVDDAFCDALEAAVTREDIHGYWLHYDNFFLGKPIRHGLVQRKLALFRVGKALYERIDEHNWSALDMEIHEHPIVEGKVGEIDARIDHRDFKGLAHFISKHRDYAQWEARRYALMRDEPETWTQLTDRQKFKYTHLTKWWYPPFYFAFTFIAKRGFLDGSAGFHYAMYKAWYFQTIRLLIQEYAAEPALQKAI

SEQ ID NO: 5214 - protein, 363 aa, Bacillus sp.
MCTITLCMIVKNEEEVLHQCLSSVKEICDEIIIVDTGSMDKTKDIAKNFTEKIFDFEWIDNFSAARNFAFSHATKDYILWLDADDILLKEDHQKFKILKKNLNASIDAVSMIYNIAFDEYGQPTFSYRRNRLVRREKKFKWIGLVHEYLEVSGNIYTADIAITHRKSDKTKSVQSDRNILIYENRLKNGEDFSPRDLYYYANELKDHADFQKAIKYYYNFLDTKKGWIEDEIRACINMAECYRNLGNLIKEKESLVMSFIYDVPRPEASCRLGDLYKGNKEFNKAIVWYRLALEKEAVNNPGFRQEAYSTWYPHLQLCVCYWETGEQKLAEEHNNRAKVYRPNDSSVKTNEKFFKNYFKNYDV

SEQ ID NO: 5215 - protein, 297 aa, Thiothrix caldifontis
MSTISVIILTYNEEQHLSRCIASVKSIAQRIIVIDSYSCDKTIEIAKNHGVDIYQNKWFNYANQFNWALENTQINTDWIFRLDADEYLTEQLKDEIKIKIPLLEPNIAAINIKRRVYFLGKWMKHGGIYPTYLPRIWKTGYGKIESRNMDEHLVLSGGKFHDFEYDLVDENLNTLDWWSNKHIKYALREALDISLKEELEKKENITSKITGSQAERKRFIKNIYLKFPLFIRPSIYFLWRYIFRLGFLDGREGFVWNFLQAYWYRVFVDCVLLEAEKKSSIEGVSASEWIKNKIYSP

SEQ ID NO: 5216 - protein, 264 aa, Paenibacillus sp.
MIEISLCMIVRNEEKSLPRCLTSVRAIADEIIIVDTGSTDRTKEIAETFGAVIYDFTWIEDFSAARNFAFSKATKEYIFWLDADDYLKESDQVLFRELKQSLPENVDSVNMQYNLAFDAEGKVVTSLRRNRLVRRSCGFKWIGPVHEYLEVYGPSYSSDVCITHEKDKAYTDRNLRIYRKREAEGESFSPRDQYYYANELRDHGIHGEACQYYEQFLNGGQGWIEDNIQACLRLAECRERLGDKEAAFTAITRTLQYDSPRRLD

SEQ ID NO: 5217 - protein, 438 aa, Clostridium saccharolyticum
MKKKARLSQCMIVKNEEKNIARALTWGKNIVYEQIVVDTGSTDRTVEIAKSMGAKVFHFTWVDDFSAAKNFAIEKAAGDWIAFLDADEYLLDKDAKRIKEILIQLESADPKLKPHILRTSLVDLKEDGTTNGITVQDRFFQNLPKLRYQNRIHEMIAITSGKLIICDLTKEISVLHTGYTEAVYKETNKVERNIRLLKKEVEDNPENYDAVAYLAETLKVSGNADEAEVLYRDILKNGVSHINSARLITTYYGLMHTILMRDKAEEEDEFFLLYEDAVKFSPEYPDYDYFMGVWHFRKECYGETVTYLENCLKKLEDYQGINVTHVPDVLTDIYTALVRAYVEISNFSQAVRYCVLILRIDRYREIITNTLVDMLKQEGDSAGAIAAIIGFLQKIYDLNSLKDRLFVIRSAKKTGYKALEDALIETMSDEDKSWYFSE

SEQ ID NO: 5218 - protein, 250 aa, Tenacibaculum finnmarkense
MNVSGLVITFNEEVNIKDCILSLKKVCNEVIIIDSFSTDKTIEIAESMGAKVYSQKFLGDGLQRVHGLQFCKNDWILNLDADERLDEDSYQFIKSQKYLKQPYDAYNFRRKNFLKKQPINFAGWYPSYTCRFFNKQTAKPATTKVHQSIQATNLKKTNLHLLHYGWKDFHQIIGKYNLYTTWQAEEYFEQGRKVHFFTPITHGVWSFIRCYILKKGILHGLDGITFSMLQAFSSYIKYAKLRKLYEESKL

SEQ ID NO: 5219 - protein, 348 aa, Brevibacillus formosus
MIVKNEEKYLARCLQSVVNLVDEMIVVDTGSTDQTKFIAEQFGAKVYDYHWDNHFANARNFALQKASSDWNLVLDADEYLVGDAEKCLRSFIETKRAIGRVLIVSKYLDNGEVKYSRQLASRLFPKGAYYKGRIHEQIASDLPHFATSIELHHSGYYETDKTDRNLPLLLLELEDQPDNPYILYHIAINKKNKKNYSAADQYFERAYSLLTGKEGYAPVLVVDYLYNIMANGNLDKGITIIDKEKERLTDFPDFHFVKGLFFMDYIQKDLENRLHMIDWIEQSYLTCIELGESNHNDSVVGVGSFLAAYNLGVLYELFGIIDSAKHYYRESSNLGYQPAADRLNQLLM

SEQ ID NO: 5220 - protein, 614 aa, Paenibacillus selenitireducens
MKKLLSLCMIVKNEEKVLERCLNSVSRLVDEIIIVDTGSKDRTKEIAFHFTDQVYDYQWDNDFSAARNIAISYATSQFILVLDADEYIDLTKYNQIINFLSSLPNKSPIAIIVPIYNFVGSPNSGNLNQIEAVRIFSNDPQVKFDRPIHEQVISTKEELEFVRFDLPIYHTGYTTESMEQKQKSKRNLNIFEHLKTNKQLNCYDNYTLGNEYFALSNYSLALQHYSLAYKNQEYGKTWMPQCLAQMLQCLFKLRQYSEMYELCEHAIELWPSACDFYWFKGSLFMEIGADEYAIQALHQCIHIAESSESSQTWIISPNYGSNLSYQLLSLIFLRQHDIENAVHALTKLLYINVNNQGVLLKLLPLLLDHESIDQIIMFLNQVYKQPEDYQLIMLFETSLLLASVELSHYYWKLCKHLNFQNRPDLPFYYAVITKNNELIMEYETNNTNTTGRLQQISKILKSILIEGNMDISINEDLKSSLLISLFRLGQYEMYDTLLKVTDYNHPIIINDLADYFFDNQHIDLGIDYYSTLLDNNQINLSGILNISRYYIKQGYLLDASDFIRNTIQLQPDHLTLYILYFLTSEHPTKRIVQQFYDLFPNYIQLPFVPPIHNN

SEQ ID NO: 5221 - protein, 348 aa, Unknown
  Description of Unknown: Lachnospiraceae bacterium Marseille-P3773 sequence
MITISVCMIVKNEEEVLARCLESLKPIADEIIIIDTGSTDRTKEIASYYTDKIFDYEWQNDFAHARNFSFSKASMDYIYTADADEVIDGVNIERFFQLKRAMLFEVEIVQMKYTNQLQYGTTYNFETEYRPKLFKRLREFAWINPIHETVNLEPVIYDSEIEIIHMPLKSHAERDFSHILKVIKDGHRLSKKLFIMYAKELFIAGQDKDFLEAESYFVCAAENEIRSAEELKAAQCVLTKCARLTRNHNLLLKSSLKNFAGDGASAEVCYELGEYFFKEKDYNEAAIWFYNAAFETECELNIHYAGDYPLKRLAEIYEILQNPEQQVEYERLFSEWELPKSLEHGELR

SEQ ID NO: 5222 - protein, 387 aa, Clostridium akagii
MKISLCMIVKNEEKYMKMCLENAMKLVDEVIIVDTGSTDKTKEIIEKISGNIKIIDYRWQDDFSKARNISLENATGDWILMLDADEKLLCDPDKVRETLANTKAAGYKIPLYNIINTKTVVYSAVYIKFFRNNKGYKYKGRIHEQINLPDAGLNENIIDEKIAKVMHYGYLESIVKGKSKSERNLRILKKELKEDPNNPFIYYNIGVGYHMAGDYEKSLKYFFKCNSIASKKSLTRITLYEIDMSKRIAECLAQLKKYDECIDMIDELLSDNCYKRFVDLEYLKGMCYYLQKQYKEAIKCFHKCTEMGETKEFLSVLGMGSFKAKFMMARCYVELKDELKAINCFMESVFDTNNFLNEGLDDFRIFLKNTNRVEILEQLNKLVSEKN

SEQ ID NO: 5223 - protein, 294 aa, Bacteroides plebeius
MLDISVIILTYNEKIHIERCINNAKKFAKEIYLVDCYSEDGTVEMAQSMGAKVFQHPWENYSKQFNWALQNLPITTEWIWRMDADEYLSDDLISELHQKLPSLPNNINGFTAPCLRIFMGKYIKHGIIPLILLRLFKIKYAICENRYMDEHIQLSEGKIGSLKNPFYDDNLNGLTWWTNKHNGYATREAIDLLLTEYDLLPQESVVNSGAHSAAIRKKKLKYIKLPLFWRAFAFFILRYIFRLGFLDGKEGFLWHFLQGFWYRTLADAKVYEIKKNHGFDSERIKTFLKENYLK

SEQ ID NO: 5224 - protein, 251 aa, Unknown
  Description of Unknown: Chlorobi bacterium OLB5 sequence
MGISAIVITLNEENNIRECLESLKWCDEIIVVDSGSTDKTVKIAEEFTKNIIISGNMSYGEKRNLGIDKAVNKWILWLDADERITSELREEIRLKVNGSNTNAFYINRKSFFINKFIKHCGWYPDFTLRLFRKDSGIRFDSSLVHEKAIFSGNTEKLNNEILHYTDRSFEHYINKLNKYTSLSAEELRKKGKNASIIDIIFRPVFTFFKMYFLKLGILDGYTGLVLCTLSSVHVMAKYSKLYLMNKPNSIN

SEQ ID NO: 5225 - protein, 375 aa, Unknown
  Description of Unknown: Candidatus Desulfosporosinus infrequens sequence
MVDKSITISLCMIVRNEEGTIARCLDSVKGIPDEIVIIDTGSTDRTKEIVNQYTDRVIDFVWIDDFAAARNFAFSKATTDYILWLDADDVLADSDREQFLKLKKNLDPLMDVVNMPYLLAFDQSGAVTFSLRRNRLVKRSKNFRWIGAVHEYLEVYGPVLNSNICVTHKGMASNDSDRNLKIYEKRKAKGESFSPRDLYYYANELSDHQLYNQAIESYQEFLKTGLGWVEDNISSCGKLADCYQKLEKKDKELEYILKSFEYATPRAEFCCRLGFYFLGAKQYEQGVFWYKLATQLERPVDSWGPVIEACWTWLPHLQLCVCYDRLGKHELAYEHNEFARNYRPEDSQVLYNKNYLEGVLKKVSAEKNALDFLLN

SEQ ID NO: 5226 - protein, 359 aa, Bacillus cereus
MKKNITISLCMIVKDEEQTISRCLESVKDIVDEIIIVDTGSTDKTKELVKKYNAKIYNFKWIDDFSAARNFAFSKATKKYILWLDADDIIEQKDKKLFLQLKSTLNTKIDAVSMKYNLTFDTEGNPTFSSKRNRLVKRNKNFQWHGFIHEYLEVYGNLMDSDISITHKKEKTHSDRNLNIYKKHLAAGKTFTPRDTYYYANECKDHQLYEIAIEWYTKFLDEKKGWIEDNIQACLKRAKCYLQLNNIEKALYSSLQSFIYDKPRGEICCQLGFIFLEKKEYDIAIYWFHTAIKSSRPTNAPFIEEACYTWIPHLQLCMCYYHMKNNEKAIYHNEQAAKFVPHHSSIKYNRDFFNTLTKK

SEQ ID NO: 5227 - protein, 338 aa, Unknown
  Description of Unknown: Firmicutes bacterium CAG:95 sequence
MIRISLCMIVKNEEKVLDRCLASIFDLMDEIIIVDTGSTDRTKEIAGKYTGRIYDFAWCDDFSKARNFAFEKAACDYIYSADADEVLDEENHEKFRLLKENLMPEVEIVQMYYRNQLANGTVYNFDRELRPKLFKRLRNFVWTEPVHETVRLLPVVYDSEIEITHKPEHNHGDRDIAIFEQLLARGEALSKRLSDFYARELFVAGTKEQLIHAKDYFISIVKDSETDADRLKTALAVVVRSCFEAGDVLTMYQYAMKDAASEASSEVCCILGEYYQNRQDYEEAILWFYNAAYEQQSILNIRYQREIPLEGLIACYHALSMSEQEAYYQKELSCIEPG

SEQ ID NO: 5228 - protein, 280 aa, Unknown
  Description of Unknown: Candidatus Koribacter versatilis Ellin345 sequence
MLLSAVIICKNEEQNIARTLASVVDLADEVILLDSGSTDHTLDVARTFGDKVKIFQEEWKGFAAQKNSAIAKASGEWILSLDADEEVSPLLGRELKEALGKKEEPQQKPGENAGQIIAGDGPFCGVTIPRDAYSIPRKNFFMERWIRRGGFYPDRKIRLVKKELAVFEDRAVHEDMKVSGQILPLHGAILHHAYPTLSSYIEHMNRYSSLGAEMVVAKGKHGFSFFNIVVRPWATFLYNYFLRLGFVDGREGLLLHLYHAVYVSWKYAKVWELSRKVRPT

SEQ ID NO: 5229 - protein, 252 aa, Unknown
  Description of Unknown: Flavobacterium sp. FPG59 sequence
MAISGLVITFNEEKMIGACIDALLKVCDEVIIVDSYSTDGTVEIAKNKGAVVIQQNFLGDGPQRSFGLPYCKNDWILNLDADEFLDYDSVGFIQEKKYLNTAHDAFSFRVKNFLQDKIIDFAGWYPDHKIRFFNKKSAHPSSDKVHQKIIATNPKKLKTHILHYGSHSFFQIIAKKNQYADWNAQQLFDQGKKVSYIKPVLNGLVSFIRCYFFKKGILNGIDGLTISLTQGYFSYIKYANLIQLHKISQKKL

SEQ ID NO: 5230 - protein, 252 aa, Fluviicola sp.
MKISATIITLNEERNIGRCIESLVGVADEIIVLDSFSEDRTKEICEKAGVRFEQRKWEGYSASKNYLNSLAQYEYILSLDADEALDADLREALLACKNDDEPGIYSVNRITNYCGKWIKHGGWYPDVKIRLFPKAGSQWVGAHVHEELEYPAGLKERQLPGHLEHYSYYSFKEHRERADKYSALTAAKFYEQGKRVGAMKPYVSAIGRFIGMYFVKKGILDGRMGFKIAWISAQSNVFKYKELLRLQRENAA

SEQ ID NO: 5231 - protein, 257 aa, Unknown
  Description of Unknown: candidate division Zixibacteria bacterium sequence
MPNLSAVVITRNEEANIKRCLLSLQIADEIIVVDSGSTDRTIEIAENLGAKVYVKEWAGYGFAKKEGVSKAFGKWIISLDADEELSPELAKEISTAVLSETGDSGFYIKRKTNFLGRWIYHCGWYPDYILRLFKKEDGDFNESVVHEKVILNGRVGYLKAEILHYSYNTIEHYFEKFATYTTLGAEQAYKSGKKSRWFHIVFKPPVSFIKHYFIKLGFLDGLEGFIISAFSAMAVMVKYSKLRHLIKQGKSGDDTNA

SEQ ID NO: 5232 - protein, 252 aa, Flavipsychrobacter stenotrophus
MIKLSVAIITFNEEENIGRCLASLKDVADEIIVVDSNSTDKTAEIARSYGATVILNPFEGYGQQKNLATDSAANDWVLSLDADEELAPEITKSILQVKEHQQYNVYEIARFTNYCGQWIKHSGWYPDKQTRLYNRTKGRWIEKKVHEYWDLFEEGKKGLLKGDLLHYSYTSLEDHLSKIDRYSELSALDAVARGKKASLLTIIFSPFWHFFNEYFIKLGFLDGFHGYTICKLSAYATFSKYTKIRMFSKMQK

SEQ ID NO: 5233 - protein, 255 aa, Unknown
  Description of Unknown: Candidatus Shapirobacteria bacterium CG08_land_8_20_14_0_20_39 _18 sequence
MTKAQTISVIINSGNEEREIGPCLESVGQMADEIIVCLSQLSNDKTGEIAREHEAKVIVQEPVEMNYAAWHNQGMKIAKGGWLLWVDADERIPLPLKEEILSVLNNSQYSAYAIPRRNFLLGKELHWGGWYPDYAKRLFRKNDLKRWEGELHEQPIFSGDLGKLKNPMLHYQPEKIEPALQKSIRWSGLETGLLFKANHPKSTWWRVLRMGLTTLFERLIKKQGFRDGVEGWIESIYQSFHTMIVYLRLWELQHQ

SEQ ID NO: 5234 - protein, 747 aa, Clostridium cellulosi
MKAHIKNPYNIKITACTITKNEEKTIARSINSYKKYVDEIIIVDTGSTDNTVKIAKSLGAKIINFKWCNDFAAAKNAGLDAATGDWIIFLDADEYFADDTCKKVRAVIAEAIRQNKNAVGCRMENYDQDTGVNLVEGFSVRIFEKGTRYRYPVHEEIYNPKGVNVLTVGKSYFYLKHSGYSSKIIAKKCKRNLDIMLKELDELSDERRRIIYYSYISDSYFGINKLNEAIKYAKMYLEGSKEKNIRILGCELRPYMNIIQGMETLKEDPEKIVPYATEFLETFPDSPEAHFEAGRSYRRMFMFNAALDELNKAVEMAKNYSGVYVDTVDAKKASVYNECGMCCEALHNPVKAMDYYYKAYNEGNDYQSALFNLIRLVRNMPAEEVDSFIRSLYAGVSQKKHLAVLAALMTHYMVPQIIECYAAYRMDKKDDPINGEVTAFVMAGKGNFKSAAEMFLLSYKVSKSKNTLARCLICAVLSNDSEAIEEIRKDCSKPRLFMFGLADKKPQLKNKDLYDIATLLAECRNMGQADFAMQRLEAMAEQLSGKELLRLSRFLADTFFFEAALYAARYADLSAKAIFMQGYCLYNLHRYNEAIDLLLLARHLHLEPSYINDIYNRIKAIKESAPVDKPNDLSALKTLITQEIESGNIEKAVMDIEEYKELAEPDADIYAAEASAMYYICEYKRAAVAVQCGLLKDDKNVDLLYNAGCIFEKLGNKKRATSMYKKALKYCTDAELTTEIEQMIKAL

SEQ ID NO: 5235 - protein, 272 aa, Unknown
  Description of Unknown: Candidatus Shapirobacteria bacterium GW2011_GWE1_38_92 sequence
MNKTTISVAIATFNEENNIKRCLDSVNSWVDEIVIADGNSSDNTTEIASKYNNVKIIKTVNKPLFHINKNIAIDSCKSQWILQLDADEVVSPKLANEIQNILSKSPDEIIENGFWIKRQNFFLGTFLKKGGQYPDPTLRLYKNGKGKLPCIDVHEQAKIESPVGILKNDLLHYADPTFSRYLLRHNRYTTLLAKKYQEEKLPLNFINFLNYFCLKPKIWFLSTYLRHRGYVDGFPGFVFSLFSALRFPISYIKYWELQKSHRSINLSQDWDK

SEQ ID NO: 5236 - protein, 641 aa, Bacillus megaterium
MHPFLSLCMIVKNEEKVIDRCLSSVAHLVDEIIIVDTGSNDKTKKIVQQFTEHVYDFVWEDDFSAARNFAASKASGKWLIVLDADEYVDEENFREFIKEIKDDKDKFDTYEIKILNFAGQRGETLLQNYHHRVYKNNGEIIYYRKIHEQFTHVYKDNNFTSKRSSLVIFHSGYLNNTVQEKDKQQRNKQLLDRELLRGKNKAFDYYNLGNEYFSLQDYSIALECYKKSYQLQSDFRVLWVSSTLMQIVNCLIHQQRYNDALTVIYDAEQVYSETPEFQYLKGEIYYLKGQIEDAKLVFNYLLNNQKKYNNVILRPDWKDQMPYKRLGEISLYENNYEEAIYNYISVLNINKYCKLSIEKVLFLLNKFHSNEEISNFLENNQLIDEMNIIDYVKICFDLGNPELSILLLKGTKNDFSVLYKVAEIKKIALGRTGNLYDFTGSINEHFIQELNKSGWLNIIDIFTLNEYLEESFDSEWNLNVFKQDPNFEILFNLKDNSLAYNRIDEGVFIVFFRIFTAYKRFDYVNLLLKYATNLSAHLTPAIAAILYENGFKVEGLQLYEKGNWDTFSKEDFLNIISSLLETENELGASQVAEYARALYPDDFRFYKVILEYPTNEDTVSQILPVVSQRFPKSTYMEKYYI

SEQ ID NO: 5237 - protein, 315 aa, Gramella salexigens
MQNLLNIVKYLNKPSLAAIILTYNEGIHLERCLKSVSKVCSEIIIIDSYSTDSTKQIALNYSAKFYQNSWINYSSQFNWGLDNAEINSEWILRIDADEYLTDKLIENIQTNLPEIKSHYTGIMVNRLMYFMGKPLKRGGMYPIRHLKIWRKGKAICEQRWMDERMKLLNGDITFLEGDLIDHNLNNLTWWIQKHNGYATREAIDILDKKFNFTDFIVLRSSLMGNSEEQRRWLKGIYLDLPLFVRPFVFWFVRYFIQLGLLEGKRGFIWNLLQCGWYRFLVDAKIYEAYNKVGKNRENLIQYFKDEFDYDVTKIG

SEQ ID NO: 5238 - protein, 355 aa, Bacillus toyonensis
MKLSLVMIVKNEENNIKRCINHVKEYVDEIIVADTGSTDQTKSILEKLLVRVVDVKWNDNFSDARNSAIEHSTGDWIIMLDADETITYFDKATIKEFMKKERIGAIKSTAKFEYQGSEKESYIYTSRLFPRHVRFSGIVHEQLDTNLEHYKVPIQIDHAGYYKTDKTSRNLPLLLKVLEKQENDPYYNFQIAREYRNIGDLEKRLYHLSVFFKNMDDGAYTKGGIVEYLYALLEAKQYDTMLNVISETDYMMSEYPDFYFVRGLLYMEYVQQDPESRFDLICEIERSYQTCLSIGENHSNGGVIGTGSFMASFNLGVYYELMDGIIPDGKKKAIQFYEQSQEHGYAPAIERLSHL

SEQ ID NO: 5239 - protein, 256 aa, Unknown
  Description of Unknown: Ignavibacteriae bacterium HGW-Ignavibacteriae-4 sequence
MESSNSIKLSAVVITYNEEDKIGRCLDSLIGVADEIIVVDSQSTDRTVEICNSKGATVINQEFLGYAAQKNFGIERANFEYIMSIDADEVLSTELIDSIKNIKISSNTYAYEFSRMTNFCGKWIKHGGWYPDTKIRIWEKGKGKWIGEGVHETLQLDENTKVIKLNGDLLHYSIDSISQHIDQIQKFTTLAARELHQKGKTTSVVTILFNSWFKFVRDYFIRLGFLDGFYGFVIAFNSAYATYLKYLKLYDLNKSK

SEQ ID NO: 5240 - protein, 387 aa, Unknown
  Description of Unknown: Clostridium sequence
MKISLCMIVKNEEKYIKMCLENAMKLADEAVIVDTGSTDKTKEIIREFDSNIKIIDYKWENDFSKARNISIENASGDWILILDADEKLLCDAAKVREILKDAKVEGYKIPLYNIMDASMILYSAVYTKIFRNKKEYRYSGSIHEQINIPDIQKNDFILDDKICKIIHYGYLASVVKKRNKSDRNLKILKKQLKEKPNEPFVYYNIGVSYEVAGDYKKALQYFFKCNELAGKKDPTGITLYEIDMAKRMAEALVKIEEYDACIEMVDNLLSDECYKGFVDLEYIKGFCYYLKKDYKTAIKVFKECIDMGETKKFVSVFGMGSFKPKRMIAQCYVNLNEEVKAINAFMECVFDTNNFVYDGLNEFRKYLIINKRAEILNELNKLVGEKH

SEQ ID NO: 5241 - protein, 675 aa, Unknown
  Description of Unknown: Peptococcaceae bacterium CEB3 sequence
MEKRISLCMVVKDESKYLGRCLRSVQGSVHEIIVVDTGSTDATREIAEAFGARIKSFPWNDDFSAARNASLEAASGDWILFLDADEELCLAGEHVLPGLTAGAEPEGYFIKIVNHLGSEGRGETCPDLVFRLFRRGSDYRFRGAIHEQIADVILERNPQAKFQVAEGIEIAHYGYLDERVKEKNKKKRNLVLIERELRRAEDDRLLRYHYGVELFRAERYAEAAQELTRAAAGIDPNSIYLPKLLRYVVMSRQNAGQFEQALEAAVLGLRFFPDYADLYYYAGLISLDLKSYGSAQDFLEKASSMPSQPPQYASFPGVRGFRCFYHLAVLAETFLDEESALKYYLAALQDNSAFTPALESILRILRPQQEPGYAKACLDKIFLLEDAQARQKMAELCFRQNAYHLALLYWEEADALGESTTAHPAPAGNELWLRRAICLIQDERYLEALKILAVFPPENSLYPLAKVNMLFAFRLLGKMRRVRSTLAELRLAGLTEDSAKVLNLLSLPEGEGNFSPRPAANRNIAVDSDTIPLDSDGVALLSQILSRLLALNRPNLAASLLAGVEPSTLARQGLNFAQMFLAYGFRIKAEYLLRDYLAGGPEGANAEAHFLLGEIYRETDRFAEAEGSYRRALAKDPSQPKYWLRLESLYTGHTADWGAPLPAERTGHFSPIPEN

SEQ ID NO: 5242 - protein, 642 aa, Thermohydrogenium kirishiense
MNFTLSLCLITKDEEKNIARCINSVKDIVDEIVVVDTGSKDKTVEIAKSFGEKVKVINAKWEDDFSKARNIAIENASSDWILFLDADEEIKKEDAEKIKPLLYDDTVEAYMFKFINYSGTSVSSGLSEIHYNFRLFRNNGKLKYVYPIHENLKNIEEDRAPIFKNVDVTILHYGYLSEIRIEKNKTQRYIDMISKYLAKHPNDKFQQGNLAVEYYNAGNYNKALKHLLIATKSMNLNSYATPRLFRYLIMTYIALKEYDTALRIINDAKKYYEDIPDYKYLEGTIYFNQKRYEKALEIFKECALMGEYKGQFVTMGGTGSYRAKYMIGQCYEKLGKLNDAVKEYMEILKQHPNYQDVFIRVFDMFVRNEKPEDVYEFFRKHVNTKVPLNYIVVARQYINIGKYDIAKQYIDSIDIDLEGLNNLRGIIYMGLKDYENAIKHFEMEYGKAKEEANYREALCYIILKDIDKAKDLLWKITDSSDKKLYMTIVGEMKAKFDEVKDSFFNLLDLLIKLKEFDLYNEVLNLYVGLFTREEYERYGQMMINNGLDDLAVEAYIKAADLNSQNTEVYKYLAQRAYNQNMFNEALSIIGRAYNLDKTDVDIYKMIFRIYKALGQDENADEVNEMVKSMYPEVDLSESYAAV

SEQ ID NO: 5243 - protein, 1264 aa, Fervidicola ferrireducens
MKSELTKRLQRLKLEYTPKEIVDLALLNVAVENFDVFKLYLKELKEYVELSSESNKISISSNILQLIIDYKNHSKNLKYRHNRSQSEKKKFAVVASLCTGDVLEVGCGSGDLSSYISMYGNRVFGIDIDPVAVEIARFKVWHFGLSDCFFDVVDANTNNIPIPDSSFDTVVLAEVLEHVKDPLKILMEAKRLCKSGGKIIISVPNGYRILSPDYLHIFNLDVLKELLSKIGVNEDDINWDDRVPDEWILCWFNNNKEDIKEKKDEDLAKYFLPPHPLEDLKGAGKVSIILPTYNGEKYIQESIDSILNQTYKNFEIIVVNDGSTDKTYEKLKPYIEREQIKYISQENKGKPCAINTALEFATGDYIWIFDDDDTALPRKLEVQMRHFLRKPHLDLIHTSSIYTDSSNKVPLLVWEPSEIEQNDLLKSLLHGCIFHGSTVLVKKEAFLKTGKYDERLIRVQDYDMWIRLVKNHCNVGKILLPTVTYRQHNKVRGSKENPIPVEKVAEATMEYEKIIFEKVYNEIPLSEIFPELKEENCNSGLRVSALIERAYAMARRRLFDYALNDLKEAFELAQKYYPVTITFRGIYFIKKFSEMLTHIENEEIKNMVTYFSLLIGNHDVRNFGKKGKITLSLCLITKDEEKNIARCINSVKDIVDEIVVVDTGSKDSTVEIAQSLGAKVIHAKWEDDYSKARNIAIENATSDWILFLDADEEIKKEDVGKIRPLLNDDTVEAYMFKIVNYGGASVSSGLTEIHYNFRLFRNNGKLKYVYPIHENLRNIEENRVPVFKNADVTILHYGYLSETRIEKNKTERYINMLLKYLMKHPNDKFQHGNLGVEYFNARDYKKALKHLLIATKGMNVNSYSAPRLLRYLIQTYTALKDYETALKLINDAKAYYIDIPDFKFLEGMLYVEQKRYKKAIEMFKECIAMGEYKGLFITMGGTGSYRARYMIAYCYEKLGRLHDAVKEYIEILKSNPNYQDVFVKLFDLFVQNEKPESVREFFDKYVDKRNPANFAILAKLYMNSGRFDIAKEYLDEVDMDIAGLNTLKGIACMGMKDYQKAIEFFDKEHEKAKSEALYHKILCHLILKELEMAKRILWEIEDSTDKKLFLTIIGEMKARYDEVKDSYFKLLEKLIQFGEFDLFNKLLKLYSGLFTRDDYVRYGHMMKDKGFDELAVAAYIKAADLNCEDSSVYRYLAKKALEQNMTDEALVFTARAFNIDRMDVDNYALMYKIYKVTGRNDEAERVSKSIKEIYPEIELEEIVQ

SEQ ID NO: 5244 - protein, 392 aa, Unknown
  Description of Unknown: Anaerobacterium chartisolvens sequence
MKISLCMIVKDEERYIRQCLESALPLVDEAVIVDTGSTDGTLDILDKSFGDRVRVIRHEWKEDFSEARNKALENATGDWILVLDADEKISFERKELFDIMDKEGDSGLKIPFYNFFSNGMVEFAIGMIRLFKRRPGVCYAGAIHEQLTLNGERMKFKILDSKVCRIFHYGYLGKVMDDKDKIARNLSMIEEELKKAPDNPFNWYNMGIMEMVRKRYDPAIECFLESHKLCKGVRYNFVENIVVKLAECMLALNRHSACREYLENVLEDSVMKGIPDLHLSLGRAYKGLRMYEKAMRSFSKCIELGENSLSTVSMKGAGSFIPMIEWAGALVAQKKISEAVIKYMEAVFNKNNYAKAGLPELVSLLKQYNMTDVLTELGTYVDLKSVMPETGT

SEQ ID NO: 5245 - protein, 287 aa, Unknown
  Description of Unknown: Firmicutes bacterium HGW- Firmicutes-9 sequence
MADVTAIVLTQNEEKNIGECLKSVAGFCSRVVVIDSGSTDRTLEIAREYGADIYEHEFTYYAAQYNWGVDNANITTAWTLRLDADERFTPAVCARCEKLMQEHAADDVNGIVMESDFFFLGRLMKHGGSKKRKIMVFKTGKGRVEDRKRDAHTILHEGRTIAISDRYLHYDFKDLTSYISRYNWYAIRELQDYIAYEQGASYSANTDPALMQHRKKKFTIYYRAPMFLRAWLWFVYNYYFRLGFLDGKEGYLYHYFESYWYRFLVDAKIYEYRKTGKTDGDLRALGK

SEQ ID NO: 5246 - protein, 476 aa, Paenibacillus sp.
MKSTYAPIIELLQKQRYKEAEVVAKDLIRTNPLEGQAWVFLGETLMHQGYGLTAKRVFNRAWLLDPEASWVKSVYEALEQTPEGEERVDIEGLLHVPKVTVAAAILARNEEQRIEKCITALYEAVDEIILVDSSTDRTREIASKFSKVKVVSIEWRDHFAAARNEGLNHIQSDWVLWVDTDELLLEEDVCGVRELAGIFHHHPTPPVLHIWHLNQIRGEVHYDFSQTRMFPMKRGLQFWGRIHEQISSSLGIYEEETYRRAVRIRFLHDGYDPSVIKEKNKLERNLRLLKMMIEEEPNDPGNWLFLGRESLLIGQEEQALVALLEAERIGMQTPRFGRMLDVYKLLTHYYMSRKDWKQAEITCLKALEHNNQFPDAHFLLAQIRMKQADELYLQADFHLKKAKTSIKEYRGSVSADYQIGQWKADLAVADLALRAGKLAEARHIYQVHAMRYPNIESLSQRIDMIEKQKHLLNRPI

SEQ ID NO: 5247 - protein, 1023 aa, Bacillus camelliae
MKPFVSLCMIVKNEEKVLERCLSSVKDVIDEIIVVDTGSTDKTKEIAAKYVNHVYHYDWNDSFADARNFAQSKATGEWILVMDADEYVDSSNLESAIQELKSFEIETFDACEVKVFNFTGNYGETIVQNHSVRIFRNLPTIGYSRSVHEQVTRTDGELRIKSLGLILYHSGYLNNVVGTKKKNERNTKLIEKQMSITGQSGFDYFNLGNELLSQGLTEKALESYIKAYQKKPDFRFSWVSFCLIQIINCLYVLKRYQDALNVIADAENIYLESPDFKCFKAIIYVAQNRSDDAIIELESLLDHTDQYQQIVTSVDFKEYRPHQMLGSIYKDKGNYEKAVFHLVKALNLNQYCYRSLLNLMEILLETSTVEEVSEFLHQNGFIKSSNDVIKFIRVFTILAETEIARKYLKELDQASDLRKSYEIKIDLIEGHAESLTYFFEKETFEDLRAMIENGVIDIYDLLLADIAYLKDKRIPVLLSNLTNEENIKELINYVVFDNVPTNTDMIKDDFLALLEKTLQMKKYDLFEMIVSKADAFKNIDLSIGHLLFRFDYQNKAKEYYEKVDPHLYDDKTFINLVKYYKEQGDFKLASEWLIVAISFGKTDYRLFENALEMHLEGNETYLWDIDQILTIGIQLYPGSPKLLYLSNKIHQGNNSQTSSEYIVGFFLETTQHYFVYESIIDELVKQGVNCHLVLNDKYGDTPETQNMFNDLLSFIGNIDRNDIEAYTITAIKDSQFQYDCMVSCYYSAWLNDVAKVHVRTPYGLLAKEYWNYSWWNVFYDKILCYSEYDASRLTIKDNCAVVGVPKFDKWFRKEIDNMDQVKQKFQLDESKETIMYAPTYGHLSSIDDWLDEIKLLEEYYNVIIKLHPGTAHRESETSRRNKIMNNFNNVTGDPRDLIPLLEIVDYVITDTSSMIFEAMITQQNILLLNPVNNPPIEENTGEHFLRSNVINLNIGENIHEYLMNKALFEEQGKRIAKELQSVYNLTDGHSGSRAAQEIITLLENRSTEPNKFLLSLRQRIFEK

SEQ ID NO: 5248 - protein, 229 aa, Unknown
  Description of Unknown: Elusimicrobia bacterium CG06_land_8_20_14_3_00_38_11 sequence
RCLESVKWADEIIVVDSGSTDKTVEIAVRFGAKVFENQWQGYGAQKNFAIDKASNNWILSIDADEVVTDELKEEIRGIIKNSAGYAAFKIPRMLYFQGRLMKWSGADYQIRLFLKGRAKFDLEPVHEKLLVDGDIGKFKNSIIHYSYENLTDYFNRFNRYTSLDARKRYQKGARFNLWHCILPFHKFISMYFLKLGFLDGRQGLDWAVLCAFYDIVKFMKLRELQNEKK

SEQ ID NO: 5249 - protein, 379 aa, Unknown
  Description of Unknown: Chlamydiae bacterium CG10_big_fil_rev_8_21_14_0_10_42_34 sequence
MKQFDITLCLILKNEAQYVATCIESVQPLVDEIMIADTGSTDDTVAICKQYTDHIETIDFSMGFSNARNHLVKQVKTKWILFLDADEYFDSIELNRLADFLNYASPDVDAFSVLRYNFFSSGAFYTSDTIKLFRSHPDIFYTGIVVDSVKPSLMKRGGKIQQIPVILNHFGHCRPILIRDQKAYKYLEMMDQDLAQNPNNFKVIGYKALILRTLGRLEEAQFWLEKALKCAPHEGHPYFVKGHVDRAFNRHEQAVAAYSRAIELDGMNPIYLNSRGIANLTKESFDEAAHDFELGQKLFPNHVHFTINLGLVDQARGDYQMAAKRFGEIGSKYPAFLKTHFEGCSEVDPYSGYIYDTVFNFHGLAYHLTFCEAKATGRI

SEQ ID NO: 5250 - protein, 359 aa, Bacillus cecembensis
MITISLCMIVKNEEDVIGRCLASVKDIVDEVNIVDTGSTDKTKEIVGQFTNRIFDFQWIDHFAAARNFSFQQATKEYILWLDADDVFSEEDQEKLKALKKSLTSDIDAVSMNYHLSFDADGNVSSLLRRNRLVKREKQFQWIGAVHEYLEVGGNIYQSDVAVSHIPLSHDHNRNIDIYNQLVKSGEELSPRDTFYYANELYDHAQYEKAIFYYEQFLTSQLGWVEDNIRACFKLADCYTHLNEKENKLSAILRSFEYDIPRPEACCRLGFHFMEQFKNFEAIHWYEQALLTKPQPHAPFQNNTFTTWLPHLQLCVLYDRLKQYEIAHAHNELAGTFIPNDPKIQFNKDYFARIFKKDDE

SEQ ID NO: 5251 - protein, 275 aa, Vibrio sp.
MIKLSSYIICKNEEARIKDAVMSLLHHVDEIIIVDTGSTDRTINIVKDIDTSKIKVFEIEWRDDFAAARNFALGKVNYNWVVTIDADEVMKEPCRLKEMIASLPEEINAIYPCIVSVGEEEEKGYSIPRIFKKDEFYYHGVVHEQLTPLKSKEQYFSELEILHYGYENETIIKKQKLMRNFLLSLDNHRKDASDEFFMMYLVIDWSAYPNSEQYVSAQKLVQCLGKINNMKYFEKAIYAVFDRYTTDLNALTTLLSTLDPETQMKAIQCFEVAYG

SEQ ID NO: 5252 - protein, 661 aa, Paenibacillus curdlanolyticus
MAAHTKLISLCMIVKNEAACIARCLRSAIGTADEFIVVDTGSTDETIAIARSFGAKIIEAEWRGDFAAARNVGLEQATGEWILFLDADEELSAGAAQELRTLVQSQASPGILLPIWNLLGEEEETATINPVLRLFRNDPRHRFEGRIHEQIAASILRAAPDAQLRLGETVIRHYGYRPSTVAEKDKIERNTRLLLQAIEEEPEQPFHRFNLGVEYLRAGRPAEALASFRSAKGAASFERLSYAHLVFKYEVRSLQTLGAWQEAAAAAREGAKLFADYADLWHCLAESLCSAGRWREAISGACSALRAGPPTGVYHTEDGMGAHRTAFLLGSLYERGGRVDAAVHWYVESVRMKPSLLPPLLRLCRLLRVNGRGDELPALLERRFAFSTEEGSLKIASLLLDSRCYAEAVQWLRQRAAGPCWGEASAAWLMLAEAELAASEGRFAQARRWAAKALDDGHGYWHEPEPEPGHGHGLGQADGEMPVWLGGRHPEQGSPLGEVTKPGVEKSQTQASEYAKDRRQSYSMGEAKCRLRLLYAAVLQITEGAEAAAAFCQGYGADVRGSLAQELAACVAGILREEKAEQAASSGASGDRLARVLQAVGESIRHGSDEAAHGGVEGLAAWADARLEQLEQSLQSRSAGATVQRVLRSARLRLAGCEGEA

SEQ ID NO: 5253 - protein, 254 aa, Unknown
  Description of Unknown: unclassified Thalassospira sequence
MSDKKPRISVVICAHNEEERLPSCLEKVTFADEIVVICDKCTDKTEDIAKGFGVKTVVGSWDIEGDRRNRAITEASGDWIFELDADEHINAELAAAIPEAVLSDKFDSYLIPVDNYVGKRLVRYGWGASFGTSAVWRLYRKGCKNWGDERVHPSFELTGKKGPRLDGALVHFVDRNISDMIRRFDSYTSARAADLRATGKIGSFAHNFRRIISRFWRCFVSRKGYKEGGLGFLIALLAALFPMVSYLKARYDDE

SEQ ID NO: 5254 - protein, 302 aa, Unknown
  Description of Unknown: Candidatus Levybacteria bacterium sequence
MNNKKISVVISAYNEDSMIKDCLESVKWADEIIFINNSSQDNTINIAKKYTDNIFNRENNLMLNINKNFGFSKAKGEWILSLDADERISPQLVDEIQKKIKEDDRFTSYNIPRKNIIFGKWIEHAGWYPDYQIRLFKNGKGRFKEEHVHEMITSEGDVGTLENSLTHYNYTSIRQFIHKHANIYAPNEADQLLKNGYIFSWQDVIRLPFKEFLSRYFAREGYKDGFHGLILSLLMGFYHLVILSYIWEKKGFPQIVEANMIMVKDEIKKSSKDLNYWINDHDIKKEENIIKKIYKKIKYKYL

SEQ ID NO: 5255 - protein, 640 aa, Bacillus acanthi
MKISGCVIAKNEEQFIENCLDSLKKVCDEIIFVDTGSTDRTIEIAKELGVQIYHYKWIDNFSAAKNYAISKAKGEWIIFLDADEYLVDTRKEVYSELALNSKNYDSILCEIINVDEHNDIQSSHIGNRFFRKDNFIKFEGMIHEDLRKKGDLLKSINGSNYMKIIHKGYSREQIQNKNKFERNLKLLLKQLDKDPENPAIYYYIADTYGLEKDFEKQYEYCKKSISKGQINQLGFAELPYILLIQSMIDSKSFASSIQFEINKAIKIFPESPVFRYFDGLIKFNEKRYHLSLESLLLSQMLNETYDYFSVDYMKNYSVSIYRMIGYIYEIQSKKMDAVSMYTKCLNIDKKQKDVLQHLLKLLSDVSEVEIIQFLNRIYSSNKEEDIEFLIEALSSLNNGILLSYFQKKLFDLTGEGNNAILLSLLFNNEHNKAYEISFDLYKETYRHDLAILMVYSSMLTKDEGKYKKIRGIVSPTLFRIINSIQKNEELYEEDLADYLKLLNYSNIFGDSEATNMLLGLSRNFIIDINEKIGEVFYLHQKYKAAIKFFENALFNTLYSRKGQLYKKIGISYYHEKEYLGARDNLIKSIEHGVLENEIFEYLIVVYTKIEEEFRDKIKDLFESLPESKYLLEIIGSVENA

SEQ ID NO: 5256 - protein, 362 aa, Cohnella lupini
MITISLCMIVKNEEHSIGRCLDSIHDLVDEINIVDTGSTDQTKSIVSLYTDRIFDFEWIEDFSAARNFSFEQATKDYIMWLDADDYLFENDRQALQKLKHSMKPEFHAVLMDYVLSRDQTGSAQNMTRRHRLLKRDCHFRWIYPIHEYIPVQGPVKISDIEISHSPFLEKKDRSRNIRILRQAILRDGGQLSRRYHFYLANELIGNGQIDEAIATFESFLAGETQYFEDHIAACGTLSNFYHERNQPDKELQYLLKTFEYTKPRPDYCCRIGIWFEEHKAYDKAVFWYELAIQVKSGDEYSLGLINKVCWTWGPHAQLAICFGKLGELDKAYEHNEIALTYLPDEPNLLKNKAQLDAARASL

SEQ ID NO: 5257 - protein, 306 aa, Bacteroides stercoris
MLDISVIILTYNEEIHIERCLNNAKKFAKEIFIVDSFSTDKTVEIATEMGVKVYQHPFKNHSAQFKWGLENLPIKTVWVWKQDADEYLSDALIEELHNKLPNLPDNVNGLTAPCLRIFMGRYIKHGIIPLILLRLFKYKYGSVENRIMDEHIQVSQGIIMDLKYPFYDDNLNGLTWWTTKHNGYATREAIDLLLTEYGMYESGVVNSGEHSSAVRKKKLKYIKMPLFWRAFVFFFLRYFMRLGFLDGKEGFLWHFLQGWWYRTLADAKVYEIKKVCNYDKDSIMRYLEKYYDIPTNGMLTNINRGG

SEQ ID NO: 5258 - protein, 370 aa, Unknown
  Description of Unknown: uncultured Sporomusa sp. sequence
MPDYTKQSHSPITISLCMIVKNEEAAIERCLQSVEQICDEIIIVDTGSTDKTKELVSKFTNNIFDFEWIDDFAAARNYAFSKATQEYILWMDADDVFLSQDLQELVKLKANLNREFDVVSMLYNLTFDQFRRVSSQLRRSRLVKREKKFRWIGAVHEYLDVSGTHLQTMIAVTHQPLGHDNERNLRIYERRQLKGEAFSPRDLYYFANELRDHKRYDQAIEYYQRFLATRQGWVEDNIGACARLADCYYQLNDIENELKAIYLSFQYDIPRADFCCRLGFYHLNNEQFKQAIFWYKLATQLGIETSSWGLVNHRCATWLPHLQLCVCYSRLGEYKLAYEHNEIAAKFIPDEPLIEHNRKLLQDYLGNEPR

SEQ ID NO: 5259 - protein, 308 aa, Dyadobacter sp.
MVDLSVIILTNNESKHIGRCIKSLQLITNKIFIVDSFSTDNTVSIAEDLGATVIQNPWVSYAFQFNFGIQNNPFQTKWLMRMDADEYITAELADELKTSLSTIPETISGLYVKRRVFFMDQWINHGGYYPIWLLRIWRHGLGVCEELWMDEHIKLSSGTTAQLQNDIVDHNLNNLTWWTQKHNNYAIREVIDLLNIKYNFGNKETVTPDFWGSQEQRTRYLKIKYANLPLFTRPFLYFIFRFIFKGGFLDGKKGLIWHFLQGFWYRFLVDAKIYEVYQRAGKEKENIVSHFRTEYGKDLQSPNQSVKI

SEQ ID NO: 5260 - protein, 465 aa, Eucalyptus grandis
MAPPHFLLVTFPGQGHINPSLQFAKRLVRVGAHVTFATAIRARPRMAESESIPEGLSFASFSDGYDDGFDNWDEMEEYMDKIKRRGTETLSDLIASNLKSGRRFSGVLYTILLPWAAEVARSHGIPSTFVWIQPATVLDFYYYYFHGYGDLIRSTGGNPSVPIQLPGLPPLMACDIPSFFNSKNEYNFSLPLFQWHFKILLEEAKPRILANTFDALEPDAIRAINEFEVIGIGPLIPSAFLDGQDPSDTSFGGDLFKSSSGYMEWLDTKPKASVIYVSFGSISVLSKPQKEEMARALVEAGRPFLWVIRESGKEERDEDRLSFKEELDKIGMIVPWCSQVEVLSHPSVACFVTHCGWNSTSESLVCGVPMVAFPQWSDQQTNAKLVADVWRTGVRITPNEQGLVESGEMRRCLELVMGDGKEGEEMRRNARKFRDLAREAVKEGGSSDKNLRAFVDEVREASELE

SEQ ID NO: 5261 - protein, 517 aa, Myzus persicae
MEMINCNSYIVILQLFILSFFKEALCADILGVFPIEAPSHQIIFDSYMSELHRRGHNVTVYSHFPDIASEQYKRIQISNTSSVLDPSYVTMDHMYSPSTLNSYKHMFHIVSNGEKYTQSDALRQLYDQPEDAYDLIVTETCNTDLYLALIDRFKAPFIAWTTSPLFVWSADRMGASTHPAYIPVLMTTYGPHMNFAERIYNTLMRSVAFYKYYTGSSISSQKIASKRYKDSSHLDQLVLRTSLLFVNTYHALWGSRPLPQNVVEVGGLHVKPPKPLQEDIQKYIDEAEDGVIYFCMGSLLRGETFSAEKRQMFLNVFNKIPQRILWKWEGELPGKPSNVMIRKWMPQRDILAHPNVKLFISHGGLLGTTEAVYEGVPILSMPIFGDQMTNIKAVVSKGGAEMMNYGDLNEDEIFTKITSMLTNPKYRQKAKELSEAFRDRPTSPLETAVYWTEYVIRHKGAPHLRSAAAGMPWYQYYLIDVLVVIVLSITTIFVLLYYLIIKVILRLLNKKSKEKQS

SEQ ID NO: 5262 - protein, 471 aa, Morus notabilis
MAILPGPGPGMGHLIPLLEFAKRLISHHRFHVTCIIPTIGPPSATLKQVLNDDYTNPNDSKLNAVYLPPVNFHGLTAVKVETQIFLAITRSLSPLREVLKSLKANYSENLVGLVVDSFGTDAFDIAEELNLSSYIFITSSAMILSFSLKLPQLDERVTGEYRAMGEPVRLPSCVPVHSGDLLDPVQDRSDLAYKLMVYHTNRFRLADGIILNSFIKLEEKGYTSFVERRRTGSSGPVLEDQSECLKWLDGQPSGSVLFVSFGSGGTLSFRQMNELALGLEMSGQRFLWVVRSPNDKVSNGSFFSLRNDNDPFAFLPNGFLETTKARGLVVTSWAPQAQVLAHISTGGFLTHCGWNSTLESVVHGVPLIAWPLYAEQKMNAVLLTESAQIALRPNVNDENGLVGRGEIAQIVKSLMEGEEGKRLRERVEEVKNAVQRVVGEHGSSTKALADLALKLKKRTCIYICRFIWKFV

SEQ ID NO: 5263 - protein, 480 aa, Zea mays
MAATPTIVLVPVWGIGHFVPMLEVGKRLLARSALPLTVTVLVMPLPAEAKRASEITEHIRQQEASGLAIRFHHLPAVEPPTDHSGIEEYISRYVQLYSPHVKAAVAGLTCPVAGVVVDIFCTALFDAAHQLGVPAYVYLITSAAMCALLLRSPTLDEEVAVEVEFEQMEGGVDVPGLPPVPASCLPTGLENRKIPTYRWFLYNGRRYMEAAGIIVNTIAEAEPRVLAAIADGRCTRGVPAPPVYSIGPVIPSTPPAEQQAQECVRWLDSQPPSSVVFLCFGSGGCFTAPQAHEIAHGLDRSGHRFLWVLRGTPEPGTKLPSDGNLAELLPADFLARTKDRGLVWPTKAPQKEILAHAAVGGFVTHCGWNSVLESLWHGVPMVPWPLGAEQHYNAFTLVADMGVAVALNVERKRKNFVEATELERAVKALMCDGETARKVRDKVMEIKAACRKAMEEGGSSNMSLQRLCDALVEGAVHPGK

SEQ ID NO: 5264 - protein, 474 aa, Centella asiatica
MEKDSTPPHVLIFPLPLQGPVNSMFKLAELLCLAGIHVTFLVTDHIHSRLLRYSDIHSRFNRYPGFRLETISDGLPEDHPRGDKFMELFDSLRMNTKPLFKQLLTSGSLVSDDLPPMSCIIADGIMGFTCDVANEVGIPIIYVRTISACCLWVFFCLPNMIESGEIPFTGEDDLDTPIKSVPGTESFLRRRDLPSFCRSGDLSHPNIQLYKSESEENPRAYGLILNTFEDLEGPILAQMRTFCPNIYTIGPLHTLIKTKLAGELTSSKTSSNSLWEEDRSCITWLDSQSPKSVIYVSFGSLALMTRDQLMEFWHGLVNSKCKFLWVIRPDSVAGNNEIPAEVAEGTKERGYIVGWAPQEEVLAHPSVGGFLTHSGWNSTLESVIEGVPMICWPYFMDQQVNSRFVGEVWKLGLDMKDTCDRVIVEKMVKDLMVERKDEFIKSAEHMAMLGKKSLSEGGSSYCHLNRLIEDIKLM

SEQ ID NO: 5265 - protein, 462 aa, Arabidopsis thaliana
MEESKTPHVAIIPSPGMGHLIPLVEFAKRLVHLHGLTVTFVIAGEGPPSKAQRTVLDSLPSSISSVFLPPVDLTDLSSSTRIESRISLTVTRSNPELRKVFDSFVEGGRLPTALVVDLFGTDAFDVAVEFHVPPYIFYPTTANVLELTEPLMLPGCVPVAGKDFLDPAQDRKDDAYKWLLHNTKRYKEAEGILVNTFFELEPNAIKALQEPGLDKPPVYPVGPLVNIGKQEAKQTEESECLKWLDNQPLGSVLYVSFGSGGTLTCEQLNELALGLADSEQRFLWVIRSPSGIANSSYFDSHSQTDPLTFLPPGFLERTKKRGFVIPFWAPQAQVLAHPSTGGFLTHCGWNSTLESVVSGIPLIAWPLYAEQKMNAVLLSEDIRAALRPRAGDDGLVRREEVARVVKGLMEGEEGKGVRNKMKELKEAACRVLKDDGTSTKALSLVALKWKAHKKELEQNGNH

SEQ ID NO: 5266 - protein, 286 aa, Unknown
  Description of Unknown: Oryza sativa Japonica Group sequence
MDATFLAWNFMGNRDAERMVFHYLTSSARAAAAKADILLCNSFVELEPAIFTLKSPATILPIGPLRTGQRFAHQVEVVGHFWQTNDDTCLSFLDEQPYGSVVYVAFGSLTIMSPGQLKELALGLEASGHPFLWVVRPGLAGNLPTSFLDATMGQGKGIVVEWAPQEQVLAHPAVGCFVTHCGWNSTVESIRNGVPMLCWPYFTDQFTNQIYICDIWRIGLKMVQTCGEGIVTKEIMVERLKELLLDEGIKERVQRLKEFAETNMSEEGESTSNLNAVVELMTRPMS

SEQ ID NO: 5267 - protein, 202 aa, Vigna angularis
MEWLDRQPPNSVLYISHGSYLSISSAQMEEIAIALHDGNVRFMWVTREESPKLREICNEKKMGLVVAWCDQLRVLLHHAVAGYWTHCGWNSVMEGIFSGLPFLTFPIALDQPLISRLIVQYWKVGWRVKKDENMEDLVTRDVIVVLLRKFMDLQSDVGSEIRRRAKELQRMVQLAISENGSSHTNIRTFLDNIVQTGAKRLD

SEQ ID NO: 5268 - protein, 470 aa, Unknown
  Description of Unknown: AGM61070.1 Sequence 29 from patent US 8420889 sequence
MEHTPHIAMVPTPGMGHLIPLVEFAKRLVLRHNFGVTFIIPTDGPLPKAQKSFLDALPAGVNYVLLPPVSFDDLPADVRIETRICLTITRSLPFVRDAVKTLLATTKLAALVVDLFGTDAFDVAIEFKVSPYIFYPTTAMCLSLFFHLPKLDQMVSCEYRDVPEPLQIPGCIPIHGKDFLDPAQDRKNDAYKCLLHQAKRYRLAEGIMVNTFNDLEPGPLKALQEEDQGKPPVYPIGPLIRADSSSKVDDCECLKWLDDQPRGSVLFISFGSGGAVSHNQFIELALGLEMSEQRFLWVVRSPNDKIANATYFSIQNQNDALAYLPEGFLERTKGRCLLVPSWAPQTEILSHGSTGGFLTHCGWNSILESVVNGVPLIAWPLYAEQKMNAVMLTEGLKVALRPKAGENGLIGRVEIANAVKGLMEGEEGKKFRSTMKDLKDAASRALSDDGSSTKALAELACKWENKISST

SEQ ID NO: 5269 - protein, 477 aa, Indigofera tinctoria
MEITKQEEGQTITGMVAMLPSPGMGHLIPMIEFAKRLVLHHNLAVTFIIPTDGPPSKAQKTVLQSLPAAISHTFLPPVDLSDLPPDAMIETIISVTVLRSLPSIRDLFRSLSPSVLVLDLFGTDAFDIAKEFNVSPYIFFPSTAMVLSFFLHLPHLDQEVHCEYGELTEPVKIPGCIPVQGSDLIGAVQDRTNDVYKWILHHAKRYREAEGIIENSFLELEQGPIKELLKEEPGKPPYYPVGPLVNVETAGRAGNGSECLKWLDEQPHGSVLFVSFGSGGTLSTAQVNELALGLEASEERFLWVVRSPNDQIANASFFSAASAADPFDFLPKGFVERTKERGFLIPSWAPQPQVLAHGSTGGFLTHCGWNSILESVVNGVPLIAWPLYAEQKMNAVMLTQDVKVALRPNDSNGDLVKREEIANVVKRLMKGDEGKKVRNQMKDLKEAAAKTIGENGASRNHISNLAQKWKNKATVTN

SEQ ID NO: 5270 - protein, 478 aa, Citrus unshiu
MSRHALMLSLARISNDYIFKLLKKIITCGYKGQPTQLLKSIAQVLNLDQFTIALVNMLHHNRFIRNKGPDSLKGLPRFRFETIPDGLPPSDREATQDLPALCSSIRKTCLAPFLELLGKLNSSGNVPQVTCVVSDGIMGFGAKAARILGIPDLPQFHELSNRGIVPFEDEKFVTDGTLDAAVDWVPGMSNMRLKDFPSLMRVTDANDILFNYMKTEVQNCLESSAIIFNTFDEHEGKVLEAIASKSPNIYTVGPLHLLCRHLPESEFKSFRSNLWKEDPECLKWLNEKEPNSVAYVNYGSITVMTDEQMKEFAWGLANSGHPFLWIVRPDMVTGDSAILSQEFYEEIKDRGMIANWCPQDKVLSHPSVSVFLTHGGWNSILESVSGGVPIICWPFFAEQQTNCRYASTTWGIGMEVNRDASREDIAALVKEIMEGDKGKLIRQNVQDWRKKAEAATDVGGASFNNFNKCIKEVLHYHH

SEQ ID NO: 5271 - protein, 477 aa, Cephalotus follicularis
MSTSNSSTATTKKRPHILIFPYPAHGHTLSLLDLTHQLSLQNLTITILVTPKNLPTLSPLLSINPSIQTLTLLFPSHPKLPPGVENVKDLGPTGNVAIISALAQLFDPIIAWFNSHPNPPVAIVSDFFLGWTLHLANKMGIPRLAFFSVGALLASVSDFCWNNIVTVSGCEHVSFPCLPRSPVFKEEHLPSVFRLYREGDPDWELVKDGMLANTLSYGCVFNSFHALEGEYLDWVKLKMGQDRVFGVGPLSLVGPEYSWRGSSDPSNGGSVLTWLDGCLDGSVLYVCFGSQKLLNREQMEALASGLDKSGGRFVWVVKPGGTTRQVEDGYGVVPDGFEERVAGRGFVIRGWAQQVKILGHSAVGGFLSHCGWNSLMEGIVAGVMIMAWPMEADQFVNAKLLVEDMGVAVRICEGADSVPDSDKLGRVIREALSEGGVQVREKAKELRDEALAAVRAGGSSKIDLDRLVNEFVNLKSV

SEQ ID NO: 5272 - protein, 498 aa, Citrus unshiu
MQSTKLKPHICLLASPGMGHLIPVVELGKRLVAHHDVQVTVFVVASHDDASNSNVHAVPNNNNLFNAVTLPLANISSLVNPDASLGEKILVLMHKSLPALRSAISAMKFRPTALIVDFFGTEAMDVADEFGLLKYMFIASNAWFLACFIHAPAIDKKLLTDEHFNLEKPMELPGCMPVRFQDSLELFLHPNEPIFDFISSIGMKMSLSDGILVNTWDDLEPKTLGSLRDDNLLGRVCKAPVYAIGPLVRSPDVASPSTKTSPSDSRVIILDWLNEQPSQSVIYVSFGSGGTLSAKQMTELAWSLELSQQRFIWVVRPPVENDVSGSYLTVVDNNSAGKLEDYLPHGFLTRTDKVGLVVPAWAPQAEILAHPSVGGFLSHCGWNSTVESIVNGVPMIAWPLHAEQKMNATMLTEEIGVAFRSKELPTESLVTRQEIEMLVRKIMVDKEGHSSIRVRAMELKYGAQKATSNSGSSYKSLSQVAKQCEKSLQELVTLGQGA

SEQ ID NO: 5273 - protein, 394 aa, Manihot esculenta
DDFKDLGFIDKQKAHVKEAVSKLTARSDSSLAGFVLDMFCTSMIDVAKELGVPYYIFFTSGAAFLGFLFYVQLIHDEQDADLTQFKDSDAELSVPSLANSLPARVLPASMLVKDRFYAFIRIIRGLREAKGIMVNTFMELESHALNSLKDDQSKIPPIYPVGPILKLSNQENDVGPEGSEIIEWLDDQPPSSVVFLCFGSMGGFDMDQAKEIACALEQSRHRFLWSLRRPPPKGKIETSTDYENLQEILPVGFSERTAGMGKVVGWAPQVAILEHPAIGGFVSHCGWNSILESIWFSVPIATWPLYAEQQFNAFTMVTELGLAVEIKMDYKKESEIILSADDIERGIKCVMEHHSEIRKRVKEMSDKSRKALMDDESSSFWLDRLIEDVINNLS

SEQ ID NO: 5274 - protein, 483 aa, Glycine max
MGSNYGPLHIFFFPFMAHGHMIPLVDMAKLFAAKGVRTTIITTPLNAPIISKTIEQTKTHQSKEINIQTIKFPNVGVGLPEGCEHSDSVLSTDLFPIFLKATTLMQEPFEQLLLHQRPNCVVADWFFPWTTDSAAKFGIPRLVFHGISFFSLCATKIMSLYKPYNNTCSDSELFVIPNFPGEIKMTRLQVGNFHTKDNVGHNSFWNEAEESEERSYGVVVNSFYELEKDYADHYRNVHGRKAWHIGPLSLCNRNKEEKIYRGKEASIDEHECLKWLDTQTTNSVVYVCFGSAVKFSDSQLLEIAMGLEASGQQFIWVVRKSIQEKGEKWLPEGFEKRMEGKGLIIRGWAPQVLILEHEAIGAFVTHCGWNSTLEAVSAGVPMITWPVGAEQFFNEKLVTEVLKIGVPVGVKKWSYSGVDCCAKWDVVEKAVKMVFAKEELEGMRKRAKVLAQMARRAVEEGGSSDSNLDVLIQELGTLSSLSR

SEQ ID NO: 5275 - protein, 471 aa, Polygala tenuifolia
MVANKNQIVHVIVVPYPSQGHINPLLQFAKRLASKGVKSTIATTQYTVKSICAPNVGVEAISDGFDEGGYAQARNVGLFLESFKVNGSKTLSQLIQKFENSSCPVTCIVYDSFLPWALDVAKEHGIYCGAFCTNSASICSIFSRIHQGLLQLPLKVEDGLTLVPGLPPFQHQDLPSFIRLPDSYPDYLAMKLSQFDNLHKADLIFINTFEALEAEAVKDVSKLWPAKLIGPMVPSAYLDGRIKDDKGYGASLWKPLSEECTKWLKTKPSNSVVFVSFGSMVSLTTEQMEEMAWGLKESGMNFLWVVREKEWINLPNDLMDTIKEQGLILTWCNQLEVLAHQATGCFVTHCGWNSTLEGLSLGVPMVGVPQWADQMTNAKFIEEIWEVGVRAKEDSNGVVRKQEIVHCLKEVMQGKRCEFFRQNARKWKESCKQAIDEGGCSDKNIDEFVHHLMHANANANGFINITSVKSS

SEQ ID NO: 5276 - protein, 472 aa, Brachypodium distachyon
MDSTGTGSSVAHEGGEGANVFFLPVPGAQGHTNPMLQFGRRLAYQYGFRPTLVVSSYTLSTTPPPDAPFRVAAISDGFDDGGKPSGPDMTEYLRRLEAVGSDTLARLLSDEARAGRPVRVLVYDPHVSWARRVARDAGVPAAAFFSQPCAVNIFYGEVHAGRMAMPVTESDACALVGGGTLGVELRPEDLPPFVALPEWHPVFTKTSIRQFDGLEDADDVLVNSFRDLEPTEVEYMESTWRAKTIGPSLPSFYLDDDCLLSNKSYGFDLFSGDDGVCMEWLEKQTISSVVFASYGTFSKYDESQLEELGNGLYSSGKRFLWVVRSDEAHKLSQELKTKCEKKGLIVPWCPQLEVLAHKATGCFLTHCGWNSTLEAISNGVPLVGIPHWGDQPTIAKYMESAWDMGVRVQTGLNGQVRREEVVRCIKQVMDGERKDEYKRNAMKWMQKAKEAMHTGGSSNKHIADFATKYSSS

SEQ ID NO: 5277 - protein, 471 aa, Centella asiatica
MIEVFFFPMFLHGHMIPMLDIAKLFASRGVRSTIITTPLNVPFFSKSVERVKDLGYEMSIRTIKFPKVDGLPEGCENGDKLTTPEMFQVFFKATFVLQEQLEQLLQDFRPDCLVSDMFFPWTTDSAAKFDIPRLVFHGTSFFAVCASEQVRMHKPFENLSDDSEPFLVPNIPHEIKLIRSQIPPHQRAKTDFTDVLAKAHESMIKSYGEITNTFYELEPDYVEYYRNVMKRKAWHIGPVSLCNRKVEEKAERGKKSAIDEHECLKWLDGKDPSSVIYVCFGSVCSFPSTQLYELAMGLEASGRDFIWVVKKVKNGEQKDDWIPEGFEERIKGKGLVIRGWAPQVLILDHEAIGGFVTHCGWNSTLEGISAGVPMVTWPTFAEQFYNEKLVTEILRIGVAVGAREWVQLGADGVKREAVEAAVKRVMVGDEAEEMRNRAKELKEMAKRAVGEGGSSYSSLDDLIKELETYHS

SEQ ID NO: 5278 - protein, 363 aa, Medicago truncatula
MGSEVPLHILLVSFPAQGHINPLLRLGKCLAAKGASVIFTTTEKAGKDMRITNKLATPIGDGCLTFEFFDHCLLDDAFEHDIPSALSWNNSSAVFATYYNYVHKLVPFPSETEPYIDVHLPFIVLKYNEIPDLTHPFNPYPILGTLITSHMNNLSKIFCVLADTYEELEHDFIDYLSKKSVLIRPIGPLFKNPTIKAASNIRGDFVKSDDDCSIIEWLHTKPTGKVVKWSPQEEVLDHPSVACFVTHCGWNSTMEAIASGVPVLAFPAFGDHLTNAKFLIDVFGVGIRLGYSLMENKLVTRDEVKKCLLEATTGEKAEELKKNAMKWKKEAEEAVAVGGSSDWNLDAFMEDIKKRGVVNIHKV

SEQ ID NO: 5279 - protein, 495 aa, Barbarea vulgaris
MASITNHKSDPLHFVLFPFMAQGHMIPMVDIARLLAQRGLTITIVTTPHNASRFKNVLNRAIESGLPINILHVKLPYQEVGLPEGLENIDCFDSMEHMIPFFKGVNMVEESVQKLFEEMSPRPSCIISDFCLPYTSKVAKKFNIPKILFHGMCCLCLLCMHVLRKNPKILENLKSDKEHFVVPYFPDKIELTRPQVPMDTYVPGELKEFMEDLVEADKTSYGVIVNTFQELEPAYVKDYKETRSGKAWSVGPVALCNKARIDKAERGNKSDIDQDECLKWLDSKEERSVLYVCLGSICNLPLAQLKELGLGLEESTRPFIWVIRGWDKNKQLVEWFSESGFEERIKDRGLLIKGWSPQMLILSHQSVGGFLTHCGWNSTLEGITAGLPLLTWPLFADQFCNEKLVVQVLNSGVRAGVEQPMKWGEEEKIGVLVDKEGVKKAVEELMGESDEANERRRRAKELGELAHKAVEEGGSSHSNITFLLQDIMQLAQSNN

SEQ ID NO: 5280 - protein, 479 aa, Theobroma cacao
MDQEQQPQAYPHVLLFPLPAQGHVNSMLKLAELFALAGLEVTFLNSDHNHERLVRHTDVGFRFAKYPRFKFETIPDGLREDHPRLGVSFMELFESMELRTKPILREMLVKINPPVDCIIGDGALGLVLDVADELGIPIFQFRTISASGIWAYFAIPDMIEAGELPIRGNEDMDRLITRVPGMETFLRCRDLPSFCRDSDMTDSNLQLIAKETRKNLSAPGLILNTFEDLEGAILSHMRSKCPKIYTVGPLHLHLNTRLAETNGTMVHQSPNSLWEVDRSCLSWLDEQPKESVVYVSFGSIAVLSREQIMEFWFGLVNSRKRFLWVFRPDFMPEKGSIPAELVEGTKQRGYMVGWAPQEEVLAHCAIGGFLTHSGWNSTLESLVAGVPMICWPYFADQQLNSRFVSEVWKLGLDMKDVCDRRVVEKMVNDLIVDKREEFVKSSAEIAKLAKACVNVGGSSYCNLDRLIEDIRSMNRNCSK

SEQ ID NO: 5281 - protein, 284 aa, Oryza sativa
MVQLMPPIDAAEIPWVSLGSTQERRRYNIQNVFKTNRLMALAEMIICNTFREIESEALELLSNALPVGPLLAPASGPTGHFLPEDMTCLTWLDTQAPGSVIYVAFGSSTIFDIAQFHELANGLAVSDQPFLWVVRPNFTNGIQEDWFNEYKDRIKGKGLVISWAPQQRVLSHPSIACFMSHCGWNSTMEGVLHGVPFLCWPYFSDQFCNQSYICNVWKTGIKLFRDKQGVVTQEEIKNKAAQLLEDKEIKERAVTLKTTARASIQEGGSSHQNFLELVNLLREQ

SEQ ID NO: 5282 - protein, 474 aa, Cyclamen persicum
MANEASPPRIVIVPSPGMGHLIPLVEFAKRVVSSHGLTATFAIPTDGPLSEAQKGFLKALPRGIDLVVLPHAELDDLPPDVKIETKISLTVARSLEQLRDTIKSLKATTRLVAMVVDLFGTDAFEIAKEVNISPYIFYPSTAMALSLFFYLPTLDHSTPSEYRDLPDPVQIPGCIPILGSDLIDPTQDRKNDSYKWLLHHAKRYTLAEGIMVNSFKELEPGAIGALQEEGLLGNPPVYPVGPLVGMGHANGMVDRSGCLEWLDGQPHGSVLFISFGSGGTLSSGQITELALGLELSEQKFLWIVRSPSDKTSTAAFFNPSTENDPLAYLPKGFVERTKGVGLVFPSWAPQARILSHGSTGGFLTHCGWNSTLESVVNGVPLIAWPLYAEQKMNAAMLTEDVKVALRPKYSKNGLVERTEIATIVRSLMEGEGGKQLRNRMRDLKDASAKTLSTDGESTRILTELSRKWKNRTSG

SEQ ID NO: 5283 - protein, 287 aa, Manihot esculenta
TLNLIPGMSKIQIRDLPEGVLFGNLESLFSQMLHNMGRMLPRAAAVLMNSFEELDPTIVSDLNSKFNNILCIGPFNLVSPPPPVPDTYGCMAWLDKQKPASVAYISFGSVATPPPHELVALAEALEASKVPFLWSLKDHSKVHLPNGFLDRTKSHGIVLSWAPQVEILEHAALGVFVTHCGWNSILESIVGGVPMICRPFFGDQRLNGRMVEDVWEIGLLMDGGVLTKNGAIDGLNQILLQGKGKKMRENIKRLKELAKGATEPKGSSSKSFTELANLVRSRGSYEN

SEQ ID NO: 5284 - protein, 466 aa, Helianthus annuus
MQKKPHIAIVPSPGMGHLIPMVEFAKRLKNYHNISATFIISNDGPLSTSQNAFLDSLPNGLNYLILPPINFDDLPQDTQAETLISLMVTRSLHSLREALRPLVVETNMVALFVDLFGTDAFDVAIEFGVPPYVFFPSNAMSLSFTFYLPKLDQMVSCEYRDLPEPVQIPGCIPVHGQDLVDPVQDRKNDAYKWMLHNVKRYMMAEGIVVNTFKELESDALKVLLEDGAGKPRVYPVGPLIQTGSSSDVDGLECLRWLDGQPCGSVLYISFGSGGTLSTNQLNELAMGLELSEQKFLWVVRSPNDQPNATYFDSHGHKDPLGFLPKGFLERTQGNGLVVPSWAPQAQILSHSSTGGFLTHCGWNSILETLVHGVPVITWPLYAEQKMNALYLTKGLKVALRPTIGENGIVGHAEIARVVRGLFEGEEVQSIRSRIRDLKNEAANVLREDGCSTKTLEQLASKLKYKI

SEQ ID NO: 5285 - protein, 386 aa, Unknown
  Description of Unknown: Oryza sativa Japonica Group sequence
MITCLARVFEFARASGPDLCDFLRSTSPAVLIIDFFCYSALDVGAELRIPTYFFLTTCIASLAFLLYLPVIQEENTMSFRDLSGDLVHAPGIPPIPADHLPMSQLDRDSVSSRHFLALSEQVCNSHGVMVNSCHSLERRAADAIVAGLCTFPGRRTPPLHCIGPLIKPREEDSTERHECLAWLDAQPKASVLFLCFGSLGVFSVEQIKQVAVGLETSGHRFLWVVRPPPGLEHVTGPDLDALIFPEGFLRRTKGRGLVVISCSPQREVLEHGAVGGFVSHCGWNSVLEAVTAGVPMLAWPLYAEQRMNKVFLVEEMRLAVGVEGYDKGIVTAEEIQEKARWLMDSDGGRELRERTLAAMREVKEAPSDKGESKMTLLELVSQWKSD

SEQ ID NO: 5286 - protein, 518 aa, Eutrema salsugineum
MTNAMTESFYTWVCKTQILFSQQQKMGTSGEGSELHFFLFPFMAHGHMIPTLDMAKLFATKGAKSTILTTPLNSNLFEKPIKSFNNENPKLQDISIQILSFPCTELGLPRGCENTDFIFSSPDLGRGNLNQKFLLAMTYFKEQLEQLIETVKPDCLVANMFFPWASKVAEKFGVPSLVFHGTGYFSLCASHCLRLHKPYKKAASSCEPFVIPDLPGNIVIIEEQVIEKEEESVMGKFMKEIRDSETNSFGVLVNSFYELEPAYSDFFKSFVAKRAWDIGPLSLGNREFKEKAERGKKASIDEHECLKWLDSKRCDSVIYLSFGTMSSFNDEQLIEIAAGLEMSGHDFVWVVNKNCSQGEKEEWLPEGLEERTKGKGLIIRGWAPQVLILDHQAIGAFLTHCGWNSLLEGVASGLPMVTWPVGAEQFYNEKLVTQVLKTGVSVGVKKMIQVVGDFISREKVEKAVREVMVGEERRKRAKELAVMAKDAVKEGGSSDIELDRLMEELKLVKLQNEKEQGS

SEQ ID NO: 5287 - protein, 536 aa, Caenorhabditis brenneri
MRLTNFILLLVVWYSSVEGFNIVFYINAIGKSHIDFSDSLVDSLVDRGHTVDIIIARMNDQVKGHGKSKADRFYVFGFKNGSNWDKMHHLTSPFEDRHFPINGFNPYYVIGNDLCQSMRRKLPFNLFYLAVALHDPELHEFLSYRKYDIGIVSTFDYCGVGILKQAGIPSIATFNAVPIMPIQTVTIGLPNAASQILPLFYSFDLNTLYGRFWNLVGWGYINWVQIPTLKYEQELLFKKRYGGHFKIEEVLNKVDLTFVNSNEVMEKPRPLHHRIQYIGGINLKKPKPVNADLDALLSKSKNGVVIFSFGTQIPGVAYPRYAVRNFLNVFKKYPEYTFLWKYDVQPGEENMFKNVKNVVLLDWLPQTDLLYDPRVIGFISHVGLNSFNEASYAGKPIIAIPLFADQPHNAENGVARGTTYVLNKSKLTEESIEKGLRAILLDKSYSVNAKKLQKMLIEKPAQPKDRFVEWMEYAAANPGLHRVFALPGASMGIFQYYCVDAVAVLIAAVGLSLYGVKKVLELLTSKIIFLRKIKRA

SEQ ID NO: 5288 - protein, 469 aa, Theobroma cacao
MIDIAERPIVNAYIRSCVATATDINFINLPPVDPPSTDEYQTYLGYICLLIAMHKLHVKNAIAHLISTESTSDSDSNTVRVAGLFVDMFCTSMIDVANELGIPCYLYFASPVSFLGLMLYLPTLDAKFATEFVALDSGLMVPKDPAAASASGLTIPGFANPVPYRVLPNSVLYRKQDGYFWYLHHARRYKETKGIVVNTFRELESYAIDSVSNGNDDWPPIYPIGPVLDLVGPAQWHPQQAQHGSIMQWLDNQPPSSVVFLCFGSMGSLSEAQLREIAVGLERSGFRFLWSIREPPKMKLDLPGEYTNVEEIEMLPPGFVDRSRRAGTGLVCGWVPQALILSHQAIGGFVSHCGWNSILESIWYGVPIATWPLYAEQQLNAFELVTELELAVEIRADYRKGSDLVSPEELERALRRLMKGNDEVRRKMREMKQKSRVALMPNGSSYKSLASLIEELTAEIAIKKVEILE

SEQ ID NO: 5289 - protein, 469 aa, Gossypium raimondii
MPQPHFIVVTYPAQGHINPTLQFAKHLIRLGVRVTYITSISASRRMTKVPTAEGLSFLPFSDGYDYGIKPGDDTDHYLSEFKRRGKDAISEYITSSENEGKPITCIVYSLCLHWAAEVARKHHIPSALLWIQPATVFDIYYFYFNGYESAIKAQADETNPKCSIKLPGLPPLFPRDLPSFVIASNVYQSALSLFQEQMDVLAEEPNAKILINTFDALEHEALNAIEKFKTVGIGPLVPSSFFNSKDALDNSLRVDLFQSDSKDYIQWLDSKPKSAVVYVSFGSIAALKKQQVEEIARALISSRRPFLWVMRNRKDRGEEEKEEDKLTCREELEQIGMVVPWCSQVEVLSHPSLGCFVTHCGWNSTLESLVAGVPMVAFPQWTDQGTSAKLIEDVWGTGVRVSTNEEGMVERDEIVRCLDVVMGDDEKGMEVKKNVEKWKGLAREAAMEGGSMDMNLKAFVDDVSQGYCK

SEQ ID NO: 5290 - protein, 468 aa, Glycine max
MKDSIVLYPALGRGHLVSMVELGKLILTHQPSLSITILILTPPSNTPSTPKGCDSTSQYIAAVTAATPSITFHHLPPTQIPTILPPHILSLELSRSSNHHLPHVITSLSKTLTLKAIVLDFMNFCAKQVTNALNIPTFFYYTSGASSLATFLQLPVIHETTTKSIKDLNTHLSIPGLPKIDLLDLPKEVHDRASQSYKLFHDIATCMRDSDGVIVNTCDPIEGRVIKALSEGLCLPEGMTSPHVFCIGPVISATCGEKDLNGCLSWLDSQPSQSVVLLSFGSLGRFSRAQVKEMAVGLEKSEQRFLWVLRSELVGVDSVEPSLDELLPEGFVERTKGRGMVVRNWAPQVRILSHDSVGGFVTHCGWNSVLEAVCEGVPMVAWPLYAEQRLNRVIMVQDMKVALAVNEDKDGFVSGTELRDRVRELMDSMKGKEIRQRVFEMKIGAKKAKAEEGSSLVAFQRLVQLWNQ

SEQ ID NO: 5291 - protein, 470 aa, Helianthus annuus
MSPTPHVLLFPLPMQGPVNCMLKLAELLCISGITVTVLNTDYIHRTLIRHSNVLTRFSSYDNLRFKTISDGLPEDHPRSGQRFLDLFDGMKTVTEPVFREMMVSGCFSFKSDPPVTIIIPDASFSFALDVAEEVGIPLFYFETVSPSALWTYLCLPKLIGAGEVPFNGNDLNVLIKNVPGTETFLRRRDLPSFCRLDDVDNLVTKIIMKEARCVPRAHGLILNTFQALDETVLVHMRKLCPDIYCIGPIHTLYKSLVTTQSSVSNSLWEENATCLSWLDTQVTRSVVYVSIGSMAMMTVEQLFEFWHGLVNSGKPFLWVQRPGSVIGEYDHNLVPKRLIDETKQRGFITTWVPQEAVLAHSAIGGFLTHSGWNSTIESIIEGVPMICWPQNVDQQVNSRFVSEVWKVGIDIKDTCDRGIVEKAVRDVIDVRKTEFIESTRMLAELGGQSVAEDGPSVMDLNRFIKTITTL

SEQ ID NO: 5292 - protein, 468 aa, Unknown
  Description of Unknown: Oryza sativa Japonica Group sequence
MADSDGSVHVLLLSYPAQGHVNPLLQFGKRLAAHRRVRCTLAVTRSLLNSCCRAPPSPGGGGGVHVATYSDGCDARGYDELGDEGAYLSRLESAGSATLDELLRGESGEGRPVRAVVYDAFLPWAAPVARRHGASCAAFFTQACAVNVAYAHAWAGRVELPLPTSAPAPPLPGVPPELEPADFPTFLTAPAAGRSAYLDLLLRQCQGLEVADHVLVNSFHELQPKEAEYMAATWGAKTVGPTVPSAYLDGRLPGDASYGFDLHTPMAAESKAWLDERAASSVVYVSFGSLATPSAVQMAELAHGLRDSGRFFLWVVRSSETGKLPDGFAGETAAKNTTGLIVPWCPQLEVLAHGAVGCFVTHCGWNSTVEAVSAGVPMVAVAQWSDQPTNARYVEEAWRVGVRARADGEGVVRKEEVARCVAGVMDGETGMEFRTNAARWSAMARAAMSQGGSSDTNISEFLTKLCSK

SEQ ID NO: 5293 - protein, 466 aa, Aegilops tauschii
MASAAESSGGATATRRVLMFPLPFQGHLNPMLQLADVLHARGLRVTIFHAAFNAPDPERYPAGYRFVPVGAGVPTADLVPTGSNADFAGAVLRINERLQAPFQDSLRAVLEEDEEGAAVCLVLDSNLRGMQVVADRLGVPTLVLRTAGAACLVAFMAFPALCDKGLLPPQDHSQLNMPLDDLQPLRVRDMVFSTTSPHETISTCLECIVESVRCSSGVIFSTFCDLEDVELQKVNDSVGVPVYAIGPLHKISSGPQSSLLAPDRTCLDWLDKQEDESVLFVSFGSLASMDKEELMETALGLANSRIPFLWVIRHDLLHGSEKVGLPDGFEEAVQGTGMVVSWAPQQEVLGHQAVGGFWTHNGWNSTLESISEGVPMLCRPHFADQMINARYVQEVWKIGFELEGKLERGEIERNVRNLLCQEVGGEMRRRAKDLKDKATRCIKKGGSSQTRVDLLVNFITSLPSSI

SEQ ID NO: 5294 - protein, 493 aa, Medicago truncatula
MVSQKIHSVLLASPGIGHLIPTIELGKRLTTHHNFDVTIFVVTTATSDSDKTKSHILQQISNLNSLDIIVTPPVDVSDKLDPNNPSLGLQIVLTMIESLPFIRSEIQSMKNPPSVLIVDIFGTAAFPMARELHMSSYVFFATNAWFTAVNINLPFITDEAFSRHAKNHEPLSILGCEPVRFEDTLETFVAPWGPIHKRYVEVTREIIAIDGILVNTWHDLEPGATKAVIENGVLGRFVKGPVYPIGPLVRTGEPEKGGDSENLILSWLDQQPAESVIYLSFGSGGTMSKGQMRELAYGLELSQQRFIWVVRRPTEDNASATFFNIAGADGTIMVDYLPKGFLNRTKDVGLCVPMWAPQAEILKHPSTGGFLTHCGWNSVLESIHNGVPMVAWPLYAEQKMNATMLSEELGVAVKATKTVAEGGVVCREKIAEVIRKVMVDDEGVAMRVKVKEYKVSGEKALSVFGSSHESLCKMAKDCELHLHHGSEAKGRGA

SEQ ID NO: 5295 - protein, 486 aa, Polygala tenuifolia
MDSHDSQLHISFFPFMGPGHMLPTIDIAKLFAFRGLKVTIITTPSNAAVDSTLQKTKELGFEIKLLFIKFPYAELGLPEGCDAKLMFQPQLRRKLCKIIPSMQHSLEELLQQHRPACLVADTIFPWATDAAKKYGIPRFVFHGSCFFSVCASICLYKHKPHHKAISDSEPFLIPDLPDEIKLSKNQLPDYIKQEEVDEIIYAFYKSALEAEFTSDGAIVNSFYELEPAYADHYTKLTGRRGWHIGPVSLCNEDFDEKAQRGNEAGNNQNKYCLRWLDSKPPSSVIYVCFGSMTNFSDSQLMEIAAGLEASGQHFIWVVKKEKEDKGNGKWLPEGLEKRVEEKGLIIRGWAPQLLILNHVAVGGFVTHCGWNSTLEGVAAGLPMVTWPVSAEQFYNEKLIIQVLKIGVSVGAQKWIRVFGDYVKKEAIAKAVTRIVIGEEAEGMRKRARALADKSKAAVTEGGSSHNELNHLIQELKALRTEKLMLQ

SEQ ID NO: 5296 - protein, 480 aa, Oryza sativa
MEADPNPMVVLHTCLGVGHLIPMVELAKLLLRRGLAVVIAVPTPPASTADFFSSSAPAVDRMAAANPSISFHHLPPPEYPDPDPDAFLQMLDTMRLTVPPLLAFLRSLPSVAALVLDLFCVDALDAATAAGVPAYFYYTSSAGDLAAFLHLPHHFATTEGSLKDMGKTPLRFPGVPPIPASDMPHTVLDRADRTCATRLGHYGRIPEARGILINSYEWLEARSVRALREGACIPDRPTPPVYCIGPLMAKGEEAANGERHACLSWLDAQPERSVVFLCFGSLGAVSVKQLKEIARGLENSGHRFLWVVRSPPQDPAKFFLPRPEPDLGMLLPEGFTERTRDRGMVVTSWAPQVEVLRHAATAAFVTHCGWNSVLEAASAGVPMLCWPQYAEQRMNKVLLVDGMQLGVVMDGYDEELVKAEEVEKKVRLVMEFEEGKKLRDRLTMAKEMAAKALADGGSSSLAFTEFLKDLNFGNTTKEKA

SEQ ID NO: 5297 - protein, 387 aa, Unknown
  Description of Unknown: Oryza sativa Japonica Group sequence
MRRFVPQLRALVVGIGSTTAAIVCDFFGTPALALVAELGVPGYVFFPTSISFISVVRSVVELHDDAAVGEYRDLPDPLVLPGCAPLRHDEIPDGFQDCADPNYAYVLEEGRRYGGADGFLVNSFPEMEPGAAEAFRRDAENGAFPPVYLVGPFVRPNSNEDPDESACLEWLDHQPAGSVVYVSFGSGGALSVEQTAELAAGLEMSGHNFLWVVRMPSTGRLPYSMGAGHSNPMNFLPEGFVERTSGRGLAVASWAPQVRVLAHPATAAFVSHCGWNSTLESVSSGVPMIAWPLYAEQKMNTVILTEVAGVALRPVAHGGDGGVVSRKEVAAAVKELMDPGEKGSAVRRRARELQAAAAARAWSPDGASRRALEEVAGKWKNAVREDR

SEQ ID NO: 5298 - protein, 479 aa, Citrus unshiu
MKKAELVFIPSPGAGHLVSTVEIAKILVDRHERICITVLIIKLPFDNKVAAYTESLAACNLPSRIKFIFLPDDNQSPTPGKVPYSSLETKKTHVKEAVAKLTGSPDSPTLAGFVLDMFCMCMVDVADELRVPSYVFFTSSAASLGSFLNGQALYDQNKLTTELIDSGADLQVPTLVNSIPARLLPSSFFDKEWGEFLFGQARRYRLVKGIMVNTFEELEPYAVKSLYDGKIKIPPVYAVGPVVNITGDNYALGPGGIEKKAEVMTWLDDQPVSSVVFLCFGSRGCFDVDQAREIAHALEQCGHRFLWSLRQAPTEDKTELPSDYADLKGVLPGGFLDRTAEIGKVIGWAPQVAVLSHPAVGGFVSHCGWNSTLESIRFGVPIATWPMYAEQQANAFQLVIELGLAVEIKMDYRKDIFNKIPTMVTAEEIERGIKCLMNPESEIRKRVKEMSEKAGRAVMDGGSSFSSLGRFIDDALDNM

SEQ ID NO: 5299 - protein, 454 aa, Cephalotus follicularis
MQTNKIYVVTGSGQGHLYPCMELCRFLSSRNYHTTLVISSNLSTAIPSSFTENPLHEIAQISPSPRPIPGSAPLSHQSAHELEAHLVTHARVPDLPPPLCAIIDFQMGWTKRVFWKFDIPVIGLFTFGACAAAMEWGAWKVHAGDLKPGETLPVHGLPEEMSLTHSDLLRKSFGQPRGSGGPKPGGGPPKPGDRPPWVPEIQGSIGLMFNTCDYIDRPFIEYMADQMGMPAWGVGPLLPQQYWNSSGSLIRNRERQSNFTEDEIIQWLDSKPRGSVLYVAFGSEVGPTMEEHQQLACALEELDRPFVWVIQPGSGGLDKKVGDRGLIICGWAPQLLILSHKSTGGFLSHCGWNSTMEAIGRGIPFLAWPIRGDQYFNAKLVVSYHKVGYRVAHDLSLLITKDDIFKGVERLMGDIQMKRRAEALSAQFEHGFPATSVAALDAFEDFISQKQKPV

SEQ ID NO: 5300 - protein, 501 aa, Centella asiatica
MDSQFQQLHFVMIPLMCPGHLIPLVDMAKLLAQRAVTVTIVTTPRNAIRFGAATSRAIQSGLPIRLLELRFPTLEAGLPEGCENVDQLSSFDFSKNFIDASKMQQGPLEKIFGDIKPSPSCIISDKHIMWTAKTAKKFQIPWIVFDGMSCFNQLCTEILHTTKVHENVSESEPFVVPGLPDVIEFKRAQLPGLFNPGSNPGSANVNDIREQIRATEVGAYGVVINSFEELEHDYVREFKKIKEGKVWCVGPLSLCNTDDIDKAQRGNNVAMDQQHKCLQWLDAEKNGSVIYVCLGSLSSLSNLSGAQIIELALGLEMSGYPFIWALRPGIKHKEIEKWVIEEGFEERVKGRGMLIWGWAPQVLILSHRAIGGFLTHCGWNSTIEGICAGVPMITWPLFAEQFVNEKFLVQVVKTGVRVGVEAVVDMGYKEEFGVKVKREDVKNAVECIMSEDEEGEYRRNRAKKLAEMAVKAVEEGGSSNLNMTLLIQDIIEQVKDRLALS

SEQ ID NO: 5301 - protein, 511 aa, Citrus unshiu
MGTESLVHVLLVSFPGHGHVNPLLRLGRLLASKGFFLTLTTPESFGKQMRKAGNFTYEPTPVGDGFIRFEFFEDGWDEDDPRRGDLDQYMAQLELIGKQVIPKIIKKSADEYRPVSCLINNPFIPWVSDVAESLGLPSAMLWVQSCACFAAYYHYFHGLVPFPSEKEPEIDVQLPCMPLLKHDEVPSFLHPSTPYPFLRRAILGQYENLGKPFCILLDTFYELEKEIIDYMAKICPIKPVGPLFKNPKAPTLTVRDDCMKPDECIDWLDKKPPSSVVYISFGTVVYLKQEQVEEIGYALLNSGISFLWVMKPPSEDSGVKIVGLPDGFLEKVGDKGKVVQWSPQEKVLAHPSVACFVTHCGWNSTMESLASGVPVITFPQWGDQVTDAMYLCDVFKTGLRLCRGQAENRIISRDEVEKCLLEATAGPKAVELKENALKWKKEAEEAVADGGSSDRNIQAFVDEVRRTSVEIITSSKSKSIHRVKELVEKTATATANDKVELVESRRTRVQY

SEQ ID NO: 5302 - protein, 464 aa, Helianthus annuus
MKMEKTPHIAILPSPGMGHLIPMAEFAKRLVEHHHISATIIIPTTGTPPKAQTTVLESLPENIHHMFLSPVNNLPENVRPEIKINRIMQGSLSSLRDALSCLKSKTKLVALVFDMFGHDSMEVAKEFNLCNFLFFPMSAMALSFTFTLQKLDEETTGEYKDLPYPVKVPGSVSFHGRELMAPVQIRTDEVYKGYLLLSKRLTLLDGIMVNSFVELEEETICVLRDDVAGQTPIYPIGPLIRSDPSNGSDRHECLKWLDDQPSGSVMLVSFGSGGTLSLEQIHELAHGLEMSNHRFLWIVRSPSKASNASFFTGSSQNDPLGFLPEGFLARIVNRGFIVPSWAPQIKILSHEAIGGFLTHCGWNSTLESIVYGVPMIAWPLYAEQHMNAKVMTEALDLALRLETDENGLYQREEIKKVVKGLMEGDEGKKISKRLKELKSAAMKALSDGGSSMESLSKIAFQLKK

SEQ ID NO: 5303 - protein, 478 aa, Saccharum hybrid
MDASGGSMHVVMLPWLAFGHILPFTELAKRIARQGHQITILSTPRNTRRLIHIPPDLAGLVRVVDVQLPHVERLPEDAEASIDLPSDDLRPYLRRAYDAAFADKLSDILQEPGPGKPDWVIIDYAAYWAPAAAARHGVPCAFLSLFGAAVVSFYGPAEGLMGRGKYARTKPEQLTVVPDYVPFPTTVAYRGFEAREFFTPVLVPDESGVSEGYRFAKCIEESQLVAIRSSAEFEPEWLQVLGGLYRKPVIPVGLFPPPPTQDIGGHKAALQWLDRQTRGSVVYAAFGSEAKLTSAQLQTIALGLEASGLPFLWAFRQPVDANEGKSGLPEGFEERVDGRGLVCRGWVPQARFLAHESIGGFLTHAGWNSIIEGLARGVRLVLLPLMFDQGLNARHLTEKKISVEVPRDEEDGSFTPKDIAAALRRVVVEEECEVFGDKAKELAKLFGNDEMNDQCVRDFLKCLSLSEYTRQRQSVVGL

SEQ ID NO: 5304 - protein, 478 aa, Medicago truncatula
MEEQKTCIAMIPCPGLSHLIPFVEFAKLLVLHHNNFHVTFLIPTLGSPTPSTKSILNSLPPNIDFTFLPHINIQDLPPNIHIATQMKLTVKHSIPYLHQEVNKMVTCSKTNFVCLVFDLFSSDVIDIAKKFNLMSYIFATSSVISLQFCLNLPKLDESVSFEFMDTTKTFDIPVSNVSFKVKDFPDPVLFGRSSETYKAFLCACQRLSLVDGVIINSFTYLEHDAIKSIQDIICVYPVGPIIQRESKSKENKLECITWLNNKPSKSVLFISFGSGGALTHEQINEIAFGLESSGCNFLWVIRVPNKHSNSAYFSGSSKKDDPLNYLPLGFLERTKDQGLVVPSWAPQVEILSHSSTGGFLTHCGWSSSLEGLVYGVPMIAWPLFAEQRMNAATLTDVFKVAVRPKIDDEDGIVKGEEVARVIKIIMNQYSRDGEGLQLRKRIEDLRVEAAAAVSEDGSSRRALSSLVLKWEERVTLIN

SEQ ID NO: 5305 - protein, 322 aa, Oryza sativa
MHAEEQLTNGFLDAPVDWTPGMSKHLRLKDFPSFFRATDPDEYMFHFALHVTERLAEADAAVLNTFDELEPEALDAMRAMLPPSVSIHTIGPLGFLAEQVVPKGSPLDALGSNLWKEDDSCFGWLDGKPPRSVVFVNYGSVTVMTNEELVEFAWGLANSGHDFLWIVRPDLIHGDAAVLPPEFMESVGGRGLLASWCPQEAVLRHEAVGVFLTHSGWNSTVESLCGGVPMLCWPFFAEQQTNRRYSCTEWGVAMEIDDDVRRDAVEAKIREAMGGDKGREMRRRAGEWTKETGLRATRPGGRAHASLDALVADVLLSGGKAR

SEQ ID NO: 5306 - protein, 485 aa, Phytolacca americana
MGAEPQQLHVVFFPIMAHGHMIPTLDIARLFAARNVRATIITTPLNAHTFTKAIEMGKKNGSPTIHLELFKFPAQDVGLPEGCENLEQALGSSLIEKFFKGVGLLREQLEAYLEKTRPNCLVADMFFPWATDSAAKFNIPRLVFHGTSFFSLCALEVVRLYEPHKNVSSDEELFSLPLFPHDIKMMRLQLPEDVWKHEKAEGKTRLKLIKESELKSYGVIVNSFYELEPNYAEFFRKELGRRAWNIGPVSLCNRSTEDKAQRGKQTSIDEHECLKWLNSKKKNSVIYICFGSTAHQIAPQLYEIAMALEASGQEFIWVVRNNNNNDDDDDDSWLPRGFEQRVEGKGLIIRGWAPQVLILEHEAIGAFVTHCGWNSTLEGITAGVPMVTWPIFAEQFYNEKLVNQILKIGVPVGANKWSRETSIEDVIKKDAIEKALREIMVGDEAEERRSRAKKLKEMAWKAVEEGGSSYSDLSALIEELRGYHA

SEQ ID NO: 5307 - protein, 478 aa, Cucumis sativus
MENGEMEPHVLIFPFPAQGHVNSMLKLAELLTLSGLRITFLNILRIHQKLTLHTDIQSRFSRFPNFQFQTITDGLDNRLIDKFSDLIDSLKSITMPLLKQMLLSGEFGPTPTCIILDGLFNFIVDVDAHPNIPVFSFRTISACSFSAYSFVPKLIEDGQLPIKGEEDMDRIISGMGGMENVLRCRDLPSFCRLEDPFDPGLQHGVTQTIQSFKSRALIFNTFNDLEGPILSSLRSRCSNIYAIGPLHAHLKTRLSGEISPASSVSSNGLWEVDRSCLAWLDDHPPKSVIYVSFGSVVVIGDDQFREFWHGLVNSGKRFLWVMRPNSLAGKDGVPADLKEKTNERGYIVDWAPQEEVLAHKAIGAFLTHSGWNSTLESIVAGVPMICWPQFADQQTNSRYVSDVWKIGLDMKDVCNRETVTKMVNDVMENRKNELMGSVIEMAESAITSVEEGGSSYCDLERMINDIRLLCKRQRDTIG

SEQ ID NO: 5308 - protein, 445 aa, Crocus sativus
MIPMTNVARIFASRPNVKATIITVPSHVNHFKPALDICPYPIHLLTIKFQLPAHDKLVSSDLIPDRLFSDAYFEAIDSLEGPFGRLLDEHCPDCVVSSGNFPWSAALANARCIPRLVFYGSAAITSIVMRTISGLKLTEGRSDHEPFIVPGLPHPLEFTKAQIMSSASYPGDTLARMVKAHAQSYGTVGNSSYELEPGYASKLDKSYFIGPVALCTGDSTGEGGNRDSDEYLNWLDNQKKCSVLYVCFGSIAQFSNAQLFEIATGLEASGHPFLWVVRDTGNTAEWLPEGFVERVGRRGLLVRGWIAQMSVLNHTAIGGFMTHCGWGSVLEGVSAGLPMVTWPLFSDQFVNEKLIVDVLRIGVPVGSKVNSSREKERTFVAGEMVRKAVGEVLSEDGEEAEERRKRARKAAEMSRKAVEEGGSSYNDVSKLIHELREIKKSKATR

SEQ ID NO: 5309 - protein, 484 aa, Cephalotus follicularis
MGSESPQLHIFFFPFMAHGHMIPTIDMAKLFASQGVKATIITTPLNAPLFSKSIQRARDLGFDIHIRTLKFPAVEAGLPEGCENVDTITSNEPNKGLLTKFAVATSMLQEPLEHLLQECRPDCLVADMFFPWANDAAAKFGMPRLVFHGTGFFPLCVSECIKLYEPHKKASSDSEPFVVPGLPGDIKLTRKQLPDFVFEDIQDDRTRFFKQVKESDLKSYGIVVNSFYELEPAYADHFRQVLGRKAWHIGPVSLYNRGIEDKAERGKQASIDEHECLKWLDSKKPNSVVYVCFGSVANFNSAQLMEIAVGLEASGQQFIWVVRRDKADKGNEDWLPEGFEKRMEGKGLIIRGWAPQVLILDHEATGGFVTHCGWNSTLEAVSAGVPMVTWPVAAEQFYNEKFVTQVVKNGVAVGVQQWTRLVGDFVKSENVEKAVKEIMVGDKAEEIRSRAKAVAGMAKRAIENGGSSNSSLKALIEELKLCRH

SEQ ID NO: 5310 - protein, 469 aa, Vigna angularis
MANDKEKVLHIVMLPWLAFGHMIPNLELAKLIAGKGHRVSFVSTPRNIERLPKVSQNLATLIDFVKLPLPKVPNLPENAEATTDVPYDVVQYLKKAYDTLEEPFTHFLESSKADWLFYDFAPFWAASVASKLCIRKAFYSICTPPFLGFLGPPSVLMGHDSSYRQKPEDYIVAPPWVPFPTTVAFRYYEIMRIVDSLSSQNNSGVADTNRFGVSIQNCDIVFIRGCTEFESEWFHLLESIYQKPVLPVGQLPSTAPVGGEDNDTWRWMKGWLDKQARGSVVYVAFGSEAKPTQDEVTEIALGLEKSKLPFLWLLRVQRGPYDPDVLRLPEGFEERIKGRGVVCSSWAPQLKILEHVAVGGFLTHSGWTSVVEAVQNEKPLVLLTFLADQGINARVLEEKKMGYSVPRDERDGSFSSDSVADSLKLVVVEEKGKIYRERIKEMKDLFVNGERQDRYIDNLIHNLKSLSKC

SEQ ID NO: 5311 - protein, 498 aa, Brachypodium distachyon
MESLTSTGAAPARASPPRPRPHVVLVASPGAGHLIPMAELARRLAEQHGFAPTLVTFTTDLSSPEEAMSCLPDSLATRPTIALPPVQIDDLPHDTPIEILLFELVRRSVPNLRALLRSIDGPIAALVPDFFCSEALPLAAELGVPGFLFVPSNLAALALMRRLVDLHHGVDVAPGAEYHDMPENLELPGGVALRRADLPVSFQSSKEPVYARLLEEGRRYLSADGFLVNSFYEMEPATGEELRQAAERGAFPPVFAVGPFVRSRSNDDAASSACIIYWLDLQPTGSVVYVSFGSGGSLSVEQTAELAAGLEASGHRFLWVVRMPTLDGNEKSGRERSDDPLAWLPEGFLERTKGRGLAVAAWAPQVRVLSHPATAVFVSHCGWNSSLESVSSGVPMVALPPRAAEQRMNAVILEQSVGVALRPRVREDHQIDADGGVVARDEIAAVLKELMEGDKGRYVRRQAGDLQQAAALAWTPEGSSRRALEEVAAAWKSALGNK

SEQ ID NO: 5312 - protein, 477 aa, Helianthus annuus
MCKHYTFTTPIRSTQTFNMYHSTNNTHLLLYPCPGYGHVIPSLELAHHLLRRGLTITVIISAADLPLIDPLLSSYPCSLHRLLFSYPKVHPSPQPLIAKILSTQQLFDPIVKWFKSHPSPPVAIVSDFFLGWTSDLASHLGIKRVMFSTSGALGSSIFHALWRDMPDINKQNNDKDENFYISFPEIPNAPKFPWWHLPPASRCFKNGDQDFEAFRTTILANMRSWGIVYNTFEGLEGVYIDHIKKQMGHDRVWAIGPLLPDEHGPMNSARNGSSAVPPHDLLMWLDSKPVDSVVYICFGSRATLSEKQMCALLGALKLSNINFIFSVKASDSSSMILSGFEDDMVARQGFVVKGWAPQLAILKHRAVGSYLTHCGWNSILEGIAAGVMMLAWPMGADQFANATLLVDQLGAGKQVCEGGPELVPDVNELARLLDESLNGDLRERSKVKELSEGAMKAVKEGTSIRDLDLFVKLVSEL

SEQ ID NO: 5313 - protein, 491 aa, Vigna angularis
MSSENSKLNFVLFPLMSQGHMIPMMDIAKILAEQGVTVTVITTLQNASRFKSTFARSIDSGSQIKLLEIQFPYQEAGLPEGCENLDMLPSLGAGLDFFNAANSNTQKEQVEKLLEDLTPPPSCIVSDMCLHYTATIATRFNIPRISFLGQSCFSLFCMYSLGKSRVLSGITSNTEYFVLPGLPDKVEMTKAQLPAQQTDAEWRKFYARTGAAEGVSYGVVMNSFEELESDYASAYKKARKGRVWCIGPVSLSNRDELDKAERGNKASIDEHFCMKWLGLQKAGSVIYACLGSMCNITPQQLIELGLALEASNRPFIWVIREGSQLEEVEKWMKEEGFEERTKGRSLVIHGWAPQVLLLSHPAIGGFLTHCGWNSTLEAICAGVPMVTWPLFGDQFLNEKLIVQILKVGVKVGVEVPVEWGQEEETSILVKKEDVERAINELMDETMESEKIRERVKEFADMAKKAVEQGGSSHSNVTLLIQNIMQQSQRDA

SEQ ID NO: 5314 - protein, 472 aa, Unknown
  Description of Unknown: Oryza sativa Japonica Group sequence
MDDAHSSQSPLHVVIFPWLAFGHLLPCLDLAERLAARGHRVSFVSTPRNLARLPPVRPELAELVDLVALPLPRVDGLPDGAEATSDVPFDKFELHRKAFDGLAAPFSAFLDTACAGGKRPDWVLADLMHHWVALASQERGVPCAMILPCSAAVVASSAPPTESSADQREAIVRSMGTAAPSFEAKRATEEFATEGASGVSIMTRYSLTLQRSKLVAMRSCPELEPGAFTILTRFYGKPVVPFGLLPPRPDGARGVSKNGKHDAIMQWLDAQPAKSVVYVALGSEAPMSADLLRELAHGLDLAGTRFLWAMRKPAGVDADSVLPAGFLGRTGERGLVTTRWAPQVSILAHAAVCAFLTHCGWGSVVEGLQFGHPLIMLPILGDQGPNARILEGRKLGVAVPRNDEDGSFDRGGVAGAVRAVVVEEEGKTFFANARKLQEIVADREREERCIDEFVQHLTSWNELKNNSDGQYP

SEQ ID NO: 5315 - protein, 464 aa, Rosa chinensis
MKQSIVLYPASPGSHYLGSTVELGKIISQRHPNFSITVLVDTSSPRALANSSYINHLLSSDQTSISFFTLPSLNLPHPDAQPKLEYFLTVPNVVQALKTISLTSKVLAFITSAVQQYPNDPEIPTYYYFPSCASVLALCLYLPTFHDQTPESFKDLNDDVVEFPGLPALRGSQMPDPILDRNEAGYDHYLHMASCLPKAKGIIINTIQELEPRAIKAIKEGICVPNHRTPPLYHIGPFISDRDSENRSIQGGSPMPTNCSTLLWLDEQPSRSVVYLCFGSRGTFSEEQFKELALGLERSKLRFLWVVRSQLDLEVLLPEGFLERTKDRGLVVTSWAPQVAILSHESVGGFVTHCGWNSITEAVTYGVPMVSWPLYSEQEVNSVVLVEEMKLAIPIFEVLSKSKQGLVSADEVEKKVLRLMDMESEEGKSLRERCQAVKAMGLAAWRNGGSSFTSFSELVSSWMH

SEQ ID NO: 5316 - protein, 293 aa, Medicago truncatula
MKNFRIKDLPDFVRAKYPNDSMVEFILEASGRAHRPSAYILNTSNELEKDVMNALSTVFPCIHAIGPLSSFLNQSPENHLTSLSTNFWKEDTKCLYWLESKEPRSVVYVNFGSLTVMTAEKLLEFAWGLANSKQPFLWIIRPDLVIGGSAVLSSEFVNEISDRGLITSWCPQEQVLNHPSIGGFLTHCGWNSITESISAGVPMLCWPFFADHPVSCRYLCNTWKIGIEIDTNVKREEVEKLVNELMVGEKAKKMRQKAIELKKKVEEDTRPGGCSYMNLEKVIKEVLLKQNRT

SEQ ID NO: 5317 - protein, 532 aa, Drosophila virilis
MNLRWALHFMLLSLLALQEIHFTAGSRILAAFFLPGKSHFMMTNSIIRELVKRGHEVTFITPFSLAKENLGANYKEIVLPQYDMWTDIKQMSNREIILDMADVSSLKFLRMLQVMGVHSTDFAFEQPEIQALINAEHKVGQYDLLLAEQFYNEGALILGHLYQIPVITVSTFGNTNYFSELVGIITPWSYSPHGFMTFTNRMSLSERLLNVFICGTEHLMRRFLYYPAHDEVLRKHFAKLLDVVPTTKQLERNISAILMNNYMPLEAPRPISFNQISVGGLHILPPKPLPQHLQKFLDEATHGAIYFSLGTQVRSADLPPEKLKIFLDAFGSLKQRVLWKFEDDSFPNLPANVMIQKWMPQGDILAHPNVKVFIAHGGLFGLQEALHYGVPVLGMPVYCDQHFNIHQGKADGYALGLDYRTISTEQLRSSLLELLENPKYRETMKRASRIFRDRPLGAMDTAMFWIDYVIEHQGAPHMVSAGLDLTWYQFYLLDVIAIFVATVVAIIVLPIWILCRILRKSQKQPKRKAKIN

SEQ ID NO: 5318 - protein, 462 aa, Vigna angularis
MALNDQNIPRQTKVVVLMIPFPAQAHLNQLLHLSRQIVAENIPVHYVGTATHIRQATLRHQNSIPNIHFHAFEVPPFVSPPPNPNNQESDFPSHLIPSFEASTHLREPVGKLLQSLSSQAKRVIVIHDSLMASVAQDAINMPNVENYTFHIFSAFNNAVYLWQEKGRPHVGDIHFPEIPSDEGCITTQFKGFLSAQYEFLNFSHGHIYNTSRAIECPYVDFLDRLGGGKKVWALGPLNLLAIEKKDSTRFRHPCMEWLDKQERNSVIYVSFGTTTTLTEEQIQQIATGLEQSKQKFIWVLRDADKGNIFDENEAKRHYLPNGFEERLKGMGVVVRDWAPQLEILSHPSTGGFMSHCGWNSCTESFSMGVPIATWPMHSDQPRNAALVTEVLKVGLVVKDWSQRNALVTASDVENCVRRLMQTKEGEEMRERAMRLKNDIHRAMNEGGVSRMEMESFISHITH

SEQ ID NO: 5319 - protein, 486 aa, Oryza sativa
MASTDRSKKLRVLLIPFFATSHIGPFTDLAVRLVTARPDAVEPTIAVTPANVSVVRSALERHGSAATSVVSIATYPFPEVAGLPRGVENLSTAGADGWRIDVAATNEALTRPAQEALISGQSPDALITDAHFFWNAGLAEELGVPCVSFSVIGLFSGLAMRFVTAAAANDDSDSAELTLAGFPGAELRFPKSELPDFLIRQGNLDGIDPNKIPQGQRMCHGLAVNAFLGMEQPYRERFLRDGLAKRVYLVGPLSLPQPPAEANAGEASCIGWLDSKPSRSVLYVCFGTFAPVSEEQLEELALGLEASGEPFLWAVRADGWSPPAGWEERVGERGVLVRGWVPQTAILSHPATAAFLTHCGSSSLLEAVAAGVPLLTWPLVFDQFIEERLVTDVLRIGERVWDGPRSVRHEEAMVVPAAAVARAVARFLEPGGAGDAARLRAQELAAEAHAAVAEGGSSYRDLRRLVDDMVEARAAGGEAAAAPQPQ

SEQ ID NO: 5320 - protein, 475 aa, Sinningia cardinalis
MEDTIVLYPAPGIGHLLSTVELGKLILRHHHFSTIHVLITTGFDDSPHTATYIDQISKTNPSITFHRLPFLPLNLSPTVSSIATLFEFIRLNATSVLHTLQKILQTSKVRALILDFFCTSAFPISESLGIPVYYFFTSGLAAVAAYLYFPTIDKQVDQSFKDLVDTKFHIPGLPPLPSRHMPQPVLNRNDPAYHDVLYFSHHLARSSGIIVNTFDGLEPIALKAITDGLCIPDIPTPPIYNIGPLIADADTKPADQNLKHHSLSWLDRQPNQSVVFLCFGSRGSFSTDQLKEIAKGLERSGQRFLWAVKKPPFDKNSKEVEELGEFNVMEIMPEGFLDRTKDRGMVVESWVPQVKVLEHPAVGGFVTHCGWNSVLEAVMAGVPMVAWPLYAEQHLNKAALVEDMKMAIPMDPREDDEFMFAEEVEKRIREVMDGEKSKELREQCHKMKNMAIGAWERLGSSTVALDKVVHVWFGN

SEQ ID NO: 5321 - protein, 417 aa, Helianthus annuus
MANNTFAELVFIPAPAVGHIMSTIEMAKLLFNRDQTLSVTLLIINPPYSVLPLTTYIESLAKNAIERMRFIKLRQDQSPPKLNSSAPFVMSFYEFINSHCKYVRNILEDAIDQTCSRSRVVGLVVNILCTSMIDVSNEYNLPTYVYFTSNAAFLGFKLHFEMLFVDQKQDLIELANSEDEIVIPTFVNPVPMKLETHAINSFSGTNFPPVYPVGPILNLDGIGGKPDDTDVFRWLQSLPPSSVVLLCFGSMGGFDEAQAKEIARGLEQSGHLFIWSMRRLPPPEQSLKVLTDDFDDPRGVLPDGFLERTSGIGKVNGWAPQVSLLAHEAVGGFVSHCRWNWMLESLWFGVPTATLPMLWEQQMNAFEMVVELGLAVDLKLDYKINVLNSEGGVVIVTAEEIKRGIRRLMENKEVRKK

SEQ ID NO: 5322 - protein, 485 aa, Oryza sativa
MAKPTVVLLPVWGAGHFMPMIEAGKRLLRGSGGALSVTVLLMPAPTPEAAVDIAAQVKREEASGADDISFRHLPAVDMPTVHTGIEEWVSLILRSHGPHVRAAIAGLDCPVAALVTDIFCTPALDVAAELGVPSYVYFTSSAVMLELLLYSPVLDEEVPGEFSEMDGALNIPGLPPVPPSVLPATMLHKKKMSTYRWFLETGRCYMKATGFIVNTAAELEQSVIDAIADGRCTRGVPAPTVYAIGPVIALTPPPEQPHECVRWLDAQPPASVLLVCFGSKGLLPPPKVREIAAALERSEHRFLWVLRGPPKDSRPGQRVPTDAMLDELLPEGFLDKTKGRGLVWPTRAPQKDILAHAAVGGFVTHCGWNSILESLWFGVPMLPWPLDNEQHANAFLLVSVLGIAVPLRLDRERDNFVEAAELERAVSTLLGGGDGEAGRKAREKAVAVKAACRKAVEKGGSSDAAFQRLTEEIRRGAVNVPKKRN

SEQ ID NO: 5323 - protein, 483 aa, Jatropha curcas
MDSESNQLHIFLFPLLAPGHMLPMLDIARLFAARGVKTTIITTPVNAPRFTKSIQKIPDLATTQLINLKAINFPSEKAGLPEGLENLDLVSNQETHSRFFDALSLLQEPLEEAIKELHPQAIVADLFFPWTTDLALKYAIPRLIFHGTSFISMCCMASIAINQPHKKVSSDTEEFVLPGLPDPIKFTKTQIPDGFPEGPPNVVTNLLSYAREVEKRSYGMLVNSFYELEPAYADYYRNVLGKKAWHIGPVSLCNRNLEEKAQRGDVSGVSQHECIKWLDLKIPNSVIYVCFGTVTKFSQSQLQEIAIGLENSGQDFIWVVRKEKNEEEGEEKWLPDGYEKRIEGKGLIIRGFAPQVLILDHEAVGGFVTHCGWNSALEGISAGLPMVTWPIFADQFFNEKLITDILKIGVGVGARKWVRLVGDYIKSEKIEKAVKEIMVGEKAEEIRSRAKKIGEMARKAVEDVGSSYNDLSTLIQELKSFQS

SEQ ID NO: 5324 - protein, 449 aa, Zea mays
MFPLPFQGHINPMLQLGDALHARGLAVTVLHARLNAPDPARHPEFRFVPVPDGVPAHVAARGNVIDIIEAMNAAMEADGSGPVRAVLESVVADVEQPPAACIVFDANLLAVPRAASAVGLRTLVLRTASAACLGCFMAYPMLHQKGYLPPQESDLYMPVKELPPLRVRDLFYSSWSDHKKMRDLLARANEAMENSSGVVINTLDALEKPELERIREQLHVPIVLAPGPLHKLCSSKSTSSHSTLDHQDHSCIRWLDKQPSGSVLYVSFGSLASLDSDEFSEVAWGLANSGHPFLWVVRADSVRGSVDGPAGLPDGFEAAVHGRGKVIRWAPQQEVLAHHAVGGFWTHSGWNSTLESVSEGVPMMCRPQFADQMMNARYVVDTWGVGLELEGELQRGGVEMAIRKLMKGREGEEMRGRAKELKKIVADCLEARGTSQVATDNLVNYILSL

SEQ ID NO: 5325 - protein, 381 aa, Cephalotus follicularis
MLHSLSSLRDLLKSMIASTRLVALVVDFFGTDAFDVANGVNLPSYLFFPSPAMILSFCFYLPKLDEMVSCQYRDLREPIQIPGCVAIPGKDLVEAVEDRKSDTYKWFLLICKMYSLAKGIVVNSFMDLEPGAIKALQEEPGCPSIYPVGPLVRTGSSGTVGDGSHCIIWLDDQLRGSVLFVSFGSGGTVSRYQLIELALGLEKSGQRFLWVVKSPDDESAKAVFFGVSSLNDLLNYLPDGFLERTKGRGLVVPSWAPQAQILSHDSTGGFLTHCGWNSTLESIVNGVPLIAWPLFAEQKMNAVMLTEDIKVALSPKFDENGLVVREEIAKVVNILMEGEEGKQIGIRMQHLKEAAVKALKHEGSSAKALSELALNWKNLTV

SEQ ID NO: 5326 - protein, 498 aa, Ricinus communis
MVSGAEQIHVMFLPYLAPGHMMPMIDIARLFASNGIKVTIITTTKNAIRFKSSIDRDIQAGRNISLEILRFPSAEAGLPEGCENLASTPTPEMSIKLFHGIGLLEPEIKTIFLKHSPDCIVSDYLFPWTVDVAVELGIPRLAFSGSGFFNLCVANSIECNRPHDSITSETESFVVPGLPDLVNLTRSQLPDIVKSRTDFSDLFDTLKEAERKSFGVLMNSFYELEPAYADHFTKVIGIKAWHLGPVSLFADDKVARGDKTSVCEHTCLRWLDSKKPNSVIYVCFGSLTRFNKEQIVEIASALEDSSRSFIWVVGKVLKSYNDNEKDEDNQQEQWWLPEGYEERLKESGKGLVIKGWAPQVMILEHPAIGGFLTHCGWNSILEGLCAGVPMVTWPIFAEQFYNEKLVTQVVKFGVPVGNEIWKIWATQESPLMSRKNIENAVRRVVGDGGEAMEMRKRARRLAECAKKAVEEGGSSYNDLKSLIDDIRMYKHATTEKKI

SEQ ID NO: 5327 - protein, 482 aa, Ricinus communis
MGSIVRDHDKPHVVCVPYPAQGHVNPMVKLAKLLHYNDFHVTFVNTEYNHRRLLNSRGPSSLDGLPDFRFEAISDGLPPSDANATQDIPSLCDSTSKNSLAPFRNLLLKLKSSDSLPPVTCIISDACMSFTLDAAEEFGIPEILFWTPSSCGVLGYSQYHTLIEKGLTPLKDASYLTNGYLETTLDWIPGMKDIRFRDLPSFIRTTDRNDIMLNFVVRELERTSRASAVVFNTFYAFEKDVLDVLSTMFPPIYSIGPLQLLVDQIPIDRNLGNIGSNLWKEQPECIDWLDTKEPNSVVYVNFGSITVITPQQMIEFAWGLASSKKPFLWIIRPDLVIGENAMLPAEFVSETKDRGMLASWGPQEQILKHPAVGGFLSHMGWNSTLDSMSGGVPMVCWPFFAEQQTNCRFACTEWGVGMEIDNNVKRDEVKKLVEVLMDGKKGKEMKSKAMEWKTKAEEAAKPGGSSHNNLDRLVKFIKGQKN

SEQ ID NO: 5328 - protein, 463 aa, Vitis vinifera
MQPQILLVTYPAQGHINPSLQLAKLLIRAGAHVTFVTSSSAGTRMSKSPTLDGLEFVTFSDGYDHGFDHGDGLQNFMSELERLGSPALTKLIMARANEGRPFTCLLYGMLIPWVAEVARSLHLPSALVWSQPAAVFDIYYYYFNGYGELIGNKGNGSSSSIELPGLPLISSSDLPSFLVPSKVSAHNFVLKLHQKQLEQLNRESNPRVLVNSFDALESEALRAINKFKLMGIGPLLPSAFLDGKDPSDTSFGGDLFRGSKDYIQWLNSNAESSVIYVSFGSLSVLSKQQSEEIARGLLDSGRPFLWVIRAKENEEEEKEDKLSCVEELEQLGMIVPWCSQVEVLSHPSLGCFVSHCGWNSTLESLASGVPVVAFPQWTDQTTNAKLIEDVWKTGLRVMVNQEGIVEGGEIKKCLELVMGGGERGQEVRSNAKKWKDLAREAVKDGGSSDKNLKNFVDEIIQGH

SEQ ID NO: 5329 - protein, 339 aa, Citrus unshiu
MSNTQEDDSFACLITDSAWHFAHAVANDFKLRTLVLQSCSISAHLAFAAYPIVREKGYLPIQDSQLEAPVIELPPLRVKDIPSFKSKDPEDLHKLLLAIDSQLQASSGMIWNSFQDLEKVQLTTIHKQYYNSISGFVVGPFHKYFPASSSSLRSQDQSSISWLEKQAPKSVIYVSFGSVAAISETEFLEIAWGLANSMVPFLWVIRPGLVRGAEWLEPLPKGGLAHPAVGGFWTHSGWNSTLESICEGVPMICQPFLSDQMVNARYVSHVWRIGLHLEGKLQRKEIERAIRRVMVEATEGHEMRERILQLKEKVDVCLKKGGSSYQSRQRLVDHILSFT

SEQ ID NO: 5330 - protein, 467 aa, Oryza sativa
GMGSMSTPAASANGGQVLLLPFPAAQGHTNPMLQFGRRLAYHGLRPTLVTTRYVLSTTPPPGDPFRVAAISDGFDDASGMAALPDPGEYLRTLEAHGARTLAELLLSEARAGRPARVLVYDPAAPWARRVARAAGVATAAFLSQPCAVDLIYGEVCARRLALPVTPTDARGLYARGVLGVELGPDDVPPFVAAPELTPAFCEQSIEQFAGLEDDDDVLVNSFSDLEPKEAAYMESTWRAKTIGPSLPSFYLDDGRLRSNTAYGFNLFRSTVPCMEWLDKQPPRSVVLVSYGTVSTFDVAKLEELGNGLCNSGKPFLWVVRSNEEHKLSVQLRKKCEKRGLIVPFCPQLEVLAHKATGCFLSHCGWNSTLEAIVNGVPLVAMPHWADQPTISKYVESLWGMGVRVQLDKSGILQREEVERCIREVMDGDRKEDYRRNATRLMKKAKESMQEGGSSDKNIAEFAAKYSN

SEQ ID NO: 5331 - protein, 283 aa, Medicago truncatula
MEKEKVYALPELLFGDFNGDLRKTSSCCFSALKPKINRCFPLVCLERCSKKVVSVVADYFAAETLSVAKEFNILSYIYYPGNALSISLFFHLPYLDKTTSCEFKDLKEAIKMPGCRPIHGCDFPSTVQNRSSIVYKSFIYVCKMLHFADGIILNAFTNLEADTIKAVQKKEAKLPSIYLIGPIIQTDSSIKVRESEFFMGWLDNQPCNSVLYVSFGSGGTLNQEQIFELALGLELSGVKFLWVVRAPNKSPNGAYLKEMMKNKDVDPRGRNHASPYFKSNQCG

SEQ ID NO: 5332 - protein, 458 aa, Medicago truncatula
MGSLPPLHIAMFPWFAMGHFTPYLHLSNKLAKKGHKISFFIPKKTQTKLQHLNLNPNLITFYPLNVPHIDGLPDGAETSSDVPFSLVPLIATAMDQTEKQIEHLLKELNPQIVFFDFQYWLPNLTQKLGIKSLQYWITSPFSISYFWNGPRHSQGKGLTVDDLKKPPSGYPDGSIKLYQHELQFLSSTRKLVFGSGVFLYDRLHIGTSLADAIGFKGCKELDEPYAEFLGNFYGKPYLLSGPLLPETPKTTLDEKWESWLKGFKPGSVVFCAYGSEGPLEKNQFQELLLGLELTGFPFLAALKPPNGFESIEEALPEGFNERVKGKGIVYGSWIQQQLILEHPSVGCFITHCGAASITEALVNTCQLVLLPRVGVDHIMNARMMSEKMKVGVEVEKGDEDGLFTKESVCEAVKIVMDDENKVGREVRKNHSELRKFLLSENLESSCVDNFCEKLQGLI

SEQ ID NO: 5333 - protein, 425 aa, Medicago truncatula
MDSIINHKNENENSKPLHVAMLPWLAMGHIYPYFELAKILAQKGHTVTLITSPKNIDQIPKTPKAIQPFINLVKLPLPHIEQLEGAESTQNVPLNKTGYLKLAYDGLQVDVTEILKTSKSDWVFYDCVADWLPSIAKSLNIPCAHYSIVPAWNICFFNPPKDQINIDRSSLSASDEMIRVRLQRKRTEQRKERQRHKQLSCWIASTIHADKRRRKEENNLDWMKIKAWLDSKESSSVVYIGFGSETKISQQDLIELAHGIELSRLPFFWALKNLKEGTLELPKEFEERTKERGIVWKTWAPQLKILAHGSIGGCMSHCGSGSVIEKLHFGHALVTLPYLIDQCLFSRVLEEKKVAIEVPRSEKDGSFTRDSVAKTLRLVIMDEEGSTYRNNAKDMGKVFSSKDLHNQYIEDFIVALQKYRVHSND

SEQ ID NO: 5334 - protein, 465 aa, Medicago truncatula
MENKTCIAMVPSPGLSHLIPQVEFAKLLLQHHNEYHITFLIPTLGPLTPSMQSILNTLPPNMNFTVLPQVNIEDLPHNLEPSTQMKLIVKHSIPFLHEEVKSLLSKTNLVALVCSMFSTDAHDVAKHFNLLSYLFFSSGAVLFSFFLTLPNLDDAASTQFLGSSYEMVNVPGFSIPFHVKELPDPFNCERSSDTYKSILDVCQKSSLFDGVIINTFSNLELEAVRVLQDREKPSVFPVGPIIRNESNNEANMSVCLRWLENQPPSSVIFVSFGSGGTLSQDQLNELAFGLELSGHKFLWVVRAPSKHSSSAYFNGQNNEPLEYLPNGFVERTKEKGLVVTSWAPQVEILGHGSIGGFLSHCGWSSTLESVVNGVPLIAWPLFAEQRMNAKLLTDVLKVAVRPKVDGETGIIKREEVSKALKRIMEGDESFEIRKKIKELSVSAATVLSEHGSSRKALSTLALKWQ

SEQ ID NO: 5335 - protein, 616 aa, Mucuna pruriens
MKKAGRLVFIPSPGEGHLLPTIEFAKLVINRDDRLWISVLVMKSPYDTASVAYTQSLASEHLQVINLPECTSNTVQNSMTTLIEQQKPHVKEAVSNLPSSPPLAAFVVDMFCTAMIDVAKDFEVPSFVFFTSGLTFLGLVLHLHSLREQDNVHFRDSDTELAIPCFANPIPSTALPALVLEKEWDSLFLAYGRGLKKANGIIVNSFQELESHAVQSFSHGALPIYPVGPLINPKPKAHADDILNWLDHQPPSSVVFLCFGSMGSFGEDQVREIAIALENNGSRFLWSLRKPPPNSSYFRTLPTDYSISDLVALLPPGFLDRTAGIGKVIGWAPQAQILAHPATGSFVSHCGWNSTLESIYFGVPIATWPLYAEQQSNAYLLVRELKMAVEIVLDYRLNFKVGPNSLLSADKIEKGIRSLLDMDQDMRKRVHEMSQMSRETSLEGGSSYSNLGRLCRLTSVACGAALLNACAIPPDLYVDKSNDTWSVGRSTTPQASIVHLGWSLDSRPVGRSTTPHAQGHTDDPSIVMIDKNNRGLPYCSRIHNNMKLSLNGASVPTISDCTCNNFNNFQSKSTTVAMSPLDLNPIKTSLDGMRLGNIVVRPLSCQRWQNNSEVMD

SEQ ID NO: 5336 - protein, 480 aa, Morus notabilis
MDQPQTQTRQHVAILPSPGMGHVIPMVEFAKRFVRNHNFTVTFLVPTSGSPSTAMRSVFNGLPDSIEHVFLPPVNFDDLPEGSKLETRIALTVVRSLASLRDALASLFSRRVGVVALVVDHFGLDAFDVAREFNLPSYLFYPSPAMVLSLILHLPELDESTSSEYWELTDPVKIPGCFPIPGKDLLDPIQDRKSDVYKLTLHKAKQYRLVDGIIVNTFNDLEPRAISSLQEREATEKLPRVYPVGPLAKIQRTNLTEEESQCLIWLDGQPRVSVLFISFGSGGTLSSDQTNELALGLENSEQRFLWVVRPPNDRAASAAYFKVNSQNESSFDFLPDGFLGRTRDRGLVVHSWAPQAQILSHSSIGGFLTHCGWNSILESMVNGVPMIVWPLFAEQRMNAFMLTEDIKVALRPKASENGVVEREEIARVIKALMEGGEDREKLRKRIEELKEAGSTALTEDGNSTKALADVADVWKSQIRN

SEQ ID NO: 5337 - protein, 480 aa, Glycine max
MSSSEGVVHVAFLPSAGMGHLNPFLRLAATFIRYGCKVTLITPKPTVSLAESNLISRFCSSFPHQVTQLDLNLVSVDPTTVDTIDPFFLQFETIRRSLHLLPPILSLLSTPLSAFIYDITLITPLLSVIEKLSCPSYLYFTSSARMFSFFARVSVLSASNPGQTPSSFIGDDGVKIPGFTSPIPRSSVPPAILQASSNLFQRIMLEDSANVTKLNNGVFINSFEELEGEALAALNGGKVLEGLPPVYGVGPLMACEYEKGDEEGQKGCMSSIVKWLDEQSKGSVVYVSLGNRTETRREQIKDMALGLIECGYGFLWVVKLKRVDKEDEEGLEEVLGSELSSKVKEKGVVVKEFVDQVEILGHPSVGGFLSHGGWNSVTETVWKGVPCLSWPQHSDQKMSAEVIRMSGMGIWPEEWGWGTQDVVKGDEIAKRIKEMMSNESLRVKAGELKEAALKAAGVGGSCEVTIKRQIEEWKRNAQAN

SEQ ID NO: 5338 - protein, 477 aa, Erythranthe guttata
MADSTTTAHIVIIPTPGMGHLIPLIQFSKKLLHHHPYFSATFLIPNHGPPPSAAQITLLSTLPSAVDYLLLPAVTFDDLPPSDDVKIETIISLTAVRSLPSIRAAVKTLIDGGKKIAAFVVDLFGTDVFEVASEFNIPPYIFYPSTAMALSLFLHLPKLDETVSSEYREVAEKLLIPGCIPVHGKELLDPVQDRKNDAYKWLLHHCKRYRMAEGIIVNSFRELEPGPIQALQEKESGNPVIYPIGPLIQTGSRKPEEDNSECLRWLDEQPSNSVLYVSFGSGGTLSHAQLIELALGLEMSGHKFLWVVRCPNDKSLNATYFDIRNSDDPLAYLPEGFLDRIGARGMVQPLWAPQAQILAHKSTGAFMSHCGWNSALESVVNGVPLIAWPLYAEQRMNAVMLHEDVKIALRPEVGESGLVERVEIAKVVKCLMEGEEGDGVRNRVRGLKNDAEKVLSENGSSTISLGELANKWKSTIV

SEQ ID NO: 5339 - protein, 380 aa, Arabidopsis thaliana
MREMKSTVRDAVKSMKQKPTVMIVDFFGTALLSITDVGVTSKYVYIPSHAWFLALIVYLPVLDKVMEGEYVDIKEPMKIPGCKPVGPKELLDTMLDRSDQQYRDCVQIGLEIPMSDGVLVNTWGELQGKTLAALREDIDLNRVIKVPVYPIGPIVRTNVLIEKPNSTFEWLDKQEERSVVYVCLGSGGTLSFEQTMELAWGLELSCQSFLWVLRKPPSYLGASSKDDDQVSDGLPEGFLDRTRGVGLVVTQWAPQVEILSHRSIGGFLSHCGWSSVLESLTKGVPIIAWPLYAEQWMNATLLTEEIGMAIRTSELPSKKVISREEVASLVKKIVAEEDKEGRKIKTKAEEVRVSSERAWTHGGSSHSSLFEWAKRCGLVS

SEQ ID NO: 5340 - protein, 455 aa, Jatropha curcas
MKNPHVLVASFPAQGHINPSLQFAQRLATMGLKVTFATTIGADRRMAKTGIPDNLSFAALSDGNDDGFKPIVNIGNYMTHDLRLHGSQTLRRLIQQASNDGHPFTFVVYSILIPWVAKVAREFHLPSALLWSQPATVFSIYYHYFNGYGEIIEKTINSATLLLNLPNLPVLSVYDLPSFFSPAKSNEYAFVLPVVKEHLEILDEEIKHNPKSAILVNTFDALEVEVLKSIDKYKLVGVGPLLRSGSFGGSLFQESNGYIEWLNSKPQRSVIYISFGSISVMSEQQIEEMAIALEKIGSPFLWVIRENAIVKEKLNKGGLTVPWCNQVEVLSNPAIGCFITHCGWNSTFESLTCGVPMVGFPQWTDQMTNAKLVQDLWKVGVRVVVNEEGIVEAKEIRRCLELVMGDGDGGKEMRKSAKKWKDLAREAINEGGSTDKNVKAFVDVITSVDEVEEGC

SEQ ID NO: 5341 - protein, 478 aa, Striga asiatica
MASDAASRRSPPHNTVAILMVPFPLQGHLNQLLHLSRLISARGLPVHFAAAPSHSRQARLRATTTAHDHHDSTITFHEIPSLPYSSPPPDPNSTTRFPTHLQPLIEATSSLREPVAEILRDLCAANRRVVVVHDSMMGFVVQDFVRYQNAEAYTFHSVSAYAIFLFLWESAGRPFDLPADLLQEKDIPSLDGCFSPEFGSFVQTQHEFIKLNSGRVYNTCRAVEGPFMELIERAEISGGKQQWALGPFNPIGNSERTGVISPGSRHACLKWLDGLESGSVVLVSFGTTTTFPRKQIHELAIGLENSGQKFVWVLRDADVGDGVITKHDDDIIALPEGFEGRVEGRGLVVREWTPQVEILGHEAVGGFVSHCGWNSCMESISMGVAMGAWPMHSDQPRNAVLVTKVLGVGITVREWARRDEIVGAREVEQGVRRLMGPGEGAEVRRRAAELGRAVREAAAEDGGPMRLEWDSFISHIIR

SEQ ID NO: 5342 - protein, 339 aa, Medicago truncatula
MLSYVYFPSSVTSLSSYFYLLKLNKETSCQYKDLLEPIQIPGCVPIHGQDLVDQAQDRSSQSYKFLLERVEKFRLFDGILINSFLEIEKGPIEALTEDRSGNPDVYAVGPIIQTPTKSGDDDNGLKCLAWLDKQQTCSVLYVSFGSGGTLSQEQINELALGLELSNHKFLWVVRSPSNTANAAYLSASDVDPLQFLPSGFLERKKEQGMVIPSWAPQIQILRHSSVGGFLTHCGWNSTLESVLHGVPLITWPLFAEQRTNAVLLSEGLKVGLRPKINQNGIVEKVQIAELIKCLMEGEEGGKLRKNMKELKESANSAHKDDGSFTKTLSQLALKWRNLV

SEQ ID NO: 5343 - protein, 421 aa, Linum usitatissimum
MIPMVDIAKLLATRGAKVTIVTTPVNAARFKSPIRRSNLRIDLVELRFPGVEAGLPEGCENVDLLPSFAYIQSMMKAAAMMEPQEEIARMVGSDQEYFVLPGMPGEIKFSNAQLPLQIWKNGHQDPEEESRRLHVMKVDSEAYGVIVNSFEELEPEYFSEYKNSRQGKIWCVGPVSLTNLDELDKIQRGNYNISLTHESLEWLNTKESKSVLYICLGSICNLSSQQLIELALGLEASETPFVWAIREKGFTKDLFTWITNDGFENRVAGRGLLIKGWAPQLSILSHSSVGGFLTHCGWNSSLEGISAGIPLVTWPLFGDQFSNEKLIVDVLKIGVRIGAEKPTFRSGKEETTEVSVRREDVERAVRLAMEGGKDGDRRRKRTGELAGMAWKAVERGGSSYKNVDLLIQDIAKHQEERRNHG

SEQ ID NO: 5344 - protein, 491 aa, Medicago truncatula
MEGVEVERPLKIHFIPYLASGHMIPLCDIATMFASRGQQVTIITTPSNAQSLTKSLSSAASFFLRFHTVDFPSQQVDLPEGIESMSSTTDSMTSWKIHRGAMLLHGSIEDFMEKDPPDCIISDSAYPWANDLAHKLQIPNLTFNGLSLFTVSLVESLQANNLLHSDTNSDLDSSSFVVPNFPHRITLCGKPPKVISKFLKMMLGTVLKSKALIINNFTELDGEECIQHYEKTTGHKVWHLGPTSLIRKTIQEKAERGKEGDVNMHECMSWLDSEKVNSVLYICFGSINYFSDKQLYEMACAIEASSHPFIWVVPEKKGKEDESEEEKEKWLPKGFEERNIRRMGLIIKGWAPQVKILSHPAVGGFMTHCGGNSIVESVSAGVPMITWPVHGDQFYNEKLVTQFRGIGVEVGATEWCKNGVAEREKLVSRDNIEKAVRRLMENGDEAKNMRLLAQEFGEKATQAIQEGGSSYNNLLALIEELKRLRDPKRHD

SEQ ID NO: 5345 - protein, 470 aa, Medicago truncatula
MVVSEMEKKAELIFIPSPDIGHLVSSLEFAKLLINTHNNIFITVLCIKFPHTPFSDSYIKSVLNLQPQIKLIDLPQVESPPKELLISPPCYIKALMHTLTPHVKSTIQTILSSHSNHVVGLVLDLFCLSMIDVGNELGIPSYLFLTSNVGFLGFMLSLQNRRVDDVFNDYDPELLIPGFTNLVPSSVLPNAAYSKDGGYEAYYNLARRINDTKGIIVNTFSDLEQYSIDALYDHDEKIPPIYAVGPLLDLKGQPNPKLDQSQLDLILRWLDKQPNKSVVFLCFGSMGVSFGPSQIREIALGLKHSGVRFLWAMKSPPRTNNYEEKRLPEGFLEWMELEGKGMICGWAPQVEVLAHKAIGGFVSHCGWNSILESMWFGVPILTWPIYAEQQLNAFRMVKELGLAVELRVDYRIGSKEIVMAEEIEKGLKNLMEKENILLKKVQEMARNAVLCGGSSFISVGKLINIMIGSN

SEQ ID NO: 5346 - protein, 479 aa, Barbarea vulgaris
MGKKEAEAEIIFVTYPIPGHLLVSIEFAKSLIKRDNRIHTITFLHWTVPLSPQSNHFARSLIASEPRIRLVTLPDVQNPPPLELFFQAAEAYILDFNKKIVPLVRDALSTLVSSPDGSDSVRVAGLVLDFFCVPLIQVADELNLPSYIFSTCNAGFVSMMKYLPERHRRLASKLDLSSGDVEHPIPGYVCSVPTKVLPPGQFVKESYEAWVEIAEKFPSVKGILVNSIECLEKNAFDYFARRPENFPPVYPVGPVLSLVDRPSPDLDPSDRNRIMRWLDDQPESSVVYICFGSFGIHGEPQIEEIARALDLAGHRFLWSIRTNPTEKASPYDLLPEGFIDRTACKGLVCDWAPQVEVLAHKATGGFVSHCGWNSVLESLWFGVPIATWPMYAEQQLNAFTMVKELGLAVELRLDYVSAYGKIVKAEEIAGAIRSLMDGKDTLRKNVKEMGEAARKALIDGGSSFVAVKRFLDELIGGGV

SEQ ID NO: 5347 - protein, 490 aa, Citrus unshiu
MGSEIPQLHVFFFPFMAHGHMIPLVDMAKLFATRGVKASVITTPANAPYVSKSVERANELGIEMDVKTIKFPSVEAGLPEGCENLDAITNEVNKGLIVKFFGATMKLQEPLEQLLQEHKPDCLVADTFFPWATDAAAKFGIPRLVFHGTSFFSLCASNCLALYEPHKKVSSDSEPFVMPHFPGEIKLTRNQLPDFVKQDMGDNDFSRLLKAIDDSDLRSYGVAVNSFYELEPAYADHYRKALGRRAWHIGPVSLCNRNFEDKALRGKQASIDELECLKWLNSKQPYSVVYVCFGSLANFTSAQLMEIATGLEASGRNFIWVVSKNKNDGGEGGNEDWLPEGFEKRMEGKGLIIRGWAPQVLILDHEAVGGFVTHCGWNSTLEAVAAGVPLVTWPVAAEQFYNEKMVNEILKIGVGVGIQKWCRIVGDFVKRETIEKAVNEIMVGDRAEEMRSRAKALGKMAKRAVENGGSSYSDLSALIEELRLSRHQSS

SEQ ID NO: 5348 - protein, 536 aa, Stomoxys calcitrans
MIIFKILLILGISWQIAITDGANILGIFTSHSPSHLIVHLSVANVLAERGHNITVVASSQPKIAIHKNITMIVVPLTKEQEVIMHRSMEKMASNNDGFLTLIRNFFGSLKIFIDAQADILKDPRFTKLYESEDTKYDLVMCGFFMNTFQLGVAAKFKAPLIVTWTSAAMSMVGRMVGNPSGVEYVPSHTVNMDKGQVKMNFLQRLKNFLSYTVFDILTFIMDIRMKQIYNDIFQDEDDSFPTLDEMYKNVSLVFCNSHFSEASIKAQVPAVVEIGGIQVKEKPNRLPENLETFIENSSEHGFILFSLGTNVKGSHVKSEIAKRIFNVLSKLKQNIIWKWDDLKHTPGNSSNILYTKWLPQDDILAHPYLKLFITHAGKGGIAEAQYHGVPMLAIPIFGDQHPNALHMVQAGYGLMVNYFTLSEEVLSSSLQEVLHNPIYRENVQRFSRLYRDRPLSARENVAYWTEYVMRHRGATHMQSPLVHMNFIESSNLDVYVVILLILYIMIVICRCGFLFVKRKVCDKKCKKNSKIKNKMN

SEQ ID NO: 5349 - protein, 336 aa, Unknown
  Description of Unknown: Oryza sativa Japonica Group sequence
MPASHLMPELLEDPESETYRATVSMLRATLDADGILVNTFASLEPRAVGALGDPLFLPATGGGEPRRRVPPVYCVGPLVVGHDDDDERKENTRHECLAWLDEQPDRSVVFLCFGGTGAVTHSAEQMREIAAGLENSGHRFMWVVRAPRGGGDDLDALLPDGFLERTRTSGHGLVVERWAPQADVLRHRSTGAFVTHCGWNSASEGITARVPMLCWPLYAEQRMNKVFMVEEMGVGVEVAGWHWQRGELVMAEEIEGKIRLVMESEEGERLRSSVAAHGEAAAVAWRKDGGAGAGSSRAALRRFLSDVGGRELRSVETLLLWAFHEIVVARIGLPLD

SEQ ID NO: 5350 - protein, 473 aa, Vigna angularis
MGHDRQLHVFFFPFFANGHIIPTIELARVFASRGLKTTVVTTPLNEPFISRTVGKANITIKTIKFPSPEQTGLPEGCENSDRLSGMQIIPFLKSTVLLRDPLEQLLQQELPDLIIADMFFPWATDSAAKFGIPRIVFHGLGFFPLCVSACVRKYKPQDKVSSYSEPFVVPNLPGEIMLTKMQLPQTPKHDLEFTKILEEANASELNSYGVIANSFYELEPVYADHYRNELGRKAWHLGPVCLSNRDNAEKVHRGNEATIDEHECLKWLDTKEPDSVVYVCFGSMTTFPNAQLKEIALGLEASGQPFIWVVKKGSSENLEWLPEGFEERTVDQGKGLIIRGWAPQVMILDHIAVGGFVTHCGWNSAMEGVCAGLPMVTWPMYAEQFYNAKFLTDIVKIGVSVGVQTWIGLMGGKPVKKEVIEKALKRIMVGDEAEEIRNRAKDIAKMAKRAVEEGGSSYSDFNSLIEDLRSRTL

SEQ ID NO: 5351 - protein, 472 aa, Sesamum indicum
MASHHVLLVTFPVQGHINPALQFAKKLINMGIEVTFATTVLARQRMEKAAASSLPKGLTFAAFSDGLDDGFKASNDPQKYMREIRRRGTKSLKDTVLSAAEQGRPITCLIYTLLLPWASEVAREVHIPSALLWIQAATVLDIYYYYFNGFGDEIIASSNDPSWKLQLHGIPILLSQCDLPSFMLPTSSDNYSFALTVFKEQLETLDAETKPKVLVNTYDSLEPDALKAIDRYELIGIGPLIPSAFLDGKDASDTSFGGDLFQKSDDCIGWLNSMPKSSVIYVAFGSILSLPRAQMEEIAKGLLDSSRPFLWVIRVNEKANEEKKEEDEKLSCIEELEKAGRIVPWCSQLEVLTHPSLGCFMTHCGWNSSLESISCGVPMVAFPHWTDQCTNAKLIEDVWRTGVRVRRNEDGVAESSEIRRCIEEVMDGGEKSRELRENVEKWKGLAREAVEENGSSNKNLKAFLEGVGAAGC

SEQ ID NO: 5352 - protein, 472 aa, Citrus unshiu
MSDSGGFDSHPHVALIPSAGMGHLTPFLRLAASLVQHHCRVTLITTYPTVSLAETQHVSHFLSAYPQVTEKRFHLLPFDPNSANATDPFLLRWEAIRRSAHLLAPLLSPPLSALITDVTLISAVLPVTINLHLPNYVLFTASAKMFSLTASFPAIVASKSTSSGSVEFDDDFIEIPGLPPIPLSSVPPAVMDSKSLFATSFLENGNSFVKSNGVLINSFDALEADTLVALNGRRVVAGLPPVYAVGPLLPCEFEKRDDPSTSLILKWLDDQPEGSVVYVSFGSRLALSMEQTKELGDGLLSSGCRFLWVVKGKIVDKEDEESLKNVLGHELTEKIKDQGLVVKNWVDQDKVLSHRAVGGFVSHGGWNSLVEAARHGVPLLVWPHFGDQKINAEAVERAGLGMWVRSWGWGTELRAKGDEIGLKIKDLMANDFLREQAKRIEEEARKAIGVGGSSERTFKELIDKWKCNNNTH

SEQ ID NO: 5353 - protein, 469 aa, Unknown
  Description of Unknown: Oryza sativa Japonica Group sequence
MSPTPRPHFLVLTFPLQGHIAPALRLARRLLAAAPDALVTFSTAAAAHRRMFAEGEGGDGDGRLELLPFSDGTENGFVKRGDAAELGAYMASFHASGRRSVGEMVDALAARGRPVSSVVYTLLLPWAADVARDRGVPSALYWIQPVAVLAIYCHYFHGLGGVVDEHRRDHSFVLEFPGLPPMAAGDLPSFLTEATDPSDYFHSIFTTFRDLFDALDRETPKATVLVNVFQELEADTLAAVGAYDVLPIGPVLPSGDDAALFKQNDAKYMEWLDTKPAGSVVYVAFGSLTVMAKGQVDELLHGLEESGRPYLCVVRKDNKAAVAETGDATAAAAARRNGVVVEWCDQVRVLSHAAVGCFVTHCGWNSVLESIASGVPMVGVPRMSDQQMNARLVERDWRVGVRAEVDGGDGVLRAAELRRRVEEVMGDGEAAEVRRSAAAWKRAVAEALGKGGSSDRNLTAFVEGARSVI

SEQ ID NO: 5354 - protein, 316 aa, Citrus unshiu
MIAHGTIANGYLNTVIDWIPGMKGIRLSDIPSFVRTTNPDDIVLNFILAETERSKRASAIILNTYHELEQEALDALTSLLLPPVYSIGHLQFQLNQIPENDSIMRIGSNLWKEETECIDWLDTKEPNSVVYVNFGSITVMTANQLIEFAWGLANSKQTFMWVIRPDLVVGDSAILPPEFVTETKERSLLASWCPQEQVLNHPAIGGFLTHSGWNSTLESICGGVPLICWPFFAEQQTNCRYSCREWGIGMEIDSNVKREEVEVLVRDLMVGEKGQEMKLEALELKKKAIEAATGPAGSSYVNLEKLITHVLLSPTN

SEQ ID NO: 5355 - protein, 445 aa, Helianthus annuus
MANNTFAELVFIPAPAVGHVMSTIEMAKVLLNRDQTLSVTLLIIYPPYSYIESLAKNVIERIRFIKLPQDQPPSKLVSKAPFMSFYEFINSHCKYVRNILEDAINQIGSRRVVGLVVDILSMFSKPDRTSNRSSYRFSGPTGQTGHVYFTSNAAFLGFKLHFETLFVDQKQDLIELANSESEIVIPSFVNPVPMKVFPEVYQKQDGLDFLICAIGRIRKAKGILINTFLELETHVINWFSRINFPPVYLVGPILNLAGVSTAVFSARCLEQSGHRFVWSLRRLPPPEQSFQVFPDDFDDPRGVLPDGFLERTLGIGKVIGWAPQVSLLAHEAVGGFMSHCGWNSMLESLWFGVLMATLPMLWEQQMNAFEMVVELGLVVDLNSEGDVVIMMTKEIERGIRRLMENKEVRTKVKEMSKMSRETVVKGGSSHSFVGYLLKEIMSNVI

SEQ ID NO: 5356 - protein, 476 aa, Unknown
  Description of Unknown: Oryza sativa Japonica Group sequence
MAAASPELRHVAMLPFMAKGHAMPLLHLTRLLLARGLASKVTFFTTPRDAPFIRASLAGAGAAAVVELPFPTDDGLNDGAAPPQSMDDELASPSQLADVVAASAALRPAFAAAFARLEPRPDVLVHDGFLPWAELAAADAGGVPRLVSYGMSAFATYVAGAVTAHKPHARVGSPSEPFEVDGLPGLRLTRADLNPPIDEPEPTGPLWDLACETKASMDSSEGIIVNSFVELEPLCFDGWSRMSPVKLWPVGPLCLASELGRNMDRDVSDWLDSRLAMDRPVLYVAFGSQADLSRTQLEEIALGLDQSGLDFLWVVRSKWFDSEDHFENRFGDKGKVYQGFIDQVGVLSHKSIKGFFSHCGWNSVLESISMGVPILAFPMAAEQKLNAKFVVDMLRVGLRVWPQKREDDMENGLVAREEVQVMARELIFGEEGKWASTRVSELAVLSKKAMEIGGSSYKKLEEMVHEISELTRDKSM

SEQ ID NO: 5357 - protein, 491 aa, Unknown
  Description of Unknown: Oryza sativa Japonica Group sequence
MAIKDEQQPLHILFFPFLAPGHLIPIADMAALFAARGVRCTILTTPVNAAVIRSAVDRANDSFRRNNGGLAIELTVVPFPDVGLPPGFESGTALTTQDDRDKFFLGIRLLHEPFDRYLSEHHVDAAVVDSFFRWAADAAAEHGVPRLGFLGTSVFARACTNSMLRNNPLETAPDDPDAVVPLPGLPHCVELRRSQMMDPKKRPDHWEKFQSLDAADQRSFGEVFNSFHELEPDYVEHYRTTLGRRVWLVGPVALANKDVAVRGTSELSPDADGYLRWLDAKPRGSVVYVSFGTLSSFSPAEMRELARGLDLSGKNFVWVINGADADASEWMPEGFAELIAPRGERGLTIRGWAPQMLILNHPAVGGFVTHCGWNSTLEAVTAGVPMVTWPRYADQFYNEKLITEVLEVGVGVGSMDFASKLENRRVIIGGEVVAGAIGRVMGDGEEGEAIRKKATELGVKARGALEKGGSSYDDVGILMDELMARRGSVNV

SEQ ID NO: 5358 - protein, 451 aa, Helianthus annuus
MKGHQKNKVLIIAYPTQGHINPSLCFATRLLKFGVNVTFCTSFYAIRRIDTQTTHHGLTLAPIFDRHHNGQQPTLQQFFSDFATNGVCAVDEIIRSATATSQPFDHLVYTTVVPWATQVAAAHSLESTLLWCQPATLLDIYYYYFNGYQDLISCNNNPTFPINLPGLPPITTSDLPSILLSSCPKEQQFIVQILKDHIDAVKIAPRILVNTFDELELEPIRAIEKLVMLPVGPLMPLELLDGRGPSNNSFSCDLFEKPEEDYVKWLSTKPKLSVVYASFGSLSTLSIDQAEEMASGLLESGRPFLWVIREGDQLVKLSKIDELKKQGMIVSWCSQVEVLNHEAIGCFLTHCGWNSTIEALVAGVPTIAFAQWSDQVTNAKMIEDVWKTGVKVKRRERDGMVEGNEIKRCVEIVMQDREMRRNAEKWRELARKALNDGESSTLNLQAFLYDP

SEQ ID NO: 5359 - protein, 496 aa, Vitis vinifera
MGSKDDELHVMFLPYMAPGHMMPLVDMARLFAAHGVRITIITTTMNAFRFQNAIHRDIEAGRQIGLEILQFPSVEAGLPEGCENLISTPTPEMSMKLFQAIRMMKPRMETLLRNHRPDCIASDVLFHWTVDVAAELGIPRLSFSGSGYFNLCVSHCVERYQPHKDVSSETEIFLVPGLPDEIKLTRSQLPDLVKGRNEFSELFDRLKEAERKSFGTLMNSFYELEPAYADYYRNNIGIKAWHIGPVSLFNKDAADKAERGNKASLDEDSWLSWLDSKKPNSVLYVCLGSLTRLSKTQLTEIASALEDSGHAFIWVVGKVLNSSGEEDGSHEWWLPEGFQERAYQSGIGHIIRGWAPQVLILEHPAIGGFLTHCGWNSILEGVSSGLPMITWPIFAEQFYNEKLVTQVLKLGVGVGNEVWKVWATEEMPLMSREKIRRAVTMVMDQGIAADEMRRKASLLGELAKKAIEKGGSSYNQLKALIKEIRSFRQPPLCRNL

SEQ ID NO: 5360 - protein, 550 aa, Caenorhabditis briggsae
MTPNNIFSLLVLVAFTDSLKILVYSPAFAGSHTNFMARIADTLTESGHNVTFFVPIFDDNRSNQLGVKLTKNVIKMERSEEMKLDPVTMDNVTSSFWNINVNSKEGHSLFDPVHKLTVQSCRSLFSNAELLATLRSHEYDVGISEPMMTCSLALFRHLGIQKTILASSCPNFDVVMAAMGEPAETSYVPGKILTCYNHQIHGITITTYSFTIYSSVSGDRMDFADRLENYDMYHFMVKRYGQVFDDEAKVYRSFLGQDFPDWRELIPDASVHFTNSISYLDFPRPSIQKTIDIGGITVDVEQIESQKLSNEFNAILDKQEKTMFISFGSMAKSFEMPQNYKENLLEVFKSEPNVTFIWKYESNNVSFAEGLDNLELVKWAPQTTLLNDKRMSAFLSHGGLGSTIETVFFGKPTIMIPIFFDQFRNSHMLSRLGTSVTLLKTDLGNLDKLKSAFHKILHNDSFRKNAGHVADVVRNQPIKPKELVVKYTEFVGNHGPFHHMTPYSLKMPWFQRHGYDVLLYKSTFYLLPSFLFLASFRKFVFSRNEIPASR

SEQ ID NO: 5361 - protein, 488 aa, Unknown
  Description of Unknown: Oryza sativa Japonica Group sequence
MADAIGGGGRRRRLRVFFLPFFAKGHLIPMTDLACRMAAAGPEEMDATMVVTPGNAALIATAVTRAAARGHPVGVLCYPFPDVGMERGVECLGVAAAHDAWRVYRAVDLSQPIHEALLLEHRPDAIVADVPFWWATDIAAELGVPRLTFSPVGVFPQLAMNNLVTVRAEIIRAGDAAPPVPVPGMPGKEISIPASELPNFLLRDDQLSVSWDRIRASQLAGFGVAVNTFVDLEQTYCHEFSRVDARRAYFVGPVGMSSNTAARRGGDGNDECLRWLSTKPSRSVVYVSFGSWAYFSPRQVRELALGLEASNHPFLWVIRPEDSSGRWAPEGWEQRVAGRGMVVHGCAPQLAVLAHPSVGAFVSHCGWSSVLEAASAGVPVLAWPLVFEQFINERLVTEVVAFGARVRGGGRRSAREGEPETVPAEAVARAVAGIMARGGDGDRARARARVLAERARAAVGEGGSSWRDIHRLIDDLTEATASPEPQLQ

SEQ ID NO: 5362 - protein, 484 aa, Unknown
  Description of Unknown: Oryza sativa Japonica Group sequence
MDAGDAATTRARKPVVLYPSPGMGHLVSMIELGKVFAARGLAVTVVVVDPPYGNTGATGPFLAGVTAANPAMTFHRLPKVEVPPVASKHHESLTFEVTRLSNPGLRDFLAGASPVVLIIDFFCNAALDVADELGVPAYMFYTSGAEILAFFLYLPVLHAQTTANFGEMGEELVHAPGIPSFPATHSVLPLMERDDPAYAEFLKASADLCRTQGFLVNTFRSLEPRAVETIAAGSCAPPGVSTPPVYCIGPLIKSAEVGENRSEECLAWLDTQPNGSVVFLCFGSIGLFSAEQIKEVAAGLEASGQRFLWVVRSPPSDDPAKKFDKPPEPDLDALLPKGFLERTKGRGLVVKSWAPQRDVLAHAAVGGFVTHCGWNSVLESIVAGVPMLAWPLYAEQRMNRVFLEKEMRLAVAVEGYDDDVGEGTVKAEEVAAKVRWLMESDGGRALLERTLAAMRRAKAALRDGGESEVTLARLVESWREAASA

SEQ ID NO: 5363 - protein, 475 aa, Indigofera tinctoria
MEVTKHEEKTTMGMVAMLPSPGMGHLIPMIEFAKRLVLNHNLAVTFIIPTDGPPSKAQKTVLQSLPPAISHTFLPPVNLSDVPKNAMIETIISLTVLRSLPSIRDLFRSLAASALVVDLFGTDAFDVAKEFNVSPYIFFPSTAMVLSFFLHLPHLDQEVHSEYRELAEPVKIPGCVPVHGKDLLAPVQDRKNDAYKWVLHHTKRYREAEGIIENSFLELEPGPIKELLKEHSVKPPVYPVGPLVNVETGRAGNRSECLKWLDEQPHGSVLFVSFGSGGTLSSAQINELALGLEASEQRFLWVVRSPNDKVANASFFSADSHADPFDFLPKGFVERTKQRGLVVSSWAPQPQVLAHGSTGGFLTHCGWNSILESVVNGVPLIAWPLYAEQKMNAVMLTQDTKVALRAKDGDGGLVEREEIASVVKCLMEGEEGKKVRYRMKDLKEAAAKTLGENGASRNHISNLAQKWKNKATVTN

SEQ ID NO: 5364 - protein, 484 aa, Barbarea vulgaris
MKSELVFIPYPGIGHLRPTVEVAKLLVDREPRLSISVFILPFISGDEVGASDYISALSAASNDRLRYKVIFTGDQETAEPTKLTLHIENQVPKVRTAVAKLIDEYSKLLDSPKIVGFVLDMFCTSMIDVANEFELPSYMFFTSSAGILAVSFHVQVLYDEKKCNFSETMFEDSEAELILPSLTRPYPVKSLPYALFRTEMLIMHVNLARRFRELKGILVNTVDELEPHALKFLLSGITPPAYPVGPLLHLESNQDDESEDEKRSEIIMWLDEQPASSVVFLCFGSMGGFSEEQTREIAIALERSGHRFLWSLRRESPNIDKELPGEFTNLEEVLPEGFFDRTKGIGKVIGWAPQVAVLENPAIGGFVTHGGWNSVLESLWFGVPTAMWPLYAEQKFNAFVMVEELGLAVEIKKYWRGDLLLGRSAMEIVTADEIERGITCLMQQDSDVRKRVKEMKGKCHVALMDGGSSTLALDKFVEDVTKNI

SEQ ID NO: 5365 - protein, 481 aa, Oryza sativa
MAPAANGGAAAAHVLVVPFPAQGHLIPLLDLAGLLASRGLRLTVVCTPATAPLLAPLLAATHQGAVSALTLPFPSHPALPAGVENAKGSGPALFAKLIVAFAGLRGPLGTWARARADTPDRVVAVLSDFFCGWTQALADELGVLRVVFSSSAVYGTAVLHSMFRLMPKREDEHDDECPVSFPDIPGSPSYPWRQLSLLYRFYKAGDEVSEGVKNNFLSNMGSSCIVSNTFRQLEGRYLERPLADLGFMRLRAVGPLAPEPDASGNRGGETAVAASDLCAWLNQFADGAVVYVSFGSMAVLQPPHAAALAAALEWTGTAFVWAAGSHAAAALPEGFEERAAAGGRGKVIRGWTPQVPVLRHRAVGRFVTHCGWNSVLEAVAAGVAMLTWPMTADQFVNARLLVDEHRAAVPVSWGGIAVPPSADEVARVFEATSAAAAASEWSEVGARVKELAGEAAAATREGGSSWREVDELARELRELGG

SEQ ID NO: 5366 - protein, 469 aa, Ricinus communis
MKKPELVFVPIPGAGHLTSAVEAAKLLLDRDARLSISILILRRSSDSKVVSDLIDSLTATITSHRIQFINLPNEESESMGLDFIEKYKPHIREAVSKLATRSDFTLAGFVLDMFCMPVIDVANEFGVPSYVFFTSGAAFFGFMLHLRALHDEQEVDPTQFKNSDDELALPCFVNPLPARVLPSVLLEKESMPAFLEMSRRFREAKGIIVNTFMELESSAINSLSDGTIESPPVYPVGPILNLKGGDSVGSAESKEIMEWLDDQPPSSVVFLCFGSMGGFREDQAKEIAFALERCGQRFLWSLCQPLPMGKMTGYTDCQNLEGFLPEEFLDRTAGIGKVIGWAPQVAVLAHPAIGGFVSHCGWNSTLESIWYGVPIATWPMYAEQQFNAFQLVTELGLAVEITVDYRKDSDVIVKAADIERGVRCVMEQDSEIRMKVKEMSEKSRKVLMDGGSAFSSLNRLIEDAIDNMP

SEQ ID NO: 5367 - protein, 202 aa, Rosa chinensis
MVVGQFSIVDEADWILCNTFHELEPEVVDWMSKLWPLKTIGPTIPSMYLDNRLKEDKDYGGSLFKQNNDACMKWLNEQPKVSVVYVSFGSGAELGAEQMEELAWGLRSSKSNFLWVVRESEAGKIPKGFVEETSENGLVVSWCPQLEVLAHEAVGCFITHCGWNSTLEALSLGVPLLAMPQWTDQGTNAKYIMDVWKLDLKL

SEQ ID NO: 5368 - protein, 499 aa, Oryza sativa
MCDSPSSSSCSSLSLALAMGERMRRAAHAMLFPFPCSGHINPTLKLAELLHSRGVHVTFVNTEHNHERLLRRRGGGGALRGREGFRFEAVPDGLRDDERAAPDSTVRLYLSLRRSCGAPLVEVARRVASGGGVPPVTCVVLSGLVSFALDVAEELGVPAFVLWGTSACGFACTLRLRQLRQRGYTPLKDESYLTNGYLDTPIDWIAGVPTVRLGDVSSFVRTLDPTSFALRVEEDEANSCARAQGLILNTFDDLESDVLDALRDEFPRVYTVGPLAADRANGGLSLWEEDAACMAWLDAQPAGSVLYVSFGSLTVMSPEELAELAWGLADTRRPFLWVIRPGLIAGAGAGDHDVVTNALPDGFVAETKGRCFIAEWCAQEEVLRHRAVGGFLTHSGWNSTTESICAGVPMICWPGFADQYINSRYVRDEWGIGLRLDEELRREQVAAHVEKLMGGGGDRGKEMRRNAARWKAAAEAATAKGGSSYGGLDKLVEQLRLGQ

SEQ ID NO: 5369 - protein, 493 aa, Siraitia grosvenorii
MEATQRDGGAQSPTPHVVMLPSPGMGHLIPLLEFAKRLLFLHRFTVTFAIPSGDPPSKAQISILSSLPSGIDYVFLPPVNFHDLPKDTKAEVFIVLAVARSLPSFRDLFKSMVANTNLVALVVDQFGTDAFDVAREFNVSPYIFFPCAAMTLSFLLRLPEFDETVAEEYRELPEPIRLSGCAPIPGKDLADPFHDRENDAYKLFLHNAKRYALADGIFLNSFPELEPGAIKALLEEESRKPLVHPVGPLVQIDSSGSEEGAECLKWLEEQPHGSVLFVSFGSGGTLSSDQINELALGLEMSGHRFIWVVRSPSDEAANASFFSVHSQNDPLSFLPEGFLEGTRGRSVVVPSWAPQAQILSHSSTGGFLSHCGWNSTLESVVYGVPLIAWPLYAEQKMNAILLTEDIKVALRPKTNEKTGIVEKEEIAEAVKTLMEGEDGKKLRSKMKYLRNAAERVLEEDGSSSKALSQMVLKWKSKISGQKNCQTKFAFLES

SEQ ID NO: 5370 - protein, 470 aa, Solanum chilense
MGHLVAAIEIGKLLISRANWLSIVFFVIDLPIETRVHTYTNQSNQRLQFLHLSSPKTQTNHLSNRETLLVETFNNSKELVRNAIIQNFMTTSLVGVVVDMFSDKMIQVATELGLPSYVFFTSSAAFLGLMFYAQILKDEHNQDISDFKNSDTLLPVSTYIHPLPAKVLPNAMLDKIGRLHLPLSTARMLRKVKGIIINTFVEFELHSINTLDNDDGVPVLYPIGPIINLKQEPDESINSWLDEQQDSSVLFLCFGSYGSFDEEQLKEIAVALDRSGCRFLWSLRQPQGKGEIGASDDVARPEQVLPDGFLTRSMNRGKVIGWAPQVAVLSHRSIGGFITHCGWNSILESLWFGVPIATWPMYAEQQVNAFEMVVDLEIAVDIKMEYRSESPVLVTAEEIECAIRRLMFDSKEEKNGIRKKMEELKEKSRKTLLEGGSSYCFLESLINEFKDQSRVRKDTIPETNSTIKTS

SEQ ID NO: 5371 - protein, 479 aa, Unknown
  Description of Unknown: Fragaria x ananassa sequence
MKKASELIFIPIPGIGHIVSTVEIAKLLLCRDDNLFITILIMKFPFTADGSDVYIKSLAVDPSLKTQRIRFVNLPQEHFQGTGATGFFTFIDSHKSHVKDAVTRLMETKSETTRIAGFVIDMFCTGMIDLANEFGLPSYVFYTSGAADLGLMFHLQALRDEENKDCTEFKDSDAELVVSSFVNPLPAARVLPSVVFEKEGGNFFLNFAKRYRETKGILVNTFLELEPHAIQSLSSDGKILPVYPVGPILNVKSEGNQVSSEKSKQKSDILEWLDDQPPSSVVFLCFGSMGCFGEDQVKEIAHALEQGGIRFLWSLRQPSKEKIGFPSDYTDYKAVLPEGFLDRTTDLGKVIGWAPQLAILAHPAVGGFVSHCGWNSTLESIWYGVPIATWPFYAEQQVNAFELVKELKLAVEIDMGYRKDSGVIVSRENIEKGIKEVMEQESELRKRVKEMSQMSRKALEEDGSSYSSLGRFLDQIQTS

SEQ ID NO: 5372 - protein, 477 aa, Medicago truncatula
MSNSKTHILIFPYPAQGHMLPLLDLTHQLALQTTITTLTFTIIITPKNLPILNPLLSTHPNTIQTLILPFPSHPKIPQDAENIRHVGNTGNYPFINALSNLQSPIIHWFNTHPNPPVALISDFFLGWTHQLATRLNIPRLAFYSISSFLISVINCCWSNSNSSTQLLKKKNDEVVQFSDIPGTPEFKYEHLPSLILRYKESDPESEFVRDSFISNAASWGFILNTCKALDGPYLDHIRAEFGGNQRVFAVGPLSSIRVDANLDGGSDVLRWLDQLEEDGSVLYVCFGSQKLLKKEQMEALAFGLERSGTPFVWVVKEPSTAEQLEEGYGLVPEGFEDCVSGRGIVVRGWAPQMAILGHRIVGGFLSHCGWNSVLEAVVAGVGILGWPMEADQFVNARLLVEDMGVAVRVCEGADSVPNPDVLGRVVSGVMTGDSPQKRRAKLMREEVVGAVSKGGVSSKELDELIQVLKQLGVKEGS

SEQ ID NO: 5373 - protein, 488 aa, Cephalotus follicularis
MSNMEPHLLPPRVLLFPLPCQGNVNSMLNLAQLLSLAGLHVTFLNSDHNHDRLVRYTDIQARFTCYPGFQFKTITDGLPVEHPRNGESFMEMCYALNSVTRPLFRDMLVSGQFGLVNCIIADGIMGYTIDVADEVGIPIFHFRSISACCFWACFSIPQMIEAGEIPIKGNEAMDVLIRSVPGMETFLRSRDLPSFCRSSDVSNPSLQLIMTETRQSPRARALILNTFEDLEGPILSQIRTQCPTTYTIGPLHAHRKTRLAKHATNTLQRSSNSSSLWEVDRSCMTWLDQQPLQSVVYISFGSLAVLTRDQLIEFWYGVVNSKKNFLWVRRLDSTPGNKEGESEDIPVELVEGTKERGYMVGWAPQEEVLAHKAVGGFLTHSGWNSTLESIVAGVPMVCWPYFFDQQLNSRFVSEVWKLGLDMKDLCDRTIVEQMLNDLMVERRQEFVKSTAEMARLSRKSVSEGGSSYSNLDRLIKDIRLISMETPKC

SEQ ID NO: 5374 - protein, 296 aa, Helianthus annuus
MPGIRLKDIPPFVRVVHPGDEFMVGFSQRELKRAKSASAIIFNTFDELEDDILDTLSLMFPLCYGIGPVHLLETNNVDRSLDIIKSNLWIEDPKCLKWLDGKEPLSVVYVNFGSITVMTPQQLVEFCWGLAKSNYSFLWIIRPDLVIGDSAVLPPEFLAETSSRGLLASWCPQEQVLNHPSIGGFLTHSGWNSTIESISSGVPMICWPFFADQQPNCWWSCNKWMIAMEIDNNVKSDEVSKLVIELMSGERGNEMRKNAIAWKNKAKEAKEACTFPSGSSVVNLDKLIHLLQSSPK

SEQ ID NO: 5375 - protein, 259 aa, Citrus unshiu
MSLENSLKLLYPLNPISRYSSLILLMNKMATNRFVSSQICSLVNLPHRSTDSDEFLLPDFPEASTIQVNQLAYYLRVADGSDSISTVLQKVLPERTNADGILVNTIEELDKIGLEAKLEPAKEHGISAELCKNWLDTKSCISVLYVSFGSQNKIAVSQKMQLAMALDASGKNFIWIVRPPIGFDINSEFKANEWLPRGFEERVKGQGLVVHKWAPQVEILSHKSISAFLSHCGWNLICARSFVSWGADNWVAIGSRAVL

SEQ ID NO: 5376 - protein, 262 aa, Citrus unshiu
DRFLKAIDLSCKLVLIKTSRDIESKYLDYFSYITKKETIPVGPLVQEPVYTDNNDDTEIMDWLSRKEPSSVVYVSFGSEYFLSQEEMNEIASGLLLSEVSFIWVVRFHSEGKFTIEEALPQSFSKEIQGNNKGMVVQGWAPQAKILGHGSIGGFVSHCGWGSTVEGIMYGVPIIAVPMVLDQLFNAKMVADIGVGLEVPREEINQRVRKNDLARVIKQVVEQEEGQQIKRKAKELSESIKKKGDDEEINVVEKLLQLVKAPS

SEQ ID NO: 5377 - protein, 481 aa, Cleretum bellidiforme
MSKIELVLVPTPGMGHLLSAVELSKLIIRRENRISVLILILSFPFDSGLVNAYVDFQSRDPDNSGSLTFITLPPLSNIPDCTSSTFFTTVIELHKPNVKQVVEERVRSGSPKPAGFVIDMLCPAMMDVAEELEVPSYILFTSGANLLNVVFHFLSLADNGVDIATEVNDPDKEVDVPGFRNRVPCKVLPLPFLEKDFLVKRGRRFRRSNGILVNTSNELESYAIQTLLEQAKDNKIPPVYPVGPILELNSKSRCGTKEDEEVSIMRWLDEQPVNSVLFVCFGSMGTFDEDQVKEIANGLEQSGYCFLWSLRQPPPEGKATPSEEAFLDTLPEGFVERTSHKGKIIGWAPQVSILAHKAVGGFVSHCGWNSTLESLWFGVPMATWPISAEQQLNAFELVKEFGMAVEIRMDFWRDCRKNTQSFVVTSEEIENGVKKLMSMDEEMVEKVKKMSDKSRKTLEDGGSSHHSLGRFINDLLENAGF

SEQ ID NO: 5378 - protein, 472 aa, Jatropha curcas
MDSERAIKPHVILVPFPAQGHINPFMQLAKLLHSRGLYITFVNTEFNHSRLVRSKGQEAVKGLPDFRFETIPEGLPPSDKDATQDPAALCDSIRKNCLVPFLELLSKLNSSSQVPKVSCIISDGIMSFCIKAGEMLGIPAVQFWTASACGLMGYLQYGEFIKRGIIPFKDESFLTDGTLDTPIDWIPGMSNIRIKDIPSFVRTTNIEDTLFDYLKSESENCLKASAIIFNTFEEFEHEVLAAISAKFPHIYSIGPLTLLERRLPETELKSLRPSLWKEDSNCLEWLNKREPSSVVYVNYGCVTVMTEQHLKEFAWGIANSKYPFLWIIRPDVVMGNSATLPEDFLEEIEDRGYLASWCPQDQVLSHPSIGVFLTHCGWNSSMESVCGGVPVICWPFFGEQQTNCRFACTTWGIGLEVNGDVKSYEIEALLKEMMENDNGKKMKQKALEWKRKAGGSSNSDFERFMKDFLHFD

SEQ ID NO: 5379 - protein, 484 aa, Sorghum bicolor
MSSGKAQQRPHAVLIPQPAQGHVTPMLHLAKALHARGFRVTYVNSEYNHRRLLRSRGQDSLAGTDGFRFEAVPDGLPQSDNDDVTQDIAALCLSTTEHSAAPFRDLLARLNATPGSPPVSCVIADGVMSFAQRVAEEMGILALVFWTTSACGFMGYLHFAELIRRAYVPLKDESDLSNGYLDTAIDWIPGMPGIRLKDIPSFIRTTDPDDVMLNFDGGEAQNARKARGVILNTYDALEQDVVDALRREFPRVYTVGPLATFANAAAGGGLDAIGGNLWKEDTSCLRWLDTQRPGSVVYVNFGSITVMTAAQLAEFAWGLASCGSPFLWVIRPDLVSGENAMLPEGFVTDTKERGILASWCPQELVLSHPSVGLFLTHCGWNSTLESICAGVPMLCWPFFAEQPTNCRYVCDKWGIGMEIDSDVRRQEVARLVREAMDGERGKAMRLKSMVWKEKARQAVDEGGSSRKNMDRMVEFLLAGNDVPS

SEQ ID NO: 5380 - protein, 499 aa, Theobroma cacao
MNKFHVVFISAPGIGNFVPTVEFARHLNNHDPRFIVTILMIEIAERPIVNAYIQSCVATHTSINFINLPPVDPPSPDEYQTSLGYICLLIAKHKLHVKNAIEDLMSTESPSDSDMVDVRVAGLVVDMFCTSMIDVAKELGIPCYLYFTSPVSFLGFMLYFPTLDGIFTTEFVDSDSGLMVPKDSAAANTSELTIPGFANPLPHLMLPNRVLYRKQEGYFWFLHHARRYKETKGMVVNTFRELEPYAIDSVSNGNGDWPPIYPIGPVLDLVGPAQWHPERAQHDSIVQWLDNQPPSSVVFLCFGSMGSLSGAQLREIAVGLERSGFRFLWSIREPPKRELDLPGEYKNGEEIEMLPQGFVDRSRSAGIGLVCGWVPQAVILGHQAIGGFVSHCGWNSILESIWYGVPIATWPLYAEQQMNAFQLVKELELAVEIRLDYREGSDLVSPEELERALRRLMKGNDEVRRKMREMKQKSRAALMPNGSSYKSLASLIEELTAGT

SEQ ID NO: 5381 - protein, 472 aa, Unknown
  Description of Unknown: Oryza sativa Japonica Group sequence
MTTKTFVLFPSLGVGHLNPMVELAKHLRRRGLGVIVAVIDPPNNDAMSADAMARLAAGNPSVTFRILPAPASPDPGAHHVKRNLDTLRLANPVLREFLRSLPAVDALLLDMFCVDALDVAAELAIPAYFFFPSPASVLAVFSHLPYYYRNAPSLREMDKAALIRFPGIPPIRNVDMLATVKDKESETTKIRLYQFKRMMEGKGVLVNSFDWLEPKALKALAAGVCVPNEPKQRVYFIGPLVDARKKVGSGAERHACLAWLDAQPQRSVVFLCFGSQGAFPAAQLKELAHGLESSGHRFLWTVRSPPEEQSTSPEPDLERLLPAGFLERTKGRGMVVKNWVPQAEVVQHEAVGAFVTHCGWNSTLEAIMSALPMICWPLYAEQAMNKVIMVEEMKIAVSLDGYEEGGLVKAEEVEAKVRLVMEAEEGRKLRERLVETRDMALDAIKEAGSSEVAFDEFMRDLEKSSLENGVRS

SEQ ID NO: 5382 - protein, 479 aa, Medicago truncatula
MEYQQQSRTTPKQELPPLVAMFPTPGMGHLIPMVEFAKRLSKHNLPITFIIPNDGPPSKAQTTVLTSLPHGISHVFLPPITLSDLPPNTKPETLMTATTVRSLPSLHQTLLSLMTSHRLSALIVDLFGTDVFDMAAELDIPSYLYFPTNANNLSFAFYFPQLAQRVQGEFRDIPEPLNIPGCFAFHGKDLADPVQDRNDEAYKCFLHHVTRYKLAKGIIENSFLELEPEAITFLKKNEPPVYPVGPLVNEDSINNGSEFDVCFQWLDEQPRGSVIFVNFGSEGILTSAQTDEIAYGLEMSEQRFLWVLRCPKDKVENDSNFIANSNVDPFEFLPNGYIERTKGKGLVLPYWAPQAQVLSHISIGGFVSHCGWNSTLESVVNGVPLIAWPLYAEQKMNAVLLSENVKVAIRPKVGENGLVQREEIASVVKRLMVGEEEQKIRYRMKDLKEAAINALKENGSSTKQICELALKWKGVTIPN

SEQ ID NO: 5383 - protein, 499 aa, Dorcoceras hygrometricum
MATQSHKLHFILFPLMAPGHMIPMKDIAKLLAQRGVVVTMITTPLNAKRFSPTIDRATESGLEIHLVEIRFPSSEAGLPEGCENLDSLPSLDLASNFFVALGLLQKQVGDLFEELEPRPNCLISDMGLPWTTQIAEKFRIPRIVFHGTCCFSLLCSHNIVSSKILDSLSSDSEQFEVPNLPDSIRLRKFQVTGSTKRDSSAIKDVTDQIRAAEKTSFGVVVNSFQELEAAYVKEYSKAKGERVWCIGPVSLCNKNGLDLVDRGNKASINEQDCLKWLNSQEPGSAIYASLGSLSRLIAPQMIELALGLEESNRPFIWSLGGGDKTGELDRWILENGFEERVNGRGLIIRGWAPQVLILSHEAIGGFLTHAGWNSTLEGISAGVPMVTWPLFAEQFCNEKLVVEVLKIGVGIGVETPVKWGEEEKVGVLVRSDDVKKALELLMDGGENGEERRRKARELAEMAKKAINGGSSYGNMTSLIEEIMAKSNVDETSGQETLPV

SEQ ID NO: 5384 - protein, 473 aa, Vigna angularis
MEAEAVVAMVPSPGMGHLIPMIQFAKRLCRHHNLRINFLIPTNAPPSQAQTTILTSLPSLISHVFLPTVTLTDIPPNAKMETIMSVTVLRSLPYLRHALLSLSATHRVTALLLDFFGTDAFDLARELNVSPYVFFPSTAMVLSLALNVPRLDQDVHFRDFSKPVHLPGCLPVHRKDLGDAFEDRDDDAYKWILHHGKRYRLAEGFLENSFRDLEPDTIDLLLKDEPGRPPVYLVGPLVKEDDAGSEVNMVEQCLCLKWLDAQPHGSVILVCFGSGGSLSRDQMEELALGLEMSEQRFVWAVKSPNEEVANASYFREDTGVHLFDFLPQGFVERTKGRGLVVPSWIPQAQVLSHPSIGGFVTHCGWNSILESVVNGVPLVAWPLYAEQKMNAVLVTEGMKVAARVVIGENGLAERGEIARVVKMVLEGEEGKKLLHRMKQLKEAAATALRDGGSSSTQISELALKWKAQTKVYY

SEQ ID NO: 5385 - protein, 478 aa, Persicaria tinctoria
GSESPAAPPTTAPPPHVIIVPSAGMGHLIPLAEFAKRLLPRFTFTFAVPTSGPPSSSQRDFLSSLPASIDTSFLPEVDLSDAPSDAQIETLMSLMVVRSLPSLRDLIASYSASGRRVAALVVDLFATDAIDVALELGIRPFIFFPSTAMTLSFFLHLEKLDETVSCEFAELSDPVQIPGCIPVHGKDLIDPVQDRKNDAYKWLLHHSKRYKLAEGVIVNSFEGLEGGPIRELLHPEPGKPRVYPVGPLIQAGSCEKGAAARPECLKWLDQQPRGSVLFVNFGSGGVLSTEQQNELAGVLAHSQQRFLWVVRPPNDGIANATYFSVDGEIDPLKLLPEGFLEQTAGRGLVLPMWAPQIDVLSHESTGGFLTHCGWNSTLESVFHGVPLITWPLYAEQKMNAVMLTEGLRVGLRPSVGKDGIIRGAEIARVIGELMEGEEGKRIRSKMQELKRAASAVLSKDGSSTRALEEVAKIWESKV

SEQ ID NO: 5386 - protein, 490 aa, Brassica napus
MGSISGMEFESSPSPTPVHVMLVSFQGQGHVNPLLRLGKLIASKGALVTFVTTELWGKKMRQANKIVDGELKTVGSGSLRFEFFDEEWADDDDRRCDFLLYISHLEQVGKKEVSKLVRRYEEANEPVTCLINNPFIPWVCHVAEEFNIPCAVLWVQSCACLSAYYHYQNGTICFPTETEPDLDVELPCVPRLKHDEIPSFLHPSSRFAGFRQAILGQFENLSKSFCVLVDSFDALEQEVVDYMSNLCPIKTVGPLFKVAKTVTSEVSGDICKPADRCLEWLDSRPRSSVVYISFGTVAYLKQEQIEEIAHGVLKAGLSFLWVFRPPPHDLKVESHVLPQELKEECGRGNGKIVDWCPQEQVLAHPSVACFVTHCGWNSTMEALSLGVPVVCCPQWGDQVTDAVYLIDVFKTGVRLGRGATEERVVPREEVAEKLLEATVGEKAEELRKNALKWKAEAEAAVAPGGSSDKNFREFVEKLGVGASKVKENRH

SEQ ID NO: 5387 - protein, 482 aa, Unknown
  Description of Unknown: Oryza sativa Japonica Group sequence
IDHTSTRSDDSGEREIVGDGRRRRRRPGRGDVPLAGVRPHDPLPPAVQAPRGEGPRRLLPLHAAKPRQAPAGAGEPFRSSPPPAAADADTVEGLPEGAESTADVTPDKDGLVKKACDGLAAPFAAFLAGRAKRPDWIVVDFCHHWLPPIADEHCVPCAMFHIIPAAMNAMFGPRWANARYPRTAPEDFTVPPKWIPFPSTIAFRRREFGWIAGAFKPNASGLPDVERFWRTEERCRLIINSSCHELEPPQLFDFLTGLFRKPTVPAGILPPTTNLVTDDDDDDDRSEVLQWLDGQPPKSVIYVALGSEAPLSANDLHELALGLELAGVRFLWAIRSPTAGGVLPDGFEQRTRGRGVVWGRWVAQVRVLAHGAVGAFLTHCGWGSTIEGVALGQPLVMLPLVVDQGIIARAMAERGVGVEIARDESDGSFDRDAVAAAVRRVAVGGEREAFASNANRIKDVVGDQEREERYIDELVGYLRRYS

SEQ ID NO: 5388 - protein, 640 aa, Medicago truncatula
MNFRIVFLNCFDSIFGCLCQHFCQSDIAVVYSRMKWKNPVKLVPPLICFIRYTYQVWFECISFMSGFQSSTICAPTLLYFFRWISCRVDDPLVSSLRRLSVVGQDMSVEFASLIADRTAGVWFSGRIMNLQKLIITLLDNFCFIINLSTMEGVEVERPLKIHFIPYLASGHMIPLCDIATMFASRGQQVTIITTPSNAQSLTKSLSSAASFFLRFHTVDFPSQQVDLPEGIESMSSTTDSMTSWKIHRGAMLLHGSIEDFMEKDPPDCIISDSAYPWANDLAHKLQIPNLTFNGLSLFTVSLVESLQANNLLHSDTNSDLDSSSFVVPNFPHRITLCGKPPKVISKFLKMMLGTVLKSKALIINNFTELDGEECIQHYEKTTGHKVWHLGPTSLIRKTIQEKAERGKEGDVNMHECMSWLDSEKVNSVLYICFGSINYFSDKQLYEMACAIEASSHPFIWVVPEKKGKEDESEEEKEKWLPKGFEERNIRRMGLIIKGWAPQVKILSHPAVGGFMTHCGGNSIVESVSAGVPMITWPVHGDQFYNEKLVTQFRGIGVEVGATEWCKNGVAEREKLVSRDNIEKAVRRLMENGDEAKNMRLLAQEFGEKATQAIQEGGSSYNNLLALIEELKRLRDPKRHD

SEQ ID NO: 5389 - protein, 454 aa, Striga asiatica
MAFHSHVAVLAFPFGTHAAPLFALVRRMAASARGTLFSFFTSPTSNVGFFNGPDEHENICVRDVWDGTPENEVFTGSHSEAVGLFLKASPGNFEKAVEKAESESGLKMECLITDAFLWFGGDMAEERCVPWVAFWTAASCSLSAHVYTDEILKVAGSTEEKTEQEQRLTFIPGLENARLADLPPEIFLDVDNPSPLALTIGNMVRNLPKSSAIVLNSFDEIDPAITADLRRKFRHFLNVGPTTLLTSPNDTTADPTECLPWLDQFRDTPKSVVYVSFGTVAVPPEPELRALARALEALRAPFLWSLNDGAKNALPEGFVGRTAGGFGRIVPWAPQPRVLGHGSVGAFVTHCGWNSILESIAGRVPMVCRPFFGDQRLNGRMVEDTWRIGVGVPGGVFGEDGSTAEVLGRVLSDEGMRENVGRLREKALEAVGPDGSSSRNFEKLLEVIRSRERD

SEQ ID NO: 5390 - protein, 496 aa, Hordeum vulgare
MNFAGSGDGRSGSARAHFVLVPMMAQGHTIPMTDMARLLAEHGAQVSFITTPVNAARLEGFAADVKAAGLAVQLVELHFPAAEFGLPDGCENLDMIQSKNLFLNFVEACAALQEPLMAYLRQQQRSPPSCIISDVMHWWTGDIARELGIPRLTFIGFCGFSSLVRYIIFHNNVLEHATDENELITIPGFPTPLELMKAKLPGTLSVPGMEKIREKMFEEELRCDGEITNSFRELEALYVEFYEQIRKKKIWTVGPMCLCHRNSNTTAARGNKASMDETQCLQWLDSRKPGSVIFVSFGSLACTTPQQLVELGLGLEASQKPFIWVIKAGPKFPEVEEWLADGFEARVKDRGMILRGWAPQVMILWHQAIGGFVTHCGWNSTIEGICAGVPMITWPHFSEQFVNEKLVVDVLKIGVEVGVKGVTQWGSEKQEVMVTRDAVETAVNTLMGEGEAAEELRMRAKDCAIKARRAFDEEGSSYNNVRLLIQEMENKTNPCD

SEQ ID NO: 5391 - protein, 460 aa, Medicago truncatula
MEERKYSNMHVLMIPYPSQGHINPMLQFSKRLSTKGVKVTMVTTIFISKTMHLQSSSLPSSLQFDFISDGYDEGGFTQVGNISTYLSHMQAIGSKNLKELIQKHNVSDHPIDCVVYDPFLQWVLDVAKEFNIIGAAFFTQMCAVNYMYYYVYHGLLKLPISSMPISIPGLPLLELKDTPSFVYDPGFYPAYYEMVMNQYSNIHKADIILVNSFYKLEDQVVDSMSKLCPILTIGPTVPSFYLDKGVPNDKDNDLNLFQLDSSPINWLNSKPEGSAIYVSFGSMVCFSIEQMKEIALGLLGSGSNFLWVIPNMEKKNISKELVEEMSSSGKGLVVNWIPQLEVLSNKAIGCFLTHSGWNSTLEALCLGVPMVAIPQWTDQPLNAKYVEDVWKVGMRVKVNENGIVTKEEIESCIMKVMENDIGREMKINAKKWRELAIEAVSHSGTSDNNINEFVNKLKRS

SEQ ID NO: 5392 - protein, 209 aa, Ricinus communis
MGITGLYHACRYKETKGIVVNTFQALEEYAINSVSASGLPPVYPVGPVLDLAGPIQWHPNRDQHHRILKWLDDQPKSSVRWLERTGFRFLWSIKSAYRLLYLPGEYADAKEVTILAHQAIGGFVSHRGWKSILESLWHGVPIATWPLYAEQMNASQLEGERGIKCLMESDSEVRKRVKEMSQKSRMAATENGSSHASLTSLIDKLAAGI

SEQ ID NO: 5393 - protein, 459 aa, Zea mays
MAASCGGRVVVFPFPFQGHFNPVMRLARALHARGVGITVFHTAGARAPDPADYPADYRFVPVPVEVAPELMASEDIAAIVTALNAACEAPFRDRLSALLSAADGEAGEAGGRVRCVLTDVSWDAVLSAARGLGVPALGVMTASAATFRVYMAYRTLVDKGYLPVREERKDDAVAELPPYRVKDLLRHETCDLEEFADLLGRVIAAARLSSGLIFHTFPFIEAGTLGEIRDDMSVPVYAVAPLNKLVPAATASLHGEVQADRGCLRWLDAQRARSVLYVSFGSMAAMDPHEFVELAWGLADAGRPFVWVVRPNLIRGFESGALPDGVEDRVRGRGVVVSWAPQEEVLAHPAVGGFFTHCGWNSTVEAVSEGVPMICHPRHGDQYGNARYVCHVWKVGTEVAGDQLERGEIKAAIDRLMGGSEEGEGIRKRMNELKIAADKGIDESAGSDLTNLVHLINSY

SEQ ID NO: 5394 - protein, 472 aa, Cucumis sativus
MASKQFPSHVFLVCYPGQGHINPTLRLAKKLAVEGLLVTLCTAAHFRETLQKAGSIRGGDQLTPVGNGFIRFEFFEDGIIEINPKDMSLDRFIAQLELSGRLSLVDLIKKQTAENRPVSFMVLNPFFPWTYDVAEELQIPYAVLWVQSCAVFSIYYHYFHKSVPFPTEIDPTVDVQLPILPRLKNDEIPSFLHPKKTYGILGKAMLSQFGKLSLAFCVLIDTFEELEKEIINYMSKIIPLKPIGPLFLISQKLETEVSLDCLKAEDCMDWLNSKPPQSVVYVSFGSVVFLKQEQIDEIAYGLCNSGFSFLWVLKPPSEFFGKQRHSLPEEVAEKIGERGKIVQWSSQERVLSHESVGCFVTHCGWNSSVEAVANGVPVVAFPQWGDQVTNAKFLVEEYGVGVSLSRGAEVNELITRDEIERCLSDVMTGGSTGDNVFRQNALKWKKMAAAAVADGGSSARNFQDFVDNIRQK

SEQ ID NO: 5395 - protein, 216 aa, Citrus unshiu
MYLDKQLEDDKDYGFSMFKQNNESCIKWLNDQAKGSVVYVSFGSMATLKIEEMEELAWGLKASDKESEQSKLPENFSDETSQKGLVVNWCPQLGVLAHEATGCFLTHCGWNSTLEALSLGVPMVAMPQWADQSTNSKYIMDVWKMGLKAPADEKGIVRREAIAHCISEILEGERGKEIKQNAGKWRNFAEEAVAKGGSSDKNIDEFVANLVCSKCL

SEQ ID NO: 5396 - protein, 463 aa, Panicum hallii
MADGSEQSVHVLLLPYPSQGHINPILQFGKRLAARRGVRCTLATTRFALSQSQPATGDAVRIAAISDGCDRSGFSEAGGVDAYLSRLESAGSETLDALLRSEAEQGRPVRVLVYDAVLPWAPRVARRRGAATAAFFTQPCAVDVAYAHAFAGRIRPPLADEETVADELHGLPAGLRPGDLPSFLAEPTRDHPAYLDLLVNQFDGLDTADHVLVNSFHELQPQESDYMASTWRAKTVGPTVPSAYLDNRLPDDTSYGFHLYTPLTATTKAWLDGRPPRSVVYTSFGSVSAPGALQMTEVAEGLYNCGKPFLWVVRASETAKIPESFAGRAKERGLIVTWSPQLEVLAHPAVGCFVTHCGWNSTTEALSAGVPMVAMPQWSDQPMNAKYIEDLWRVGVRVRPDEEGVVRKEEVERCVREVMDGEKSTEYRRNAAGWKEKAKRAVSEGGSSDNNIVEFLGKLGLEV

SEQ ID NO: 5397 - protein, 492 aa, Citrus unshiu
MDLKEEKEYGDHVLMVSLATQSHINPLLRLGKRLVSKGLSVTVATPEIAQHQLLKSFTSSKINDCVSDDIPCLYFSDGFDLDYNRKSDLDHYMETIEKAGPGNLSKLIKNHYHDKHKKLSCIINNPFVPWVVDVAAELGIPCAMLWIQPCSLFSIYYRFYNKLNPFPTSENPNSSVELPGLQTLHTHDLPSFVLPSNPFGSFSRILNDLFQNLNKQYKWVLANSFFELEKEATESMSQLCPIRPVGPLVPPSLLGQDEKLDVGVERWKPEDCCLEWLNKQSNSSVVYISFGSLTQLSANQMEVIATALKNIKLPFLWIVKQSESASSDGEGTLPLWFLEETKNRGLVVSWCPQTKVLAHPALACFVTHCGWSSLLETIVAGVPVIAYPQWSDQPTNAKLVADVFKIGLRLRPSEDGFVGNEELEKCVEEIINGPKSEYYKKNAVELKHAARQAVAGGGSSDQNIQLFADEILGNYSEGGARCGEKLASSMIG

SEQ ID NO: 5398 - protein, 478 aa, Brassica napus
MNSEVSEPIHICFFPFMAQGHMIPTLDMAKLFSSRGAKSTIITTPINSKIFEKQTEAFKNQNPDLEIGIKIFHFPCVQLGLPEGCENVDFINSYQKPNAGDLSLKFLFATKYMKQQLESFIETTKPSCLVADMFFTEKFGVPRLVFHGTSFFSLCCSYNMRIHKPHKKVSTRSTPFVIPGLPGNIVMTLQQANVSNDETPRGKFMKEVRESESVSFGVLVNSFYKLESTYADFYRGFVAKRAWHIGPLSLCNVDLAEKAGRGKKANVDEQECLRWLESKATGSVVYMSFGSGTSFTNEQLLEIAAGLEGSGQNFIWVVRKNENQGENEEWLPEGFEERTKGKGLIIRGWAPQVLILDHKAVGGFVTHCGWNSVMEGIAAGLPMVTWPMGAEQFYNEKLLTMVLKTGVNVGATELVKRGKLISREEVEKAVREVIVGEEAEERRKRAKKLGEMAKAAVEEGGSSYNDLNKFMEEVNGRK

SEQ ID NO: 5399 - protein, 459 aa, Arabidopsis thaliana
MAKPSQPTRDSHVAVLVFPFGTHAAPLLAVTCRLATAAPSTVFSFFSTARSNSSLLSSDIPTNIRVHNVDDGVPEGFVLTGNPQHAVELFLEAAPEIFRREIKAAETEVGRKFKCILTDAFLWLAAETAAAEMKASWVAYYGGGATSLTAHLYTDAIRENVGVKEVGERMEETIGFISGMEKIRVKDTQEGVVFGNLDSVFSKTLHQMGLALPRATAVFINSFEELDPTFTNDFRSEFKRYLNIGPLALLSSPSQTSTLVHDPHGCLAWIEKRSTASVAYIAFGRVATPPPVELVAIAQGLESSKVPFVWSLQEMKMTHLPEGFLDRTREQGMVVPWAPQVELLNHEAMGVFVSHGGWNSVLESVSAGVPMICRPIFGDHAINARSVEAVWEIGVTISSGVFTKDGFEESLDRVLVQDDGKKMKVNAKKLEELAQEAVSTKGSSFENFGGLLDEVVNFG

SEQ ID NO: 5400 - protein, 479 aa, Centella asiatica
MSQLHAFFFPMLAHGHMIPTLDIAKLFASRGVHATIITTPLNAPVFTKAVEKASRSGLQMSLKIIKFPKVPGLPEGCESADQITNPQLFPNFFTATMLLEEQLEQVLEEFRPDCLVADMFFPWATDVAAKFGIPRLVFHGTSFFTLCAAEQVRLNKPHENLLNDWDPFVVPNLPHEIKMTRSQLPPSERDGVQTEFTKMLSRAKESELKSYGVIVNSFYELEPDYADHYRNVLKRKAWNIGPVSLCNREVEEKAQRGKKAAIDQDECLKWLDSKNPKSVIYVCFGSVCSFPPSQLHEIALGLEASGQDFIWVVRKGKNDEEEEEEKRIPEGFEERMEGKGLFIRGWAPQVLILEHEAVGGFVTHCGWNSILESICAGVPMVTWPAFADQFYNEKLVTEILEIGIGVGCREWYMAGRGNSDVKMEEVEMAVKGIMVGEEAEERRNRAKALKEMAREAVEEGGSSYLDLDALIKDLSSHHS

SEQ ID NO: 5401 - protein, 477 aa, Pueraria montana
MQQEETIVLFPSAGIGHVVSMVELAKLLQTHNYSITILLTTGFLDHPSIQTYIHRISTSHPSISFHRLPHIDPTTTPTTVSFITKGFNFNKRNAPNVATTLTQISKSTTIKAFIIDLFCTTAMEPASSLGIPVYYFFTSGAAVLALYSYFPKLHEETNVSFKDMVGVELHVPGNAPLKAVNMPEPILEREDPAYWDMLEFCTHLPEARGIIVNSFAELEPVAVKAVADGACFPNPEHAPTVYHIGPLIAEPQQSDAATDSKQCLSWLDEQPSRSVVYLCFGSRGSFSVSQLREIANGLEKSGHRFLWVVKRPTQDEGTKQIHDVTAGEFDLSSVLPSGFIERTKDRGLVVRSWAPQVEVLSRDSVGAFVSHCGWNSVLEGVVAGVPMIAWPLYAEQHVNRHVMVGEMKVAVAVEQREKDGFVSGEEVEKRVRELMESKEVRETSFKLKQLALAAVEESGSSTKALANLVETWTGIGI

SEQ ID NO: 5402 - protein, 479 aa, Ricinus communis
MAHILVFPFPSSGHIIPLLDLTQSLLSRGLIITVAITTNNLPLLNPLLSSTQQLQHLLLPSPSINPSATAPSKNRLFSILRFMRETHYPILLNWFQSHTSPPVAIISDFFLGWTYHLASQLGLPRIVFSPSGAFAFSVGASTWSDQPQNDNPENHDFVVSFPNIPNSPSYPWWQISHLYRMPKDSDWEFYRDSNLANMASWGVIFNSFTELERVYIDHMKNEFGNVRVWAVGPALPSDDDLMGPAANRGGTSSVPCHDVLTWLDSHHKDHSVVYVAFGSRAMLTCEQMNELAAGLEKSGVDFILCVRQQGDYGILPDGFEDRVAGRGFIIKGWAPQMAILRHRAIGAFLTHCGWNSVLEGISAGVVMLTWPMGADQFTNAQLLVGELEVGMRVGEATQKIPESGELARILSESVEENRRERVRAKKLKEAARSAVKGGSSEADLDRLIKRLNELKLENGGGLMISSNGVKIEKYDTHIS

SEQ ID NO: 5403 - protein, 478 aa, Vitis vinifera
MGSATPLHVVVFPFMAQGHTLPMLDLSKLLACRGLKVTIITTPANFPGIHSKVSKNPEISISVIPFPRVEGPLEGVENTVDLPSEDLRAPFIEVIKKLKEPFEEILRGMFEAGCPPIGVISDFFLGWTLDSCNSFGIPRIVTYGMSALSQAILIISGFHTPYILASLPEDPVQFPELPTPFQVTRADFLHLKHDPRGSLMSSIIQEFTEADLKSWGLLVNSFEDIEREHIAALESLYSTEAKAWCVGPLLLCNPIKEKEEDANEPQAGNQTSDPCIEWLNKQIGYETVLYISFGSEAHVSDEQLDEIALGLEMAMHPFIWVVKSRNWVAPEGWEERVKERGLIVRGWVEQCRILAHPKTGGFLSHCGWNSVLEGLSMGVPLLAWPMAAEQPFNAKIVADWLGAGIRILELSECSQTIGSEIICDKIKELMEGEKGRKARARAQEVKRMARQAMKKGGSSDRNLNELIESLARRRKHIT

SEQ ID NO: 5404 - protein, 485 aa, Unknown
  Description of Unknown: Oryza sativa Japonica Group sequence
METATSKPHFVLVPWIGSISHILPMTDIGCLLASHGAPVTIITTPVNSPLVQSRVDRATPHGAGITVTTIPFPAAEAGLPEGCERLDLIPSPAMVPGFFRASRGFGEAVARHCRRQDARPRRRPSCIIAGMCHTWALGVARELGVPCYVFHGFGAFALLCIEYLFKQRRHEALPSADELVDIPVLPPFEFKVLGRQLPPHFVPSTSMGSGWMQELREFDMSVSGVVVNIFEDLEHGSAALLAASAGKKVLAVGPVSLPHQPILDPRAASDDARRCMAWLDAKEARSVVYVSFGSAGRMPAAQLMQLGMALVSCPWPTLWVFNGADTLPGDVRDWLRENTDADGVAHAHSKCLVVRGWAPQVAILDHPAVGGFMTHCGWGSTLESVAAGMPMVTWPFFAEQFINERLIVDVLGIGVSVGVTRPTENVLTAGKLGGAEAKVEIGADQVKKALARLMDEGEDMRRKVHELKEKARAALEEDNDMKAIG

SEQ ID NO: 5405 - protein, 218 aa, Trifolium pratense
MKKAEVVIIPSPGVGHLVSTLEFAKLLINRDNRLRITVLVIKFPHTTETDVYTKSLPISDSLNVINLPDCSLPPTSKPGPAMAFTLLEAQKQNVKKVVSNLTTGEQHGHLAAFVVDMFCTTMIDIAKEFSVPAFVFFTSGVAFLGLCLYIHNMFERDNVDSTHFLQRTELAIPSFANLVPTKSLPGAVLRKEFESYFMTYAKGLKNADGIIVNSFEEL

SEQ ID NO: 5406 - protein, 454 aa, Nicotiana tomentosiformis
MKKHHFLIISLPAQGHINPTLQLAKILARAGARCTFVTSVHGFRKMNNLPSIDGLFYASISDGHDDGRPKEMYFGDYLNDFKRVGSENLKNLLHKFTDDGYPVTCLVYTILFTWVAEVARECHAQSAFLAIQCATAFAIYYNLFTTNNGIYSSTTEIEPSFPIKLPELPLISRDDIPTFLLQSDSASSFMIPVMREHIKILESDSNPRVLINTFDALEEKSLKILEKIGVCSIGPLIPSAFCDGNDVNDKSFGCELFDKSENYSQWLDLKAEGSVVYVSFGSLAVLKEEQKEEILKGLLESERPFLWVIRSSNEDDKIKNENYGLNGKGMIVPWCSQMEILFHKSIGCFVSHCGWNSTLESIALGVPLIGYPQFSDQVTNIKMVEEVWGTGVRARAEEGIVKREELKRCLEILMGNGEKGNEIRRNVKKYGDLAMEAVRGGSSHYNLNKFLDSF

SEQ ID NO: 5407 - protein, 468 aa, Morus notabilis
MGNKNIEPPMHVLLVSFPAQGHINPMLRLGKRLLSKGLLVTFTTTTNMAKDIQKYPNDNPEDKTTPFIGFDFFDDGIPDDDSRRSDFDFYFSRLEKAGKESIPQLIKKLNDNGRPVSCLVNNPFIPWACDVAEDLKIPWATLWVQSSAVFAVYYHFFHQTVPFPSEAEPDIDVQLTSMPALKRDEIPSFLIAGNPYEVFGKTILEQFKNLSKSFCVLADTFEELEQDIIRALSGFCMVRPIGPLFKGPKDIAVTRGSECLEWLDSKPPSTVVYISFGTVAYLKQEQVDEMAHGVLNSGMSFLWVMRPPKKESGLKPHVLPEGFLETIGDRGKFVEWSPQERVLAHPSVTCFLTHCGWNSSVEALTLGVPVVCFPQWGDQVTNAKFLVDVFGVGVRLGRGEAENRVVPRDEVERCLVEATVGEKAAEMKRNAVRWKKAAEEAVEKGGLSDRNLDEFVEEIRSRSVASSN

SEQ ID NO: 5408 - protein, 471 aa, Vigna angularis
MKDSIVLYSALGRGHLVSMVELGKFILSHHPSLSINILFLTPPPNQDTPTSPTAFTCAATAKYITSVTAATPSITFHRIPQISLPTVLPPLALNFELCRATTHHLRRILNSISLSSNLKVVVLDFMNHSAARVTHTLQIPTYFYYTSGASTLAILLQQIILHENYTKSIKDLNMDVLIPGLPKIHTDDFPDTVQDRTSEAYKVFTEIAMCMRDSDGVIVNTSEAMERRAVKAFNEGLMEGTTPPVFCIGPVISSAPCRGDDDGCLSWLDSQPSQSVVFLSFGSMGRFSRAQLREIAIGLEKSGQRFLWVVRSEFEDGDSGEPTSLEELLPEGFLQRTKGTGMVVRDWAPQAAILSHDSVGGFVTHCGWNSVLESVCEGVPMVAWPLYAEQKLNKVILVEEMKVGVAVKGDKDGLVSSTELSNRVKELMDSDRGKEIRQNIFKMKISATEAVGEGGSSIIALNRLVELWKEH

SEQ ID NO: 5409 - protein, 472 aa, Panax ginseng
MKSELIFLPVPAFGHLVGMVEMAKLFISRHENLSVTVLISKFFIDTGIDNYNKSLLAKPTPRLTIINLPEIDPQKYLLKPRCAIFPSLIENQKTHVRDVMSRMTQSESTRIVGLLADILFVDIFDIADEFNVPTYVYSPAGTGFLGLAFHLQTLNDDKKQDVTEFRNSDTELLVPSFANPVPAEFSPSIFLEKDGRHDVLLSLYRRCREAKGIIVNTFEELEPYAINSLRMDSMIPPIYPVGPILNLNGEGQNSDEAAVILGWLDDQPPSSVVFLCFGSFGSFPENQVKEIAMGLERSGHRFLWSLRPCISEGETTLQLKYSNLELPAGFLDRTSCVRKVIGWAPQMAVLAHEAVGGFVSHCGWNSVLESVWYGMPVATWPMYGEQQLNAFEMVKELGLAVEIEVDYRNEYNKSDFIVKADEIETKIKKLMMDGKNSKIRKKVKEMKEKSRVAMSENGSSYTSLAKLFEEIM

SEQ ID NO: 5410 - protein, 470 aa, Arabidopsis thaliana
MDQPHALLVASPGLGHLIPILELGNRLSSVLNIHVTILAVTSGSSSPTETEAIHAAAARTICQITEIPSVDVDNLVEPDATIFTKMVVKMRAMKPAVRDAVKLMKRKPTVMIVDFLGTELMSVADDVGMTAKYVYVPTHAWFLAVMVYLPVLDTVVEGEYVDIKEPLKIPGCKPVGPKELMETMLDRSGQQYKECVRAGLEVPMSDGVLVNTWEELQGNTLAALREDEELSRVMKVPVYPIGPIVRTNQHVDKPNSIFEWLDEQRERSVVFVCLGSGGTLTFEQTVELALGLELSGQRFVWVLRRPASYLGAISSDDEQVSASLPEGFLDRTRGVGIVVTQWAPQVEILSHRSIGGFLSHCGWSSALESLTKGVPIIAWPLYAEQWMNATLLTEEIGVAVRTSELPSERVIGREEVASLVRKIMAEEDEEGQKIRAKAEEVRVSSERAWSKDGSSYNSLFEWAKRCYLVP

SEQ ID NO: 5411 - protein, 514 aa, Cephalotus follicularis
MHAIEFQPRLLFSYILINQTTYVDQPKTMRKFELLFISIPGVGHLVPIVEFSRRLTNHDRRLSATILVTTLNDAPILDAYIQSRTSTTSDIKFLRLPPLDPLSPDQYQTSSAYISIFIDKHKPHVKHAITSLMMSTESDSVAVAGFFVDMFCTAMIDVANELGIPCYLYFPSPASYLGFTLHLPTLDTQLATEFVDSETGLIVPRNPQTELNVPSFVNPLPPLVLPTRVLRRKEDGYFWFLYHARRYIETKGIVVNTFRELEPHAIGSVSISGRGVPPVYPVGPVLDLDGPAQWHPYRDRQESIMRWLDDQPPSSVVFLCFGSKGSVDGAQVKEIALGLDRAGFRFLWSLRKPAKGETDLPGEYTNLEEVLPNGFLVRTEGIGLVCGWVPQVTILAHEAIGGFVSHCGWNSTLESLWYGVPIATWPLHSEQQLNAFQLVKELGLGVEIRLDYREGSDLVSAEELQRSIKQLMDGDNELRRKFKEMKEKSRLAVMENGSSYQSLTTLIEELTTHI

SEQ ID NO: 5412 - protein, 201 aa, Cephalotus follicularis
MDSDKLQPIAVCHVVAMPYPGRCHVNPMMNFCKLLVSRKNDILITFVVTEEWLGYIGSDPKPGEKQIAEQCCHLKVLCHSSVGGFWTHCGWNSTLEAVYAGVPMLTFPLFLDQGPNSKQIVECWKIGRRVSAELGPENLVTRKQIAEQVRRFMDLESNEGKEMRRRARELHNVCRQGIAEDGSSTTNLDAFIRGISPGHGG

SEQ ID NO: 5413 - protein, 475 aa, Morus notabilis
MAKPRFLLVVFPAHGHVNPALQLARRLVLIGCEVTFVTTVRAHRRMITKGGGTDDNNDNNFTPPNGMSFTQFSDGYDDGFGPKAIDFTVYSLELRSRGSQALIDLVDSSKNEGRPYTCMIYTFIMPWVADVAAKLGIPVALFCVQTATVFDLCYYYFHGYGDLIRDKMVNDISCSLGFPGLPLDFAVRDLPSFLDASDSKLGSLVQLFQEQFDVIGQESQPKILVNTFDALEPEALRALCDNYKLNLIGIGPSINPVELRNSDDKNYKISKWLNSKPKGSVIYVSFGSIAVLTKPQMEEIAKGLLDFGRPFLWVIRENDNKNKDERGGGEEEEKVSFKEELEKVGKIVPWCCQVEVLSNNALGCFVTHCGWNSTLESLVCGVPVVAFPQSVDQLTNAKLIEDFWKTGVKVKANEEGIVEGQEIKRCLESVMGGEEMRRNAQKWRDLAWEASKDGGSSDTNLKAFVSDVIGLKTIS

SEQ ID NO: 5414 - protein, 482 aa, Unknown
  Description of Unknown: Oryza sativa Japonica Group sequence
MGSHGDDGGGGGAHVLLLPYPSQGHVHPMLQFAKRLAFHGMRPTLAVTRYILATCASPDAAAAGAVRFATISDGCDAGGFGECCDDDGGGGVTAYLSRLESAGAATLDKLLRDEASDSGGRRPVRVLVYDAFLPWGRPVAARHGAAAVAFFTQPCAVNVVYGHVWCGRLRVPVEAGDGEDGGGGAVALPGLPALSPEGLPWFIKVGPGPYPAYFDLVMKQFDGLELADDVLVNSFYELEPEEAAYMASAWRAKTIGPTVPAAYLGDGRMPGDTKYGFHLFELTTAPCVAWLGAHPPRSVVFASFGSLSDLDPAEMREVALALLDAGAPFLWVVRSSESHKLPAGYAAAAAAANGMVVSWCPQLEVLAHPAVGCFLTHCGWNSTAEALVAGVPMVALPQWTDQPMNAEYVEAVWGAGVRVRPAAAAGLAARAEVARGIEEVMRGERSGEYRRNAAAWMEKARAASREGGSSDRNIAEFVAMYG

SEQ ID NO: 5415 - protein, 469 aa, Ricinus communis
MKKPELVFVPIPGAGHLTSAVEAAKLLLDRDARLSISILILRRSSDGKVVSDLIDSLTATTTTRRIQFINLPVEDTESMGLNFIEKYKPHIREAVSKLASRSDFTLAGFVLDMFCMPVMDVANEFGVPSYVFFTSGAAFLSFMLHIQALHDEQDMDPTQFKNSDDELALPCFINPLPARILPSVVLEKEWISLFLGMARRFKEAKGIVVNTFMELESSALNSLSDGTIRSPPVYPVGPILNVKGGDSVKSDGSKIIMEWLDNQPPSSVVFLCFGSMGGFREDQAKEIAFALEGSGQRFLWSLRQPSPTGKMTGSTDYQNLERSLPEGFLDRTAGIGMVIGWAPQVAVLAHPAIGGFVSHCGWNSTLESIWYGVPIATWPMYAEQQFNAFQLVKELGLAVEITVDYRKDSDVIVKAADIERGIRCVMEHDSEIRMKVKDMSEKSRKVLMDGGSSFSSLNRLIEDIVDNMP

SEQ ID NO: 5416 - protein, 465 aa, Fragaria vesca
MAPVSNQVGGHVAVLAFPFSTHAAPLLNIVCRLAAAAPSTLFSFFNTKQSNSSILAGNTSVLRYSNVSVCEVADGVPEGYVFVGKPQEDIELFMKAAPDNFRRCLEASVAESGREVSCLVTDAFFWFGAHMADDMGGVPWVPFWTAGPASLSAHVHTDLIRNTTGGGGHDEKETITVIAGMSKVRPQDLPEGIIFGNLESLFSRMLHQMGQMLPLATAVFINSFEELDPVITNDLKSKFKRFLNVGPLDLLEPPASAATTTPQTAEAVTGDGCLSWLDKQKAASVVYVSFGSVTRPSPEELMALAEALEASRVPFLWSLRDNLKNPQLDEFLRKGKLNGMVVPWAPQPQVLAHGSVGAFVTHCGWNSVLESVAGGVPLICRPFFGDQKLNARMVEDVWKIGLRLEGGVFTKNGMLKSLDMLLSQDEGTKMRNKINTLKQLAQQAVEPKGSSTRNFESLLEMTTTN

SEQ ID NO: 5417 - protein, 486 aa, Medicago truncatula
MTDGICSYITNHSIPMAKTIHIAVIPSPGFSHLVPIVEFSKRLVTNHPNFHVTCIIPSLGSPPDSSKSYLETIPPNINSIFLPPINKQDLPQGVYPAILIQQTVTLSLPSIHQALKSLNSKAPLVAIIADIFAQETLDFAKEFNSLFYLYFPSSAFVLSLVLHIPNLDEEVSCEYKDLKEPIKLQGCLPINGIDLPTPTKDRSNEAYKMLLQRAKNMHLVDGILFNSFLELESSATKALEQKGYGKIGFFPVGPITQIGSSNNDVVGDEHECLKWLKNQPQNSVLYVSFGSGGTLSQTQINELAFGLELSGQRFIWVVRAPSDSVSAAYLESTNEDPLKFLPIGFLERTKEKGFILASWAPQVEILKHSSVGGFLSHCGWNSVLESMQEGVPIVAWPLFAEQAMNAVLLSDGLKVAIRLKFEDDEIVEKDEIANVIKCLMEGEEGKRMRERMKSLKDYAANALKDGGSSIQTLSHLASQWENFGGT

SEQ ID NO: 5418 - protein, 469 aa, Barbarea vulgaris
MTNLEDDDNGTKLHVAMFPWLAFGHMVPYLELSKLMVQKGHTVSFISTPRNIDRLLPRLPENLSSAINFVKLPFSGGNKLPDDGEATTDVPFDLIPYFKIAFDGLQIPVTKFLESSKPDWILHDFAPYWLPPISRRLGIKTGFFSAFTGASLGIIKPPGFEEYRTSPEDLLTPPKWVPFETPVSYRLFECRFIFNGFLVEPIEGNVSDVHRFGGVIDGCDVIAIRSCYEYEAEWLRLIQDLHRKPVIPVGVLPPKLEEKFEDTDTWLSIKTWLDTHNKTSVVYVAFGSEVKLSQTELNEIAFGLELSGLPFFWVLKTQRGPWDTEPVKLPDGFEERTADRGMVWRGNWVEQLRILSHDSIGLLLTHPGWGTIIEAIRFAKPMVMLVFLYDQGLNARVVEEKEIGYMIPRDESEGFFSRESVAKSLKLVMEEDEGKVYRENVKDMKKVFGDMDRQDRYVDSFLDYLVTHR

SEQ ID NO: 5419 - protein, 469 aa, Clitoria ternatea
MALQHFLIVTFPAQGHINPALQLAKKLIAMGAQVTLPITLYVYNRIANKTTIPGLSLLPFSDGGYNTAGGGANYKLYVSELRRRGSEFVSNLILSSAKEGQPFTCLVYTLLLPCAADVARSFNLPFALLWIEPAAVLDILYYYFHDYRDYINQKTQKSSSCSISLPGLPFSLSSCDIPSFLLVWKTSVFSFVLESFQEQIQQLDLETNPTVLVNTFEALEPEALRAVDKLNMIPIGPLIPSAFLDGKDHTDSCFGGDLFQVSNDYVEWLDSRPEKSVVYVAFGSYFELSKRQTEEIARALLDCGCQFLWVIREKKDSQVDGTKSEEEMSFREELGKKGKMVTWCSQMEVLSHPSLGCFLSHSGWNSTMESLVSGVPIVAFPQWTDQKTNAKLIEDVWKIGVRVDDHVNEDGVVEAEKIKRCLEVVMGCGKKGEELRKNAKKWKALARDASKKGGSSEKNLRVFLDAVAQ

SEQ ID NO: 5420 - protein, 287 aa, Unknown
  Description of Unknown: Oryza sativa Japonica Group sequence
ECTNDVPSDKFELLWKAFDALAPPFAEFLGAACVGTRALPAGGDVHEKAACPPRPSAAVARRRTPPHRRDGRRRHHAVAGRAAARFSGVRRAGERGAVRVELVHELALRLELAGTRFLLALRKPCGVDDSDVLPLGFLEQTHGHGHVAMGWVPQTTILAHAAVGAFLTHCGRNSLVEGLLFGKPLIMLPIVGDQGPNAWSMEGNMVGLQVRRDENDGSFDRHGVTAAVRAVMVEEETRSVFVTNALKMQEIVADRELHERYIDGFIQQLIFHVADGNSDTAAPDPSS

SEQ ID NO: 5421 - protein, 270 aa, Vigna unguiculata
MPVMDSADLPWGGVAKIFFSHIVKEMKNLEFGEWWLCNTTSDLEPGAVTISPRFLPIGPLMESDTNKSSFWEEDTTCLTWLDQQQPQSVVYVSFGSLATLEPNQFKELALGLDLLKRPFLWVVRPSSDKNKVNNAYPDEFHGGKGKIVKWAPQKKILNHPAIACFISHCGWNSTLESLCSGIPFLCWPFFSDQFFNRSYICDVWKVGLRLEKDENGVIVKGEIRKKVDQVLEDGDIKARSLKLKELLVVDNSVKGGQSSKNLEKFINWAK

SEQ ID NO: 5422 - protein, 522 aa, Spodoptera litura
MEKLKYFLFCVLISLCSCNAYKILAVFPVPSPSHGILGDNMVKHLLNAGHEVTYITPFASRQKSNPKLNIVDVTDHHSFFNPDVLDITQIMTGAVNFNDHDVVFAMMVHIATMTLGHENVQKLMRDPQQKFDVIIGEYMFADLYSTFPAVFQCPYIWFSTVEPHWMVVNLVHSPMNPAYNGDYMYASIPPFNFMQRVQELWRLLFGLYRHNNEYYKREEAVYLKHIVPILKEQGKPVPDYNVLKYNASLLLGNSQVAIGNAVPLPPSYKHIGGYHIDDEVKPLPENLKKILDNSKNGVIYFSMGSNLKSKDLPDELKKGLLEVFGGLKQTVLWKFEENLPNQPKNVHIVQWAPQQSLLAHPNLKLFVTHGGLLSLTEAVHFGVPVIAIPVFADQFLNANQIQHKGIGEKLDLSYNLHKDLKVALDKVLADLPKYTAKIKEISVAYHDSPMKPKEALNFWVEHVVRTRGAPHLRSVALQVPLYQQAYLDLLAVILAATVVILLLVKKMLCYLKSQESIKQKKN

SEQ ID NO: 5423 - protein, 479 aa, Medicago truncatula
MCSLGTTKNVPHVVCVPYPAQGHINPMLNIAKLLHFKGGFHVTFVNTEYNHKRHLKARGPDSLNGLPTFRFETIPDGLPESNVDSTQDIPSLCESTRKTCLPHFKNLLSKLNDALDTPPVTCIVSDGVMSFTLDAAQELNIPQVLFWTTSACGFMCYAQYRQLMEKGLTPLKDWSDMTNGYLETPIDWVPGIKEIRLKDLPSFIRTTDPNDPMIEFMSRECQRAQKASAIILNTFDALEHDVLEAFSSIFPPIYSIGPLNLLLKDVTNEELNSIGSNLWKEDSKCLKWLNNKEPNTVVYVNFGSVTVMTKEQMIEFAWGLSNSKKPFLWVIRPDLVAGENAVLPLEFLEETKDRGLLSSWCLQGEVLAHSAIGGFLTHSGWNSTLESVCAGVPMICWPFFAEQQTNCRFCCNEWEIGLEIEDAKRDKIESLVKELLDGEKGKEMKAKALQWKKLAHNAASGPHGSSFMNLENLFRDVLL

SEQ ID NO: 5424 - protein, 337 aa, Oryza sativa
SPATVVLIPFCVPGHLTPMLEVGKRMLRVGFCGNADDGRGAMSLTVLLAQLPEFVRAPDHEETIRREAAGASEHSGFDVRFHCLPAEELPDFRGGEDFMSRFMQQHASHAREAIAGLESRVAAVVLDWFCTTLLDVTRDLGLPGYVFFTSAASMLSLLLRLPALDKEVAVDFEEMGGAVDLPGLPPVPAALLPTPVMKKGCNYEWLVYHGSRFMEAAGIIVNTVAELEPAVLEAIADGRCVPGRRVPAIYTVGPVLSFKTPPEKPHECVRWLDAQPRASVVFLCFGSMGSFAPPQVLEIAAGLERSGHRFLWVLRGQPAAGMPYPTDAVVDELLPEG

SEQ ID NO: 5425 - protein, 278 aa, Cephalotus follicularis
MLHHAKRYKLAEGIMVNSFPELEAGAIKALQEKEPGKPPVYPIGPLVKMGSSGNTDDSDCLKWLDNQPHSSVLFVSFGSGGTLSSDQISELALGLEMSEQRFLWVVRSPNDKVANATFFSVESGHRDPSDFLPKGFLERTKGRGMVVPSWAPQAQVLSHGSTGGFLTHCGWNSTLESVVNGVPLIAWPLYAEQKMNAVMLTEDIKVALRPNASESGLIGRVEITRVVKALMEGEEGKMVRYRMKDLKDAATKVLSEDGSSTKALSELAHKWSRNQKSC

SEQ ID NO: 5426 - protein, 395 aa, Citrus unshiu
MSLYVPFTRATKLMQPHFERALESLPHVSFMVSDGFLWWTLDSANKFGFPRFVFYGMNNYVMCVSSSVGANRSLSGVQSDDELVTPPEFPWIKITKKDFDPPITDPEPKGPQFELFIDQIVSTSNSYGMIVNSFYELEPLFADHCNRVVKPKSWCVGPLCLAELSPKNEEPKNELSKPAWIRWLDRKLDEGSSVMYVAFGSQAEISAQQLKEIATGLEQSKVNFLWVIRKAESELGDGFEERVKGRGLVVRDWVNQKEILWHESVQGFLSHCGWNSALESICAGVPILAWPIMADQPLNARMVTEEIKVALRVETCDGSVRGFVKWQGLEKTVRELMGGEKGEKARTKVKELSEIARKAMEEEKGSSWRCLDMLLDETCKYEQQLHDDKNNYEGR

SEQ ID NO: 5427 - protein, 743 aa, Unknown
  Description of Unknown: Oryza sativa Japonica Group sequence
MADSDGSVHVLLLSYPAQGHVNPLLQFGKRLAAHRRVRCTLAVTRSLLNSCCRAPPSPGGGGGVHVATYSDGCDARGYDELGDEGAYLSRLESAGSATLDELLRGESGEGRPVRAVVYDAFLPWAAPVARRHGASCAAFFTQACAVNVAYAHAWAGRVELPLPTSAPAPPLPGVPPELEPADFPTFLTAPAAGRSAYLDLLLRQCQGLEVADHVLVNSFHELQPKEAEYMAATWGAKTVGPTVPSAYLDGRLPGDASYGFDLHTPMAAESKAWLDERAASSVVYVSFGSLATPSAVQMAELAHGLRDSGRFFLWVVRSSETGKLPDGFAGETAAKNTTGLIVPWCPQLEVLAHGAVGCFVTHCGWNSTVEAVSAGVPMVAVAQWSDQPTNARYVEEAWRVGVRARADGEGVVRKEEVARCVAGVMDGETGMEFRTNAARWSAMARAAMSQGEKDLKQCLGIGSAQKNIDLPVAVRKNSAGKKDDLAVKAITKSGAETKMGVVMGTWKSEEPFAAAAALQASEKQEPHQSPIHLNQVEFSIGSGLGHNYKSVRKIRCYGTAVGTGTARYQNPGRWIWPDLTAGRVWYRAVPILSLCSTTRRTEVEGQKRNFACNNRIGRDGRAARTLEALGFLIDRRRRLLEVNSAVAAAASGKDDIDAATVAGNDKFAAAVACFNVAAATVAGKDDIDAAAAGKEDIDAAATGNDEFATAAAYFNTAAARKDEFVAAAAACFNACRNPPLAAT

SEQ ID NO: 5428 - protein, 470 aa, Rosa chinensis
MAGMKQSIVLYPASPGSHHMVSIVELGKLISQRHPNLSITVLLDTSSPLAKSSYINHLLSSNSDPDQARISFFTLPALNLPQPDAQTRPERVHQLRLQTVPSVLQALKTISLTSKVLAFITSLWHHPYDPEIPTYYYFTSCASVLALFLYFPTVHDQTPESFKDRNDDVVEYPGLPALRGSQMPDPILDRNEAEYDFFLYFASYLPKAKGIITNTFQELEPRAIKAIKEGVCVPNHQTPPLYHIGPLISDSENRSIQGGSPMPTNCSTLWLDKQPSRSVVFLCFGSRGTFSEEQFKELAIGLERSKLRFLWVVKSQLDLEVLMPQGFLERTKDRGLVVTSWAPQVAILSHESVGGFVTHCGWNSITEAVTYGVPMVAWPLYAEQEVNSVVLVEEMKLAIPIFEVPSKSKQGSVSADEVEKKVLRLMDMESDEGKSLRERCQAVKAMGLAAWRNGGSSFTSFSELVSSWMH

SEQ ID NO: 5429 - protein, 477 aa, Cephalotus follicularis
MKRAELIFIPTPGIGHLVSTLEFSKRLIERDDRISITVLVMKFPIATFVDAYTKSLTASQPRIQVIDLPLVDPPPPTLVQKSRHRYLCSFIESCIPNVKNVIKNIVTSSDSSSGSVQVAGLVLDFFCVSMIDVANEFGLPSYMFLTSNAGFLDLMLYLPTRHDQISFEFEKTDPEILLPGFANPVPPCVLPDGLFNKEGGYSTYIKLAQRFKDVKGIIVNTFIELETYTVNSFSHAQIPHVYPVGPVLELKGQPHPDTNQAEYDKIMEWLDDQSQSSVVFLCFGIMGSFEVPQVREIALGLEQSGYRFLWSMRVPPTKAEASVTSPYTSYEDMLPEGFLERIKGRGKTCGWAPQVKVLAHKAIAGFISHCGWNSILESLWHGVPIVTWPIYGEQQLNAFMMVKEFGLALKFRLDYRRDGQLVTGDDIERAVRCLMDGDEELRKKVRDMSEMGRKALVDGGSSFNSIGQLIEDMIGRS

SEQ ID NO: 5430 - protein, 291 aa, Helianthus annuus
MIQLSTSMPLMDPANFVWACMGDPDPVANQIIFDYLFLEGKDAAEAADHIICNSSMELEPGAFTLFPKMLPIGPLLATNNATRQVGHLWKEDSTCLTWLNQQPVCSVIYVAFGSITIFDQLQFEELALGLEDTKMPFLWVVRPGPSGNMDYVYPSGYLDRIGSRGKILSWAPQQEVLNHPSVACFMSHCGWNSTMEGVSNGVPFVCWPYFADQFFNKTYICDIWKTGVGLNKDETGIVTRGEIKSKVEQLVNNDIHKANALNLKEKLTDCLREGNSSNKNLNKFIDWLKEG

SEQ ID NO: 5431 - protein, 482 aa, Vigna angularis
MAGAHVVMFPCPFQGHVQPMLKLAELLALHHLHVTFINTHSIHNRLTRYGDIQSLSASYPTLHFNTIADCYSHGNHTGSGDTSGDIILSTTLHAKPLLRNILLAQSPEIPKVTCIIQDGILGSLSNDLASELGIRITIIHFRTSSPCCFWPYFWLPNLFKTNELPIRGDEDMDRIITNMPGMENLLRCRDLPSFCRPGAKGNMSIDWVSFQTQQSLAADALILNTFEELDRLVLSQIRLHFPKVYTLGPLHHHLNVRKAETNGANDAPSFRSSFFEVDRSCMAWLDAQAQGSVLYVSFGTSTIVTREELMEFWHGLVNSKKRFLWVMRPDLVVGRENDDRIPEEVEEGTKERGLMVEWAPQEEVLAHKAIGGFLTHSGWNSTLESLVAGVPMICWPYFADQQVNSRFVSEVWKVGLDMKDVCDRDVVEKMVNDLMVHRRDEFLKSAQAMAMLAHQSVSPGGSSHSSMQDLIHYIKSVSKENN

SEQ ID NO: 5432 - protein, 483 aa, Medicago truncatula
MVLPANINDVPHFVLFPLIAQGHIIPMIDIAKLLAQRGVIVTIFTTPKNASRFTSVLSRAVSSGLQIKIVTLNFPTKQAGLPEGCENFDMVDSIDMRMNLFHAITLLQKPAEELFDALTPKPSCIISDFFIPWTIQIAENHKIPRISFHGFSCFCLHCMLKIQTSKILERVDSESEYFTVPGIPDQIQVTKEQIPGILKGELKEFGEKMHDAEMKSYGEIINTFEELEKAYVKDYKKEKNGKVWFVGPVSLCNKDGLDKAQRGIIASISEHHCLKWLDLHQPKSVVYACLGSLCNLIPSQLMELALALEATNRPFIWVIREGNKSSEELEKWISEERNKGRGLIIRGWAPQVLILSHPSIGGFLTHCGWNSTLEGISAGLPLVTWPLFADQFLNEKLVTQVLRIGVSLGVEVPMRLGVEESLGVLVKKEGIKEAICMVMDEGEESKERRERASKLSEMAKRAVEKGGSSHLNINLLIQDIMEQ

SEQ ID NO: 5433 - protein, 473 aa, Amborella trichopoda
MGAISYWSPSQDKAMLSQQSDLLAASNASLLVSLATNKTVGQQMHDASAAGPVGPISFETFSDGLGMPDNNQHDLDKFMAQLNCAGPEGLAALINDLQARGRPVHYVVSNPFMPFVVDVAEGFGIPCAMLWIQSCAVYAVYYRSLYRLGEFPTPERPNIDISLRGLPVLKTNELPSFLVPFAPYQCLADAILCHIRKINKVKWVLANSFHALETEAIRSMSELTPIMPVGPLVPSKLLGKSTASEMQGDLWKPEDDCLNWLSTQPREFVIYVAFGSVVSLPPKQIEELAWGLASSGRPFLWVGKPVASTSKFLLPDGFLDATAGRGKVVKWCPQVEVLTHPAVACFVTHCGWNSTLETIAAGTPILAFAHWGDQVTNAKFLVDVFGVGVRLERDAEGVVRRDEVCRCIEEIREGPRASKMRENAMKLKEAAREALEEGGSSYKNLRVFVENLMSLALEVQAIRVRLPEDQSPD

SEQ ID NO: 5434 - protein, 460 aa, Medicago truncatula
MKDTIVLYPALGSGHLMSMIELGKLIVTHHPSFFITILILTPPNKNTLSPQEQYIASVSSTFPSINFHYIPLISPPTTLPPPPLLTLELSHQSNNYVHNILQSISKTTNLKGVILDFLTYNASKVTTKLEIPTYFYFTSGAIVLALFLHYPTIHQNATKPIKDLHTPLRIPGLPKNISTDDYPDEAEFFLESAKTMRQCDGVIVNTFDAIEGKANKALNEGLYIPDGTTPSIFCIGPLITASYGEDENECLSWLESQSSQSVVLLSFGSMGRFSKAQLNEIALGLEISEQRFLWVVRSELDLEEQSLDELLPEGFLERTKQKGMVARNWAPQGAILKHDSIGGFVTHCGWNSVLEAICEGVPMVAWPLYAEQRLNKVILVDEMKVALELKDSKDGFVSGTELGDRIKELMDSDKGKEIRKIIFKMKISAKEAREEGGSSLVALNNLAQLWKQKKQPSMAN

SEQ ID NO: 5435 - protein, 483 aa, Dianthus caryophyllus
MVAEPHRLHIVMFPFLAHGHMIPTLDIARLFAARNVEVSIITTPVNAPIFTKAIETGNPLINVELFKFPAKEAGLPEGCENAEIVIRQPELIPQFFKATHLFQQQLEEYLDRVRPDCLVADMFYPWATDSATKFNLPRLVFHGISCFALCAQESVSRYEPYRNVSSDDEPFALPGLPHEIKLIRSQISPDSRGDKENSSKTTTELINDSEVESFGVIMNSFYELEPEYAEFYAKDMGRKAWHIGPVSLCNRSNDQKALRGKRASIDDHECLAWLDSKEPNSVVYVCFGSTSVSIAPQLREIAMALEQSGKNFIWAVRDGGNGKNEEWLPLGFEERTKGKGLIIRGWAPQVLILDHKAVGAFVTHCGWNSTLEGISAGVPMVTWPLFAEQFFNEKLVTNVLRTGVSIGVKKWNRTPSVEDLITREAIEAAIREIMEGEKAEEMRLRAKKLKEAARNAVEEGGSSYNHLSTLIDELRKYQTQKRN

SEQ ID NO: 5436 - protein, 467 aa, Vigna angularis
MKDTIVLYPNNGRGHLVSMVELGKLILSHHPSLSITILILTPSPNATFTLACNSNAQYIAAVSATIPAITFHSVPMAQLPLDNPSLPPHLISLELSRHSTQNVALALQSLVKASNIKALVMDFLNFSNPKILTENLTTNIPIFFYYTSAASSLVVLFHFPTTLPKQVKDQQFQLHFPGLPAISTDVFPNETFDPLSYTNQIFRRIAEAMKRSSGIIINTSEAIEEKAIAVLNDNRMLPPLFFVGPVISAPYGEEDKGCLSWLESQPSQSVVLLCFGSMGWFSRRQLMEMAIGLEKSEQRFLWVVRTELEGGDSLEEKPSLDELLPEGFMDRTKEKGLVVRDWAPQREILSHDSVGGFVTHCGWNSVLEAVCEGVPMVAWPLYSEQKLNRVFMVQEMKVALALKEEKDGLVSGSEFGERLKELMESDTGKEIRQRVFKMKLSAAEELGEGGTSRVALDRLAMLCKRVM

SEQ ID NO: 5437 - protein, 476 aa, Sesamum indicum
METASAAPSPSHIAVLPSPGMGHLIPIVEFAKKLLHHHRISTTLIMPTDGPLSNAQNTLFSTLPPGIDYILLPTLNFDDLPPDVKIETRISLTVTRSLPSLRDAVKSLLERTPLAALVVDLFGTDGFEVALEFKIPPYIFFPSTAMALSLFLYLPKLDETVSCEYREVAEKLLIPGCTPIDGRDLLDPLQDRKNDAYKWVLHHTKRYRMAEGIILNSFKELEPGAIEALQEKEDRKPVVYPIGPLIQTGPKPEVDESCVCLKWLDEQPRGSVLYVSFGSGGTLSHDEMVELALGLEMSEQRFLWVARCPNDTTANATYFNIQSSNDPLAYLPDGFLERTKGRGLVVPTWAPQAHILGHESTGAFLTHCGWNSILESVVNGVPMIAWPLYAEQRMNALMLHEDVRVALRPKAGENGFVGRDEIAKTVKGLVEGEEGKEIRSRMRDLKDAAAKVLSVNGSSTKILAELAGRWKSNTCI

SEQ ID NO: 5438 - protein, 461 aa, Eucalyptus grandis
MNHQHFLIISFRGQGHLNPTIQLAKRLVWAGAQVTYANAVDGRNVRTIKTPISMEGLSHTSFSVTDDDAGEPSSYEDRISEIKRVGSRNLRELIVSLSEKDRPVTFLIYTVLLPWAADVARDLGVPSAFLSIQSAAVFAIYHHYFNSRSGFYQSSKNEPPTTISLPGLPPLTPEDLPSFLLPTDPNFPIVPTFQEHILTLEKETNPCVLLNTFDALEEDLIKAGMENMKLFAIGPLIPLAYLDNKDRPLDNSFGCDLFDCSTDYLQWLDSKPASSVIYVSFGSLAVLKKNQMEELCQGLRESGQPFLWVIRPSNTSEQEEIDTMIKGRIDGDSGLIVPWCLQVEVLNHKSIGCHVTHCGWNSTLESLTAGVPMVACPQFSDQLTNAKLIQDVWGVGVKARADGEGVVGREEMKRCLDLVMGPTHEEGMRESASKWKALARRAVKESGSSDDNLRLFMAGLK

SEQ ID NO: 5439 - protein, 449 aa, Helianthus annuus
MGHAGQLVARHMVKTFDHITATVLVIKLPGDEIGTDYTNSFTDHIQINFIHFPPMDLHLFQQCPTLGFRVDAVINHHKPIIRDLVASASTGPGPMGALIVDMFCTTIIDVAKEFNLPAYVFFTSNAAFLGTMFHFQTLQDELGQDISELSHSPTELQVPSYANPVPPSVVPNVLLDRDQWSKRFLCYARKYREANGIIVNTFQELEHHALRWYDGNTPPVYTVGPLIKPKKPTPDHEVLQWLKGQPESSVLLLCFGSRGWFGVDQVRGIAVAIERSGCRFIWSLRRASPEELNGFPDEYADYNEVLPDGFLERTAEKGKVVGWVPQAEVLVDMATGGFCVALWVELVTGEYLVRVPVATWPIYAEQQLDAFQMVKDLGLAVEISLDYNQMNKDQQLVSAETIEKGIREVMDRNSAVRAKVKEMSAKSRMAMEEGGSSFESLRRLVDDIM

SEQ ID NO: 5440 - protein, 467 aa, Elaeis guineensis
MEDPIQQHILVATYAGQGHINPALRLATQLARTIPGARVTFSTTVYGHRRMFPSAASDGEVSDGRLSYLPFSDGYDDGFKDLIPKFDQYMIQAKLNGSRNLSNLLGDLTARGRRVTCLIYTILLPWAADVAREHGIRSFLHWIQPAAVFAIYYHYFHGYEGVVASHREDPLFEVEFPGLPPLRMRDLPSFFAISADDPFHSVLLMLREEFETLDREKTESTKPWILVNTFDALEADALAAVDAMHLLPVGPLLPSPEETISEGDMFQLDGKRYMEWLDSKPEKSVVYVSFGSLSVIRKQQLEELSNGLEECGRPYLWMVRKDNRGEGVELEKGENGMVVEWCSQVQVLSHPSIGCFVTHCGWNSTLESLACGVPIVGAPQMSDQAMNARLAEDAWGTGVRAEANNEGVLEGTELRRCLEVVMGEGEKGAEIRRKAKKWRDRVREAVASGGSSDRNLRAFVEEIGKGS

SEQ ID NO: 5441 - protein, 357 aa, Citrus unshiu
MPYPLQGHIKPMMSLAELLGSANFQVTFVNINHNHDLLLRNTDITSFCNRFPNFQFKSIPSGLPANVIRSGLTAKDVFDAMKAVSKPAFRDLLISLEELQIPLLALRTHNASYSWIYFHLPKLIEDGLIPFPDENMDKPIAGIPGFENFLRNRDLPGTCRVKTSDDDYLLQFFIEETFAMTRASALVLNTFEIEAPIVSLLGFHFTKIYAIGPLHKLQKSRMKDINSPSVSSSGILQKEDTSCMTWLNSQPPKSVLYVSFGSLVGLTREQMSELWHGLVNNGQSFLLVVRPDLILGEPGAGETPLAQNEGTEERNRFIVSWALQEEVLAHPAVGGFLTHGGWNLTLEGIAAGVPMIC

SEQ ID NO: 5442 - protein, 486 aa, Populus trichocarpa
MGSLGHQLHIFFFPFLAHGHMIPTVDMAKLFASRGVKTTIITTPLNAPLFSKTIQKTKDLGFDIDIQTIKFPAAEAGLPEGCENTDAFITTNENAGEMTKKFFIATTFLQEPFEKVLQERHPDCVVADMFFPWATDAAAKFGIPRLVFHGTSNFALSAGESVRLYEPHKKVSSDYEPFVVPNLPGDIKLTRKQLPDFIRENVQNDFTKLVKASKESELRSFGVIFNSFYELEPAYADYYRKVLGRRAWNVGPVSLCNRDIEDKSGRGKEASIDQHECLKWLDSKKPNSVVYICFGSMASFPASQLKEIATGLEASGQQFIWVVRRNKNSEEDKEDWLPEGFEERMEDKGLIIRGWAPQVLILDHEAIGAFVTHCGWNSTLEGITAGKPMITWPVSAEQFYNEKLVTDVLKTGVGVGVKEWVRVRGDHVKSEAVEKAITQIMVGEEGEEKRSRAIKLGEMARKAVEEGGSSCSDFNALIEELRSYRP

SEQ ID NO: 5443 - protein, 468 aa, Populus euphratica
MAVQPHFLLLTYPAQGHINPALQFAKGLTRIGVLVTLVTSLSAGRRMSKTLFPDGVSFVTFSDGYDDGFKPEDDRDHFTSELKRRGSQTLNELIVDSAKEGKPVTCLVYTMLLQWAAEVARAQHLPAALLWIQPATVFDIYYYYFNGYGDIFNNCKDTSYAIELPGLPPFASRDLPSFVLPSNTYTFAIQMFQEQLEQLSQETNPKVLVNSFDALELGAMSATEKFNLIGIGPLIPSAFLDGKDPLDKSFGGDIFQGSEDYTEWLDSKTKSSVVYVSFGSFLVLSKQQIEEIARGLVDSGLPFLWVIRDEQKKNEEKEEEEDHPSACREAILERQGMIVPWCCQVEVLSHPSIGCFVTHCGWNSTLESLVSEVPVVAFPHWTDQGTNAKLIADVWKTGVRVAANEEGIVKGDEIKRCLDLVMAHGKMGEDIRKNAKKWKDLARDAVKEGGSSDKNLKAFVQEVGQGCF

SEQ ID NO: 5444 - protein, 385 aa, Cephalotus follicularis
MMHMLAQLHDPIVNWFKNHPSPPVAIISDMFLGWTHDLACKLGIQRIVFSPSGAMALSTMYYLWRYMPIPNDPNDPNATVSLSTMPNSPTYPWWQISPLYRGFVEEGPNMEFVKDGFLGNISSWGLVINSFTDLEGLYLDHLMKELGHERVWAVGPLLPTPDNDSSGLIERGGSSAVSVDDILYWLDTCEELKVVYVCFGSQAVLTNDQMKELALGLETSGVHFIWSIKEPTKGQVEGQYGMFPSGFEERVAGRGLVIKGWAPQVLILRHRAVGAFLTHCGWNSTLEGLVSGVRFLAWPMGADQFVDTALLVDELRVAIRVCEGAKTVPNSHKLAIALAESVSDNGVDERERAMGLRGAALEAIKEGGSSVKALDGLVKRLTELG

SEQ ID NO: 5445 - protein, 400 aa, Medicago truncatula
MPSTIETTLLNKPSISRSIEQFKIHFNNIDIQTIKFPCVEGGLPYELLLQQKPHCIVADMFFPRATDSAAKVGIPTIVFHATGNINMTRLQLPNIFTKIDAPKLMESEVRSYGVIINSFYELDGVYADYYREFIGKKEWHIGLFSVYNRDMDTSYRGKEPSINKHKCLKWLDTKDINLVVYVCFGSTNHFLNSQLKEISMGLKASWKDLVLVVKKKREDREKGLPEFEKIMKGKGLIIRGWPLQLLIFQHKAIGAFVTHCGWNLTLESVAAGVPMITWPIAFEEFYNEKLVTEVLKIGVPVGDKKVSGYHSVAILLTRIVIIREDEDIAQRLLHDYHVTTASDEISLISKLTYVFLRQHSEIILDNPSFSAGKLDYLEIMEEEDIGQHLLMTCYNRTSGK

SEQ ID NO: 5446 - protein, 483 aa, Solanum chilense
MTSGKKIELIFIPSPGIGHLVSTVEMAKLLITREKNMSITVLIIQSPHDNKLPSYIQSLTNFSSSLKFIHLPQDDTVLKLLKSNPFTSYIPAHKPAVRDVVAEIIKTQSNVTLAGIVIDLFCTSMIEVANEFELPTYVFYTCGAAPLGLQFHIQSLTDDFGRDITNYKDEPEAELSIPTYFNPFPAKCLPSVALDKEGGSAMFLDLTRRFRETKGIMINTFLELDSHAINFLSQDKNIPPVYPVGPVLNLNNVQGDNLSLSDQNMMKWLDDQPTSSVVFLCFGSGGSFTIEQVKEISYALENSGCRFLWTLRQPPQKDATLPGDYENFEEVLPEGFLQRTQGIGKVIGWAPQLAILSHKAVGGFVSHCGWNSTLESTYFGVPMATWPMYAEQQANAFQLVKDLEMAVEIKMDYRKEPTGKMGQKVIVKAEEIEKAIRELMDPENKIRMKVKEMKEKSREATMEGGSSYTSIGSFIQSIMENTP

SEQ ID NO: 5447 - protein, 470 aa, Brachypodium distachyon
MESVNTSPHSSDHEGGGGGGAHVLLVPLPAQGHMNPMLQFGRRLAYHGLRPTLAATRYVLSTGPPPGAPFRVAAFSDGFDAGGMASCADPVEYCRKFEAVGSSTLAQAIESETAAGRAPTVLVYDPHMAWVPRVARAAGVPVAAFMSQSCAVDLVYGEAWAGRAPLPMADGSALKRRGIVSIDLAAEDLSPFVVSPEIYPKYLDVSIRQFEALDDADDVFVNSFRDLEPLEAEYMEKRWRAKTVGPTLPSFFLGDDRLPSNKAYGVNFFSATAPCMAWLDRQPARSVVLASYGTVYNLESMELDELGNGLCDSGKPFLWVVRSSEAEKLSEQLLGRCKEKGLIVPWCPQLDVLAHNAIGCFLTHCGWNSTTEAIVAGVPMVAMPRSADQPTTAKYVESAWGIGVRVRADEKGLVKRAEVEGCIKKVMDGEMKDEFRGNAAEWMRKAKEAMQEGGSSDKNIAEFAAKYLER

SEQ ID NO: 5448 - protein, 316 aa, Arabis alpina
MKTNSFPNLEDLDQTVQLPALPLLEVRDLPSFMLPSFGSHFNTLMAEFMDSMKDMKWVLVNSFYELESEIVDSMTDLKPMIPIGPLVSPFLLGANEDETLDGKNLDLWKSDEYCMEWLDKQARSSVVYISFGSLFKSSENQVQSIATALKNRGVSFLWVIRPKESGENVDVLQGMIKEGQGVVIEWGPQERILSHEAISCFVTHCGWNSTMEAVVTGVPVVAYPSWIDQLMDARLLVDVFGIGVRMMNDEGDGELKVTEVERCIQAVTEGPTAADMRKRATELKHAARLAMAPGGSSARNRDSFISDITTITWLRT

SEQ ID NO: 5449 - protein, 472 aa, Clitoria ternatea
MSGHHFILVLFPAQGHINPAFQLAKRLIISFGARVTISTTLRMHRRLTNKPSLPSLSFLPFSDGFDDTAATANQSSLYASELKRRGSQFLTNLILSHAQEGHPFTCLLYTPLLPWAAEVARGFHLPTAILWTQPATVLDILYHYFHGYRDYINDKTKEDPSCSIELPGLPRVLMLTPRDLPSFLLNSNPSLDPLIVSMFEEQFNDLDVETKPRILVNTFEALETQALRAVDKFSMIPIGPLIPSAFLDGKDPSDTSFGGDMLHFSNGYVEWLDSMAEMSVVYVSFGSFCVLSKIQMEELARALLDSGRPFLWVIREKEKKVGETEEEEEELRCREELEQRGKIVKWCSQVEVLSHPSLGCFVTHCGWNSTLESLVSGIPMVAFPQWTDQKTNAKLVEDVWKTGVRVDHHVNEEGIVEGEEIKRCLEVVMGSGEKGEELRMNAKKWKDLVKETVKEGGSLEKNMKTFLDSVGS

SEQ ID NO: 5450 - protein, 462 aa, Arabidopsis thaliana
MGEEAIVLYPAPPIGHLVSMVELGKTILSKNPSLSIHIILVPPPYQPESTATYISSVSSSFPSITFHHLPAVTPYSSSSTSRHHHESLLLEILCFSNPSVHRTLFSLSRNFNVRAMIIDFFCTAVLDITADFTFPVYFFYTSGAACLAFSFYLPTIDETTPGKNLKDIPTVHIPGVPPMKGSDMPKAVLERDDEVYDVFIMFGKQLSKSSGIIINTFDALENRAIKAITEELCFRNIYPIGPLIVNGRIEDRNDNKAVSCLNWLDSQPEKSVVFLCFGSLGLFSKEQVIEIAVGLEKSGQRFLWVVRNPPELEKTELDLKSLLPEGFLSRTEDKGMVVKSWAPQVPVLNHKAVGGFVTHCGWNSILEAVCAGVPMVAWPLYAEQRFNRVMIVDEIKIAISMNESETGFVSSTEVEKRVQEIIGECPVRERTMAMKNAAELALTETGSSHTALTTLLQSWSPK

SEQ ID NO: 5451 - protein, 508 aa, Cicer arietinum
MQNATCKDYIINHLIHFYINKKNFIKLFTKLSMGNENNDLHIILFPFLANGHIIPCIDLARLFFSRGLKVTIITTHLNVPLISRTIGKSKINIKTIQFPSPQHTGLPEGCENSESALAPDKFIKFMKATILLREPLEHVLQQEQPNCLVSDMFFPWSTDSAAKFNIPRIVFHGLGFFPLCVLACIRQYKPQEKVSSYTEPFLVPNLPGEITLTKMQLPQVPQHDKVFAQLLEESNESELKSYGVIANSFYELEPVYADHYRNELGRKAWHLGPVSLCNRETEEKACRGRESSIDEHECLKWLQSKQPNSVVYVCFGSMTVFGDAQLKEIAMGLEASEVPFIWVVKKGAKSEGEKSEWLPEGFEERIKGKGLIIRGWAPQVMILDHECVGGFVTHCGWNSTLEGVCGGCSMVTWPMYGEQFYNAKFLSDVVKIGVGVGVQTWIGMGGGEVVKKDVIEKAVKRIMVGDEAEEMRNRAKEFGNMAKRAVEVGGSSYNDFNSLIQDLRSRAH

SEQ ID NO: 5452 - protein, 577 aa, Citrus unshiu
MVQGEPHILILPFPAQGHMRPMLKHVADDDMDREINSVPGVEAILRRRDLPSPCRSKEIDVPILQFFVNETLAVTRVIARSTIENMCLNSHKKLRFRALSMEQTRVPHVVLLPYPAYGHIKPMLTLAELFSHAGFRVTFVNTEQYHDRLLGNNDVTGFYKRFPNFRFTSIPDGLPPDNPRFGIYIKDWFCSDKPVSKLAFLQLLMSPGLLPTCIISDSIMSFTIDVAEELNIPIITFRPYSAHCFWSDFHFSKLAEEGELPVTNENFDKPVKCIPGLENFFRNRDLPSICRDGGPNDPILQTFIRDTSATTRTSALVINTFNEIEGPIISKLGSRLTKIYTVGPLHALLKSRIQEDSAESSPPESNNCVLSKEDRSCMTWLDSQPSRSVLYVSFGSFIKLGREQILEFWHGMVNSGKRFLWVIRSDLFDGEPGVGPVPVELDQGTKERGCIVSWAPQEEVLAHQAIGGFLTHSGWNSTLESLVAGVPMICWPQIGDQQVNSRCVSEIWKIGLDMKDTCDRSTIENLVRDLMDNKRDKIMESTVQIAKMARDAVKEGGSSYRNLDKLIEDIRSMAFKA

SEQ ID NO: 5453 - protein, 438 aa, Genlisea aurea
MTAADKPTLFFIPFPVFSHFVAAVKTAELLLERDNRLQINVLVLKFVVKNEIADFIKKKSTNQKPAVRDAVAGALNGRESNIPAGIVVDMFCTTMADVAEEFGIPSYVYFTCGAANLGMMFHAQSLVDDLGGDLSEFEDPGRFVAVPGYKNPFPTSVTPALILDKERRDYFLEMMRRFRRAKGILVNSFLELEDYAIKTLSEDTKLPPVYPVGPVLQDSGEEIRLDFKELMDWLDGQPDSSVVFLCFGTRGGGAFDDAQVKEIAAGIERSGRRFIWSLRKQSPHGPNFFPSDYETFDEILPAGFPNGSGKVIGWAPQAAVLAHRAVGGFVSHCGWNSILESVWFGVPVAVWPLSAEQQANAFQLVREFETAVEIKMDYRAGGGEKVPAEKIEGAIRELMDLNNPIRLNAKELKEKSRTTLLPNQSSSNFLAKFARDFI

SEQ ID NO: 5454 - protein, 495 aa, Panax notoginseng
MEERKEKMIVIFPYMAQGHIIPFLSLALQIEKKGYQITFVNTPLNIKNLKQSLPLNSSIRLLEIPFNSSDHRLPPETENTDSIPFSLTLTLLEASVSLKPAFRNLISDLVRGGAPPLAVIADIFFGWTAEVAHEFGIFHTIFSSTGGFGMACYYSVWMNLPHNYTDSVEFTLPDFPEAGLIHRTQLSANVLAADGTDPSSKIIQLLLSSWVDSDGILFNTIEEIDKIGLYYFRRKLSLPVWPIGPILLSVDSRARSNKVCGISSESCINWLDSKPQNSVLYISFGSQHTISASQMMQLAKALDSIDINFIWVVRPPLGFDMNLEFDAVEWLPEGFLKRIEEQNRGLIIVKWAPQVEILLHKAVAAFLSHCGWNSVLESISAGVPLIGWPMGAEQFYNVKYLEEEVGVCMEVARGTNFEVRNEDIVKKIGIVMGENGKGKEIREKACEVKKMIENGGRDEEGYKGSSVRAMEEFLNVAAFFGKEKKVRGQKCRMNT

SEQ ID NO: 5455 - protein, 474 aa, Cephalotus follicularis
MKDVVVLYPSPGIGHIISMVELGKLILHHYHHQFSITILLTTGFRDTHSITSYIDNVSQSHPSITFRHFPSISVDTTPTRSPAAIAFEFVHLNAPNALHSLGEISKTSTIRAFVIDLFCSDALPVAKQLNIPTFYFYTSGAAALAAFLHFPKLHQLFTQSYKDLATTILQFPAGVPPLRAIHMPEPLLDRNDPAYQDFVHFCSSLPLSDGIIVNTFHDLEPIPIKALEEGACLPDKPTPPIYCIGPLIAEARDEGTHDCLSWLDKQPKRSVVFLCFGSRGTFSPAQVKEIAKGLERSGYRFLWVVKTPPSNEKRKGIDERDMKDVDLDALLPAGFLVRVKDRGMVVKSWAPQVQVLSRDSVGLFVTHCGWNSVLESVVAGVPMVGWPLYAEQHLNRNILVEDMKMAVAVEQREEDGLVNGDELERRVREMMESEKGRELRQRVLLMKERAMVALGESGSSTRDLAQLVQLWNHA

SEQ ID NO: 5456 - protein, 390 aa, Cephalotus follicularis
MFRQIMQKEEEDDRITCIIYDSLMYFAQDVADSFKLPGISVRTSAAAMLLVMAVFRRPDEQGNISYQAFAVNSPSVLPIKKTCVQKKTNVVYVDAVDYMPEDKTPVLQSLKLKNIFESMPQSARDAMLEYRAALTDSLKRSSAIIVNTMDFLEQEILTNIQKLFSAPIFTIGPFHKLAPTISSTSIFQEDATCISWLNKQVPKSVIYVSFGSMASMNENELHETAWGLANSEQPFLWVIRPGLVQGVDWLKLLPEGFKERIGERGCIVKWAPQKEVLAHVAVGGFWSHCGWNSTLESICEGIPMLCRPFFGDQPLNVRYVCDVWKVGLELESELDRGKIEIAVRRLMVDTEGEDIRQRAMEFKKKTDHCLGESGSSLDCLNELTEKILSV

SEQ ID NO: 5457 - protein, 470 aa, Phoenix dactylifera
MEHRPQHFLIVAYPAQGHINPALHLARRLASTTGAHVTFSTAISAHRRMFPALSKPDEEVEDGLLSYIPFSNGYDNGFKAGTGTENAQDFVSKFKLVGSRTLSTIIANLAARDRPVTCMIHTMLFMSWAADVAYDHGVPPVVYWIQPAAVFAIYYHYFHGFEELITSHSQDPLFTVNFPGLPPFRIRDLPTFTITNSDDPYYVILLDFRETFDMLDRKQRSSKPRIMMNTFEALEADAIKAVGNVELITLGPLVPSLPLLGMDSKDKDLFKPDDKGYMEWLDSKPERSVVYVSFGSIAVMKKQQLEEVLRGLRESGRAYLWVVRKDGREEGVELEDEENGMVVEWCSQVKVLSHPSVGCFVTHCGWNSTLESLVCGVPTVGVPQWSDQGTNAKLVETWGTGVRTEVDKEGMLEGRELRRCLEVVMGEGERGVEIRKRAEIWKNKAQEAIREGGSSDVNLRAFLEQIASNN

SEQ ID NO: 5458 - protein, 470 aa, Amborella trichopoda
MEMGSETKHVMLVCYAAQGHINPVLQFAGRLASRGISITVATAAIGRQRILKDGDKATAFEADGNIKFEFFSDGSDPLMPIKDLDDCLGRLEREGPESLAGLVEDLRVQGRKVTYMVTTPFTPWVIDLAKGLGVPCSLLWIQCCAVYGYYYRVLHRNRAEMEVPLTFPGLPHLKPEDFPTLASPSSTYNRFPLLLTQLYEKLGDVKMVLGNSFNELEPEEIWFAEGLHLMKLVGPLIPQALLGCPTAPRLRKDMWVAPSNCLSWLDSKPEGSVVYVSLGSVSVLPPKQTEEMAWGLKISRRAFIWVVKPPENSSETGLPEGFLEGVEGQGIVVPWCPQVEVLSHPSLACFLTHCGWNSTLETVAAGVPVIAFPQWTDQPTNAMFLVDVLRVGVRLKVDLVTRDEVERCIAEVTDGEKATEMKKAAARCKEMARASVAKCGSSERNMQAFVDDIMDNGPIHEPKPGNGVLC

SEQ ID NO: 5459 - protein, 474 aa, Medicago truncatula
MDIQPKKKSLPHVLIFPCPAQGHVNPMLKLAELLAIQNIYITFLNTKYIHNRLIQFNDDIQALLECYPKLQFKTISDFHSEEKHPGFGEKVGDVILSLSLYGKPLLKDIIVSEKISCIILDGIFGDLATDLAAEFGIQLIHFRTISACCFWAYLSVPKLLECNELPIKGDEDMDRIIRNVPGMENLLRCRDLPSFRKMDDSDTILDKAALLTQQSLKGNALILNTFENLESPALSQIRLHAPKLYTIGPLHHHLNTTKKTSSSSSSSSKSNFFEVDRTCMTWLESQPLKSVVYVSFGSITPMKGEEIIEIWHGLLNSKKPFLWVIRPNMVQEKGLLKELEEGTTKEKGMIVGWVPQEEVLSHKAIGAFLTHSGWNSTLESVVCGVPMICWPYFADQQINSRFVSDVWKLGLDMKDVCDRKVVENMVNDVMVNRKEEFVRSAMDIAKLASKSVSPGGSSYNNFQDLIQYIRSTSP

SEQ ID NO: 5460 - protein, 456 aa, Unknown
  Description of Unknown: Crocosmia x crocosmiiflora sequence
MDSASRQHVALIAFPFASHPGNLFAFARALAAAAPDITFSFLTTTFAAATLPPAPPAANLRLCHVADGVPEGGLPPGTTIHGRIGMFLRATPGNFRDGVRAAEEEVGVKVSCVVSDAFLWMTADVAEEIGAQWLPLWTCAPAALLAHVSTDQLRERFGVEKQATAGWADELVDFIPGLSCLRIRDIPDEIVTNWHSDLSILLHRMGNQLTSATAVALNTFDGLDTTIDAALASLFKKTLPIGPLNLLSSPPPLQPGDEKCLSWLDGQEDATVAYVSFGTMVLMPTQSDVSEIAQGLESSGVRFLWSLREEARAGLLPPGFLERTAGRGLVVPWAPQVRVLGHRAVGAFVTHCGWNAVMESVTSGVPMACLPSFADQKTNARMVSAAWGIGEALRGEKVTKEEVVRSMEIVMMGEEGRRMRERIGNLREKAAEAVGPGGSSSENFKSVLEMVRGTAN

SEQ ID NO: 5461 - protein, 857 aa, Citrus unshiu
MYRNSMNCSRWCNSGESGRIFLCEIATEEEGLRRLFWAPAPTVVQAVPISQSFSCRLRAGLSVVTGPVSQAGMASGICQLHIFFFPFLAHGHMIPTVDMAKLFTTRGVKASVITTPANAPHLSRSIQKASELGIELDVKIIKFPSAEAGLPEGWENLDAITNEVNRELIVKFYMATTKLQKPLEQLLQEHKPDCLVADMFFPWATDAAAKFGIPRLVFHGTSFFSLCAIKCLALYEPHKKVSSDSEPFVMPNLPGEIKLTRNQLPDPAKQDMGDNDFSRFMKASDDSDLRSYGVVALGRRAWHIGPVSLCNRNFEDKALRGKQASVDEQECLKWLNSKQPNSVVYICFGSVANFTSAQLMEIAMGLEASGQNFIWVVRKNKNNGGEEEKEDWLPEGFEKRMEGKGLIIRGWAPQVLILDHEAVGGFVTHCGWNSILEGVTAGVPLVTWPVYAEQFYNEKIVNEVLKIGIGVGIQKWCRIVGDFVKREAIVKVVNEIMMGDRAEEMRSRAKAFGEMAKRAVENGGSSSSNLNSLIEDLRLTTGLSMVECPFSVFAEQFFNETWVTRLLKIGEVGMAGEIRKLHIIFFPLMAHGHMIPLVDMAKLFGSRGVKTTVITTPANATLFSKAIPRANELGIEIDIKTIKFPSVEVGLPEGSENLNEMTSQPDMPVNLQEHKPNCLVADMLFPWATDAAAKFGIPRLVFHGTSFLSLCATACLMLYEPHKKVSSVSEPFVIPNLPGDIRLTRNQLPDTMKQDDETDFSRLFKAAVESELKSYGVVVNSFYELEPAYAVHYRKVLGRRAWHIGVLKLAEIKATQFCCLPMLWKPSQLHFCSANGDCNGASSFGAKFHLDCEEKQE

SEQ ID NO: 5462 - protein, 540 aa, Oryza sativa
MTRDKAESSLKLWTPTTHTDTRCYLAIGEPVCSSCSGRDAAVAPAGTMGDGGGGGLDVVVFPWLAFGHMIPYLELSKRLAARGHDVTFVSTPRNVSRLPPVPAGLSARLRFVSLPMPPVDGLPEGAESTADVPPGNDELIKKACDGLAAPFAAFMADLVAAGGRKPDWIIIDFAYHWLPPIAAEHNVPCAVFLIVQAAAIAFLGPRWANAAHPRAPLDFTAPPRWFPPPSAMAYRRNEARWVVGAFRPNASGVSDIERMWRTIESCRFTIYRSCDEVEPGVLALLIDLFRRPAVPAGILLTPPPDLAAADDDDVDGGSSADRAETLRWLDEQPTKSVIYVALGSEAPVTAKNLQELALGLELAGVRFLWALRKPAAGTLSHASAADADELLPDGFEERTRGRGVVWTGWVPQVEVLAHAAVGAFLTHCGWGSTIESLVFGHPLVMLPFVVDQGLVARAMAERGVGVEVAREDDDEGSFGRHDVAAAVRRVMVEDERKVFGENARKMKEAVGDQRRQEQYFDELVERLHTGGGEINDEKYC

SEQ ID NO: 5463 - protein, 435 aa, Arabidopsis thaliana
MTTTTTKKPHVLVIPFPQSGHMVPHLDLTHQILLRGATVTVLVTPKNSSYLDALRSLHSPEHFKTLILPFPSHPCIPSGVESLQQLPLEAIVHMFDALSRLHDPLVDFLSRQPPSDLPDAILGSSFLSPWINKVADAFSIKSISFLPINAHSISVMWAQEDRSFFNDLETATTESYGLVINSFYDLEPEFVETVKTRFLNHHRIWTVGPLLPFKAGVDRGGQSSIPPAKVSAWLDSCPEDNSVVYVGFGSQIRLTAEQTAALAAALEKSSVRFIWAVRDAAKKVNSSDNSVEEDVIPAGFEERVKEKGLVIRGWAPQTMILEHRAVGSYLTHLGWGSVLEGMVGGVMLLAWPMQADHFFNTTLIVDKLRAAVRVGENRDSVPDSDKLARILAESAREDLPERVTLMKLREKAMEAIKEGGSSYKNLDELVAEMCL

SEQ ID NO: 5464 - protein, 418 aa, Cephalotus follicularis
MHTLGKAGPINLSNLITDHYHNHHKKLSCIINNSFVPWVADVASKHGIPCAMLWIQPCSLYAIYYRFYNKLNPFPTLTNPNMNVELPGMPLLLTEDLPSFVLPSNPFDSFTELLSFGFQNMRAYKWVLGNSFFELEKDAIESMAEICPIRPVGPLVPPSLLGEDQNLDVGFEMWKTDDSCIDWLNNQPASSIIFVSFGSIVVLSAKQMEAIATALKNSNRSFIWVVKRPEFPSPNREGELPQGFIEETKSQGLIVSWSPQTKVLAHPALACFITHCGWNSMLETMTAGVPVIAYPQWTDQPTNAKLVTDVFSIGLRLRPNQDGIITSEEVERCVKEIFDGPKSEELKKKAAEWKAAAREAVGSGGSSDRNIQLLVDEIVGVSEISSSVERVVHECLGSDSGVHEVDDQLVIGVDSLAN

SEQ ID NO: 5465 - protein, 253 aa, Cephalotus follicularis
MKGICLKDMPSFIRTTDKDDLIIDIILDVTERAKRASAIILNTFNSMEHQFLSALSSMLPPIYSIGPLQLLLNEVPDTDLKHFGSNLWKEEPECLEWLGSMDANSVVYVNFGSITVMTPDQLVEFAWGLANSKQTFLWIISPDLVSGDSAILPPEFFADTKDRALLASWCPQEKVLNHLAIGGFLTHSGWNSTIESVCGGVPMICCPFFAEQQTNCRYCCTKCGIGMEINNDVKRDEVESLARELTEGDKGKE

SEQ ID NO: 5466 - protein, 428 aa, Unknown
  Description of Unknown: Oryza sativa Japonica Group sequence
MGEEAAAATVTAAAAAAASGGAPHLLLICFPGQGHVNPMLRLAKRIAAKGLVVTFSSTSAIGAKLVESSGVSVGGDGVPLGGGRIRFEFLEDGFDGSDLDELMRHLGTAGPAAFAELLARQEAAGRPVACVVGNPFIPWAVDVAAAAGILSAVLWVQSCAVFSLYYHRVHGLVEFPPEDDLDARLTLPGLPAMSVADVPSFLLPSNPYMSLTEAIQQQIRTIDKATWVFVNSFTELERDVVDALRGVATSPPPPPLIPVGPLIELEGDAAVRGDMIRAADDCVGWLDEHPPRSVVYASLGSVVVLSAGEVAEMAHGLASTGRPFLWVVRPDSRALLPEGFLDAVAGRGMVVPWSPQEQVLVHPAVACFLTHCGWNSTLETVAAGVPVVAFPQWGDQCTDAMFLVDELGMGVRHVEAFVEEVKARAAKA

SEQ ID NO: 5467 - protein, 480 aa, Vigna angularis
METPKLTHVVLVSSPGLGHLIPVIELAKRFVLLHNFKVTVIAVTSQTSPAEAQILNSLLTPSLCHLIDIPSPDISALISQNDAVFTRLCVVMSEAKLAIRSILSEITPRPSAVIVDAFSTETIPITRELDILGYVYCASHAWMLALVLYSPVLDELVEGQYVDQTEPIKIPGCKPVRPENLVDPMLDRNDRQYTEYLKIGKGIVQSDGVLVNTWEELQREELEALREGGSLSEALNMKIPVYAVGPLVREPELETNSSIESLVTWLDQQPTQSVVYVSFGSGGTVSSEQMKELAWGLELSEQRFVWVVRSPIEGVADAAYFTTGSSGIDEVAKHLPEGFVSRTREVGLLVPDWAQQVTILSHRSIGGFLSHCGWGSTLESITNGVPLIAWPLYAEQKINAALLAEELGVAVGPRVLPTKKVVRREEIAEMVREVIEGVESVKGNHVRERVKEVQQSAMKALSKGGSSLVALSHLVNIISG

SEQ ID NO: 5468 - protein, 458 aa, Polygala tenuifolia
MEGVEANKTHCIVLAYPAQGHLNPMVQFSKRLIQKGVRVTLVTTHFYCKNLRKENYNSISIEGITDGFDEGGAMQSAEDWETYLNKFWQVGPASLAELLEKFASSGSPAGCLVYDSFMPWALDVAKKYELVGAVFLTQSCAVNNVYYHVHEGLLKTPISEHTISLPGLPELAVKDLPSFVYSPDSYPVLSKLIVDIFSSIGKADWVLCNTFYELEEEAVKFLSKVWPLRPIGPAIPSMYLDQRHQDDTEYGLSILNQNTEVCLKWLGERPKRSVVYVSFGSLASLNDEQMKEIAYGLKDSESDFLWIVREPDEAKLPKHFAQTLQKGLVMRWCPQLQVLAHDAVGCFFTHCGWNSTLEAISLGVPMIAMPQWTDQTTNSKFIMDVWRVGVKVQLDERGIAKREAIKQTIKEVMEGERGKDIRENSIKWKALSQSTFNEGGSSEKNIDDFVSTLMFSPK

SEQ ID NO: 5469 - protein, 272 aa, Medicago truncatula
MTKLIRDFVIVFLDKANQGLIEYVVDWTMKIWPKFRPIGPSIPSMFLDNRHKDDEDYGVAQFKYNEKCMEWLNDKPKGSVVYVSFGSMVSLDEEQIQELAYGLRDSGSYFLWVVRASEENKLPKDFEKESKKSLVVTWCSQLKVLAHEAIGCFVTHCGWNSTLEALSLGVPTIAIPQWSDQRTNAKFIADVWKMGIRAPIDEKQIVRQDKFKDCILEIMKGEKGKEIKSNATQWKTLAVGAFEEHGSSQKNIIEFVTSLINVGPLTREGSIQ

SEQ ID NO: 5470 - protein, 467 aa, Arabidopsis thaliana
MRNVELIFIPTPTVGHLVPFLEFARRLIEQDDRIRITILLMKLQGQSHLDTYVKSIASSQPFVRFIDVPELEEKPTLGSTQSVEAYVYDVIERNIPLVRNIVMDILTSLALDGVKVKGLVVDFFCLPMIDVAKDISLPFYVFLTTNSGFLAMMQYLADRHSRDTSVFVRNSEEMLSIPGFVNPVPANVLPSALFVEDGYDAYVKLAILFTKANGILVNSSFDIEPYSVNHFLQEQNYPSVYAVGPIFDLKAQPHPEQDLTRRDELMKWLDDQPEASVVFLCFGSMARLRGSLVKEIAHGLELCQYRFLWSLRKEEVTKDDLPEGFLDRVDGRGMICGWSPQVEILAHKAVGGFVSHCGWNSIVESLWFGVPIVTWPMYAEQQLNAFLMVKELKLAVELKLDYRVHSDEIVNANEIETAIRYVMDTDNNVVRKRVMDISQMIQRATKNGGSSFAAIEKFIYDVIGIKP

SEQ ID NO: 5471 - protein, 479 aa, Zostera marina
MDKAEGRHLVFISIPIVGHLIPMVAFAKLLTPRFQITILTMNPPLPNWAAPSAAYLASLRSENNNNTDHDLSRIRFLQLPSVDFQVDHTNHAFTTMSRFIDAHKFNVKEAISDLQQTPNVHVYAVVTDFVTSMIDVANELRIPAYVYFPSSAACLSIMLYPPSQSQLTDDMVDVVGISPVPADAMPGLITDPDGYDTFTYHGRRFNKAQGIIVNTFKELEPAVADALSAKSVLGDATSDDGHYVDVLPPVYTVGPVISIPTETSQHECIRWLDDQPPLSVVYLCFGSMGWFETKQVRQLAHGLERSQHRFLWVLRCPSNEDGSRGDTDLERIGLPDEFLKRTRSRGLVWGSWVPQMDILLHSSVGGFVTHCGWNSCLEAVWAGVPMLAWPLYAEQKFNKCEMVEDMGVALPIISKDGEGVMDAEEVEKGVRCLMGESEEGIKVRIRVTKMKDESRKAVQTRSGSSYHALELWIQNILSF

SEQ ID NO: 5472 - protein, 496 aa, Oryza sativa
MATPAPALVLLPEWGSGHLMSMLESCKRVLLAGAGGGKEFSITLLVMRPPTDEAGSEVEAHVRREAASGLDIRFHRLPAVDPPADAAGVEEFIARYIHLHAPHVRDAVAGMGRPVAALVLDMFAAPMVDVARDLGVPSYVFMSSTGAMLALMLHLPVLHDRVAVEFHEVDGEVDVPGLPPLPPASMPCPVVDKKSPNYTWFVRLGDRFMDATGIIANTADELEPGPLAAIADGRCVPGRAAPPVYPIGPVLSLGGNDKRDSSEPPHECIAWLDGQPPASVVFLCFGSMGWFEAAQVVEITAALERSGHRFLWVLRGPPPAAESGTGAPDGSEHPTDANLDELLPEGFLERTKGRGMVWPTWAPQKEILAHPAIGGFVTHGGWNSVLESLWHGVPMAPWPLYAEQHLNAFELVRDMGVAVPLGVDRERDNFVEAAELERAVRSLMDDASEEGKKAREKAAEMKAVCRSAVAAGGGSSHAALQRLSEALHQGAALPKK

SEQ ID NO: 5473 - protein, 487 aa, Unknown
  Description of Unknown: Oryza sativa Japonica Group sequence
MPAMEEEAVANEAHHFLVVTYPAQGHINPARHLARRLARAAPGARVTISTAVSACRKMFGDAAAAGAGGELVDEGGVRYAPYSDGYDDGFDRAVHDSASYMTQVRVVGARTLAAVIEGFRAAGRPVTRVVYTLLLTWVADVARDHGVPVALYWIQPAAVLAAYFHYFRGTGGVDRDIAAAAAARDRMAPVRVPGLPPLRLRDLPSFLAIADDDDPYAFVLDAFRDIVAVLSRGDRPTVLANTFDAMEPEAVASLRQHGVDVVPVGPVLSFLDAAKSGGGGGAITTTTSNDLFKQNDTGYLEWLDARPAGSVVYISFGSLSTMSRRQIAEVSRGMAASGRPFLWVLRKDNRGEADDVAIDGGVVVEWCDQVRVLGHPAVGCFVTHCGWNSTLEAVASGVPAVCVPQWTDQGTNAWLVAERLGAGVRAAVSEVDGVLEAGELRRCIDAATSEAVRASAAAWREKARAAVADGGSSEKNLQAYVGKIRAN

SEQ ID NO: 5474 - protein, 359 aa, Arabis alpina
MSFTLDPAEELGVPEVLFWTLSACGFMAYLHFYRLVEMGLSPLKDESCWTKEYLDTVIDCVPSMKNMKLKDIPSFIRATNHDNIMLNFSLRETERAKRASAIILNTFDDLEHDILRSMQSILPPVYSIGPLHLLANREIAEDSKIGKMGSNLWKEETECLDWLDTKPRNSVVYVNFGSTTVVTAKQLVEFAWGLAGCGKEFLWVIRPDLIAGEEAIVPPEFLVETANRRMLASWCPQEKVLSHPAMGGFITHSGWNSTLESLSSGVPMICWPFFAEQQTNCKFTCDEWEVGMEIGGDVKREEVEAVVRELMGGNKGKKMREKAEEWCRLAEEATKHKVGSSVVNFETFVNKALLGQRSE

SEQ ID NO: 5475 - protein, 505 aa, Unknown
  Description of Unknown: Oryza sativa Japonica Group sequence
NTFGLTAAPSVRPSARRRRRHTAMSSCEARRAHAVLIPQPAQGHVTPMLHLAKALHARGFFVTYVNSEYNHRRLLRSSGPGALAGAAGFRFEAVPDGMPESGNDDVTQDIAALCVSTTRHSAEPFRELLVRLNSTPGTPPVSCVIADGVMSFAQRVAEEMGILALVFWTTSACGFMGYLHFAELIRRGYVPLKDESDLTNGYLDTPIDWIPGMRGIRLKDVPSFIRTTDPDDVMLNFDGGEAQNARKARGLILNTYDALEQDVVDALRREFPRVYTVGPLPAFAKAAAGEVGAIGGNLWKEDTGCLRWLDAQQPGSVVYVNFGSITVMSPAHLAEFAWGLACCGRPFLWVIRPDLVSGEKAMLPEEFVGETKERGVLASWCPQELVLSHPSVGLFLTHCGWNSTLESICAGVPMICWPFFAEQPTNCRYVCDKWGVGMEIDSNVSRTEVARLVREAMEGERGKAMRVNAMVWKEKAKEATEEGGSSSRNLDRLIEFLHSSGSDAR

SEQ ID NO: 5476 - protein, 487 aa, Catharanthus roseus
MGSLSSSDYSKKPHAVCIPYPAQGHINPMLKLAKLLHYKGFHITFVNTEFNHKRLLKSRGSDSLKGLHSFQFKTIPDGLPPSDVDATQDIPSLCESTTTHCLVPFKQLLQKLNDTSSSEVPPVSCVVSDAVMSFTISAAQELDIPEVLFWTPSACGVLGYMHYAQLIDKGLTPLKDASYFSNGFLDQVLDWIPGMEGIRLRDLPTFLRTTNPDEYMIKFILQETERSKKASAIVLNTFQELESEVIDSLSTLLPPIYPIGPLQILQNQVDDESLKVLGSNLWKEEPECLEWLDTKDPNSVVYVNFGSITVMTNDQLIEFAWGLANSKQNFLWIIRPDLISGESSILGEEFVEETKERGLIASWCHQEQVINHPAIGGFLTHNGWNSTIESISSGVPMICWPFFAEQQTNCRFCCNKWGIGMEINSDVKRDEVESLVKELMVGEKGKEMKKKALEWKNIAEVTTTKPDGSSYSNLEKLIKVLKSKPSH

SEQ ID NO: 5477 - protein, 356 aa, Oryza sativa
REGTPAVSSNQLDDKDGREEEQVVRGLGILPAQLELSTKELPWLVGDSATQRSRFAFWLQTLRRARGFRSVLVNSFPGEAVTGTAAAEDDDGPQRQAACPRVLPVGPLLVLAGCNVERAKGAGDDGGVAATNINNHPQPCSKNPSMWQADSTCIRWLDAQPAASVVYVSFGSWVGPIGHDKIRELALGLEATGRPFLWAIKDDPSWRAGLPAGYAGSVAGRGKLVDWAPQDDVLGHAAVGCYLTHCGWNSTVEAIQHGVRMLCCPVSGDQFINCAYITRVWEVGLKLGSVRRDVVRDCIERIMGGAEGTRLQEKMDALRQRAVTAEARCLAQGNLRSFVNEIKRDHPLLTQIYNIL

SEQ ID NO: 5478 - protein, 332 aa, Unknown
  Description of Unknown: Fragaria x ananassa sequence
YYFNGYKDLIKNNTGADNNDPSFALELPGLPLLFKRRDLPSFILASSPIIHRLVIQMFEDQFEDLGKLSKPIILVNTFDALEPEALKAIDKYNLIGVGPLMPSAFLDDKNSSDKSFGCDIFQKAKESCYMEWLNSKPEQSVVYVSFGSISVLSKNQMEELAKGLLDCGRPFLWVIRENQKKGEGKEEKEEEEELSCRAELEELGMIVPWCSQVEVLSNPSLGCFVTHCGWNSTLESLVCGVPVVAFPQWSDQGTNAKLIEDSWKTGVRVEPNEEGIVVGEEIKRCLDLVMESDKMRRNAKKWKDLAREAVSEGGSFHKNLKAFLEEIEERLR

SEQ ID NO: 5479 - protein, 461 aa, Populus euphratica
MENKHFLLIALPAQGHLNPMFQLGKCLIHAGAGRVTFATTAHGLTQVEAFPSLENLHYASFSDGFDDGIKPTNDPHRIRAELKRVGSQTLTELLLSLSKEGNPVSYLIYTLLLPWAADVARDMSIPSAFLCILSTTAFALCYCFFKERDGVYDSNDNGPPSSIEMPGLPLFTSKDMPSFLLPNDPHASILIPLFQHHIQALEKDSNPCVLLNTSDCLEEEAIRRISNLNPIPIGPLVSYAFLDENNSTDSSCGIDLFEKSTEYSQWLNSKPKGSVVYVSFGSLAVLQKNQMEKILLGLTGTCRPFLWVVRPSAGSDDREFEEKIRDKVNEEEGLIVPWCSQMEVLAHESIGCFMMHCGWNSTLESLATGVPVVGFPQFSDQTTNAKMVEEVWRTGVRARVNDDGTLEAEEIERCLEMVMGGGQRGEEIRRNAKKWKGLTLEAVMEGGSSYNNLNAFLEKIE

SEQ ID NO: 5480 - protein, 470 aa, Medicago truncatula
MSYFANNNKKPHAVLIAYPVQGHINPLFKLAKLLYLKGFHITFGHTEYNHKRLLKSRGPKAFDGFTDFNFETIPDGLTPMEGDGDVSQDIPSLSDSIRKNFYHPFCELLAKLHDSATAGLVPPVTCLVSDCYMSFTIQAAEEHALPIVFFSPASASTFLSVLHFHTLFEKGLIPLKDKSYLTNGYLDTEVDCVPGLKNFRLKDLPDFIRITEPNDVMVEFLIEAAERFHKSSAIIFNTYNELETDAMNALYSMFPSLYTVGPLPSLLNQTPHNHLASLGSNLWKEDIKCLECITVMTRDQLLEFAWGLADSKKPFLWIIRPDLVMGGSFILSSEFENEISGRGLIAGWCPQEEVLNHPAIGGFLTHCGWNSTTESICAGVSMLCWPFFADQPTNCRYICNSWEIGIEINTNVKREEVSNLINELMSGDKGKKMRQKAMELKEKADETTSPGGCSYNNLDKVIKEVMLKQY

SEQ ID NO: 5481 - protein, 467 aa, Medicago truncatula
MKDTIVLYPALGSGHLMPMVELGKLISTHHPSFSITILILTPPNKNTNTNKGTLSPQEQYIANVSTTFPSINFHYIPPISFPTTLPQLLCTLEVCQHSNNHVENILHSISKTTNLKAVILDFFTYSASQVTKKVEIPTYFYYTSGAIFVATFLHFPIVYENATKPIKDLHMPLQIPGLPKSLSTDDYPDGFNDSISENKVLQDMLDSMKTTRECDGIIVNTFDGIEGRAIKALNEGLFIPDGIPSIFCTGPLIASSYGEDENGCLSWLESQPIQSVVLLSFGSMGRFSKAQLNEIALGLEKSEQRFLWVIRSELDLEEQSLDELLPEGFLERTKERGMVVRNWAPQGAILKHDSIGGFVTHCGWNSVLEAVCEGVPMVAWPLYAEQRLNKVILVEEMKVALELKDSKDGFVSGTELGDQIKELMDSDKGKEIRQIIFKMKISAKEAREEGGSSLVALNKLAQLWKQN

SEQ ID NO: 5482 - protein, 468 aa, Panicum hallii
MVSSDHQSLHILLLPFPVQGHINPLFQFGKRLASHKGVRCTLAATRFVASSTKPAPGSSSVHVAVFSDGCDGGGPDELGGPGGPYFERLESAGSETLDALLVSEAEEHGRPVHVVVYDAFLPWAQGVARRRGAACAAFLTQTCAVNALYTHAWAGRVPFRPAKEELAGLRGLPAQLEPGDLPSFLVDRSCPRSFREVVLNQFQGLDTAEAVLVNSFHELEPQESEYLASTWGAKTVGPTVPSAYLDNRLPDDVSYGIQLHTPMTAESKAWLDGHPARSVVYVSFGSMVALAADQLAELAQGLRASGKPFLWVVRATETAKLPESFRGRARAARGLVVPWCPQLDVLAHPSVGCFVTHCGWNSAVEAIAAGVPMVVVPQWSDQPMNAMCVEDVWHVGVQARPETEATAVVGRGEVERCVRTVMEGETGAGFRRSALDWSRKAKKAVSEGGSSDINILEFISKFRSLQVN

SEQ ID NO: 5483 - protein, 491 aa, Tripterygium wilfordii
MQEDKFTYSHTHREVSMAAIVLYPTTGMGHLISMVELGKLILTHHPSFTVNILLPTAPYATGSTAQYISAVSTTNPSIIFHHLPPVSLPLDPASYSCVEALTFDLIRLNNPNVHTAIQSISQTSTVHALILDFFCNAALDVATELDVPAYFFLTSGASFLALFCHFPTIDRSTNKNFKDLETTVNLPYLPPIPLSHMPEPMLEKDTTEYAGFIDCSVGLSKSTGIIVNTFSTLEPKAVKALADGVCNPDGPTPPVFCIGPLIVTNRQIGNEGDDKVLGSECLTWLDKQPSQSIVFLCFGSLGLLSKEQLREIAIGLEKSGQRFLWVVRNPPSEDKKQRFLTQPDPDLNSLFSDGFLDRTKERGLVVKRWAPQVAVLNHEAVGGFVTHCGWNSVLESVCAGIPMVAWPLYAEQKFNKALLVEELKLALPMNESETGFVSATEVEKRVRELMESEEGNSLRERVTAKRNEAMKAMEEGGSSRVALAKLVEQWK

SEQ ID NO: 5484 - protein, 350 aa, Helianthus annuus
MINQTGSSRVVGFVVDVFCTGMIDVANEFNLPTYVFFTSSSAFLGFNLYIETLCVDHNQDHVIELSNSKGEIVVPSFVNPVPKKAFPADYWTQEGLDFVICSIRDLRKAKGIMVNTFLELETHVMKSFTDTNFPPVYPVGPVLNLDVVVKKAHDMDVIRWLDGSSEGDSTRIRTKWSSFCVVPTLSPHLAQSFEDPKVLLPDGFLERTVGIGKVIGWAPQVSLLAHEAVGGFVTHCGWNSILESLWFGVPMTAWPVYAEQQLNAFEMVVELRLAVDLKLDYKMDLFNPNVNTTIVTTEEVERGIRRVMEDNKVRAKVKEMSKLSRATLVEGGSSYASVGYLVQEIMSNII

SEQ ID NO: 5485 - protein, 473 aa, Genlisea aurea
ELVFIPSPGRGHLQAALQLATFLVEADSRLSVTVLVITPFSAPKSPLQSPATHSRIRFVDVAPSDFSPSLDMAKSPVFAMQSFISSHRDSVRAEVKKLREDSGSNGKLAGFVVDMFCNSMIDVADEFSVPAYVFFTSGAAFLGFMFHMQGLLEHKKQDLMAFKNSTEIIDAPSYKHPFPANLLPALTFEKPDGTIFYNIAAAYRRAKGILVNTFLELETHAINSLSDGEKFPQVYPIGPLIYMENDEKNPKYSEIMNWLDEQPDSSVVFLCFGSMGWFDGDQVKEIAAGLERSGHRFLWTLRKPPAPGTVANPGDYENFDEILPDGFLRRTAGIGKVIGWAPQVAVLSHRAVGGFVSHCGWNSILESLWFGVPIAAWPMYAEQQPNAFLLVKDLGVAVEMKMDYVKNSVYGGGNVSSMIVSADVIASGIRELMDSGNHVREEVRVMKEKSRAALSENGSSSRYFRSFVDSLVD

SEQ ID NO: 5486 - protein, 476 aa, Centella asiatica
MKTNYRQPHVVILPFPAQGHIKPMFMLGKLLCNTGINVTLVNTDQNHNILSSSIDKSSFYHLYPGFRFMALGVGPPEENIRRRGKAEIMKWIISTCHPKFNELMIEENKGDGKITCVIADGYMSFAIDVAKEFDIPVISFRTYNATCTWLYFHLEELLQSGEIPVQDRDMDQQVTCIPGLENIVRRRDLPEFCRHESGNSILQFYMDQTSKMKQASALILNTFEELESPIVSNLRSIFQKVYTIGPLQGLLESRMAQNSRWSDVSDASLRPQDQTCISWLDNQAPKSVIYISFGSLVVLTRDQLMEFWHGLVNSGLPFLWVIRPGLIMSDTQTPPERSDWPNKRGFIVDWAPQEEVLAHRAIGGFLSHGGWNSTLESIWAGKSMICWPQFADQQVNSRCVEEMWRIGLDMKDTCDKSTVEKMVKDLMDSTNEQIQKSTARFASMAHNSVSKGGSSYRNIEKLIADIKVGCFNKPNT

SEQ ID NO: 5487 - protein, 221 aa, Panicum miliaceum
MEENRIPQLIQDGVIDEKGWPKRQETLQFAPGMPPLHTSRLAWNNAGAPEGQPAVFQLVTRNNEAKDLAEVIVGNSFRDAEPAAFKLYPDILPIGPLVADLQLKKPVLAHGAVACFVSHCGWNSTLEGVRNGVPFLCWPYFTDQFQNESYICNVWRTGLAVAPGADGVVTKEELSGKVERVLGDDGIRERVGALRDAARRSIAEGGSSHQNLMKFVELLKK

SEQ ID NO: 5488 - protein, 474 aa, Rhodiola rosea
MGSDSRPLRVFFFPFMAHGHLIPMVDIARLFSSQGVHSTIITTPLNANYISKTTSLSIKTIPFPAAEVGLPDGCENIDMLPSPDLFFKFFQAANLLQAPFENLLELERPDCLISDIFFPWSVDSAEKFNIPRLVFHGTSFFAMCAMESLKTHKPYKSVSTDSEPFLIPNLPDEIKMTKSQFTVDAWEDTEKGLGKLLADARASGLRSFGMIVNSFHELEPAYADYYKNVLNMKAWCVGPVSVCNRNVEEKIARGKKSAIDDHECLKWLEGKQPDSVVYVCFGSSASFPDEQLRDIALGLEESGVNFIWVIRRSSESGSKDYLPEGFEDRVKDRGIVIRGWAPQVLILDHPSVGGFVTHCGWNSALEGISAGLPMVTWPLFAEQFFNQKLIKDVLKVGVEVGVQKWSRNGEDRVTKEKVEKAVRAVMVGEEAEERRGRARQLGKLAKKAVAKDGSSYIDLHNLLDELKLRRETLS

SEQ ID NO: 5489 - protein, 486 aa, Ricinus communis
MPSMGQDQLHIFFFPFMAHGHIIPTIDMAKLFASRGVKSTVITTPLNAKTISKTIQRTKNSGFDIDIRILEFPAEAGLPEGCENMDVIISHQDGKDLVMKFFRAIARLQQPLENLLGECKPDCLVADMFFPWTTDAAAKFGIPRLVFHGINFFSLCTGECIKLYEPHKKVSSDSEPFVIPYLPGEIKYTRKQLPDFLRQQEENDFLKMVKAVKESELKSYGVIVNSFYELESVYADFYRKELGRRAWHIGPLSLCNSGIEDKTQRGREATIDEHECTKWLDSKKPNSIIYICFGSLANFTASQLMELAVGLEASGQQFIWVVRRNKKSQEEDDEEWLPKGFEERMEGKGMIIRGWAPQVLILDHEAIGGFVTHCGWNSTLEGITAGKPMVTWPISAEQFYNEKLVTEILKIGTGVGVKEWVKFHGDHVTSEAVEKAINRIMTGEEAEEMRSRAKKLAEMAGHAVEEGGSSYSDLNALVEELRPRRG

SEQ ID NO: 5490 - protein, 516 aa, Aedes aegypti
MIGKIGFPLLLLALAISSNNKGVESAKILCIFPSPGRSHVLVGQTLLKGLAARGHEVTMVSPFKLSKPVPNYREIYVPADDTVSKMTKSFLEKPQNMFKSMPTLMRSVTETANKTINDPQFLAIKNEQFDVVITGLFVADFILGFGPHFNAPTIALWSAGQTKFTSDLVGNPRALEAVPHIMLGSQGAMGFFGRMKNLLIGTVENLITIYMTHSQQKFYDWNFPADKYPSYKDVRKNVSLVLLNTHFSSSGPRPYIQNIIEVGGLQIKTKPDPLPKDIQEWLDGAEHGVIYFCLGSNLKSSDLPPEKLQIFLRVLGKQKQRVLFKWETDSIPNQPKNFLTKKWLPQDDVLAHKNVVLFIAHGGLGGMAEARFHAVPVLGIPIFAEQSHNVNGVEREGWGKQVDYATLTEESFETPLKEILTNPQYRQKVQELSELYRDRPQSAIDLACYWVEYVIRYKGAPHMHYQGADLNFFQEQMLDVVAALLVGAYVVFKVLKLLIKSIAKRICGGRKKQKTY

SEQ ID NO: 5491 - protein, 462 aa, Brachypodium distachyon
MDSINTTAQRSIGGGGGHVLLLPFPGMQGHANPMLQLGRRLAYHGLRPTLVVTRYVFSTTATTDGCPFPVAAISDGFDAGGIASCPDTAEYLRRMESVGSETLSRLISDEARAGRPVRVLVYDSHLPWARRAAKRAGVAAAAFLTQLCAVDVIYGEAWAGRVALPLTDGSALRGVLSVELGPDDVPPFVAAPEWYPAFTESALGQFDGLEEADDVLVNSFRDLEPKEADYMELVWRTKTVGPTLPSFYLDDNRLPLNKTYGFNLFSSIALCMEWLDKQVPCSVVLASYGTVANLNSTQLEELGYGLCNSRQPFLWVLRSDEAEKLPKDLRDKCNTKGLIVPFCPQLEVLAHKATGCFLTHCGWNSTIEAIVTGVPMVAIPQWADQPTTAKYVESAWGIGRRACPDRECLVTREKIERCVKEVICGEKEYTRNAAKWMQKAKEAMQQGGSSDKNISDFVAKYL

SEQ ID NO: 5492 - protein, 474 aa, Ipomoea triloba
MDTSQRSIRVLMFPWLAHGHICPFLVLAQALSKRNFYIYICSTPVNLSSIKKRISEKDAISIKLVELQLPSLPNLPPHYHTTNGLPPHLMPTLKKALDMAKPGFLNLVHTLKPDLVVYDFLQPWVPAMAAAQGIPAVLFLSTGTAAFSYILYNIGRGYPAEEYPFPEVYLRDHEFITNKRLFEAAEQTDGGVSDGERIDGCLDGSSSIILLKTFRQLEGKYIDHLSNMVKKRCVPVGPLVRSPAPDGENPEIKEWLDMKPRCSTVFVSFGTEYFLTEEEMEEVALGLELSKVNFLWVIRFPAAEAGEKPRAIEDALPEGYLERVGERGKLVEGWAPQGMILEHSSIGGFVSHCGWSSVMEALKFGVPIIAMPMHLDQPLNARVVTAAGIGEEVVRDGEGKVEREEVARVVRKVVAEKSGQRLRRRAREFSEKIMSERGEEEIDEAVQELTALCQTTTFRQDSAELNCIRFSLGG

SEQ ID NO: 5493 - protein, 483 aa, Manihot esculenta
MGSLASEIPPHAVLVPYPAQGHVNPLMQLGKLLHSRGFYITFVNTEHNHRRLIRSRGQEFIDGLPDFKFEAIPDGLPYTDRDATQHVPSLSDSTRKHCLAPFIDLIAKLKASPDVPPITCIISDGVMAFAIDAARHFGIPEIQFWTTSACGFMAYLHHIELVRRGIVPFKDESFLHDGTLDQPVDFIPGMPNMKLRDMPSFIRVTDVNDIMFDFMGSEAHKSLKADAIILNTYDELEQEVLDAIAARYSKNIYTVGPFILLEKGIPEIKSKAFRSSLWKEDLSCIEWLDKREPDSVVYVNYGCVTTITNEQLNEFAWGLANSKHPFLWIVRPDVVMGESAVLPEEFYEAIKDRGLLVSWVPQDRVLQHPAVGVFLSHCGWNSTIECISGGKPMICWPFFAEQQTNCKYACDVWKTGVELSTNLKREELVSIIKEMMETEIGRERRRRAVEWRKKAEEATSVGGVSYNNFDRFIKEAILQHKTK

SEQ ID NO: 5494 - protein, 593 aa, Helianthus annuus
METHDSTLRSTTSRRIILFPLPFQGHINPMLQLANILHTRGFKITIIHAEYNSPNPSNYPQFTFKPIKDRFSAIADQLPTNPDTTYYLKYLNESCVDPFRDCLAGLLAEERVACVITDAGFYFAQAVADDLKICRIVLRTSSLGGLLACKVLPFFSKKASFYLTKEANMLHTRGFNITVIHAEYNSPNPSNYPHFTFIPIKDRFSEIADQLPTNPDASYFLNYLNKSCEQPFRDCLAGLLAEPGEERFACVITDAAFYFTQAVADDLKLPRIVLRTSCIGCVITYDALPFYSKKACFKLTKQDPDYEASVPEYPLLKFKDIAKITINPQGTGDFATNMLSQMRASSGIIWNTFKELEESDLETLSRDFPVPSFTLGPFHKYFPASSSSLIEQDRTILSWLDKQPPKSVVYVSFGSVAHITESEFQEVAHGLVNTGLPFLWVVRPGIVIGSEWLEALPEKFLERMGERGRIVKWSPQQEVLAHPATGCFWTHNGWNSTLESICEGVPMICSPCFVDQPINARYVSDVWKIGVMLEDGFERVGIEMAIKRVMMDKEGEEMCERVTSLKEKVNLSLAEGGSSCRSLNNLVDYISSL

SEQ ID NO: 5495 - protein, 458 aa, Solanum lycopersicum
MKHHHFIIISLTIQGHINPTLQLAKNLSRAGVRCTFVTTVNGFSKLNNLPSIDGLFYASISDGNDDGTAKMDFSDYMKQLKRVGSENLKKLIDRYAGDGHPVTCLVYTFIWPWVAEVAREINLPSAFLVIQSATAFAIYHHLFSINNNGVYSSTNEINLSFPIKLPELPLLFRDDIPSFLLQNDPYSSFMIPVMREHIQNLEHDTNPRVLINTFNKLEEKSLKIIDKIGIYSIGPLIPSAFLDGIELEDKSFGCDLFEKSETYCQWLDSKLEGSVVYVAFGSIATVKEEQKEEVLQGLLESEMPFLWVIRSSKEDDKKKNDEIYGLNGKGMIVPWCSQMEVLFHKSIGCFVSHCGWNSTLESTIAGVPLIGVPQLADQFTNIKMVEEVWGTGVRARVEEEGGIVKREELKRCLGVLMGDGEKGNEIRRNVKKYRDLAMEAVKVGGSSHNNLNKFLESL

SEQ ID NO: 5496 - protein, 480 aa, Helianthus annuus
MGSNLEKKPHALCIPAPLQGHINPMLKLAKILHSKGFLITFVNTEFNHQRLLRSQGLEALHGLPSFRFETIPDGLPPPENTNATQEIPSLAKSVEETCLGPFKSLVTKVNASYAPVTCIVSDLLMGFTLAAAEELGIPEILLWTSGTGSLICYNQFTNLLEKELMPLKDPSYLVNGYLDTVVDCIPTMPGIRLKDFPPFIRIIYPGDEYMVRFLCLQVERAKRASAIIFNTFDALEHDVLDSLSSMYPPCYGIGPLHLLEKNIADKSLASFKSNLWKEEPECLKWLDSQAPSSVIYVNFGSIAVMTPQQLVEFCWGLAKSNYSFLWIIRPDLVIGDNAMLPPEFVTETSDRGMLVGWCPQEEVLNHPSIGGFLTHSGWNSTLESISSGVPMICWPFFADQQTNCWWSCNKWGVATEIDNNVKSDEVSKLVVELMKGEKGREIRKNVIDLKNKAQEACIAPSGSSMTNLEKVVQLMHTFSK

SEQ ID NO: 5497 - protein, 470 aa, Cephalotus follicularis
MASNSMDTSHHVVLFPFMSKGHTIPILGLARLLLLRPGITVTVFTTPANSPFISKSLTDTTASIIELPFPQNIPEIPPGVESTDKLPSISFHVPFTRATKLMQADFERALEAVPRVSFMVSDGFLWWTLDSANKFGFPRFVFYGMCGYANCVFKAVFENRLMIGPKSDDELITVPPFPWIKVTRNDFEPPFNDPEPKGPFFELFMDQIISTENSYGQIVNSFYELEPTYVDHWNSGGEHKKWCVGPLNLAEPPGLEPGRHQKPTWIQWLDQKWSQGSSVLYVAFGSQAEISGEQQKEIAKGLEESNVNFLWVIRRKEAELGEGYEERVGERGIVVMEWVDQNEILKHQSVKGFLSHCGWNSVLESICAGVPILAWPMMAEQHVNARMVVEELKIGLRVETCNGSVRGFVKWQGLEKMVRELMEGEMGKEARKKVKEFAEMAKAAFEEGSGSSRRTLDMLIDEICNATKMS

SEQ ID NO: 5498 - protein, 459 aa, Nelumbo nucifera
MGERPNHFLLVTLPMQGHINPTLQFAKRLLRTGAQVTFAISFSAYRRLMKSSTPIHGLTFAPFSDGFDDGYRVFFDEPSEFKLRASQALADLILAASKEHRPVTCLIYTLLLSWAADVANNLGVASALLWIQSAAVFDIYYHYFNGFRELIANSEDDPLSSIELPGLPRLTSQDVPSFLLPSNFLPLAVPGFQEQFQSFERETKIQVLINTFDAMEPEALGAIDKINMIGIGPLIPSAFLDDEDPSDKSFGGDLFHGSGDYIEWLNSKPDSSVVYVSFGSLAVLQTEEIANGLLESGRPFLWVIRLNRNETGEETMLGRWEELKERGLIVPWCTQVEVLSHSSVGCFVTHCGWNSTLESLVAGVPVVTLPQISDQTTNSRLIEDVWRTGVRTKVKTEEGIVESGEIKRCLDLVMGSESGNEMTRNVKKWKEMSKEAVKDGGSSDKNLKRFLEEIVMTGI

SEQ ID NO: 5499 - protein, 492 aa, Zea mays
MATAAVPASRTGSGGVVRRRRRRVLMFPLPFQGHLNPMLQLAGALHARGGLDITVFHATFNAPDPARHPPGYRFVPVGDGVPSADLVPSGVDADIPGALLRINRRLREPFRDCLRQALALPEDDGDEGGAPPACLVVDSNLRGMQLVAEELGVPTLVLRTGAAACLVAYLAFPALCDKGLLPPTSKDKSQLDIPLDGLTPLRLRDMVFSPTTTHANMTECLKCLVDATRSCSGVIFNTFRDLEDSDLQRIANGVVGVPIYPVGPLHKISPCTEDSLLAPDRACLEWLDKQEADSVLYVSFGSLARVDGKELLEIAWGLADSKMPFLWVLRHGLLVNSSSSDDDDDQDKVRRLLLPGGFEEATRGRGVVVPWVPQQEVLRHRAVGGFWTHSGWNSTLESVCEGVPMMCRPQFADQMINTRYVQEVWRVGFELDGDQLERRKIAGAVTKLLCTEEGRRMRQRARDLRDKAIECVQEEGASKSAIQLLIDRIASF

SEQ ID NO: 5500 - protein, 482 aa, Medicago truncatula
MEPSRPHVVCVPLPAQGHINPMLKLAKLLHHSGFFITFVHTQFNFDRLLQSSGQNSLKGLPDFRFETISDGLPPENQRGIMDLPDLCSAMPIGGLISFRNLIAKFVSSENEDVPPVTCIVSDGVMNFTLKVAQEFNIPEFMLYTPSGCGMLGYINFDELQKRGYFPLKDEKNVCDGYLETEVDWIPAMRGVKLKDLPTFFRTTNSNDTMFNYNRESVNNAMNAKGVILNTFQELEQEVLDAIKMKYPHLYPIGPLSMLHKKNSNSSSNNQLDSIDFNLWKEDVNCMNWLDKKDKGSVVYVNFGSLVIMTTKQLREFAWGLANSKYNFLWVIRPNLVDCGDEVISNDEFMKEIENRGLILGWSPQEKVLSHSCIGGFLTHCGWNSTLESICEGVPLACWPFFAEQQTNCFYACNRWGVGIEIESDVNREQVEGLVKELMKGEKGKEMRNKCLELKRKAEAATSIGGSSYNNYNSLVLKLKFEK

SEQ ID NO: 5501 - protein, 517 aa, Bicyclus anynana
MRLNYAYLQKMIKKALWLVVVILTLCEISAYKYLVVSPIPSKSHSILGDALVEYLADAGHEVTYITAFTPEKVSPRVTIIDTSDHIRNFPIDATFNLKSFMDGTVTTNNFMTFAPLMLEISRATLGNSNVRKLLADENQRFDAVIAEWMYNEVYVGFAGVFNCPLIWFSSIEPHWMVMQLIDEIPNPAYSTDMLTADSIPPLTFRQRVVELYTQIVGRLAQTFWLSGLERDVYNEYFVPFIRDRYNTVPPFEELRYNASLMLCNSHLSMNTPIRLPANVITIGGYHIKPNIKPLPEDLQTLMDNSKDGVIYFSMGSNLRSKHFPDEVKQSLLKMFGKLKQIVLWKFEEDLPNRPNNVHIVQWAPQQSILAHKNCILFITHGGLLSTTETVHFGVPIIGIPVFADQFVNVGRAVKKGFAQRVDLSYSLAADIEKAIRNVLDNPSYTTRVKELSAIYHDRTVPPATELVHWAEQVVKTKGARHLRSPAFMMPWYQKMYLDLILVLLVVLLVLKYVFIYI

SEQ ID NO: 5502 - protein, 367 aa, Medicago truncatula
MIFLCFSLISRLSHNLCQHRNHKHLLKSRGPKAFDGFTDFTFETIPDGLTPTEDSSNDDLIPPVSCLVSDIELFLLVHPHFCVLCSFVHLLIKVSYPSKMSYLTNGYLVTKVDWIPADDMVHEANAIVFNTYNELESDVVKALSIKIPSIYAIGPLSSFLNQNPQKHLASLGSNLWKEDMKCLESKEQGSVVYVNFGSTMLVIGGSVILSSEFVNGTSDRGQIASWCPQEQVLNHPSVGRFLTHCGWNSTLESICARVPMLCWPFFSEQPTYCRYICNKLEIGIEIDTNVKREEVEKLMNELMVGQKGKKMRQKAVELKKKKAEKDTRPGDSSYMNLDKVIKDVLEIILQKHTSLHYTISFLLHRLI

SEQ ID NO: 5503 - protein, 473 aa, Rhodiola sachalinensis
MAGSGTGAPHIALLPSPGMGHLIPMAEFAKRLVHHHNFTVTFIIPTDGPPSAAYRQVLASLPTSISHIFLPPVDLSDVVPSHPRIETLISLTVVRSLPSLHNTIASLLASKNLAALFVDLFGTDAFDPAIDLGVSPYIFFPSTAMTLSLILHMPELDRSVTCEYRHMTDLVRIPGCIPIRGSDLFDPVQDRTDEAYKRIVHHAKRYPMAEGIIENSFMELEPGALKYLQSVEPGRPPVYAVRPLIKMDYEVDSSGSKIIEWLDGQPIGSVLFISFGSGGTLSFDQMTELAHGLESSQQRFLWVVRSPSLIPNSAYFSAQSQNDPLAYLPDGFLNRTSDRGLVVPNWAPQAQILSHGSTGGFMSHCGWNSILESVVYGVPIIAWPLYAEQKTNSIIVVEDVKVAVRPAGVGEGLVKRLEVATAVKALMEGEEGKKVRNRMRDLKDAAARAICVDGASTKAIAELAKKWRSSVKH

SEQ ID NO: 5504 - protein, 317 aa, Theobroma cacao
MDQEQQPQAYPHVLIFPLPAQGHVNSMLKLAEVFALAGLQYPRFKFETIPDGLREDHPRLGDCFMELFEGMELRTKPILREMLVKINPPVDCIVGDGVLGLVLDVADELGIPIFQFRTISASCIWAYFAIPDMIEAGELPIRVFGKWTGVACHGLMSNQRNLLFRPDFMPEKGSIPVELVEGTKERGYMVGWAPQEEVLAHCAIGGFLTHSGWNSTLESLVAGVPMICWPYFADQQLNSRFVSEVWKLGLDMKDVCDRRVVEKMVNDLIVDKREEFVKSSAEIAKLAKACVNVGGSSYCNLDRLIEDIRSMNRNCSK

SEQ ID NO: 5505 - protein, 470 aa, Medicago truncatula
MTFQPDKNNPHPHTLVIPFPAQGHMIPLLDLTHKLASTITNLTITILTTPKNQSLLTPLLNSHPSTIHPLILPFPSHPSIPHGIENAKDLPNSFDTFILAVSKLHDPLLNWFHSHHSPPQYIISDMFCGWTQHLASQLNIRRLVFSPSGAFAFSTMCFNWKHLPSRVNPNDENEVVLYHNIPNSPKYPWWQVSPIFRSYIPGDTDSEKLKDLFLCNSQSYGIIVNTFAEFEKPYLDYLKTELGHDRVWAVGPLLPVDESSTMALQRGGSSSVSVNDVVSWLDQREDKKLVYVCFGSQTILNKDQTVAIASGLLKSGVHFIWSIKETKNENEGLDFEDAFLGRGLVIRGWAPQVMILRHRAVGAFLTHCGWNSVLESVVAGVPLIAWPMTADQFVDATLLVDELKVGKKVCEGGNSVPDSDELGRVLAEAIGGSGEEISRSLKLKQAAFDAVREGGSSDKDLQCLMEQLVL

SEQ ID NO: 5506 - protein, 474 aa, Oryza sativa
MAIPTLVLLPTWGTGHLMSLLDAGKRLLGCRGGGGLSLTVLVMQPPRKEYASAVAATVRREEASGLDIRFRHLPAVEPPTGCAGVEEFVSRFVQLHADHVRAAVSGLDCPVAGLVIDFFCTTLLDVARELAVPAYVYFTSNAACLALLLRLPALEGEVTVEFEEMDGEVDIPGLPPVPPSSLPMPVMDKKNPNYTWFVYHGRRFMEANGIIVNTVREIERSVLAAIADGRVTPGVRAPVIHPVGPVISFTPPSDDPPHECVRWLDAQPPASVVFLCFGSMGSLAPPQVLEVAHGLERSGHRFLWVLRGAPAAGGSMNPTDADLDELLPEGFLERTTGRALVWPTWAPQKEILAHAAVGGFVTHGGWNSTLESLWFGVPMVPWPLYAEQHLNAFTLVAAMGVAVAMKVDRKRNNFVEASEVERAVRSLMGGSEEGRKAREKAAEMKAVCRKAVEEGGSSDMAVHKLYEELSTQTA

SEQ ID NO: 5507 - protein, 471 aa, Vigna angularis
MEKAARLVFIPGPGVGHLVSTIQFANLLLERHHHIWITLLVIKLPSDTTTAAYTHSLNSHRLQLVNLPETPSDAQAIPITLIELQKPNVKEAVSNLSPTPPLAAFVVDMFCTSMIDVAKEFHVPSLVFFTSGLAFLGLILHLHTLKEEENAEFTEPDAEWVIPSFAKPVPIRNFPSVVLWKEWEEFFVAFGRGLKKADGFVVNSFEELESHAAHSFLDGPQLIFAVGPILNPKPKLHPDAPADNADIFDWLDNQPPSSVVFMCFGSMGSFGEDQVREIARALENSGARFLWSLRKPPPKGSRFIPPSDYAPSELPSILPAGFLDRTAGIGKVIGWAPQAQILAHRATGGFVSHCGWNSTLESIHFGVPIATWPLYAEQQTNAFLLVRELEIALEISLDYRAESKNETPSVLSAEQIENGIRNLVEIDDEKRKRVVEASENSRKTLLEGGCSYSSFGRLIDYVMNQGINSPC

SEQ ID NO: 5508 - protein, 468 aa, Citrus unshiu
MSPGHQIDMARIFASRGVKATILTTPLNISRFESSINRDDYHHHNPIKLLLLNFPSTAANLPPNCENLDAIPSRDLSYNFSKAIMMLQPQADDLVRQCQPDAIISDMNFPWTAEIARKYGIPRLVFRGTCCFSLSLSVAAAQHKPNVNVSSDTETFLVPGLPRPVYITQSQMPDQFFGNTDLQEFFEKFIKAERNSYGVVANTFFEIEPDYVKHYEKVTGKVVYPVGPPRGNEGDRGSVDEDYCVSWLDSRESNSVLYVCFGSLCEFAESQLLEIALGLESSNICFIWVIKSDAFLLLDKDFEERVKDRGLIIKGWAPQVLILNHPAVGGFMTHCGWNSVLESVSSGAPMITWPLFAEQFYNGNFVLTHWKIGVGVGVESGLAWGEEEKIGVLVRRDRVEKVVYQFMINGGEEVEGMRKRARKLSELAKIAVSKGGSSYVNVGLLIDDLLNQKVERLSKKKESVDQFV

SEQ ID NO: 5509 - protein, 474 aa, Unknown
  Description of Unknown: Oryza sativa Japonica Group sequence
MAMVEKTVLLYPCPAVGHLNPMVQLAEALVRRGVSVTLAVADPPDKGAVLAGAIARIAAVCPSIGVRLLPIPSCEGKTYSHPVMWIVDALRLANPVLRELLRSFPAAVDALVVDMFCIDALDVAAELAVPAYMFYPSAASDLAIYLQVPHVARSAPSSFKDMADTVLSFSGVPTIRALDMPDTMQDRESDVGTTRIHHCSRMAEARGILVNSFDWLETRALKAIRGGLCLPSGRSVPAIYCVGPLVDGGKLKENDARHECLEWLDRQPKQSVVFLCFGSRGTFSVSQLSEMARGIENSGHRFLWAVRSNLGEVDLEALFPEGFLERTQGRGFVVKNWAPQSAVLQHGAVGAFVTHCGWNSSLEAIMSGVPMICWPLYAEQRLNKAHLVEEMKLGVLVEGYDGELVKADELETKVRLVMESEEGKRLRERSAMAKEMAADAVKDGGSSDMAFAEFLNNLGTNNVKSGPRDTPVHD

SEQ ID NO: 5510 - protein, 480 aa, Arabidopsis thaliana
MKTAELIFVPLPETGHLLSTIEFGKRLLNLDRRISMITILSMNLPYAPHADASLASLTASEPGIRIISLPEIHDPPPIKLLDTSSETYILDFIHKNIPCLRKTIQDLVSSSSSSGGGSSHVAGLILDFFCVGLIDIGREVNLPSYIFMTSNFGFLGVLQYLPERQRLTPSEFDESSGEEELHIPAFVNRVPAKVLPPGVFDKLSYGSLVKIGERLHEAKGILVNSFTQVEPYAAEHFSQGRDYPHVYPVGPVLNLTGRTNPGLASAQYKEMMKWLDEQPDSSVLFLCFGSMGVFPAPQITEIAHALELIGCRFIWAIRTNMAGDGDPQEPLPEGFVDRTMGRGIVCSWAPQVDILAHKATGGFVSHCGWNSVQESLWYGVPIATWPMYAEQQLNAFEMVKELGLAVEIRLDYVADGDRVTLEIVSADEIATAVRSLMDSDNPVRKKVIEKSSVARKAVGDGGSSTVATCNFIKDILGDHF

SEQ ID NO: 5511 - protein, 465 aa, Unknown
  Description of Unknown: Oryza sativa Japonica Group sequence
MMTETVVVNAGLGVGHLAPMVELANLFPRHGLAVTVVLIEPPAKPPSFAAAVSRSMASNPRITFHVMPSPSCHSNVPELIRAMNAPLREYLRSSVPSARAVVFDMFCACALDVAAELGLPAYFFQCGGASHLAVGLHLPHVQAEINASFGEIGDEPLLFPSVPPFKPSDLPKAALDRNDEMYRWILGVFERLPESRGILVNTFQWLETKALRALGDGACVVGRPTPPVCCVGPLVSRSGEDKKHGCLSWLDAQPEKSVVFLCFGSMGSFPKEQLAEIAIGLERSGQRFLWVVRRPHAGEASLSGLLAGCHGTHGELDIDELMPEGFLERTKGRGLAAGSWAPQADVLRHRATGAFVTHCGWNSVLEGIAAGVPLLCWPLYAEQRLNKVFIMEEVGVGAVMAGYDGEVVRAEEVEAKVRWMLESNEASPIRERVALAKERAEEATRKSGSSHQSFVKFLIDFGVTK

SEQ ID NO: 5512 - protein, 473 aa, Fragaria vesca
MTQHRFLLVTFPAQGHINPSLQFVKRLIRTTDADMTFVTALSAHRRIANGSSMPRGLTFAPFSDGYDDGFKPGDIDIHHYMSELRRRGSQAITDIVMSSANEGRPYTCIVYTILLSWVAKVASELQLPAALVWIQPATVFDIYFYYFNGYKNLIRNSAMTNNCDPCHGVQLPGLPLSLKSRDLPSFMVDSNSNPYDFALPLFEEQFEQLGKESKPTILVNTFDALEPEALKAIEKYNLIGIGPLIPSFFLDGKDPSDESFGGDLFDKSKDSAYLAWLNSKPKESVVYVSFGSISVLSKIQMEEIAKGLLISGRPFLWVIRENQKNGEKEEDKVSCREELEELGMIVPWCSQVEVLSNPSLGCFVTHCGWNSTLESLVSGVPVVAFPQWTDQGTNAKLIEDTWKTGVRVEPNEEGVVVGEEIKRCLDLVMESDKMRMNAKKWKDLAREAVSEGGSSGKNMKVFLDQIGDGSFLA

SEQ ID NO: 5513 - protein, 463 aa, Unknown
  Description of Unknown: Oryza sativa Japonica Group sequence
MAIGTVESVAVVAVPFPAQGHLNQLMHLSLLLASRGLDVHYAAPPAHLRQARLRLHGWDPDALRSIRFHDLDVPAYESPPPDPTAPPFPSHLMPMLESFAVAARVPLAALLERLSASYRRVVVVYDRLNSFAAAQAARLPNGEAFGLQCVAMSYNIGWLDPEHRLVREHGLQFHPVEACMTKEFVELISRAEQDEENAASSGILMNTSRALEAEFIDEIATHPMFKELKLFAAGPLNPLLDATARTPGQTRHECMDWLDKQPLASVLYVSFGTTSSLRGDQVAELAAALKGSKQRFIWVLRDADRANIFADSGESRHAELLSRFTAETEGVGLVITGWAPQLEILAHGATAAFMSHCGWNSTMESLSYGKPILAWPMHSDQPWDAELVCKYLKAGLLVRPWEKHSEVVPAEAIQEVIEEAMLPEKGMTIRRRAKELGEAVRASVADGGSSRKGLDDFVGYITR

SEQ ID NO: 5514 - protein, 464 aa, Arabis alpina
MTPPHFLLVTFPAQGHVNPSLRFARRLIRTTGARVTFVTCQSVFNCSMIPNQSNLKNLSFLTFSDGFDDGGMSNVEDRQKRSLNLKTNGDKTLTDFIEANRYSDSPVTCVVYTILLNWAPKVARRFQLPSALLWIQPALVFDIYYNHFTENNTSFEFPNLPSLAIRDLPSFLTPSNTNKDAYGSFQEMIELLKEEANPKILVNTFDSLEPEALTAYPNIKMVAIGPLLPTEIFLESTKSVKDVSREQSRYSLWLDSKTESSVIYVSFGTMVELSKKQIEELARALIDGKRPFLWVITDKSNREAKTEGEDETEIEKIDGLRHELEEVGMIVSWCSQVEVLRHRSVGCFVTHCGWNSTLESLVLGVPVVAFPMWSDQPTNAKLLEEQWKTGVRVRENEKGLVERGEIRRCLEAVMEEKAVELRENAEKWKRLAAEAVGEGGSSDKNMEAFVEEICGNSVQWKRGG

SEQ ID NO: 5515 - protein, 452 aa, Helianthus annuus
MEKPSHIAIIPIPGMGHLIPLIEFSKKLLAQHNLSATFIIPNEGPLSNSQYEFLDSLPDAINYTLLPPVNFDDLPQDTKIETRLCLLATRSATALHATISSMMADKKIVALFVDLLAADAFDVADKFGVPRYLFFAASAMCLSLCLYLPKLDQMVSCEYRDVPDPIQIPGCIPVHGRDLLGSLQDRNNEAYKRVLHIAKRYVMADGIVQPGMPPVYPVGPLIQSGSVESSKGVNESSCLKWLDGQPCGSVLYICFGSAGTLSSEQVTELAMGLELSEQRFIWVVRPPHDKGADGTYLNSQGHDGTFDFLPKTFLERTKNRGLVVPNWAPQARILSHSSTGGFLTHCGWNSILETIVHGVPVIVWPLYADQKMNAIMLTEGLQVGMRAKLNENGIVDRLEIARVVNGLLQGDEGKAIRIRTHKLKEAALSVLSKDGCSTKTLDQLASKLKNKI

SEQ ID NO: 5516 - protein, 475 aa, Brachypodium distachyon
MASHAEPAQGEAAGAGAGGGHVLLLPYPSQGHVHPMLQFAKRLAHHGMRPTLAVTRHILATCTPDAALASAVRVAAVSDGCDAGGFGECNDVDDYLSLLEAAGSETLGELLRAEAAGGRPVVAVVYDAFLPWARGVAAAHGAAAAAFFTQPCAVNVAYGHVWGRKVSVPVEAGAKVVGLPGLPALQPEGLPWFLKVGPGPYPGYFEMVMSQFKGLELADDVLVNSFYELEPEEAAYMASAWGAKTIGPTVPASYVGDDRLPSDTKYGFHLFDLTAAPCIEWLSTHPARSVVFASFGSLSNLDPAEMREVAQGLLDAGRPFLWVVRCSEAHKLPAGYSEACGSRGGLVVSWCPQLEVLAHRAVGCFLTHCGWNSTAEALVAGVPMVALPQWTDQPMNAEYVEAVWRVGVRVRPAAEDGLARSGEIVRGIEEVMEGEKSGEYRRNAAAWVEKARAASREGGSSDRNIAEFVAKYSSK

SEQ ID NO: 5517 - protein, 460 aa, Ricinus communis
MGHPHILVVTFPSQGHINPGLQLAKRLVTLGLKVTFATTISTHRRMSRTDDSNGLLSFATFSDGHDDGYNLLGGDFAHCLSELTHYGQQTFPKIILRSAKDGHPVTCIIYSLLVSWVAKVARDFHLPSIFLWNQPATVLDVYYHYFHGYEGDIEKSINSPTISVNLPGLPPLRSSDLPSFFSPKSNTKLHGFALPALKEHFHILDAETNPRILVNTFDELEHEALNSIKKYNLIGVGPLIPSAFLDEKDPSDTSFGADLVQGSNSYTEWLDSKPKSSVIYISFGSIAMLSEKQMEETAKALIDIDRPFLWVMRENDIGVKHRKELQQKGIIVDWCCQVEVLSHPSVGCFVTHCGWNSTMESFVSGVPVVALPQWSDQGTNAKLVTDVWMTGIRMVPNERGIFEGEQLKKGVQLVMGEREKAKEMRKNARKWKDLARDAVKEGGTSDKNLKTFLDEIIEGC

SEQ ID NO: 5518 - protein, 469 aa, Medicago truncatula
MDTIRDEEKALHIVMFPWLAFGHMIPYLELAKLIAQKGHKVSYVSTPRNIQRLPKLPPNVAPLIKFVNLPLPKVDNLPENAEATTDIPYDVVPYLKNAFDKLEKPFTHFLETSNAGWIFHDFANFWIAPTASQLGIKCAFFSIFTAPTMGFLGPVSVILGDEPGRTKPEDFTVAPPWVPFQTTVAYRYFEIIKTADILSDKILGTSDLHRYGLSIQNSDFILIRGCTEFEPEWFQVIQNIHQKTVLPAGQLPNTEFDSGHENDSWPRIKEWLDKQPHGTVVYVAFGSEAKPSQEEVNEIALGLEKSNLPFFWVLKVRRGPTDKVVLQLPEGFEERTKGRGVVCTDWVPQMKILGHMAVGGFLTHAGWTSVVEAVQHEKPLVLLTYLSDQGINARVLEEKKMGYSVPRDERDGSFTSDSVAHSIRLIVVEEEGMIYRENIKNMKDLFVNIERQDKYVNNLLSHLTSLLKH

SEQ ID NO: 5519 - protein, 482 aa, Indigofera suffruticosa
MAKKRAQVVFIPSPGAGHFGSTVEFAKLLSNRDEGISITVLVMKSPFDHSTSANSCTESLSSFERIKVTHLPEVQVTADQFNPGSFMTELLELQKPNVTQVVSNLTASASAPPLAAFVVDMFCTTMIDVAEQHFKVPSLVFYTSGLAFLGLILHLHTIRERDNIYFGDSEADVAIPSFVNPVPPKSLPSIVVNKEWNPFFLRYGGGLKRANGLIVNSFEELESHAVRSFSSTSEFHHLPVYPVGPILNFNGGDDADNNNNNEEIIKWLDDQPPSSVVFLCFGSMGSFDEDQVREIAIALDNSGARFLWSLRKPPPKDTMGKPSDYAPSELPAILPDGFLDRTAGIGRIIGWAPQTQILAHPSTGGFVSHCGWNSTLESIYFGVPIAAWPLYAEQQTNAFELVCELKVAVEIALDYRVEFKGGRNMLLSADKIERGIRSVLEKDGEFRNKVKEMSEKSRKTLLPGGCSYSYLGRLVDYLMDQV

SEQ ID NO: 5520 - protein, 490 aa, Polygala tenuifolia
MDQTASSAKPHVLILPFCAQGHIKPMFKLGQLLCHAGLRISFVNSEHNHQNLLRQIDLLAFQAQYPEFSFLSIPDGLAVDHPRSGLTSGDLFLPPARSVMTQHLNELITGFIGRNTKPACIIADGVMCFAIHVAREFEIPSITFRTYSATCTWAYFHFKTLTQEGLVPLPEGVDMDNPVTCIQGLENLLRNRDLPIMCRYKVAARAVEFFIEETSIMAQASALLLNTFDELEAPLISKLRSIFNKIYTIGPIHSLYKSYIKSNLPQSNGLSNTSGSLVQEERSCMTWLESKPPKSVLYVSFGSVVELKQNQLLEFWHGLVNSEKFFLWVIRSDLISGEKDAGQNVPAELKEGTMDRGCIVSWAPQEEVLAHPAVGGFMTHSGWNSTLEGIAAGVPMICWPLISDQQVNSRCVSDIWKTGLDMKDKCDKVIIEQMVRDLMENKKDEIRISAEEKGRLAQESVEKGGSSYNNFEKLIEDIRSMALARAHESS

SEQ ID NO: 5521 - protein, 499 aa, Theobroma cacao
MLTTLYINPTEAGFVHIHQRIHIAISGTQRDSSAFFPKMPNQENSVAVVMVPFPAQGHLNQLLHLSRIVLSYGIPVHYVATPTHNRQAKIRAHGWDPVATANFHFHDCQVPPFLSPPPDPSSAIKFPSHLQPCFDACWHLCQPVTELLRMLSSQARKVIVIHDSMMGSVVQEVGSIANAESYTFHTVSAFSLFFYVWESIGKPEVNAEMPDEGDVPSLEGCFTKDFLEFIALQFQYLRDNAGIIYNTSKVIEGPYLELLGGIMRGKQHWALGPFNPVRIPGKNSSASRHFCLEWLDKQATNSVLYVSFGTTTAMDDEQIKELAIGLRKSNQKFIWVLRDADKGDVFNGEVRRPELPQGYEDSVKDTGLVVRDWAPQLEILAHPATGGFVSHCGWNSCMESITMGVPIGAWPMHSDQPRNAVLITKLLKVGIAVKDWERRDGTVTAPIVEDAVKRLMASKEGDEMRKRAAEVGGAVRQSVAEGEVSQKERDSFIAHITRK

SEQ ID NO: 5522 - protein, 479 aa, Sorghum bicolor
MAGDDGRAPTPTGRRVVMFPFPFGSHITQMLQLGELLRARGLGVTVLHTDFNAPDPACHRDLTFVSIRETLPADVVASPDMVEQMIRLNAACEAPFQAALAEELLAARGGTTTVVACVVVDRQWYRMLGAATRVAVPALALCADGAATFLSMLATPRLVADGYLPIKEERLDEAVPGLEPLRVRDLIRVDGSDDETVLRFITLDAEAVRASSSGVVLNTFEGIEGAELAKVRRELSGRPAFAVGPLHLQAPPAPAAGRGQFQHAPDRSCLAWLDARPPRSVLYVSMGSVARVDRAVFEETAWALAASGVPFLWVLRRGSVVRGGGGAAGVDAEEEEVPPPVPEELRETVRHRGKIVAWAPQREVLAHPAVGGFWTHCGWNSMVEAIAEGVPMLVQPFFAEQIVNARYVTHQWGVGFEVGKPLERTAMARMIRRLVVGELGPQGPRERARLLMGQAKECVAEGGAASLALDGLVEYISSL

SEQ ID NO: 5523 - protein, 497 aa, Oryza sativa
MATMDEQQPLHILFLPFLVPGHLIPIADMAALFAARGVRCTILTTPVNAAVVRPAVDRANDDALRGDAGGAPAIDIAVVPFPDVGLPPGVESGTALASEEDRGKFVHAIQRLREPFDRFMAEHHPDAVVADGFFTWSVDAAAEHGVPRLVFLGTGVFARSCQESMVRHNPVEACPDDDPDAAVSLPGLPHRVEMRRSQMIDPKKRPDHWAYFKMMNDADQRSYGEVFNSFHELETDYVEHYRTALGRRAWLVGPAAFASKDVAARGAAELSPDADGCLRWLDAKPHGSVAYVSFGTLSSFSPAEMRELARGLDLSGMNFVWVINGAADDTDASGQWMPEGFPELISPHGDRGLTIRGWAPQMLILNHPAVGGFVTHCGWNSTLEAVSAGVPMVTWPRYADQFFNEKLIVEVLKVGVSVGSKDFASNLENHQVIGGEVIAGAVRRVMGDGEEGAEAIRKKAAELGVKARGALEKGGSSHDDVGRLMDALMARRTSVDV

SEQ ID NO: 5524 - protein, 456 aa, Citrus unshiu
MEREIFVVTGYGQGHLQPCMELWKNFSSRNYHTTLVIPSILVSAIPPSFTQYPRTRTTQITSSSRPMPPSDPLSQQAAKDLEANLASRSENPDFPAPLCAIVDFQVGWTKAIFWKFNIPVVSLFTFGACAAAMEWAAWKLDATDIKPGETRLIPGLPEEMALTYSDVRRKSSVPSRGGRGGPPKPGDKPPWVPEIEGSIALMFNTCDDVDGLFIKYMADQIGIPAWGVGPLLPEQHWKSTSSLVRHCEITEQKRQSSCSEEEVIQWLDSKPRGSVLYVAFGSEVGPTREEYRELAGALEESPGPFIWVVQPGSEEYMPHDLDNRVSNRGLIIHAWAPQALILNHISTGGFLSHCGWNSTMEAIVHGVPFLAWPIRGDQYFNAKLVVNYIKVGLRVTDDLSETVKKGDIAEGIERLMSDEEMKTRAAILQVKFEQGFPASSVAALNAFSDFISRKVT

SEQ ID NO: 5525 - protein, 480 aa, Ziziphus jujuba
MVQPRFLIVVYPAQGHINPGLQFAKRLIHIGAEVTFVTTISAYRRMNKAASIPSGLSFAPYSDGYDDGFKYGVHDADHFLSELSRCGKQAISDLVVSAAKEGRPFCCVVYSILLPWAPEAAHELQVPSALLWIQPTTVFHIYYYYFHGYDNAITNNGAFNDGPSWSIELPGLPLKLKRRDLPSFMDAGNAYTFAIPLFKDQFEKLELGNNRKVLVNTFDALEPEALKAIGINFDLIGIGPLIPSAFLDGKDPSDTSFGGDLLQHPKDYYIEWLSSKPKGSVIYVSFGSMSVLAKPQMEEVGRALLEMGRPFLWVIREKPDSNNGEDKKEEDQLSCREELEKLGKIVPWCSQLDVLSNSSCGCFVTHCGWNSTLESIACGVPMIGYPQWSDQGTNAKLIEDVWKIGLRVNKNKDGIVESDEFKRCLEVVMGDGDKGEEMRRNAKKLKDLARESAKEGGSSDKNLKEFVDEINQKERAGPQV

SEQ ID NO: 5526 - protein, 442 aa, Cephalotus follicularis
MELCGHLSPQNYHTIHVFSSNLSSAIASFFTQNPLHKIAQISPSPRPMPGSDPLSQQSAHDFEAYLITHARVPDLPSPLCAIIDFQMGWTKGVFFFWKFNIPVIGLFTLGVCTAAMEWNAWKVLAGDLKSGETLPVRGLPEEMSLTHSDFLRKPFGPQRGSGQSKTDPKRGGRGPPKLGDRPPWVPKIQGSIALMFNTSDYIDGPFIEHMADQMGMSAWVVVPLLSQQYWNSSAKLIRNCEITEDKQCQSNFTEDEITQWLDSKPRGSILYVDFGSKVGPMMELASARRVRWALRLGHTTGVGGLDKRMGDGGLVIYGWEPQLLILSHKSAGGFLSHCEWNSTMEAIGRGIPFLSWPIRVDQYFNAKLVVSYHKVGYRVAHDLSLLITKDDILMGVQRLIGDIEMKRRAEVLYAKFEHGFLASYVAALDAFENFTSQNQMVV

SEQ ID NO: 5527 - protein, 486 aa, Dianthus caryophyllus
MGAEPKRLHIVFFPFLAHGHMIPTLDVARLFAARNVEATIITTRVNAPRFTSAVDTGNRIGNNQTVKLELLRFPTHEAGVPEGCENAEIAMRIPGMMPRFFKGTQLLREQLEQYLSRVKPNCLVADMFYPWATESANKYDIPRLVFHGTSYFSLCAQEIVRVHEPYKMVLCNNEKFTIPLIPHDIKLLRSQMCPDLISDEDNDFRKRMDLVKKSEVESYGVIVNSFYELEPDYAEVYTKELGRKAWHVGPVSLCNRSVLEKGRRGNQASIDEHECLTWLDSKKLASVVYISFGSMSSSITPQLHEIATALENSGCNFIWVVRSGESENHDESFPPGFEQRTKEKGLIIRGWAPQVLILDHEAVGAFMTHCGWNSTLEGITAGVPMITWPHAAEQFYNEKLVTEILKSGVSVGAKIWSRMPSVEDLIGREAIEIAIREVMDGEKAETMRLKAKWLKEMARKAVEEGGSSYTQLSALIEDLKNYHTQK

SEQ ID NO: 5528 - protein, 273 aa, Helianthus annuus
MLSSSPKEHKFVMEFIKDHVDALKIFSRILVNTFDELEIDPIRAIEKVVMLPVGPLVPSEFFEGRGPPNSSFSCDLFEKPMEDYIKWLNTKPKSSVVYVSFGSMATLSIEHVEEMASGLVESAPPFLWVIRDSGQVGKLSKIEELKKQGMIVSWCSQVEVLNHQAIGCFLMHGGWNSTMEALATGVPTVVFSQWSDQATNAKMIEDVWKTGVKVKRREEDGMVEGKEIKRCVEMVMEDEEVRRNAKKWRELARQAINNEGSSAINLKAFLDDA

SEQ ID NO: 5529 - protein, 438 aa, Helianthus annuus
MPVGRKILIVSYAGAGHINPSLTFADRLRKMGVDVTISTSFFVLKNIKDKETTPHGLTFAPFSDGHDNGIQPTTTLQQFISDFATNGARSVGETITSAVAAGQPFDHLVYTSGIPWAAKVAQAHKLKSSLLWCQPATVLNIHYYYFNGYENLIADNMNNASFPIELPGLPSLTTADLPSFYSPSRPKEHDFLMQVLEDHVDALKTAPRVLVTSFNELEIESITASEQLEFLPIGPLIRSDGKENDECIRWLDTKLEASVVYVAFGSQAILSMEQVEEIAIGLVTSSRPFLWVIRDSEQARRVSKTAQLQTQGMIVEWCSQVAVLNHRSIGCFVTHGGWNSTIEALVAGVPTVVFPQWADQPTNAKMIEDVWKTGVRVTRRGDGVVDGKEIDRCLQKVMTGDDGGEMRRNARKWRDLATEALENGGSSTVNLQAFVNDV

SEQ ID NO: 5530 - protein, 416 aa, Genlisea aurea
FYITFVNTHFNHRRLIQSHGIQALSGLPDFRFASIPDGLPPSDANATQDVPSLCKSTTTTCLEPFCELIHELNKEKKVDCIVSDGVMSFTLKAAERFRLPEVLFWTTSACGLLGYMCYQRLIDEGITPLKDVGQLSNGFLDTVIDWVPGVKGGGLRLKDFPTFIRTTDPDDIMLNFVIQETEALKRASGILLNTFDALEEDVIAALQQILPPIYTVGPLNLSLHRIPDGPVKSIGSSLWKEESECLKWLDNKNPATVLYVNFGSITVATPEQLTEFAWGLANSGSPFLWVIRPDIVFGESAMLPEAFLQATKDRGILASWISQEEVLGHAAIGGFLTHSGWNSTIESISSGVPMICWPFFAEQQTNCRFSCVEWGVGLEIDSDVKREDVEKLVRELMEGEKGKRIKEAAAKWRNEA

SEQ ID NO: 5531 - protein, 478 aa, Unknown
  Description of Unknown: Fragaria x ananassa sequence
MEKPAELVLIPSPGIGHLVSTLEIAKLLVSRDDKLFITVLIMHFPAVSKGTDAYVQSLADSSSPISQRINFINLPHTNMDHTEGSVRNSLVGFVESQQPHVKDAVANLRDSKTTRLAGFVVDMFCTTMINVANQLGVPSYVFFTSGAATLGLLFHLQELRDQYNKDCTEFKDSDAELIIPSFFNPLPAKVLPGRMLVKDSAEPFLNVIKRFRETKGILVNTFTDLESHALHALSSDAEIPPVYPVGPLLNLNSNESRVDSDEVKKKNDILKWLDDQPPLSVVFLCFGSMGSFDESQVREIANALEHAGHRFLWSLRRSPPTGKVAFPSDYDDHTGVLPEGFLDRTGGIGKVIGWAPQVAVLAHPSVGGFVSHCGWNSTLESLWHGVPVATWPLYAEQQLNAFQPVKELELAVEIDMSYRSKSPVLVSAKEIERGIREVMELDSSDIRKRVKEMSEKGKKALMDGGSSYTSLGHFIDQI

SEQ ID NO: 5532 - protein, 250 aa, Genlisea aurea
YTRGPGEDYPFPAIKLADDDKFDPRAIHGKSFSGVENEFFGGVFKFSTGVVILKSYGDIEAKHIQYLSELCGRKVLPAGPLVSESDYDNQSSEIVDWLDGKTPGSTVYVSFGSEYSISGEETRQLAKGLELSGVNFLWLYRSQSETSIEELLPEGFSERTGERGMVATKWAPQTVLMTHPSIAAFVSHCGWGTLTECLYFGIPIIAMRLKLTDWPVNAALMVESGAGVTMDRKGGIYTAEEIAKSISGAV

SEQ ID NO: 5533 - protein, 461 aa, Ricinus communis
MAQGHSIPLIDMAKLFASRGQKVSIITTPVNAPDISKSIQRSRVLGHKIDIVIIKFPCVEAGLPEGCEHLELVTSPEMVSVFFQATTILAQPLEHLLKKYCPDCLVSDTFFPWSNKVASKFGIPRIVFSGTCFFSSCASQCMYLYQPCKNVSSDTDVFVIPNLPREIKLTRNQLPEFVKEETSFSDYYRKVKEAEAKSYGVLVNSFYELEPTYADHYRNVLGIKAWHIGPISLCNSNNQDMLNRGKEASIDENECLEWLNSKKPNSVVYICFGSLANFVSSQLLEIAMGLEDSGQQFIWVVKKSKSNEEDWLPDGFEERMKEKGLIIRGWAPQVMILEHKAVGGFVTHCGWNSTLEAVSAGVPMVTWPVSAEQFYNEKLITEVLRIGVAVGAQKWLKLEGDGVKKEAINKAVTQVMVGGKEAEEMRCRAEKLGEMAKKAVAEGGSSHSDFNTLIEGLRSKN

SEQ ID NO: 5534 - protein, 313 aa, Medicago truncatula
MTTSFNLYFPALHEQVSCEYKDHTDLIQFPGCLPICSQDLPPEFFHDRSSVRYSFFLLHSKNLSLAHGFLVNSFSKMEASTGRALQEEHNKTTKLVYMWLENQTPNSVLYVCFGSGGTFSQQQTNELALGLELSGQKFLWVLREPSKSKDVDYKIASIGNDDNDLLKYLPHGFLERTKEQGLVVPLWAPQTKILSHNSTGGFLTHCGWNSTLESIVSGVPMVTWPLFGDQRMNAILIVEGLKVGLKIKFNENDIAEREEIAKVVKDLMLGEERSEIRQRIEELKDEAACALAGDGSFTRALFEFGTRVENFSL

SEQ ID NO: 5535 - protein, 468 aa, Ricinus communis
MESLCSEQTYHVVLFPFMAKGHTIPILDLARLFLHRQIAVTIFTTPANLPFIAESLADTNVSIVELSFPSNVPEIPTGIESTDMLPSMLLWPSFVFSTKLMQPNFERALENLPPVNFMVSDGFLWWTLESANKFGFPRFVFFGMSNYAMCVEKAVYENKLLFGPESEEELITVTPFPWIKITRSDFDPSFSNPESKGLFFELAKLVFTAASSSFGYIMNSFYELEQVFVDYWNNHSERQLTWCIGPLCLAERPRLQRVDNNKPTWIQWLDQKLEQGQPVLYVAFGTQTEISLEQLQEISIGLEVSKVNFLWVTRDKGINLEGFEERVKGRGMIVREWVEQREILMHKSVQGFLSHCGWNSVLESMCEGVPILAWPMIAEQPLNARMVVEEIQIGLRVETCDGSVRGFVKSEGLRKTVKELMEGDVGKKTRKKVKEVAKMAKEAMKDNTGSSWRSRDLLIQNCNCKVSL

SEQ ID NO: 5536 - protein, 241 aa, Ricinus communis
MARSAGIISITFEALEERALKAVREGHCTPGEPVPPLYCILPGGGIESTIKEQHACLSWLDAQPSRSVVYMNFGSVGKVSANQLKETAIGLEKRGVRFLWVVRNPIAEVLNHDSVGGFATHCRWISVLESLSAGVPMLAWPLYAEQRLNMAALVEMKLPLSIKQSYDGYVSATELEERVNELMNSEKGKAIGERAMVMKEAAAEVTKDGGSSRIAIAQLVESFKLKQIQNMLNLHHKLLSK

SEQ ID NO: 5537 - protein, 494 aa, Centella asiatica
MASNIQQLHFVLVPLMSQSHIIPLTDFGKLLAQRGVVVTMITTPLNAVRCKPIIDGAQNANLNIQLASLHFPTREVGLPEGVENLDELSMKSLKTLGINFFQANEMLREPLEKLLAEMVPRPSCIISTDALPWTNEVAWKFKIPRYSFNTISCFSLVLFHKLKISRVHESVTSDSESFVVPGLPDKIELKRSQLPEWVKRTSNDNNSHVMDKLKATEHLPRGVLVNTFEEMEPRYVEEFKKQEKLVFCVGSVSLCNTDQSDMSSRGNKASVEEDSCLKWLDSMKPCSVIYVCFGSLSNIPYPQLIELGLGLEASNRPFIWIIRKGDYSPRLEKWLEEYRFEEKVKGRGLIIRGWAPQVLILSHPSVGGFFTHCGWNSILEAVCEGMPMITWPMFAEQFYNERFVVDVVKIGVPVGVEEALTSVEDEEKFELLVTSSQVKEAIDELMDGEDAGERRKRARELGEKAKKAIEDGGSSYLYITNLIEDVRQQNSSRF

SEQ ID NO: 5538 - protein, 458 aa, Centella asiatica
MVTNSKDNNALRILMFPWLGHGHISPYLELAKKLSRKDSKIYFCSTPINLKPIKNKILDYNSIELIEFPLPSSQELPPHYHTTTGLPPHLLPALKDAFEMASPQLSNILDTITPDLLIYDIYQPWVPKLASSYKIPAVHFQTTGATAISYFYRLSMNLKTAFPSTIIHLKDIELVRMLETGGGDESDPENEQDRDRVFDSILGSVEILLIKSSREIEGKYIDCLSDFIKKKIVSVGPLVQEFVGNDQENDDVITWLSKKEPFSTVYVSFGTESFLSKKDLEELAHGLELSGVNFIWALKFPEAEKITKVEEALPQGFLERVGEKGLVLGGWVPQAKILNHSSIGGFVSHCGWSSVIESLSFGVPIIAMPLQNDQPLNARLVVEVGVGLEVEKDDKLEFGREEVARVVKEVVVEEKSRETFGKRVKELSEVLKVKADEDVDNAIKELKRLCENNLRKVE

SEQ ID NO: 5539 - protein, 448 aa, Rhodamnia argentea
MATTRRTIRVLMLPWLAHGHIGPFLELAKKLSKRNFHIFLCSSPINLTSIEIPHEYGSTIELVELNVPSLPGLPPQYHTTRGLPPHLMPKLKTALDMAGPCLSKIITECRPNFLIFDHLLPWAPEVARSHGIPSVDFSGVAAGTTSYALHSIKRLGDEYPFKAMSLQDHWTMKFRNQFEQASENGMSDTERFMRCIHQSSGLIFLKTFRELEGKYIDYLSDLLGKKVVPVGPLVQDPVQEDGNPIIEWLDQKERSSAIFVSFGTEYFLSEKEREEIACGLELSNVNFIWVVKFPAEEHIKLEETLPKGFLGRVRDRGLVIEGWAPQATILAHPSVVGFVSHCGWSSVMESMTFGVPIIAMPMHLDQPLNARVVEDVGVGLEVTRNESGELEREEIAKVIRGVVVEEGGERVRNRVKEVSIGIRNKGDEEIDQVEDAIVKLCGIALGSC

SEQ ID NO: 5540 - protein, 523 aa, Citrus unshiu
MMQLAMALEASGKNFIWVVRPPIGFDINSEFKANKWLPRGFEERIKCSGQGLVVHKWAPQVEILSHRSVSAFLSHCGWNSVLEALSHGVPIIGWPLAAEQFYNSKLLEEEMGVCVEIARGMSCEVLKEDLSAKIELVMNETEKGTDLRNKANEVKMLQSLLQTLVNTPLNLKRLKSSLPQNSSIHLLEIPFNSIEHDLPPCTENTDSIPHHLFPRFLQASASLEPHFKKLISELVNEQNGQKPLCIITDSFLGWCKETAQEYGIFHAIFIGGGGFGFACFYSLWVNLPHRKTDADKFLLPDFPEASTLHVTQMSLSLRAADGSDSLSVLSKELFLQWKDADGILASGKNFIWVVRPPIGFDINSEFKAKEWLPQGFEEKIKGSGQGLVVHKWAPQVEILSHRTISAFLTLSHGVPIIGWPLAGEQFYNSKLLEEEIGVCVEVARGLTCEVLKEDLSAKIELAMNETEKGTDLRNKAKEVKVIIKNAVRNEDNFKGPSVKAMDQFLNAALIMRQMEKGASKNEV

SEQ ID NO: 5541 - protein, 477 aa, Rosa chinensis
MEKPAELVFIPSPGIGHLVSTLEIAKFLLSRDDQLLITVLIMKFPAVSKGTDAYVESFADSSSPISQRIKFINLPQVNTDHTEGSVRNSLIGFVESQQPHVKDAITKLSESQTRLAGFVVDMFCTAMIDVADQFGVPSYVFFTSSAAALGLMLHVQALRDQEGKDCTEFKDSDAELLIPSFVNPLPAAKVLPGRLFVKEGAESFLNIIKRFRDTKGILVNTFADLESHALHALSSDAVIPPVYPVGPLLNLNTNESSVDSDEAKQKSDILKWLDDQPPLSVVFLCFGSMGSFGEDQVKEIAHALEQAGHRFLWSLRRPPPTGKIAFPSDYDDHTGVLPKGFLDRTVGIGKVIGWAPQVAVLAHPSVGGFVSHCGWNSTLESLWHGVPVATWPLYAEQQLNAFQLVEELELAVEIDMSYRSESPVLVSAKEIERGIREVMKRDNDIRNRVKEMSEKGKKALMDGGSSYSSVGQFIDQI

SEQ ID NO: 5542 - protein, 479 aa, Vitis vinifera
MDQGSISPHVLIFPFPIQGNINSMLKLAELLCLADIQVTFLNCHYPHRRLLSYSNIQARFSRYPGFRFETISDGLPMEHPRTAEQFLDIVDGVKTTTAPLFMEMMISWCRSASDTRSPLTCIIADGLMSFAIDVANEVGLPVIIFRPISACSFWAYFSLPQLIEAGEVPFRGGDMDRLVASVPGMEGFLRRRHLPSSGRVNDVAYPGLQHLMKIFRQAQRAHSLVINTFDDLEGPVLSQIRDHYPRTYAIGPLHAHLKSKLASETSTSQSSNSFRKEDKSCIPWLDRQPPKSVIYVSFGSLAIITKDELGEFWHGLVNSGNRFLWVIRPDALVGKDEERQTPAELLEGTKDRGYVVGWAPQEEVLKHPAVGGFLTHGGWNSTLESIVEGLPMICWPYFADQQINSRFVSHVWKLGMDMKDSCDRVTVEKMVRDLMVEKRDEFMKAADTLATLAKKCVGDGGSSSCNLNSLIEDIRLLST

SEQ ID NO: 5543 - protein, 481 aa, Medicago truncatula
MSSEDTEIKPEIHVLLVAFSAQGHINPLLRLGKSLLTKGLNVTLATTELVYHRVFKSTTTDTDTVPTSYSTNGINVLFFSDGFDISQGHKSPDEYMELIAKFGPISLTNLINNNFINNPSKKLACIINNPFVPWVANVAYELNIPCACLWIQPCTLYSIYYRFYNELNQFPTLENPEIDVELPGLPLLKPQDLPSFILPSNPIKTMSDVLAEMFQDMKKLKWVLANSFYELEKDVIDSMAEIFPITPVGPLVPPSLLGQDQKQDVGIEMWTPQDSCMEWLNQKLPSSVIYISFGSLIFLSEKQMQSIASALKNSNKYFLWVMKSNDIGAEKVQLSEKFLEETKEKGLVVTWCPQTKVLVHPAIACFLTHCGWNSTLEAITAGVPMIGYPQWTDQPTNATLVSDVFRMGIRLKQDNDGFVESDEVERAIEEIVGGERSEVFKKNALELKHAAREAVADGGSSDRNIQRFVDEILVTAIDSNN

SEQ ID NO: 5544 - protein, 443 aa, Oryza brachyantha
  MOD_RES (114)..(117): Any amino acid
MAAAAAPRCSPMLLLAAALHARGLAVTVVHAETRVPDRRSLPAGCELVTVPDGIPPELAASNDIPSFVFALNRNCAAPFRDLLAAALREDDDGRRVACVVVADVDWFAPPPPAXXXXALMTSSAARFRVYMAYRRLSEMGYLPVQESNMDKPVDELPPLLVRDLHARMDTARHVAYADLLDHIVAGVRQSSGLILNTFDAIERADVEHIRRDTSIPVFPVGPLHAISPVAAPQQSGALPEEDRSCLAWLDTQLPGSVLFVSFGTLVSIDADELMELAWGLAGSNRPFLWVVRPRLVRGRDSVELPGELLQEIRGRGVIVRWVPQEEVLSHPAIGAFVTHCGWNSTLESISKGVPIICKPCGSDQLGTARYVCDMWKVGVRVEIKDKVTREGIQVAIERLMDGKEGEMVRDRIIEMSDVVSKCTMKGGSSELAMNDLVDFIESS

SEQ ID NO: 5545 - protein, 361 aa, Medicago truncatula
MRHIRCQNVTIITTPSNAQILGKSIPLNQHLRIHTVPFPSQEVGLPDGVESLSAATDFNNMVKIFQATTLLRPPIQHFVEQHPPDCIVTDFLFPWVDELANKLQIPRLSFNGFSLFAICAMESVKAHSLYGYASFVIPGLPHSIVMNATPPKQMSEILGERLEMVFKSQGILVNNFVELDVVPEKKGKENESQEEKEKWLPKGFEERVIAKKKGLIIKGWAPQVMILSHTVVGAFMTHCGWNSTVEAVSAGVPMITWPMHGEQFYNEKLITQVRGIGGEVGAVEWCLVGIGEKEKLVGRDGIEKVVKRLMDNSYVAEIIRRHAREFGDKAKCAAQEGGSSHRNLTVLINDLKSLRDNKLLV

SEQ ID NO: 5546 - protein, 359 aa, Vigna angularis
MSFTVDAAQELGVPEVLFWTTSACGFMCYVQYEQFIQKGITPLKDSSDVTNGYLESTIDWIPGIKEIRLKDIPSFIRTTDSNDLMLDFVQGECKRARRASAILLNTFDTLEHDVLEAFSSILPPVYSIGPLNLLVKSVDDKKLNAIESNLWKEETECMEWLGTKEPNSVVYVNFGSIAVMTPEQLVEFAWGLGNSNKSFLWVIRPDLVAGENAVLPQEFVKETKNRGLLSSWCSQEEVLNHPAIGGFLTHSGWNSTLESLCAGVPMICWPFFAEQQTNCRFCCKEWGVGLEIEDVKRDKIESLVKELMGGEKGKEMKEKALQWKELAKSAASGPYGTSFLNLDNMIRQVLLDKNVINQF

SEQ ID NO: 5547 - protein, 455 aa, Hordeum vulgare
MAPPPPHIAVVAFPFSSHAAVLFSFARALAAAAPAGTSLSFLTTADNAAQLRKAGALPGNLRFVEVPDGVPPGETSCLSPPRRMDLFMAAAEAGGVRVGLEAACASAGGARVSCVVGDAFVWTADAASAAGAPWVAVWTAASCALLAHLRTDALRRDVGDQAASRADELLVAHAGLGGYRVRDLPDGVVSGDFNYVISLLVHRQAQRLPKAATAVALNTFPGLDPPDLIAALAAELPNCLPLGPYHLLPGAEPTADTNEAPADPHGCLAWLDRRPARSVAYVSFGTNATARPDELQELAAGLEASGAPFLWSLRGVVAAAPRGFLERAPGLVVPWAPQVGVLRHAAVGAFVTHAGWASVMEGVSSGVPMACRPFFGDQTMNARSVASVWGFGTAFDGPMTRGAVANAVATLLRGEDGERMRAKAQELQAMVGKAFEPDGGCRKNFDEFVEIVCRV

SEQ ID NO: 5548 - protein, 492 aa, Sorghum bicolor
MPAMVEEEVVIRGAAAAPEPEPHFLVVTFPAMGHINPARHLARRLLRATGARVTVSTSVFALRKMFPGAAAETEPEGHRDASGVWYVPYSDGYDDGFDKAVHDATHYMDQIKLEGSRTLGNVLDRLRDAGRPVTLVVYTLLLSWVADVARAHAVPAALYWIQPATVLAAYLHFFRATDGVDAAIAAAGGDPWATVRFPGLPPLRVRDLPSFIVSTSENDPYAFVVDAFRQLIELLDGEDSPSVLANTFDAMEPEGVASLRDHGVDVVPVGPVLSFLDDDDDDDAAAGGGNDLFSQDGKGYLDWLDAQAPGSVVYISFGSLSVMSERQIEEVARGMSESGRPFLWVLREDNRSSEGAAPLGGERGMVVGWCDQVRVLSHPAVGCFVTHCGWNSTLESMACGVPVVCVPQWTDQGTNAWLVERIGTGVRAAVSDKDGVLEADELRRCLDFATSEMVRAKAAVWREKARAAASEGGSSERNLKAFVAKQIAGGNN

SEQ ID NO: 5549 - protein, 529 aa, Solanum chilense
MASCAINSCCLLVFTHLTLTSTNQASSNEPLQISLNILFKQQKMDRLNKKTELVFIPVPGMGHLVPTLEMAKVLIARDEHLVITVLVIKLPSDNKLSSYIESVSTNPNYNSQMKFIELPQDESILQSITNTTFITFLSSHKPQVRNSVIEILYSGSNRLAALVIDMMCTAMIDVANEFGLPTYVFYTSGAAMLGLQLHLQSLRDDFNEDVTDYEDDPEAELSVTTYGNPFPAKCLPSIAFDKDGGSTMYLDLSKRLREAKAILVNTFSEFESHAVKSLSLDEKIPLVYPVGPLLNLDNNQVNNQESSQHQTIINWLDDQPDSSVVYLCFGSLGSFTEEQIKEIAYALEKSGCRFLWSLMKPLAKDTIFPAAYDNPEDVLPEGFLQRTEAIGKVIGWAPQVAILSHDAVGGFVSHCGWNSTLESIWFGVPLATWPIYSEQQANAFQLVKDLEIAVEIKMDYRKDLRGTESNVIVKAEEIEKAIKQLMEPENEIRLKVKGMKEKSRLVFKEGGSSYNSVGHFIEQVMDITN

SEQ ID NO: 5550 - protein, 522 aa, Papilio polytes
MRLASFSTFLIINELCSAYKILLVFPVPGRSHAILGEGYVRHLLNDGHEVTYITPIMMKMEHPRLRQIDISSDFKLMPPDELFDTKNILMNTWNVKNIEFMLFVTTEFVNGTLGHPNVQRLINDTSEQFDAVIVEWLYSELYAGFASVFECPLIWSSSLDPHWLVLDLIDEVPNPAYNPQHLADVVTPLDFWNRAQELWHVIHTKYFKWRLRHRENRIYNNAFASSVALRGRDLPPFNEVRYNGSLMLGNSHLSAGTSISLPPNYIPIGGYHITDNIDPLPSNLQQVADNARNGFIYFSMGSMLKSSRIPDIIKKGLLDVFSKLKQTVIWKFEEDLLDRPKNVHIVSWAPQWSILAHPNCKLFITHGGLLSILETLHFGVPIIGVPMFGDQHMNINRVVEKGFGMRVDLNDDVVVNMEIAIKEILDNPRYTQKVKEYSFVYHDRATSPGKELTHWVSHVIRTKGALHLRSQANMLPWYQKLYLDLAIVMFLIFYLSVKIVFKIFRGILLMSIKCAASKQKVN

SEQ ID NO: 5551 - protein, 468 aa, Helianthus annuus
MKNHEGGDTTVESTRPAATPRRIILFPLPVQGHIGPMLQLASILHTQGFKIIIIHPESYSPNHSDYPHFTFKPIVDGFSEIGKHIPEKPDPSFFITYLNEHCADSFTDCLAGLLAEPGEPPVACLITDAEYYFTQEVADSLKVPRVVNWACNIVVLLVYNDLSYFYEKGYFNLTMKDSEYEEPVPKYPSLKVKDVIQTSRNPNGMVRFVTKVMKQVKASSGIIWNSFKEPEEDLMQTLSHDFPIPRFTLGPLQTYLPPSTSNNMFEQDRTFFSWLDAQPPMSVIYVSFGSVASISESEFQEVAYGLANIDFPFLWVVRPGVVKGSDWLESLPEKFLEEVGGRGRIVKWCPQKEVLAHEAIGCFWTHNGWNSTLESVCEGVPMICSPCDVGQPLVARYVCDVWKIGILLEDGLQREGIKRAVKRLMIDKEGEEIRERINRLKEEVKISFDEGESSHRSLKSLVDYISSF

SEQ ID NO: 5552 - protein, 498 aa, Vigna angularis
MELPKQEARVAPAPPIVAMLPSPGMGHLIPMIEFAKRVVRYHNLSVTFVIPTDGPPSKTQIAVLQALPDSISHTFLPQVTLSDLPPDAKIETVMSYVVLRSLPSLRQAFHSLSATHTLAALVVDLFSTDAFDVAAEFNASPYVFFPSTATALSLLFHLPTLDREVHCEYRDLPEPVKIPGCIPLHGRELLDPVQDRKDEAYKWVLHHAKRYREAEGIIENSFTELEPGAWSELQKEQPGRPPVYAVGPLVRMETSSVESECLRWLDEQPCGSVLFVSFGSGGTLSTAQINELAHGLEASEQRFLWVVKSPNDKIANAAYFSAETAADPFHFLPEGFVERTKGRGFVVPSWAPQPQVLAHPSTAGFLTHCGWNSILESVVSGVPFIAWPLFAEQRMNAFMLTQEVRVALRPKVADNGLVERQEISSVVKSLMEGEEGKKLRYRTKDLKDAAAMALAENGSSTNHISHLALLWANKTTVTPPPPKIKLNPSSSSSSSSIQ

SEQ ID NO: 5553 - protein, 484 aa, Oryza sativa
MASAERSKKLRVLLMPFFATSHIGPCTDLAVRLAAARPDVVEPTLAVTPANVSVVRSALRLHGSAASTVVSIATYPFPEAAGLPPGVENLSTAGDERWRVDAAAFDEAMTWPAQEALIKDQSPDVLITDFHFSWNVGIAEELAMPCVQLNVIGLFSTLAVYLAAAVVNDSDSEELTVAGFPGPELRIPRSELPDFLTAHRNLDLVDNMRKLVQVNTRCHGFAVNSFLFLDKPYCEKFMCNGFAKRGYYVGPLCLPQPPAVASVGEPTCISWLDSKPNRSVVYICFGTFAPVSEEQLHELALGLEASGKPFLWAVRAADGWAPPAGWEERVGDRGLLVRDWVPQTAILAHSATAAFLTHCGWNSVLEGVTAGVPLLTWPLVFEQFITERLVMDVLRIGERVWDGARSVRYKEAALVPAAAVARAVARFLEPGGAGDAARIRAQDFAAEAHAAVAEGGSSYGDLRRLIDDLVEARADAGESALQPL

SEQ ID NO: 5554 - protein, 225 aa, Helianthus annuus
MSWILPIGPLLASNRLAKQTGYFWKEDPTCLTWLDQQPAHSVIYVAFGSFTLMDRNQFHELAIGLELTNRPFLWVVRADMVDEMNNNYLTGYMNRIHERGRIVGWAPQQLVLNHPSVACFVSHCGWNSVLEGVSSGLPFMCWPYFADQFINQGYVSDVWKTGLEFGKDESGIISRYEIKNKVEQLLEDKECKVRAAELKEKVKIAVRRGGHSDINLNSFIDWIQE

SEQ ID NO: 5555 - protein, 479 aa, Helianthus annuus
MGSNAELGKPHAICIPFPAQGHVNPMMKFAKLLHLKGFHISFVNTHFNHKRLLRSQGPSSLDGLPDFRFYSIPDGLPPSDADATQSIPDLFHSIPKHCVEPFCELITRLNGASDVPRVSCIVSDGAMTFTLKAAEKFGLPEVFFWTTSACGLLGYLRCRDLMQKGYTPLKDMSYVTNGYLETILDWIPGMNNIRLRDFPSFIRTTDINDILLNYLVTEAEALTRGSVVVLNTFDALEKDTVNLLTASMPRIFTVGPLNLMQQHVQDERVKQLGSSLWKEDVTCIHWLDTKDPGSVVFVNYGSITVLTKEQLIEFAWGLANSKKDFLWITRPDIVCGNEAVMPPEFLVETKGRGLIISWCPQEQVLKHPAIGVFLTHCGWNSTLESISSGVPLLCWPFFAEQQTNCRYSCVEWGIGMEIDTNVKREKVEAQVREMIEGEKGKLMKAKALELRRKAEEGVTIDGLSYLNFDKFITDVLSKI

SEQ ID NO: 5556 - protein, 498 aa, Barbarea vulgaris
MASEKSHLFDPSLHFVIFPFMAQGHMIPMIDIARLLAQRGAKITIVTNPHNAARFYNVLSRSIESGLPINLEHVKLPYQEAGLSEGQENIDSLDSMELMVPFIKAVNLLEEPVMKLMEEIKPRPSCLISDLLLPYTSKITKKFNIPKIVFHGMGCFCLLCMHVLRRNIEILKNLKSDKDYFLVPSFPDRVEFTKPQVPVETNASGDWKEFLDEMVEAEDTSYGVIVNTFQELEPAYIKDYKEAKAGKVWSIGPVSLCNKIGADKAERGNKAAIEQDECLKWLDSKEEGSVLYVCLGSICNLPLAQLKELGLGLEESQRPFIWVTRGWEKYDELYEWMLESGFEERTKDRGLLIRGWAPQVLILSHPSVGGFLTHCGWNSTLEGITSGVPLLTWPLFGDQFCNQKLVMQVLKVGVSTGVEEIMKWGEEEKIGVLVDKEGVKKAVEELMGESDDAKERRKRVKELGKLAHKAVEEGGSSHCNITLFLQDICQLQSVKYFK

SEQ ID NO: 5557 - protein, 649 aa, Drosophila pseudoobscura
MRLLQLLMALSLLCGAISCANILAVLPSVWKSHYLFGRRLLQELVASPRNHSITLISPHALEAGGVDAELPNIREIRIEGLKENWVGMGMSFEPEQMRSQSVMERFTRLIYAGTTNVDLLLSDQQVRKLLTSGEQFDLLIVDLFLSDALLGLAYYYGIPTVAISPTGANSWLNNMFGNPQSSSLDPSNFLPFTERMNTQQRIVNSLMSTFERLTYNFFHLISQQTVYSKHFEMLVQELPLYRDLTKNLSLALINSHPGLNYPRAYLPNMVEVGGLHLTARTDLRPLPNHLLSFMESAAGGCIYMSLGADVQTAQLPSEKLAIFMDVFGHLKEFHFVLKWENEDFVSSLELPENVMIANWWPQQAILSHTLVKLFISSCGQLSVWESIMGETPILAIPILAEQEVMAKRLQLNGVSLTVNYDAIAYDALLHGIRQLTLNTSYADSLVKLRKRLGGPSPSSLAVGQIELILDSGGADFLKSHANTLTYWRLEGLDVLVIITIGFVGILTIPFLVISCILRKSYYSEAGQDQQPPYRSTLKVVGRVHSYGDPGGTPAEPLRRTRSAQSLSARSSSSSFSSNTTPPTTASTTPLDMTPPPPAVVQLLGHVPSPLQLYVNQQQQQQQQQQIYSNSDLSNRQQASQDDITERRFS

SEQ ID NO: 5558 - protein, 481 aa, Unknown
  Description of Unknown: Oryza sativa Japonica Group sequence
MASVDGATRRGGGDGSIRRRRVLVFPLPFQGHINPMLQLAGALHGRRGGGGGELSVTVLHTRFNAIDPSRYPELAFAEVPDGIPPDVAANGNIVDIIVALNVAMDGGESSPSFRDVLASVVAADDEGRKPRASCLIIDGNLMAAQKTAAELGLPTLVLRTGSAACLGCYLAYPALLQKGYLPPKESQLYEPVEELPPLRVRDLYYTSNANQELVRKVLGWIAETARNSNGVVINTFDELEPAELERIRRELDGDGVAIVLAVGPLHKLSPMNAGGSLHLCPDRSCIEWLDTQATGSVLYVSFGSLASLDSNEFLEVAWGLESSGQPFLWVVRPDLVKGLDKPSLPDGFERAVEGRGKVIKWAPQQEVLAHHAVGGFWTHNGWNSTLESVSEGVPMICKPQFADQMLNTRYLEAVWAVGFELVGKLERGEIKKAIKRLMVEKEGAEIRERAKELKKKMDQCLESSGSSQIAINRLVNYIISL

SEQ ID NO: 5559 - protein, 473 aa, Medicago truncatula
MEKTIHIAVVPGVGYSHLVSILQFSKRLVQLHPNFHVTCFIPSLGSLPTDSKTILQTLPSNISCTFLPPVNSNDLPQGIALVLQLQLTLTHSLPSIHQALKSLTLKTPFVALVVDISAMDALDFAKEFNLLSYVYYPASATSLSSYFYLLKLDKETSCEYRDLPGPIQIPGSVPIHGRDLFELAQDRSSQSYKYLLQGVEKLRLFDGILINSFIEIENGPIEALTDEGSENLLVYAVGPIIQTLTTSGDDANKFECLAWLDKQRPCSVLYVSFGSGGTLSQEQINELALGLELSNHKFLWVVRSPSNTANAAYLSASDVDPLQFLPSGFLERTKEQGMVIPSWAPQIQILRHSSVGGFLTHCGWNSMLESVLHGVPLITWPLFAEQRTNAVLLSEGLKVGLRPKINQNGIVEKVQIAELIKCLMEGEEGGKLRKNMKELKESANSAHKDDGSATKTLSQLVLKWRNFGIEKQV

SEQ ID NO: 5560 - protein, 486 aa, Unknown
  Description of Unknown: Oryza sativa Japonica Group sequence
MGSNSRLHAVLIPYPAQGHVTPLLHLAKVLHSRGFHVTFVNSEYNHHRLLRSRGTGALAGLDDFRFETIPDGLPPPSESDNDDVTQDIPTVCTSFLTHGPAAFGALLARLNSEPGTPPVSCVIPDGVMSFAQRVASDMGILAPAFWTTSACGFMGYLHYAELIDRGYVPLKDESYLTNGYLDTVLDWVPGMPGIRLRDMPSFIRTTDRDEFMLNFDSGEAQNARHAQGLILNTFDAVEHDVVDALRRIFPRVYTVGPLLTFAGAAAARRPEVGAIGGNLWKEDASCLRWLDAQQPGSVVYVNFGSITVMSPAHLAEFAWGLARCGRPFLWVIRPDLVASEKAMLPEEFVSETKERGIFLSWCPQEQVLEHPATGLFLTHSGWNSTLESISAGVPMICWPFFAEQMTNCRYACTKWDIGLEIDTDVKREEVARLVQEAMDGEKSKDMRAKAMAWKEKAVAATEEGGTSSAGIDRLVEFLLARGDHAS

SEQ ID NO: 5561 - protein, 473 aa, Unknown
  Description of Unknown: Pyrus x bretschneideri sequence
MESQTPLPHIFLVCFPAQGHINPMLRLGKRLASKGMLVSFSTTENYGKEMRKANDGISDQPTPVGNGFIRFEFFDDGLAEDDPKFSRLDEYMPLLELVGKELVTQTIKRHANEGRPVSCLVNNPFIPWVCDVATELGIPRATLWIQSCALFSAYYHYHNKTVPFPTEAEPIIDIQLPGMPVLKHDEIPSFLLPSDPFQVLGRAILGQFKKLSKSLYVLMDTFQELEPEIIEHMSQVCIVKPVGPLFKNPKAPKTSIGGDLMKADDCFEWLNSKPPTSVVYISFGTIVYLKQEQVDEIAHGLLSSGVSFLWVMKPPGKAFGWEKHVLPDGILEKVGDKGKVVQWSPQEQVLAHPSVACFLTHCGWNSSVEALTSGVPLVTFPQWGDQVTNSKFLVDVFGVGLRLCRGRAENRLITRDEVEKCLLEATVGEKANELKQNALKWKKAAEEAVAEGGSSDRSLEDFIDEISKITYVA

SEQ ID NO: 5562 - protein, 480 aa, Ricinus communis
MAFDSNNHQLHILLFPLMAQGHMLPLLDIARLFASRGVKITIVTTPGNAPRLNRSFQTTQDSSTQISFKIIKFPAKEAGLPEGLENLDSVSDKETHSKFFDALSLLREPLEQVLQELHPQGLVSDIFFPWTAEVASKYGIPRLIFYGTSFFSMCCLENLEEHQLYKKVSSDTEKFILPGFPDPIKFSRLQLPDTLTVDQPNVFTKLLASAKEAEKRSFGMIVNSFYELESGYVDYYRNVLGRRAWHIGPVSLCNRNLEEKSQRGKEASISEHECIKWLDSKKPNSVLYVCFGTVAKFSDPQLLEIALGLEASGQNFIWVVRSEKNEEEKWLPDGYEKRIEGEGLIIRGWAPQILILEHEAVGGFVTHCGWNSTLEGVSAGLPMVTWPIFADQFFNEKLITDVLGIGVSVGAEKWVRLVGDFVESGKIEKAVKEVMVGEKAVKIRSRAKKVGEMATRAIEVGGSSYNDLGALIQELKSYHS

SEQ ID NO: 5563 - protein, 236 aa, Citrus unshiu
MAKSCPVLTIGPTIPSFYLDSRIQNDNGYDLNLFTLDKSICINWLNKKPERSVVYVAFGSMGCLANKQVEELAWGLKKSSFYFLWVIRDTEEKYKLPKGFVDEIGDKGLIVNWSPQIEVLSNKALGCFLTHAGWNSTIEALSLEVPMVAMPQWTDQPMDAKFIEDVSKVGVRVGVDGDGIVRRDDIESCIREVMEGKSGREMKINAKKWRDLAIEAVSEGGTSDKNIDEFISKFTT

SEQ ID NO: 5564 - protein, 489 aa, Citrus unshiu
MKEKAELVFIPSPSVGHLVSVIVFAKRLLLLDRDNAAGSNNSFSITVLVMQEHTATASDNDAHIKSLAGAGATADVSIRFIGVPKMNPPPLDYFKSPEKFITEYVDSHKDCIKEAIIEHVLNNNVKIAGLVLDFFCSSMIDTANELGVPSYAFFTSGAGFLGFVLHLPTRGGEEFEESEADSADIFTYANPVPYRVLPSLCFNKHGGFSAFENFGRRFKETKGIIVNTFEELESHAVEYLMKCDGVPPVYNVGPMIDLHGDIHARPRGGGTQRDEIIRWLDDQPASSVVFLCFGSMGSFGEEQIKEIASGLEKSGVRFLWSLRKTPPKDRPEMPGEYTCVEDILPRGFQERSKGRGMICGWAPQKEVLAHSAIGGFVSHCGWNSILESVWFGVPIVTWPIYAEQQINAFQMVRDLGLAVELRLDYRRGTENHVMADELARAVGCVMDGDSEVRKRVKEVSEKARLALRDGGSSYAATGRLIEDLFGSVS

SEQ ID NO: 5565 - protein, 471 aa, Pueraria montana
MKDSIVLYSALGRGHLVSMVELGKLILSHHPSLSITILFLTPPPNQDTPTSPTAFTCDATAKYIAAVTAATPSITFHRIPQISIPTVLPPMALTFELCRATGHHLRRILTSISQTSNLKAIVLDFMNYSAARVTNTLQIPTYFYYTSGASTLAVLFQQIIIHQNNTKSIKDLNMHLLIPGLPKIHTDDMPEQVQDRENEGYEVFIDIATCMRDSDGVIVNTFEAMEGRVMEAFNEGLMEGPTPPLFCIGPVISSAPCRVDDDGCLSWLDSQPSHSVVFLSFGSMGRFSRTQLREIAIGLEKSEQRFLWVVRSEFEEGDSVEPPSLDELLPEGFLERTKGKGMVLRDWAPQAAILSHDSVGGFVTHCGWNSVLEAVCEGVPMVAWPLYAEQKLNKVILVEEMKVGLAVKQNKDGLVSSTELGDRVRELMDSDRGKEIRQKIFKMKMSANEAMAKGGSSIMALNRLVEVWREH

SEQ ID NO: 5566 - protein, 478 aa, Trifolium pratense
MKKVEVVFIPSPGVGHLVSTLEFAKLLINRDNRLRITVLVIKFPHTTEVDVYTKSLPITDSLHVINLPECSIPPNIPPSSLMNVLLEAQKPNVKQAVSNIATGAENGVLSAFVVDMFCTNMIDIAKEFSVPGLIFFTSGVASLGLILHGHTLFERDNVDSTQLLQQTELTIPSFANLFPINSLPGFMLRKEWESFFMNYAGGLKKADGIIVNSFEELESHAVHSFSSHPDLPDFPIYPVGPLLNPEPKTKGTDDSSNIIKWLDDQPPSSVVFICFGSRGSLDEDQVKEMALAIENSGASFIWSLRKPPPKGTMISPSDYPLSDLNSLLPEGFLDRTADIGKVIGWAPQAQILAHPATGGFVSHCGWNSTLESIYFGVPVATWPLAAEQQSNAFELVVELKMGVEIALDYRVEVGGGANYLLTADKIERGIRSVLDKNGEVRNNVKEMSEKSRNTLLEGGSSYAYLGRLIDYIINQVSN

SEQ ID NO: 5567 - protein, 467 aa, Eucalyptus perriniana
MAPLNYLVVAFPAQGLINPALQIAKRLLHAGAHVTFATAGSAYRRMAKSDPPEGLSFASFSDGSDEGLKPGIDFNQYMVDVERLGSETLRDLVVTSLNEGRKFACIFYTTIIPWVAQVAHSLQIPSTLIWTQPATLLDIYYYYFNGYGDIIRNLGKDDPSALLHLPGLPPLTPPDIPSFFTPDNQYAFTLPLMQMQFELFKEEKYPRVLVNTFDALEPGPLKAIGNVTMFGIGPLIPSAFLDGQDPLDKSFGGDLFQGSKGYIQWLDTKPKGSVIYVSFGSISVLSKAQKEEMARGLLGTGHPFLWVIRKDKDEEGEGEQDHLSCMEELEQKGMIVPWCSQVEVLSHASVGCFVTHSGWNSTFESLACGVPMVAFPQWNDQLTNAMLVENEWKVGVRVNVNEGGVVEGDEIKRCLELVVGDGEQGEEIRRNAKKWKHLAREAAKEGGSSDRNLKAFLEEIQIEANGH

SEQ ID NO: 5568 - protein, 417 aa, Citrus unshiu
GPNKNSLSSLLPHFEFCSFSDDGFSETYQPSKVADDIPALLLSLNAKCVVPFRDCLANKLMSNSQESKDSFACLITDAAWFIAHSVANDFRLPTIVLLTDSIAASLSYAAFPILREKGYLPIQDFQLEAPVIEFPPLRVKDIPLLKTQDSNNADKFLSIRDNQIMASSGIIWNSFEDLEQVELTTVHQQYYLSIPVFPIGPFHKYFPAYSSSLLSQDQSSISWLDRQAPRSVIYVSFGSIAAINEIEFLEIAWGLANSRVPFLWVVRPGLGRGAEWLEPLPKGFLEMVDGRGYIVKWAPQQQVLAHPAVGCFWTHSGWNSTMESICEGIPMICQPYFADQMVNSRYVSHVWRVGLHLEGKLEREEIERAIRRVMVEADGQGMRERAMYLKEKVDICLQRGGSSYQSLGRLTDHILSL

SEQ ID NO: 5569 - protein, 442 aa, Citrus unshiu
MGGRQAHVLAVANPAQGHVGPLMKLSLLIADQGIKSLGNCVIRKWQNTRLDFVSIPDGVDPQDGREERIQLSESMQRVMPSHLENLIMKINSSEDDRMATCFIAHATIAWAIDTAKKMGVKMAMFWPSAVAAFAFSLIDAKITDHNGVPLKSGMIKISPKLPAMSTDEFMWSVPGDPIRRKILFGYISCAKKTLKICNWLLGSSFYELEPLACDSIPNVLPIGPLLWINRPGKAAASLWPEDSTCLKWLDKQPSQSVIYVAFGSIAIFSRCQFEEVALGLELAGRPFLWVVRPNLLDGSVIKHPDGFLERVPNQGMIIEWAPQEQVLAHRAVACFLSHCGWNSTIEGLSSAVPFLCWPYFADQFLISSYICDFWKVGLGLKQEANGNISRHEIKRNLDQLLSDSGIRENGLQIKEMAGKSLIERESSRKNFEIFIYQLKCMI

SEQ ID NO: 5570 - protein, 485 aa, Eucalyptus grandis
MGSESHQLHIFFFPFMAPGHMIPMIDMAKMFAMRGCKSTLIATPHDEPTFLRSIAKPKDLGFDINVVTVTLPLKDVGLPEDCGSLSKITTMEMRMTFVRAVMMLDRQIELLIEKLAPDCLISDIFLPWTTEIAAKFGIPRLVFHGTSAFSMAGIECVRLYQPHKKVSCDSEPFIIPNFPGEITLCKMQMQDLVREENELAKFFNAVKDSEKTSFGVVMNSFYELEPAYADHYRTFLGIRSWFVGPLSLCNKETEDKAHRGNEASIDQHECLKWLDSKQPNSVIYICFGSTTNFNAAQLHEIAVGLEASGQQFIWVVKKDPNAEEGKEEWLPDGHESRIRNKDLIIRGWAPQALILDHEATGGFVTHCGWNSILEAVAAGVPMVTWPVAAEQFYNEKLVTQVLKIGVDIGVKQGVISFGDSVKSERVEEAVKRVLVGEEAEEMRRRAKALAEMARGAVEEGGSSWSDLGALIQELKSHRLAHTKKI

SEQ ID NO: 5571 - protein, 292 aa, Rosa chinensis
MPEPMLDRNDPAYLDMVYFCSHLALSDGIIANTFEELETPAAIKAISEGRCVPDAPTPPVYYIGPLIDEEKASGSAHSEEECLLWLDKQPSRSVVYLCFGSMGSFSEAQVREIASGLERSGQRFLWVVKKPPVDNTKQSHGVDDFSLEALLPEGFVERTKDRGLVVKSWAPQVLVLKKVAVGGFVTHCGWNSVLESVIAGVPMVAWPLYAEQHLNRSVLVNDMKMAIDVEQRKEDGFVTGDEVERRVRELMESEKGRELRERSLKIGEMALGAVGELGSSRRALANFVNAIE

SEQ ID NO: 5572 - protein, 308 aa, Helianthus annuus
MSYVTSGYLETSLDWIPGMNNIRLRDFPSFIRITDINDFLLNYLMNEVEALPRASAVVLNTFDALEHDSVKPLNALNPRIFTLGPLHLMEQHLQDEGVKQLGSNLWKEDVSCIHWLDTKDDGSVVFVNFGSIAVMTKEQLIEFGWGLANSKKDFLWITRPDIVGGNEAVMPPEFLDEIKGRGMITSWCPQEQVLNHPAIGGFLTHSGWNSTLESISSGVPVLCWPFCGEQPTNCRYSCMEWGIGMEIDTNVKRKEVEAQVRELIDGAKGEMLKAKALDLQKKAKEAVIFGGSSYVNFNKLVTEVLWKN

SEQ ID NO: 5573 - protein, 487 aa, Jatropha curcas
MGSMDQNQLHIFFFPFMAHGHTIPTVDMAKLFAFRGHKTTIITTPSNEPLISKTIQRTKDLGFVINIQILKFPSVEVGLPEGCENIDFVLSLVENGTEMMNKFCLAIGKLQEPLEKLLQECNPNCLVADMFFPWATDAAAKFGIPRLVFQGTSFFSLCAGESIRLYQPHKKVSTDSASFVIPDLPGEIKITRKQFPIIFREEVQNDFTKIVKESNESELKSFGVVVNSFYELEQAYADHYRNVLGRKAWHIGPVSICNRGMEDKAQRGKEASIDEQECLKWLNSKKPNSVIYIRFGSITNFTDSQLKEIAIALETAGQKFIWVVRRNKNSEGHEEEWLPEGFEKKMEGKGLIIRGWAPQVLILEHDAVGGFVTHCGWNSTLEGVSAGKPMVTWPVGAEQFYNEKLVTEVLKIGIGVGAKEWDWLHGDYVKSEAIEKAIRRVMEGEEAEEMRSRARKLGEMARQAVEDGGSSYSDFNALVQESRYYGP

SEQ ID NO: 5574 - protein, 459 aa, Arabis alpina
MELHGALVASPGMGHAVPILELGKHLLNHHGFDRVTVFLVTDNVSRSKSLIGKVLTEEDPKFVIRFIQLDVSGQDITGLLLTKLAEMMRNALPKIRSAVMTLEPRPSVFVVDLLGTEALAVAKELEIMKKHVLVTTSAWFLALTVYMASLDKETLYKNLRSIGALLIPGCSPVKFDRVQNPSNYVRELAESQRIGAEVITADGVFVNTWHGLEPVTIRAFLDLENLGQVMRGVPVYPVGPLVRPAEPGLKHEVLDWLDLQPKESVVYVSFGSGGALTAEQMIELAYGLELTGQRFIWVVRPPAEDDPSASMFDKTKNQTEPLDFLPDGFLDRTKDIGLVVQTWAPQEEILAHKSTGGFVTHCGWNSVLESIVNGVPMIGWPLYSEQKMNALLISEELKIAVRVNVGDGIVKKEEIVEMVKRVMDEEEGKEMRKNVKELKKTSEEALKNTHIPSTYFTQN

SEQ ID NO: 5575 - protein, 466 aa, Vigna angularis
MTTFEVVFIATPALGNLVPLVEFANLLTKHDPRFSATVLTIFMPQRPLINTYVQSRASSPANLRILHLPTVDPPPPDQYQSSIAFLSLHIQNHKHHVKNALLSLLPSDSNSPVRLAAVFVDMFCGSLIDVAAELSVPCYLFFASSASFLGFTLHLPRPDSLDSESEFSIPSFKNPVPKSVLPSFVLDANDASPWFSYHARRYRETKGIVVNTLGELEPHALPSLHDDSLLPRVYPIGPVVDLAGSAGWDPNPVQYKRIMEWLDRQPAASVVLLCFGSMGSMKADQVEQIAIGLERAGVRFIWALREPPKAQLEDPRDYLNEVDVLPDGFLKRTAGIGLVCGWVPQAKVLGHEAVGGFVSHCGWNSILESLWHGVVVATWPVYAEQHLNAFQMIRELGLAVEISVDYRVGGDLVRAEAVEKGVRSLIEGSDELRRKVKEMSEKCKSALVEKGPSYNNLVSLIQELTS

SEQ ID NO: 5576 - protein, 484 aa, Medicago truncatula
MKMEYTKAPLKILLVSYPAQGHINPMLRLGKCLASKGSSVIFITTEKAGKELRTVNNITEKLVIPVGNGSLTFQFFDDGLSDDDPIRTSQTTYLPHLELVGKQFLSQMIKNESNTPISCIINNPFLPWVCDVAVENEIPSALLWVQSSAVFAAYYNYFHKLVRFPSVEEPYIDVQLSSVVLKYNEIPDFVQGFSTFSILGTIIMEQIKNLSKVFCVLVDTYEELEHDFIDYVSKNSVKIRPIGPLFKNPQIKNASNICGDFVKSDDECIIEWLNSKPPSSVVYISFGTVVHLPQEQINEIGYGLMNSQVSFLWVLKAKPPPDFTHVGFKPHFLPDRFFEETSGRGKVVKWCPQEQVLAHPSVACFVTHCGWNSSMEALTLGVPMLTFPAWGDQVTNAKFLVDVFGVGIRLGCGQAENKLVCRDEVKKCLSEAMAGPKAEELKQNAIKWKKAAEAAVAIGGSSDQHLDAFMEDIKARFKRYNTLS

SEQ ID NO: 5577 - protein, 476 aa, Catharanthus roseus
MAMKTAELVFVPSPGIGHLLSTVELAKILVNQDHRLSITLLIMKFPFETKIAKYTKSFYESPIPRLKFIEIKEDQPSSSERYKSTFFYDFIDSHKGKVRDVLSEISISEKSQLSGVIVDMFCTSMIDVANEFGVPSYVYYTSGAAMLGLVLHFQHLRDDLNEDIIEYKDKDTDFTVPTYINPLHSKVLPSVLFDNEEGSKLFLDQAKRYRETKGIIINTFLELESHSVTALSEDPNIPPVYTAGPILNLKSEASQESELILKWLNLQPESSVVFLCFGSYGSFSAEQVKEIAIALENSGHRFLWSLRRPPPEGKMEPPSEYENLEEILPEGFLKRTAETGKIIGWAPQIEVLSHSAVGGFVSHCGWNSTLESVWCGVPMATWPIYAEQQLNAFEMVKDLEMAVEIKIDYRREVWTTNSEILGADLIEERIRCLMDPENKIRSKVKEMQRKSSSTLKEGGSSWSSIRRFIDSVVTKN

SEQ ID NO: 5578 - protein, 465 aa, Eucalyptus grandis
MAPPHFLLIAFPSRGAINPALQLAERLTHAGSRVTFFTTVSAHRRMIEPVCLDGVTFATFSDGYDNGYELGDDVDHFMAELKRRGSEALRGLIEYSSGRGLRFTCALHTMFRWADEVARSFQIQSVLVWIQPATVFGIYYHYFNGYEDVIKSVTSQSCDTTSLIRLPGLPPLTDRDLPSFFNPDNKYAFGLPHMQSQFKQLKEGGKPNMVLLNTFDMLELEVLRAIGTLNLVGIGPLVPFRFLNAQDRNSSDESSRGDHFQSSKEYVQWLNTKKEASVIYVAFGSIAKFSKAQKLEIAHGLLETGRPFLWVVRKTVGDDDELIYKEELDKRGMIIPWCSQMEVLSHRSIGCFFTHCGWNSTLESLACGIPMVAFPQFTDQMTNSKLVEDVWKVGVRVSEINEDGIIVKGGEIKKCLELVMGSGETGDGIRRNARKWKNLAMEASKEGGSSDKNLRAFVEEFSKVD

SEQ ID NO: 5579 - protein, 980 aa, Citrus unshiu
MQRLEYQTHGDVVALLASPGMGHLIPVLELGKRFATQNDFQVTIFVVATDTSTVQSQLRNLPNPHLFNIVSLPPVDISALLDADASIVIKIIFMMRESLPALRSSISTLKPRPTALFADLFGTEAFQIADEFEMLKYVYIASNAWFLAATIYFPTIDKRLQEEHYGRKQPLMIPGCRSVRFQDTLEAFTDPKDQLFDEYLRIGLEMVTADGILVNTWEDLEPTTLASLRDGISKLPPIYPIGPVVRSMGSSHMSENSSLLEWLDMQPTESVIYVSFGGGGTLSANQMVEVAWGLELSQQRFIWVVRPPMDNDVSGSFFKVGDGSSDGTPDYLPDGFLTRNAKMGLVVPDWAPQVEILGHASVGGFLSHCGWNSTLESIVNGVPLIVWPLYAEQKMNATMLAEELGVAVRPNEMPTENLVKREEIEMMVRRILVLVDKEGQALRSRVKELKHSAKKASTKGGSSYNALSQVAKQCEMSLQGLMAKCLTMEIRKPRVALLASPGMGHLIPVLELGKRLVIQNNHHATIFVVANDTSSEQLSKLVNSPDYDILDIVLLPCIDISGIVCTDASLVTQIAVMMHESIPALRSTISAMKYRPTALIVDLFGTEAMAVADEFEMLKYMFIASNAWFVAVTIYAPALDKKVLQEEHVNQKKPLKIPGCSAVRFEDTLEAFLDPYGPMYDGFLQVGMDMSKADGILVNTWEDLESKTLAALRDFNMLRRVAKAPVYPVGPLARSVASSPVSGSHVVLDWLDKQPHESVIYVSFGSGGTLSSKQTMELAWGLEQSKQRFIWVVRPPLDHDVFDSYLTAGSGALNTAEGALDYHYLPEGFLIRTRDVGLVVPMWAPQPEILAHPSVGGFLTHCGWNSTMESIVNGVPMIVWPLYAEQKMNATMLTEELRVAIRSKEVPSEKSVVGRGEIEMMVRRIVAEKQGHAIRNRVKELKHSAQKALINGGSSYNSLSKIAHECENSLQFTQEKAEGA

SEQ ID NO: 5580 - protein, 495 aa, Ricinus communis
MEEAIVLYPTPAIGHLISMVELGKLILSCRPSCSIHILILAAPYEAGSTAPFIAKVSATIPQIKFHHLPIITLPSTPTTHHETLTFEVIRLSNINVHQTLLSISETSTISAFIMDFFCAASLSVPTELSIPGYFFFTSGASCLALLLYFPTIHQNTTKSFKDLNTFLDVPGAPLVLASDLPKPTLDRNDKAYECFLDCAKCFYKSSGIIVNTFELLEPKAVKAISDGRCIPNATTPPVYCIGPLIVTNNKRGDNNTSNGAPQCLTWLDSQPSKSVVFLCFGSLGLFSKEQLREIAIGLERSGQRFLWVVRNPPSNIQSLAISAQPEPDLDSLLPDGFLDRTKGRGFVMKSWAPQLAVLNHDSVGGFVTHCGWNSVLESVCAGVPLIAWPLYAEQRFNKVLLVEEIKIALPMNESENGFITALEVEKRVNELMESEAANTVREQTIAMQKASKAAVTEVGSSHAALSKLIDSWKGKKIYCGPCKMCQWLSDSICIA

SEQ ID NO: 5581 - protein, 487 aa, Arabidopsis thaliana
MESHVVHNAQKPHVVCVPYPAQGHINPMLKVAKLLYAKGFHVTFVNTLYNHNRLLRSRGPNALDGFPSFRFESIPDGLPETDGDRTQHTPTVCMSIEKNCLAPFKEILRRINDKDDVPPVSCIVSDGVMSFTLDAAEELGVPEVIFWTNSACGFMTILHFYLFIEKGLSPFKDESYMSKEHLDTVIDWIPSMKNLRLKDIPSYIRTTNPDNIMLNFLIREVERSKRASAIILNTFDELEHDVIQSMQSILPPVYSIGPLHLLVKEEINEASEIGQMGLNLWREEMECLDWLDTKTPNSVLFVNFGCITVMSAKQLEEFAWGLAASRKEFLWVIRPNLVVGEAMVVLPQEFLAETIDRRMLASWCPQEKVLSHPAIGGFLTHCGWNSTLESLAGGVPMICWPCFSEQPTNCKFCCDEWGVGIEIGKDVKREEVETVVRELMDGEKGKKLREKAEEWRRLAEEATRYKHGSSVMNLETLIHKVFLENLR

SEQ ID NO: 5582 - protein, 480 aa, Arabidopsis thaliana
MAEANTPHIAIMPSPGMGHLIPFVELAKRLVQHDCFTVTMIISGETSPSKAQRSVLNSLPSSIASVFLPPADLSDVPSTARIETRAMLTMTRSNPALRELFGSLSTKKSLPAVLVVDMFGADAFDVAVDFHVSPYIFYASNANVLSFFLHLPKLDKTVSCEFRYLTEPLKIPGCVPITGKDFLDTVQDRNDDAYKLLLHNTKRYKEAKGILVNSFVDLESNAIKALQEPAPDKPTVYPIGPLVNTSSSNVNLEDKFGCLSWLDNQPFGSVLYISFGSGGTLTCEQFNELAIGLAESGKRFIWVIRSPSEIVSSSYFNPHSETDPFSFLPIGFLDRTKEKGLVVPSWAPQVQILAHPSTCGFLTHCGWNSTLESIVNGVPLIAWPLFAEQKMNTLLLVEDVGAALRIHAGEDGIVRREEVVRVVKALMEGEEGKAIGNKVKELKEGVVRVLGDDGLSSKSFGEVLLKWKTHQRDINQETSH

SEQ ID NO: 5583 - protein, 400 aa, Rhodiola sachalinensis
RSNPPVSCIVSDGVMSFTLDAAKELGVPEVIFWTTSACGFLGYSLYDRLRKQGFTPLEDSRQLTNGYLETVVDWPPSADGIRLKDFPTFLRTTDPDDLMFEFVTSESTRAQRATAIVLNTFEPLESEVLSALQAHYTPPVYCIGPLHLMATDTALDGLGSNLWKEDRHCIKWLNSRPDNSVVYVNFGSITIMTGDQMLEFAWGLADSARSFLWVIRPDLVSGKTAVLPPEFLTATEGRGLMVDWCPQEEVLAHSAVGGFLTHSGWNSTMEALTSGMPVIAFPQWGDQVTDAKYLVDEFKIGVRMCRGEAENRVVTREEVRKCLLEATTGEKAAEMKANAAKWKKAATEAFVEGGSSDRNLQTFVDDVRMKSVEITKKNLAFGLPAAKTEGQRGVDTAVKA

SEQ ID NO: 5584 - protein, 503 aa, Vigna angularis
MATSKPHAILLTSPGMGHIIPMVELGKRLLTHHSFHVTIFVVTTDSATTTSQILQQTSNLSSLNIVHVPPIDSNKLPPNAPLEVRINFTMLESLPFLRSSLTSINNFPPPSALIVDLFGLQALPMARDLGMLTYVYFATSAWFSAVTVYFSDTDNKIMERHAENREPLLIPGCAPLRFEDTLESFLSPGGAMYEGYHAAAKEIVAADGILMNTWQDLEPSATKALTEDGILGRFTKGEVYAVGPLVRSVEKKPKGGKKDGVLQWLDEQQAESVVYVSFGSGGTMSGNQMREVALGLELSQKRFVWVVRPPCEGDASGAFFDVASGGDAAMSYLPEGFLKRTEGVGVVVPMWAPQAEILEHPATGGFVTHCGWNSVLESVENGVPMVAWPLYAEQKMNAFMLSEELGVAVRVAEEGGGVVGREQVAEVVRRVMVDKEGFGMRKKVKELKLSGEKALSMFGSSHHSLAEMRKECEVHMQSSDTKLPPACHLRSTTTDVFNHVVYS

SEQ ID NO: 5585 - protein, 1367 aa, Citrus unshiu
MNLSTGYILSLYLIRKLNMGSKVPQLHVFFFPFMAHGHMIPIVDMAKLFASRGVKASVITTPANGPYVSKSVERANEMGIELDVKTIKFPSVEAGLPEGCENLDAITNEVNKELIVKFVGATTKLQEPLEQLLRDHKPDCLVADIFFPWATDAAAKFGIPRLVFHGTSFFSLCASNCLALYEPHKNVSSDSEPFVMPHFPGEIKLTRNQLPDFVKQDMGDNDFSRLLKAIDDSDLRSYGVAVNSFYELEPAYADHYRKALGRRAWHIGPVSLCNRNFEDKALWGKQASIDEQECLRWLNSKQPNSVVYICFGSIANFTSAQLMEIATGLEASRRNFIWVVRRNKNDGGEEEKEAWLPEGFEKRMKGKGLIIRGWAPQVLILDHEAVGGFVTHCGWNSTIEAVTAGVPLVTWPVSAEQFYNEKMVNEVLKIGVGVGIQKWCRIVGDFVKREKIEKAVNEIMVGDRAEEMRSRAKTLGKMAKRAVENGGSSYCDLSALIEENCSRWCNSGESGRIFLCEIATEEEGLRRLFWAPAPTVVQAVPISQSFSCRLRAGLSVVTGPVSQAGMASGICQLHIFFFPFLAHGHMIPTVDMAKLFTTRGVKASVITTPANAPHLSRSIQKASELGIELDVKIIKFPSAEAGLPEGWENLDAITNEVNRELIVKFYMATTKLQKPLEQLLQEHKPDCLVADMFFPWATDAAAKFGIPRLVFHGTSFFSLCAIKCLALYEPHKKVSSDSEPFVMPNLPGEIKLTRNQLPDPAKQDMGDNDFSRFMKASDDSDLRSYGVVVNSFYELEHAYADHYRKALGRRAWHIGPVSLCNRNFEDKALRGKQASVDEQECLKWLNSKQPNSVVYICFGSVANFTSAQLMEIAMGLEASGQNFIWVVRKNKNNGGEEEKEDWLPEGFEKRMEGKGLIIRGWAPQVLILDHEAVGGFVTHCGWNSILEGVTAGVPLVTWPVYAEQFYNEKIVNEVLKIGIGVGIQKWCRIVGDFVKREAIVKVVNEIMMGDRAEEMRSRAKAFGEMAKRAVENGGSSSSNLNSLIEDLRLTTGLSMVECPFSVFAEQFFNETWVTRLLKIGEVGMAGEIRKLHIIFFPLMAHGHMIPLVDMAKLFGSRGVKTTVITTPANATLFSKAIPRANELGIEIDIKTIKFPSVEVGLPEGSENLNEMTSQPDMPVNLQEHKPNCLVADMLFPWATDAAAKFGIPRLVFHGTSFLSLCATACLMLYEPHKKVSSVSEPFVIPNLPGDIRLTRNQLPDTMKQDDETDFSRLFKAAVESELKSYGVVVNSFYELEPAYAVHYRKVLGRRAWHIGVLKLAEIKATQFCCLPMLWKPSQLHFCSANGDCNGASSFGAKFHLDCEEKQE

SEQ ID NO: 5586 - protein, 461 aa, Erythranthe guttata
MKSHHFLIISFPIQGHINPILQLAKNLARLGAKVTFATTDRILHRLQDSLPTLHRLSYASFSDGQHHEEEQEKSTKSTAGYMAEMKRAGSENLIRILQESLDGPEPVTCLVYSLLLPWAAAVARDMQIPSAFLFIQCATAFAIYHRFSKPHNEIVDPVDIIQDLPLFSSSDLPTFLLPDNPMYSFMKPMMIEHMQELEKDPKPLVLLNTFEELEQDAIESLKTKNINVITIGPLIPSAFSDGNDSTDKSFGGDLFISKKEDYFKWLDTKPENSVVYVAFGSLVVMNKDQKIEFLHGLVESKRPFLWVIRSSSSSSDSVDENETKKMIDNSDIGENGMIVEWCAQMGVLSHKSIGCFVTHCGWNSTLEGLICGVPFICCPHFADQPTNAKLVEEVWGTGVRARANGEVLIEREEFKKCLDVVMGEGDRGKEMRRNALKWRGLALEAVKEKGSSYINLKRVLE

SEQ ID NO: 5587 - protein, 497 aa, Persicaria tinctoria
MKKAHLVFIPSPGVGHLVSAVEFSRRLLARDARLSITILAMTSPFPTSTSLPQTTSTPSTDSNSPGEPHYIFLPQADLPPKEVLENSMEEYISKFAASHSHHVRTALLTLQESSLDRVRFHLVVDMFCTSLIDVGKDLGIPSYLFLTSGAAFLSLLLHLPERFLRTGVPRFDESEPEIAISGFQNPVPSSALPEFAFNTSGYTALMSHANKLEETNGLIINTFAELEPFAIKSLREVYDELAAGTESEIKIQRFRPPLFTVGPVLDLKGQARRPGDASQESKIMKWLDTQPEASVVFLCFGSVGAFSEEQAKEIANGLTQSGQRFLWSLRKKTTTGAKRPMEYTDAELKGVLPKEFWGAVEGGRGLVCGWAPQAEILAHKAIGSFVSHCGWNSTLESVWFGKPIVAWPLYAEQPSNAFELVNELGLAAAWLGYGGKPGDLVTADEVERAVRSVMDSDNPVRSRAKEMSEASKSALLNGGSSFDSIGCLMRKIIGDEL

SEQ ID NO: 5588 - protein, 241 aa, Punica granatum
MSKVYPLMTVGPTIPSIYLDKRVENDSNYGLDLFDLDSSNITSWLETHSPRSVVFVSFGSMATLSTEQTEELAWGLHDSGHPFLWVVRASENSKISEKFKLAITAERALLVQWSHQLEVLSSDRIGCFFSHCGWNSTIEALSMGIPMVAMPQWTDQPTDAKLVEDVWVVGVRVRVGEDGIVKREEIEHCVREVMESERGKVMAVNATKWKDLAVEAVSEEGTSDNNINDFVSKILLKRKSI

SEQ ID NO: 5589 - protein, 229 aa, Ricinus communis
MTSISASSGLIQRSKALSCMFALAACHIITKQLIELALGLEASMRSYIWVVKEGDYTAELDKWLVEEQFEETVKDIGLVVRGWAPQVPILSHPAIGGFLTHCGWNSTLEGISSGLPMITWPMFAEQLFNEKLIVQVLKIGVRIGVEIPMKWGEEEKLGVMVNKDEIKKAIDQLMDEGSEGEDRRRRAKELGEMAKKTVEEGGSSYLNMTLIIQHVIEEVTNGNQSNYTI

SEQ ID NO: 5590 - protein, 480 aa, Zostera marina
MAVCQENRHRLHIFFLPFLAPGHMIPMVDMARRFTEHGVKSTIVTTPLNVLRIQPSIDHFNNSSENNWPIEILQIKFPSSYFEPGENVSSFQSPSITGELLASMNSLRQPFEELLEKHRPDAIVSDALHVWSPDSADMFGIPRLVFHGCGTFPILVSTKLMDHIPLDDGDDEKKFVVPGLHHRIEMRVSELPGYVLKRNIWTDDMVRGYRRSYGVVMNTFTDLEKDYIRDDVATSPSSWEVGPLSLCNRDKTDMILRGDVIADGFSATCMDWMDSMKPKSVLYVCFGSCGKFTIPQLKEILSGLDASGYPYIWVVKSVGGTHLSEWLPEEERRSKKGLILTGWAPQVLILNHNSIGGFMSHCGWNSCLESITAGVPMVTWPLFGDQFFNMKFIVDVVKVGVEVGDMVCSEIAEERRVMTRWQIEKAIRRVMDGGDEAVAMRKRVSTLRSLSLKAVEEGGSSFNNTRRLINELMKLKHDKA

SEQ ID NO: 5591 - protein, 501 aa, Sorghum bicolor
MSAASLPTGQEPEPQPHAVCVPFPTQGHITPMLKLAKILHARGFRVTFVNTEYNHRRLVRSRGAAVAGLTASSSSFRFATIPDGLPESDADATQDPATISYATKHNCPPHLRSLLAGLDGVTCVVADNLMSFAVDAARDMGVPCALFWTASACGYMGYRNFRLLIDMGIIPFQDEEQLTNGFMDMPVDWAPGMSKHTRLKDLPTFLRTTDPNDVLLNFQLQEVERSEYASAVVVNTFDELEQPALDAMRAVIPAVYTIGPLVSVTEQVVVVRRDPRLDAVSCSLWREDQSCLAWLDARKHRPRSVVYVNFGSITVMTGQEMAEFAAGMASSGHDFLWIVRPDAVKGDTSSSAAALPPGFLEATPKGRGLLASWCDQEAVLRHEAVGLFLTHSGWNSTLESLAAGVPMLCWPFFAEQQTNCRYKCVEWGVAMEVGGDVRREAVEARIREAMGGDKGKEMARRAAEWKEAAAGSAARSLANLDRLINDVLLSPARLGGSLKMA

SEQ ID NO: 5592 - protein, 287 aa, Panicum miliaceum
MPVSELPPYRVRDLVVLGGDDRGGVRELLARAVTAVKVSSGLILNTFDALERRELEGLRRDLAVPVFDIGPLHKFSPAGDSSLLRQDRSCLEWLDARPPSSVLYVSFGSLACMSQRDLVETAWGIAGSGVPFLWVVRPGMVRGSAHQELPEGFEAATRGHGMVVAWAPQEEVLRHRGVGGFWTHNGWNSTMESVCEGVPMLCRPYFGDQMGNARYVEHVWKVGFEVGGELERGAVEAAIRRLMMTGKDGAEMRARAGELKKAAEECTGKGGSSCLAIDKLVTHMMSL

SEQ ID NO: 5593 - protein, 483 aa, Ricinus communis
MASQNQQLQFVFLPHLAQGHMIPMVDMARLLAQHGVTVTIITTPFNAARYETMINRASESGVRIQLLQVPFPSKEVGLPQGCESMDTLPSRDLFKNLLIGITMLQVPVEQLFSKLQPPPSCIISDKNVAWSHQTALKFKIPRLVFDGTSCFSLLCTHNILATKIHESVSDSEPFVVPGLPHQIVLTKGQLPNAVLMNDSGDIRHEIRESEKAAYGVVVNTFEELEPAYISEFQKARGCKVWCVGPVSLCNKETLDKAERGNKASIDENQCLKWLDLRAQGSVLYACLGSLSRLTGAQLIELGLGLEASNRPFIWVIRGGNGTEEFEKWISEKDYETRLRGRGILIRGWAPQVLILSHPAIGGFLTHCGWNSTLEGLCAGIPMITWPLFAEQFYNERFIVQILKIGVRLGSEFSVKLSEEKKSWEEVKRAIDQLMDEAEEGEERRKRAEELGKMARKAIEEGGSSHLNMISLIEDIKKQVISNS

SEQ ID NO: 5594 - protein, 513 aa, Medicago truncatula
MDLYKPTHIVLLSSPGLGHLMPIIELAKRFQIHHNFKLTILAITSQTSHTESHILKSATNPSLYNIIQIPSPNISSLLPVSATVCTRIFLTMRHSIPSIKSALTNLTLPPSALIVDIFGTEALPLALELNIPRFIYVASHAWFLSLYVYSPVLDKQIQGPYIEQKEPLKIPGCKSVQPNDLVDPMLDRYNLEYKEYLTVAKNFSKSDAILVNTWDELQHRELKALNDGDGELSSLLKVPVFAVGPLVRQAESEIGQASESVIQWLDKQPKESVVYVSFGSGGTLSNEQMNELAFGLELSEQRFVWVVRACASTTEAVDAAFFTTGSGGDGFGDELDDQIGKHLPEGFVERIKNKNVGLFLHEWAPQVTILKHPSIGGFVSHCGWGSVLESLTNGVPIIAWPLYAEQRMNAALLVEELGVAVRTVVSPGKNVVEREEIASLVRKVILVDQNGKRNHVRERVKEVRVSAEKALLQGGSSYNALSHVAKIINKQDFVCVSKNMDTDGDDIKDRKNQ

SEQ ID NO: 5595 - protein, 486 aa, Medicago truncatula
MGYSEAPINILLVSYPAQGHINPMLRLGKCLASKGSSVIFITTEKAGRELRTVNNIIDKSVIPVGNGSLAFEFFEDGLSDDDPIRASLTTYLPHLELVGKKFLSQMIKNHAADESNTLISCIINNPFLPWVSDVAAELEIPSALLWIQSGAVFAAYYNYFHKLVRFPSNAEPYIDVQLSSLVLKYNEIPDFLHCFSKYPFLGSLLLEQIKNLSKVFCVLVDTYEELEHDFINYISKYSVLIRPIGPLFQNPKTKTASNICGDLVKSDDDCIIEWLNSRPQSSVVYISFGTIVHLPQEQVNEIAYGLLDSQVSFLWILKVKPSLNAKHVGFKPHCLPDGFLEETSGKGKVAKWCPQEQVLAHPSVACFMTHCGWNSSMEALTLGVPMLTFPAWGDQVTNAKFLVDVFEVGVRLGYSQAENRLVCRDEVKKCLLEAMAGPKAEMLKQNTIKWKKAAEAAVAVGGSSDRHIDAFMEDIKTRFKRCNKLS

SEQ ID NO: 5596 - protein, 482 aa, Vinca minor
MGSEEKNFPPHVLIFPLPIQGHVNSMLRLAELLCLAKLDITFVVSDFSHNRLIKHTNVASRFARYPGFQFQTISDGLPDDHPRAGEKVMDILPSTKNVTGPLFKRMMIENNCFASSTRRPTTCIIADGVLSFAGDFAEENGVPLIYFRTVSACAFWACFSMPELIESGDIPIKGNGMDLLVKGVAGMETFLRRRDLPGFCRVNDMSEPKLQIIKTETRQTTRAQAAILNTFEDLEGPILSQIRKHIPRLFTIGPSHSHLNSRLETQNIKTSISSGSFWEEDRSCVDWLDSQPPRSVLYVSFGSITVVTRAQLLEFWHGLVNSGHRFLWVMRPDSIMGKDGENRVPHELEEGTKERGYMVGWAPQEEVLNHSAIGGFFTHCGWNSTLESIVAGVPMICWPYFADQMINSRFVSEIWKIGLDMKDSCDREIIVKMVRELMEVKKDEFMERADEMAKLARKAVSEGGSSYSNLDALVEYIRSLII

SEQ ID NO: 5597 - protein, 497 aa, Vitis vinifera
MQMQMQFETQVRFDHPLHRPNRSISTSSSSPTMTQPHFIVITYPAQGHINPSLQLAKRLIRVGAHVTFVTSTYASERMAKTPTMDGLKFVTFPDGCDSGLKQSDALQGFMSELERLGSQALTDLLIASANEGRPVACIIYGILIPWVAEVAHSLHIPSALFWSQPVSVFNIYYYYFCGYGELIRKKVRDSSPSIELPGLPLLSSRDIPCFLLPSNANEYNFVLSAFEKHLEMLHRDTNPTVLINTFDALEPEALRAVSKFKSIGVGPLFPTAFLGGKDPSDTSFGGDLFRRSKDYIEWLNSKPESSVIYVSFGSLAVLSKQQSEEIARGLLDSGRPFLWVIRAKEKGEEEKEEDKLSCYAELEQQGMIVPWCSQVEVLSNPSLGCFVTHCGWNSTLESLASGVPVVAFPQWTDQSTNAKLAEDVWKTGVRVTVNQEGIVESDEIKRCLELVMGDGEEAKEMRRNAKKWKGLAREAVMEGGSSDKNLKNFMDEVIQGY

SEQ ID NO: 5598 - protein, 349 aa, Arabidopsis thaliana
MEESKTPHVAIIPSPGMGHLIPLVEFAKRLVHLHGLTVTFVIAGEGPPSKAQRTVLDSLPSSISSVFLPPVDLTDLSSSTRIESRISLTVTRSNPELRKVFDSFVEGGRLPTALVVDLFGTDAFDVAVEFHVPPYIFYPTTANVLSFFLHLPKLDETVSCEFRELTEPLMLPGCVPVAGKDFLDPAQDRKDDAYKWLLHNTKRYKEAEGILVNTFFELEPNAIKALQEPGLDKPPVYPVGPLVNIGKQEAKQTEESECLKWLDNQPLGSVLYVSFGSGGTLTCEQLNELALGLADSEQRFLWVIRSPSGIANSSYFDSHSQTDPLTFLPPGFLERTKKRVRAKWQPLNI

SEQ ID NO: 5599 - protein, 481 aa, Eustoma exaltatum
  MOD_RES (92)..(92): Any amino acid
  MOD_RES (102)..(102): Any amino acid
MGQLHIFFFPFLAQGHMLPTIDMAKLFSSRGVKATLITTPYHNPMFTKAIESTRNLGFDISVRLIKFPYAEAGLPEGIESTDQITSDDLRPXFLKGCNLLQXPLEQLLQEFHPHALVADVFFYWANDSAAKFGIPRLLFHGSSSFAMSATDSVRRHKPYQNLSSDSDIFVVPDLPHEIKLSRGQISVEQREGIENEMTKLWEKVIDSERKSYGVVVNSFYELEPDYVNYYKNVMGKKAWHVGPLLLCKKEDEDVSQRGKESAINTHECLKWLDSKNPNSIVYICFGSMSNFTVAQLNEIALGLELSGQEFIWVVRKCADEEDSAKWFHKDLKTRIQGKGLIIKGWPPQLMILGHEAVGGFVTHCGWNSTLEGVCAGVPMVTWPMFAEQFYNEKLVTDVLRTGVGVGSKQWGRVNKETVKREAIKKAICHVMIGEEAVEMRSKAKELKKMAKMAVEEGGSSSNDLIALFEELKAYHDGRKQD

SEQ ID NO: 5600 - protein, 471 aa, Arabis alpina
MDKPHALLVASPGLGHLIPVLELGNRLSSVLNVHINVLAVTSGSSSQTETEAIRAAAASGACKITELPSVDVNHLVEPDATVATKIFVTMRAMKPAAREAVKSMSRKPTVMIVDFFGTGLMSLADEVGMTGKYVYVPSHAWFLAVMVYLPVLDKVVEGEYVDIKEPMKIPGCKPVGPKELMETMLDRSDRQYRECLQGGEEIPTSDGVLVNTWEELQGNTLAALRQDGKLSRVMKVPVYAIGPIVRTNGSVKKPDSIFQWLDQQPERSVVYVCLGSGGTLSLEQTMELACGLELSGQRFLWVLRRPTSYLGASSGDDDDQVCAGLPDGFLDRTSGVGLVVTQWAPQVEILSHGSIGGFLSHCGWSSVLESLTKGVPIVAWPLYAEQWMNATLLTEEIGVAVRTSELPAKEVIGQEEVAVLVRKIVVEEDEEGRKIRAKAEEVKVSSERAWTQGGSSHSSLFEWAKRCHLVS

SEQ ID NO: 5601 - protein, 665 aa, Vitis vinifera
MLHHHFLLITYPAQGHINPTLQFAKRLIRMGMEVTLVTGVSALSRMAKAPSSAGLTFTTFPDGYAEWDKARADFSHQLSEIKRSGSQALTDIILRSAEQGRPVTCLVHTLLLPWVTGVARRLHVPSALLWIQTATVLDIYYYYFNYYGDVVRKNSNNPSCSIELPGLPLLTCGDLPSFLLTGDDLTSFLCSSTLDSISFSTFQEQVEVLTQETNPKVLVNTFNELEAEALRSVDKLKLIGIGPLIPSAFLDAKDPSDTSFGADIFHGSTDCIQWLNSKPKSSVIYVSFGTLCDLPKPQMEEIARALLDSGRPFLWVLRSQGSGNVKDKDQEEEKWSCREELEEKGMIVPWCSQLEVLSHPSLGCFVTHCGWNSTLEGLACGVPIVAFPQWSDQRTNAKLITEMWKTGVRALVNEEGIVESDEMKRCLEIVMEDGERAREMRRNAEKWKDLAREAVKEGGSSDRNLKAFVDEVVAERVEEMRRNANKPKDLEKETVKEGGISDKNLIVFVDEVPEGRGEETVRNAEKCKDLARQVVNQGGSSDKDHKAFVEEADGERVEELRSNTEKWKDLAAEAVNEAGYSDKNLGALVDKVAEEKVEEMRNGEKWKDLTREGMKDGAVSDKNLKALLDEVAAGRLEQFSMNGGFSHKNLKAFMDDIAAGEEQYN

SEQ ID NO: 5602 - protein, 488 aa, Cephalotus follicularis
MSNMEPPHPLPPHVLIFPLPCQGHVNSMLNLAQLLSLAGLHVTFLNSDHNHDLLVRYTDIQARFACYPGFRFTTIPDGLPLEHPRNGESFMELFDAVKSITMPLFREMLVSGQFGLVNCIIADGIMGYTIDIANELGIPIFHFRTISACSFWAYFSIPQLIEAGEIPIKGNEDMDALVKSVPGMETFLRSRDLPSFCRCSDVFNPGLQLVMNETRQSPRARGLILNTFENLEGPILSQIRTQCPTTYTIGPLHAHLKSRLAKHATNTLQRSSNSSSLWEVDRSCMTWLDQQSSQSVVYISFGSIAVLTREQVIEFWYGVVNSKKNFLWVRRPDSIAGNKEGESEDIPVELVEGTKERGYMVGWAPQEEVLAHKAVGGFLTHSGWNSTLESIVAGVPMVCWPYFADQQVNSRFVSEAWKLGVDMKDLCDRKIVEQMLNDLMVERRTEFVKSTAEMAGMSRRSVNEGGSSYSNFDRLIEDIRLMSMETPI

SEQ ID NO: 5603 - protein, 504 aa, Brachypodium distachyon
MGSEAGETLAAPHAVLVPYPAQGHVTPMMKMAKLLHARGFHVTFVNTEFNHRRLLRSRGPAALDGVVPGFRFAAIADGLPFSDADATQDVPQLCQSTMTTCLPRLLSLLATLNDTPSSGVPPVTCLVVDGVMSFAYDAAREIGVPCAALWTASACGFLGYRHYRQLIEQGLVPFKDESQLTDNAFLDAVVPGIRGMCDGMRLRDFPSFLRTTDREDIMLNFFVHEGERLSLPDAVMVNTFDELERKVLDEMREFVLPAPLYTVGPLLLHAHHAVPEGSTPLDALGTNLWKEQDGLLDWLDGHAPSTVVYANYGSITVMTNEQLLEFAWGLAGSGYPFIWNIRPDLVKGDAAVLPPEFLEAVRGRAMLTTWCAQEKVLAHGAVGAFLTHSGWNSTLDGICGGVPMLSWPFFAEQQTNCRYKCTEWGNGMEIGGEVRREALAGMIRQLMEGDEGRGIRRRAAEWKESALRATLPGGSAMANLDTVVRDVLLAKFSGRDGGNYYAKN

SEQ ID NO: 5604 - protein, 486 aa, Anthurium amnicola
MAANIPPRTPDAPHVLCVSFTGQGHLNPFLRFARRVAAKGADVTFSTVEDAGHRIRKSSNSAVADGEFTTVGSGRLRFEFFSDGWEVGDPRRLDIQLYLPQLREVGSREVAALIRLQGELGRPVSSVVNNPFIPWVLDVAAGMGIPCGMLWVQSCAVFSVYYHYYHSLADFPDEARPEQIVPLPGVPPLQPHELPSFLLPTNPYLFLTDSILAQFENLHKARWVFANTFMELERDAITGIPNLFRPVIPVGPLVDAPFTGEGEHVHGDLWKAADCMGWLDAQEPCSVVYASVGSVVVLQRDQVVEMAEGLKAGGRPFLWVVRDDARWMLPEGFEEDTAGKGVVVGWSPQERVLAHPSTACFLTHCGWNSTIECLASGVPAIAFPQWGDQVTDAKFLVEVYGVGVHLRSKAPRLASGKGPSFTRADLERCIEEVTRGPRAESMRAMAARWKEATRSAVAEGSSSDTNILAFMEEISPGEPPWLPLPP

SEQ ID NO: 5605 - protein, 471 aa, Unknown
  Description of Unknown: Oryza sativa Japonica Group sequence
MESKPSRNVVLYAAMGAGHLLPMVELAKLFLTRGLDVTIAVPATPGSGTTGSPTIAGIAASNPSITFHHLPPPPSCADPDPNPLLLMLDVLRRSVPSLASLLRSIPSVAALVLDIFCAEAVDAAAALHVPAYIYFTSAAGAFAASLGLMHHYSTTTTNLRDMGKALLRFPGVPPIPASDMPSLVQDREGRFYKARVKLYARAMEASGVLLNTYEWLEARAMGALREGACSPDRPTPPVYCVGPLVASGEEEGGGVRHACLAWLDAQPARSVVFLCFGSMGSFSAAQLKEIARGLESSGHRFLWVVRSPRQDPANLLEHLPEPDLAALLPEGFLERTADKGMVVKSWAPQAKVLRHAATAAFVTHCGWNSTLEGITAGVPLLCWPLYAEQRMNKVFIVEEMKVGVVIDGYDEEMVSAEEVEAKVRLVMESEEGGKLLERLAVARAKAVEALAEEGPSRVAFDEFIDRLVTSE

SEQ ID NO: 5606 - protein, 475 aa, Linum usitatissimum
MERKSSEECHVILLPYPGQGHINPMTEFARRLVSRGIRATLVTTVFISNSLKLGPTIGHVHHDVISDGFDDSGRYGKGRTLPEYLEKAKEVGSRSLSELIEKYKSAPFGQPVDCVVYEPFLPWALDVAKEHGLYAAPFFTQPCAVDYVYYNVWAGSLGLPVDGWPVEIPGLPVMEAADAPSFLVDPVSSKDFLGLLVNQFSNAERADCFLINTFYELEKEVVDTFSKICPILPIGPTIPSNYLTTKPSMTENGKYGLDLFEHDESIPIKWLSNKPLSSVIYVAFGSRASLTHTQMEELALGLKQTAHYFLWVVRETEQAKLPKQFLKSSGNDNKGLVVKWSPQLKILANKAIGCFLTHCGWNSTIEALSLGVPMVAMPIWSDQPANASFVEKVWKVGVRVRVSEKNGVVGRDEIERCIREVMDGTGMAMKKNATKWREAVVKAVGKGGSSFRNIDDFVAKITTHKKTFETRMLIG

SEQ ID NO: 5607 - protein, 457 aa, Ricinus communis
MEKAANASKAHAVILPYPSQGHINPMLQFAKRLVSKGVKATLANTKAINKSMHSDPSCLIDIETISDGFDEGGSAQAKSTEVYLSTLKVVGAKSLANVIKRFKDSDCPVTAIIYDGFLPWALDVAKQFGILAVAFLTQACAVNNAYYHVQRGLLRVPGSSPTVSLPGLPLLQVSELPSFISDYVSYPGFRNLLVDQFRNIDGADWVLCNTFYRLEEEVVDWMAKKWRLRTVGPTLPSKYLDKRLEYDKDYGINLFKPDSGTCLNWLKTKPSRSVVYVSFGSVAELGTEQMEELALGLKGSNCYFLWVVRTSGWSKLPENFIEETYGKGLAVSWCPQLEVLANEAIGCFVTHCGFNSVLEALSLGVPIVAMPQWADQPTNAKYVEDVWKVGIRARPNEKGIVRRETVELCIREVMEGQKGKEIKENANKWKNLAKEAIDESGTSDKNIDELVAKISSS

SEQ ID NO: 5608 - protein, 301 aa, Unknown
  Description of Unknown: Oryza sativa Japonica Group sequence
MPASHFIDNRPEEPPESEVYKAVMDLVRRYTNKCSNGFLVNTVDSLEARVVNTLRHARRQGGRALPPFYCVGPLVNKAGERGERPERHECLAWLDRQPDRTVVFLCFGSTGIGNHSTEQLREIAVGLEKSGHRFLWVVRAPVVSDDPDRPDLDALLPAGFLERTSGQGAVVKQWAPQVDVLHHRATGAFVTHCGWNSVLEGITAGVPMLCWPLHSEQKMNKVLMVEEMGIAVEMVGWQQGLVTAEEVEAKVRLVMESEAGVELRARVTAHKEAAAVAWTDVGSSRAAFTEFLSNADSRQTS

SEQ ID NO: 5609 - protein, 444 aa, Gardenia jasminoides
MFPWLAYGHISPYLELAKRLTDRGFAIYICSTPINLGFIKKRITGKYSVTIKLVELHLPDTPELPPHYHTTNGLPPHLMATLKRALNGAKPELSNILKTLKPDFVIYDATQTWTAALTVAHNIPAVKFLTSSVSMLAYFCHLFMKPGIEFPFPAIYLSDFEQAKARTAAQDARADAEENDPAAERPNRDCDSIFLVKSSRAIEGKYIDYLFDLMKLKMLPVGMLVEEPVKDDQGDNSNELIQWLGTKSQRSTVLVSFGTEYFLTKEEMEEIAHGLELSEVNFIWVVRFAMGQKIRPDEALPEGFLERVGDRGRIVEGWAPQSEVLAHPSTGGFICHCGWNSVVESIEFGVPVIAMPMHLDQPLNARLVVEIGAGMEVVRDETGKFDRKEIARAIKDAMVEKTGENTRAKMLDVKGRVELKEKQELDEVAELLTQLVTETTQSSN

SEQ ID NO: 5610 - protein, 477 aa, Trifolium pratense
MKKAEVVFIPFPGPSHLISTLEFAKLLINRDNRLHITVLLMKFPNSRGTDAYTKSLSTSDSISFINLPECSLPPNTNPRDAFGALFEAQKPNVRQAVSDLTNGEQYGHLAAFVVDMFCTTMIDIAKEISVPTLVFFTSGVASLGLNLHLHTLRVRDNVDPTQLQQLKELVIPTFANPVPSYSLPGSVLSKEWEPFFLNYVGGLKKADGIIVNSFEELESHAIKSFSSHSELAGLPIIYPVGPILTPEPETKGVVESNDIIKWLDDQPPSSVVFLCFGTRGSFDEDQVKEIAHAIENSGARFVWSLRKPLPKGVMAAPSEYYSLSDLSLVLPEGFLDRTTGIGRVIGWAPQTQILAHPATGGFVSHCGWNSTLESVYFGVPIATWPIFAEQQANAFELVVELKMAVEIVLDYRVDLFQGPNYLLTADKIEKGIRSVLDNDEVRKNVKKMSENSRKTLLENESSHTYLGRLTDYIINQI

SEQ ID NO: 5611 - protein, 489 aa, Arabidopsis thaliana
MGSQIIHNSQKPHVVCVPYPAQGHINPMMRVAKLLHARGFYVTFVNTVYNHNRFLRSRGSNALDGLPSFRFESIADGLPETDMDATQDITALCESTMKNCLAPFRELLQRINAGDNVPPVSCIVSDGCMSFTLDVAEELGVPEVLFWTTSGCAFLAYLHFYLFIEKGLCPLKDESYLTKEYLEDTVIDFIPTMKNVKLKDIPSFIRTTNPDDVMISFALRETERAKRASAIILNTFDDLEHDVVHAMQSILPPVYSVGPLHLLANREIEEGSEIGMMSSNLWKEEMECLDWLDTKTQNSVIYINFGSITVLSVKQLVEFAWGLAGSGKEFLWVIRPDLVAGEEAMVPPDFLMETKDRSMLASWCPQEKVLSHPAIGGFLTHCGWNSILESLSCGVPMVCWPFFADQQMNCKFCCDEWDVGIEIGGDVKREEVEAVVRELMDGEKGKKMREKAVEWQRLAEKATEHKLGSSVMNFETVVSKFLLGQKSQD

SEQ ID NO: 5612 - protein, 427 aa, Helianthus annuus
MENQPKTTVRRHRRIIMFPFPFQGHINPMFQLANLLYSEGFSITILHTNFNAPKVSNYSHFTFKSILDDCPENERYSKASWADFAQNFIYKQDDAFWHFTQKVADSLNLPRLVLRTSSLYCTIVYSSIPLLDDRGYFTLDESHLEEQVVELPLLKVKDVIGIKSIKDPYAELICDMVKETKASSGIIWNSFKELEETELKRVSDDFLVPHFLIPFPKYFTASSSSLLEQDRTIFPWLDQQLPKSVVYVSFGSLSQVEEKEFLEIAHGLVYSKQPFLWVVRHGFVKSSTWHESLPEGFPGERGRVVEWAPQQDVLANEATGVFWIHSGWNSTLESICEGVPMICSSFWGDQPLDARYMSEVSRVGVYLENGLQREEIASAIRRLMVDEEGKEIRERARVLKRKADVSVTKGGSSNESVKTLIDYISSL

SEQ ID NO: 5613 - protein, 485 aa, Cicer arietinum
MDLLADGTKKKPHALLIPFPIQGHINPFLKLAKILHNKGFYITFVNTEFNHKRLFKSIGPNALNGFQDFQFETIPDGLPHTNMDATQSIPSLCDSTRKYSLAPFCNLISKLNDSNCAPPVSCIISDGIMSFTVKASQQFGLPNVLFWTHSACGFMSFKECKNLMDRGLIPLKDASYLTNGHLDTIIDWIPGVKNITLRDLPGIYHTIDPNDLLLNFVVEQIEVASKASAIILPTFDALESDVLNALSTMFPKLYSIGPLEFFLDQISDNRFESFHCNLWKEEFECLKWLDSQEPNSVLYVNFGSVIVMRYNQLVELAWGLANSKKKFLWVIRPDLVEGETLLVPQEIVEEVKDRALMVSWCPQEKVLKHKAVAGFLSHCGWNSTIESIINGVPMICCPFFNDQILNCKYICSEWNFGMKMDSENVTRDEVEKLVVELMDGEKGKEMKNKAIEWKKMAEEATNINGSSSLNLDKLVSEVLLFKSLG

SEQ ID NO: 5614 - protein, 470 aa, Citrus sinensis
MEQEQHQQHQPHFLLVTFPAQGHINPALQLARRLIRIGTRVTFATTIFAYRRMANSPTPEDGLSFASFSDGYDDGFNSKQIDPRRYVSEFKRRSSEALTELITGSENQGAQPFTCLVYSLLLPWTAEVARAYHLPSALLWIQPALVFDVYYYYFYGYGDLIEEKVNDLIELPGLPPLTGCDLPSFMDPRKSNDAYSFILPYFKEQMEAIVEETDPKILVNTFDALEAETLRAIDKFNMIAIGPLVASALLDGKELYGGDLCKNSSKEYYMEWLSSKPKSSVIYVAFGTICVLEKRQVEEIARGLLDSGHPFLWVIREHENKDKDKGEDDVVMKYKEELNEKGMIVPWCSQVEVLSHEAVGCFVTHCGWNSSLESLVCGVPVVAFPQWTDQGTNAKIIVDFCKTGVRVKANEEGILESDEIKRCLELVMGEGDEFRGNSLKWKDLAREAAKQGGSSYKNLKAFVDDFSTSK

SEQ ID NO: 5615 - protein, 491 aa, Unknown
  Description of Unknown: Oryza sativa Japonica Group sequence
MSASDCSLSSQSRSPIPCSEMSPKKLAVIYPPPGMISHLVSTVELGKLLAAQGLDITIVLGGHDEKEAAATATTSFLAEAAAANPELSFHRLPQPTLQCDVPADDYVSRIFEFARSSGPDLRDFLRSTSPAVLIIDFFCYSALNIGAELGIPTYFFLTTCIASVAFMLYLPVVQGENTLSFRDLGGDLVHAPGIPPIPADHLPRSQFDRDSMSSNHFLALSEQVCNAHGVMVNSCRSLERRAADAVVAGLCTFPGRRTPPLHCIGPLIKPREDDSAERHECLAWLDAQPKDSVLFLCFGSMGVFSVEQIKQVAVGLETSGHRFLWVVRRPPGFEHVTGPDLEALIFPEGFLRRTKGRGLVVMSWAPQREVLEHGAVGGFVTHCGWNSVLEAVTAGVPMLAWPLYAEQRMNKVFLVEEMRLAVAVEGYDKGVVTAEEIQEKARWIMDSDGGRELRERTLAAMREVKEALSDKGEFKIALLQLTSQWKNYNNS

SEQ ID NO: 5616 - protein, 477 aa, Scutellaria barbata
MGQLHIILVPMIAHGHMIPLLDMAKLFSSRGVQTTIIATPAFADPVRKAREAGHDIGLTITSFPPEGSSLPDNILSLDQVTNDMIAEFFRALELLQQPVEEIMKELKPDCLVSDMFLPWTTDSAAKFGIPRLIFHGTCCFSRCCAIEMGLQKPFKNVSSDSEPFVIPNLPHELSFVRTQVPDFELQEDVNENPFTKMMKQMRESEARSYGDVINSFQELESEYADHYKNILGMKAWHIGPLLLCNKRGEEKASQRGKKSVIDEDECLAWLNSKKPNSVVYMCFGSMATFTPAQLHETAVGLESSGQDFIWVVRNAGENEDWLPQGFEERIKGRGLMIRGWAPQVMILNHPSVGAFVTHCGWNSTLEGICAGLPMVTWPVSAEQFYNEKLVTEVLKTGVSVGNKKWHKVGDGVGSEAVKAAVVQVMVGDGAAEMRSRAKHYKEMAGKAIEEGGSSYNALNALIEELSAYVPPMKLAIN

SEQ ID NO: 5617 - protein, 478 aa, Cephalotus follicularis
MGSTILSERPHAVCIPFPAQGHVNPMLKLAKLLHHKGFHITFLNPEFNRRQLLKSRGANSLNGLSSFRFETIPDYLRPTDVDAARDLPSFCESTRKTGLAPFRELLSKLNDTSSSDVPPVTCIIADGGMTFTLDAAEELGIPEVLFWTTSACGFLAYVHVRTLIEKDVSYLTDGYLDNVIDFLPGMKGIRLKDMPSFIRTTDKDDPMIDIILDEIERAKRASAIILNTFNSMEHQFLSALPSMLPPIYSIGPLQLLLNQVPDTDLKRFGSNLWKEEPECLEWLGSMDPNSVVYVNFGSSTVMTLDQLVEFAWGLANSEQTFLWIIRPDLVFGDSAILPPEFLADTKDRALLASWCPQEQVLNHPAIRGFLTHSGWNSTIESVCGGVPMLCWPFFAEQQTNCRYCCTEWGIGMEINNDVNRDEVESLVRELMEGDKGKEMKQKAMEWKKMAEESTACPNGSSYKNLEMMINQVLLSIRN

SEQ ID NO: 5618 - protein, 476 aa, Linum usitatissimum
MTMTVAVTTVPHILIFPFPAQGHLIPILDFTHYLALRRQLQITILVTPKNLPLLQHLLSRHPSIQPLTLPFPDSPGIPPGVENTKDLPPSSTKSAHVSFMNALSGLRSPLLNWFQTTPSPPSVIISDMFLGWTHHLASDLGIPRIVFSPSAAFALSVIYHLWRNMPQLPENPSESITFPDLPNSPNWIKSQLSPIYRSYVPGDPQSELVKDGFLADIDSWGIAFNSFAGLESKYLEYLKIELGHDRVWAVGPLLSPPSESVASRGGTSSVSVPHLEAWLDTCPDDKVVYVCFGSEAVLTEDQSNKLASGLEKSGVQFVWRVKDVEGGRPSIPEGFEDRVAGRGVVIRGWAPQVMILSHRAVGAFLTHCGWNSVLEGIVAGVPMLAWPMGADQFIDATLLVEELKMAVRVCEGKESVPDSEVVASKLSELMEEDREERKLAKELSLAAKEAVSEGGSSVKDMESLVEQLVQLYSSSD

SEQ ID NO: 5619 - protein, 339 aa, Salvia splendens
MAKITQAYRNFDLKRAAFLPGAAALLALTTSAEKLVVDGVIDTDGTPLQSDPIRLSPSMPEMNPNHFAWVCLPDLAGRRAIFQSIVENNKSAKLAQYLICNSSSALEPAALDFLHNCRPIGPLLATRRLAKQAGHFWPENPTCLSWLDHHPPRSVVYVAFGSFTLLDPAQFRELALGLELTGLPFLCVVRSDITCHVSEAYPAGFEDRVRSRGKIVDWAPQQEVLAHPAVACFVTHCGWNSSVESVSSGVPVVCWPYFADQFLNETYIVDHWGVGVRLEKGGNGIIGREEIKGKVEMVLGDGGYKERVMELQEKTLASSVVGGSSHKNLCDFVDWIKED

SEQ ID NO: 5620 - protein, 486 aa, Helianthus annuus
MANNTFAELVFIPAPAVGHIMSTIEMAKLLLNRDQTLSVTLLIINPPYSVLPLTTYIESLAKNAIERMRFIKLPQDQSPPKLDSNAPFVMSFYEFINSHCKYVRNILEDAINQTSSRSRVVGLVVDILCTGMIDVANEYNLPTYVYFTSNAAFLGFKLHFETLFVDQKQDLIELANSEGEIVIPSFVNPVPMKVFPEVYRKQEGLDFLISAIGRMRKAKGILINTFLELETHAINSFSGTNFPPVYPVGPILNLDGVGEKPDDTDVFRWLQSQPPSSVVLLCFGSTGGFDEAQAKEIARGLEQSGHRFVWSMRRLPPPEQSLKVLPDDFDDPRGVLPDGFLERTSGIGKVIGWAPQVSLLAHEAVGGFVSHCGWNSMLESLWFGVPTATLPMLWEQQMNAFEMVVELGLAVDLKLDYKINVLNSEGDVVIVTAEEIERGIRRLMENKEVRTKVKEMSKMSRETVAKGGSSYSSVGYFLKEIMSNVI

SEQ ID NO: 5621 - protein, 400 aa, Unknown
  Description of Unknown: Oryza sativa Japonica Group sequence
MAAFVTFTDAVSLLRPQFEAAVAAMWPLASFIVADAFLYWVNESAAVLGVPKMSFFGISAFAQVMRELRNRHGLCAVMEPGDVDDDGYPATLAVPEFPHIRVTLEDLMATFGEPSAVRMMMELDGKLGKAIEESHGLIINTFHGLEAPYIKFWNEHVGPRAWPIGPLCLAQSASATADARPSWMEWLDEKAAAGRPVLYIALGTLAAIPEVQLKEVADGLERADVNFIWAVRPKNIDLGLGFEERIKDRGLVVREWVDQLEILQHESVRGFLSHSGWNSVLESVTTGVPLAVWPMIADQPFNARFLVDELNIAIRVSPIDRTMRGLVPSEEISKVVKELMDGEAGAEATKRVVELSALAKEAMDEGGLSWIAVKEMITELCAMKNDVHEKEEANYCKQDI

SEQ ID NO: 5622 - protein, 480 aa, Ricinus communis
MASEFDHHQLHILLFPLMAQGHMLPLLDIARLFASRGVKTTIITTPGNAASFTKITQDLSIQINLKIIKFPSKEAGLPEGLENLDLVSDKQTHSKFFKALSLLQDPLEKVVQELLPHGLVSDIFFPWTTEVATKCGIPRLIFLGTGFFPMCCFANIEEQQPHKNVSSDTELFILPGFPDPIRFTRLQLPDFMTGEQQTVLAELLGSAKEAEKRSFGILVNSFYELEPGYVDYYKNVLGRRAWHIGPVSLCNRTLKDKAQRGKETSISEHECMKWLDTKKPNSVIYVCFGSVTKFSDSQLHEIAIGLEASGQDFIWVVRTNNEEKWLPDEYEKRMEGKGMIIRGWAPQVLILDHEAVGGFVTHCGWNSILEGVSAGLPMVTWPICGDQFFNEKLITDVLRIGVGVGAKKWVTLVGDYIESTKIKEAVREVMMGEKAREIRRRATKFGEMARSAIEEGASSFNDLGALIQELKSYHTRIQVS

SEQ ID NO: 5623 - protein, 481 aa, Cucumis sativus
MEEAKQREEQQEFESSTPHVVMMVSPGMGHLIPLVEFAKRLVLLHRFTVTFVIPSGGPPPKAQISLLSSLPSAIDHVFLPPVSLNDLPPQTKGETIIVLTVTRSLPSLRDQFKSMLTQRNPVAFVVDQFCTIAIDLAREFNVPPYVYLPCSATTLSLVLHMPELDKSVVGEYTDLTEPIKLPACSPFPAKALPDPFLDRKDDSYKYFLESMSRFGLADGIFVNSFPELEPDPINALKLEESGYPPIYPVGPIVKMDSSGSEEEIECLKWLDEQPHGSVLFVSFGSGGTLSSIQNNELAMGLEMSGQKFIWVVRSPHDKEANASFFSVHSQNDPLKFLPEGFVERNKGRGLLLPSWAPQAQILSHGSTGGFLSHCGWNSTLESLVNGVPMIAWPLYAEQRLNAVILIEEIKVALKVKMNEESGIIEKEEIAKVVKSLFESEEGKKVREKMEELRVAGERVVGEGGSSSRTVLEVVQKWRNRN

SEQ ID NO: 5624 - protein, 494 aa, Unknown
  Description of Unknown: Oryza sativa Japonica Group sequence
MAAAGHDVQLPHVAIFPFMARGHTVPMTHLACLLRRRGLATVTFFSTPGNAPFVRGQLDDDVAVVELPFPDHVVARGAAECVEALDSLFPLPAFVEAVSALRPGLEVSLAAARPRVGLLVADAFLHWAHASAAALGVPTVAFLGGNMFATIMRDVILRDNPAAALLSGGGGAEAATFAVPEFPHVHLTLADIPVPFNRPSPEGPIMELNAKLWKAIAGSNGLIVNTFDAMEGRYVEHWNRDHRAGPRAWPIGPLCLAHGGTGTGTGAVEPSWMKWLDEKAAAGRAVLYVALGTAMAIPDAQLREVAGGLEAAAAAGVYFLWAVRPSDADLGAGFEERVEGRGMVVREWVDQWRILQHGCVRGFLSHCGWNSAVEGVAAGVPLAAWPMGAEQPLNAMLVVDELRVGVRVPVPTAMATGGHGVVGSEVIARVARELMMMAGEGKGGGGGEEARNVAALASKAREAVAEGGSSWKALEEMVATLCRPVEGDTPKPTK

SEQ ID NO: 5625 - protein, 246 aa, Citrus unshiu
MGKTLPKATVVAINSYEELDPIVVETLKSRFRKFLNVGPSTLTSPPPVSDPHGCLPWLNEHENASVIYISFGSMITPPRAEVIALAEALEAIGFPFLWSFRGNAEEQLPKGFLERTKSYGKVVPWAPQLKILEHSSVCVFVTHCGWNSTIEGITGGVPMVCRPVFADQALNQRIIETAWGIGVGVEGEKFTKDETVNALKQVLSSEEGKRMRENVGALKKLAFKAVESDGSSTKNFKALVEVVNRT

SEQ ID NO: 5626 - protein, 441 aa, Citrus unshiu
MARKLHVVMLPWSAFGHLMPFFQLSIALAKSGVKVSFISTPKNIQRLPKPAPESEVAALINFVEFPLPASAALDDKLLLPEGAEATVDIPSENIQYLKIAYDLLQHPFKQFVAQQSVDWIIVDVMSHWAGKIAQEYQVPLLLFSAYSAAAFQFIANPECLVGDGQKRVRPSAESLTSVPEWVDFPSSVALRTFDAIGMHHGFYGMNASGITDAHRTAEILHSCQAMAIRSCPEFEGEYLNLLEKLTGKPVIPVGLLTPEPNSAKGRDHQISMIFQWLDEQKPRSVVFVGFGSECKLSKDQVYEIAYGLELSGLPFLWALRKPEWATDDVDALPLGFADTIRGKGIVSIGWAPQLEILAHPSIGTSLFHAGWGSVIETLQFGHSLVVLPLIIDQPLNARLLVDKDLAVQVERKDDGSFTRDGVSQGSETGHGVLWGFFCERR

SEQ ID NO: 5627 - protein, 436 aa, Helianthus annuus
MAQTQPHFLLITYPAQGHLNPALQFAKQLTRLGVKLTFPTTVNAYHRMGKAGKIPESLNYVLFSDGYDDGFNPDTDDATHLLAQFREKGNECLKDTILFSAKNGTPVTCLVYTLLIPWAAEVARDCNVPPALLWIQPASVFRVYYYYFKGYDKLIGENCNEPSWSIELPGLPLLKSRDLPSLCLPSNASDPVGLERDGWQGKHGGCWLIPSAFLDGKDMSDQSFGGDLIEASHEYLEWMNTKPKGSIVYISFGTLIVWSKKQKEAMAHGLLESKRPFLWVIKDKDREEEEDEISYMHELKKLGLELIIPWCNQLEVLAHPSLGCFVTHCGWNSTLESMACGVPLLAVPKRSDQTTNAKLIEDLWGAGVRVTTNEEGVVEGEEMKRSIEMVMGGHERGEIVRVNVMKWMGLAREAMKEGGSSYMNLMAFIEEVGSCT

SEQ ID NO: 5628 - protein, 216 aa, Cephalotus follicularis
KVYEYFLETAIQMPKSAGIMVNTVETLEQRALKAILHGESTSGDPAAPIYCIGPLIVASEGSGKDKHECLNWLDKQPSRRVLFLSFGSLGKFSTEQLKEMALGLERSRVRFLWAVRNPPQEDDPLRKLEAAGVGEPSLEYLLPEGFIDRTKDQGLVAKDWVPQVPVLSHDSVGGFVTNCGWNSAMECLREGVPMLAWPSYAVQSINKLVSPNEFEN

SEQ ID NO: 5629 - protein, 434 aa, Rhodamnia argentea
MSPERGAFTSILMLPWLAHGHISPFLELSKRFADRNIHIYFCSTPVNLASVKPKLAGTKYFSKIKLVELHLPSLPELPPRNHTTKTLPPHLMPTLKKAFDTSSPGFAGILRLLVSDLVVYDFLQPWAPAIGTSLGIPAVEFLCTSATMCAFVNHANMKPGVEFPYPGIYLHDHEFDKFTNLLECSANGIKDRERVFQCFERSLDMIIIKGIREIEGKYIDYLSFLLDKRVVPVGPLVEDTMFEDGEKSKILDWLDNREEKSTVFVSFGSEYFLSKQEMTEIAHGLEASKVNFVWVVRFHDGERDAEANSRCHLPEGFLKRVAGRGLVLQGWAPQAAILQHSSIGGFVSHCGWSSVMESIRFGVPIIAMPMHLDQPMNARVAEEVGVGTEVKRDETEHPESGGGEEHQECDGRQGGGESEAESEGDERYHKKERR

SEQ ID NO: 5630 - protein, 475 aa, Trifolium pratense
MKKAEVVFIPSPGVGHLVSTLEFAKLLINRDNRLRITVLVIKFPHTTETDVYTKSLPKSDSLNVINLPECSLPPNSSPGPAMNALLEAQKLNVKEAVSNLTTREQHGHLAAFIVDMFCTNMIDVAKEFSVPAFVFFTSGVAFLGLNLHIHNLFERDNVDSTQLLQLTELAIPSFANLVPTKSLPSAVLRKEYESFFIGYAKGLKNADGIIVNSFEELESHAVHSFSSHPDLVGLPIYPVGPILNPEPKTKDADDIINWLDDQPPSSVVFICFGSRGSFDEDQVKEIALAVENSGAHFVWSLRKPPPKGTMIPPTDYLLSELVLVLPEGFLDRTVEIGRVIGWAPQAQILAHPAAGGFVSHCGWNSTLESIYFGVPVATWPLFAEQQTNAFELVTELKTAVEIALDYRVELFGGPNYLLTADKIEGGIRNVLEKDGEVRKKVKEMSEKSRKTLLEGGSSYNYLGHLIDNIMNQISN

SEQ ID NO: 5631 - protein, 774 aa, Helianthus annuus
MDCNTKPHAVLIPFPAQGHVIPFMNLAKLLHSHGFHITFVNTEFNHRRLVRAKGPESVKGLPDFWFKTIPDGMPHSDQDATQDVPMLCDMIKKTCLGPFKELLCRLNSSDGVPPVSCVIGDGVMTFAIKAAMDLGIPEVQFWTFPACALMCFLHYREFIKRGIVPFKDDNYLTDGTLEKSIDWIPAMSNLRYKDIPSFIRTTDPNDIMFNIAMDEAENNLSSPAIIMNTFDALEHKVIEAIASKFDYPNIYTIGPLPLLARYVPDDSPIQSLNSSLWMSDSSCLKWLDQKEEGSVIYVNYGSITTMTDQHFIEFAWGLARSMQPFLWVVRPNVTMGNSAVLPGELLEEIKDRGMLVSWCAQEKVLAHRSVGAFLSHCGWNSTTESILEGVPLICWPFFSDQLTNCRFACTEWGIGMEINHDVKRNEVEVVVKEMMQGEKGKEMRRNAREWKRKAKEATEIGDDNYLTDGTLEKSIDWIPAMSNLRYKDIPSFIRTTDPNDIMFNIAMDEAENNLSLPAIIMNTFDALEHKVIEAIASKFNYPNIYTIGPLPLLARYVPDDSPVQSLNSSLWMSDSSCLKWLDQKEEGSVIYVNYGSITTMTDQHFVEFAWGLARSMQPFLWVVRPDVTMGNSAVLPGELLEEIKDRGMLVSWCAQEKVLAHRSVGAFLSHCGWNSTTESILEGVPLICWPFFSDQLTNCRFACTEWGIGMEINHDVKRNEVEVVVREMMQGEKGKEMRRNAREWKRKAKEATEIGGLSYNNFQRFIKEALHYHT

SEQ ID NO: 5632 - protein, 496 aa, Unknown
  Description of Unknown: Oryza sativa Japonica Group sequence
MAVGEGEQQPLHILFFPFIAHGHLIPVADMAALFAARGVRCTILTTPVNAAVIRSAVDRANDASRGTGSPEISITLFPFPDVGLPPGVESVPGISSKAEQEKIAEAFLRFREPFDRFLAEHHTDAVVVDSFFHWSSDAAADHGVPRLAFLGSSLFARACSDSMLRHNPVEASPDDPDAVVSLPDLPHRVELRRSQMMDPREREGEWAFLQLVNAADQRSFGELFNSFREMEPDYVEHYHTKLGRRAWLLGPVALAAGKGMAERQDTDTDSGRLSPDEERCLRWLDGKAAGSVVYISFGTIARLLAAELTEIARALQLSGKNFLWIITREDTDASEWMPEGFADLMARGERGLVVRGWAPQVLVLNHPAVGGFVTHCGWNSVLEAVSAGVPMVAWPRYTDQFYNEKLIVEMLKVGVGVGAREFASFIDHRSQVIAGEVIAEAIGRVMGEGEEGEAMRKKVKELREKARSAVKEGGSSYDDAGRLLDELMARRSSGTS

SEQ ID NO: 5633 - protein, 310 aa, Cephalotus follicularis
MYTDLIRQHYANVEGNDSGDKTFEFIPGLSKIHIDDLPDRILPKSGSNFEESPFHSMLSKLKHILPQSATVVMNYYQELYTVPLLDDLKSKFPGLLNVGYMTLSMPPPPLLPSNLDATGCLSWLDGQKDMSVAYISFGTLAILPPNETLELGEALEASGVPFLWALKDDFKDHLPNGFLERTSMQGKVVPWAPQTQVLAHSSIGVHVTHFGANSVNESIANGLPMIGRPCLGDNHINGRIAEEIHGIGLRVEVLTKSGVIKSLELVLVHEQGKEMRKNVQSLKEIVLKAAGPTGSATKDFQTLVENISIL

SEQ ID NO: 5634 - protein, 456 aa, Eucalyptus grandis
MAPPHFLLVALSTRSAMNPALQLAERLARVGSRVTFLSTVCAHRCMIDPVCPEGVTFTTFSDGYDDGYVPGDDLERYRAEMKRRGSEALRDLIEHSSGQGLSFTCVLHTIVPWVHDVARSLQIKSVLVWIQPATVFDIYYHYFSGYEDVIKSVTSQRCDTTSLIRLPGVPPLTNRNIPSFLHVENKYAFALPEIQSLLENLKEGENPKVVLVNTFDALELEALRAIGTLNLVGIGPLVPLSFLDSDQSSRGDRFLGSEDYVKWLNAKEEASVIYVAFGSIAMLSKAQKREMARGLLETGRPFLWVMGKGDGDDDELIYKEEIDKRGVIVPWCSQIEVLSHPSIGCFLTHCGWNSTIESLVCGIPMVAFPQWADQMTNAKLVEDVWKVGVRVSEIDQEGIIVEAGEIKKCLELVMGGGERGDEIRRNAKKWKDLVMEASKDGGSSDKNLKAFVEEIA

SEQ ID NO: 5635 - protein, 221 aa, Citrus unshiu
MLLCLKSLDLWEPGSVIYACLGSICGLATWQLLELGLGLEASSQPFIWVIRGGERSQGLEKWIQEEGLEERTKGRGFIIRGWAPQVLLLSHRAIGGFLTHCGWNSTLEGVSAGVPLVTCPLFADPFYNDKLAVQVLGIGVSVGIEAAVTWGLEDKSGLVIKREKVKEAIEKLMDRGKQGDERRKRARQLGEIANCATGVGGSSHRNMEMLIKFVIQRTRGQ

SEQ ID NO: 5636 - protein, 460 aa, Syzygium oleosum
MDNMQRPIKVLMLPWLAHGHISPFLEPAKGLSRRNFHIYLCSTPVNLSSIKPKISEKYSSSIGLIELHLPSLPNLPPHYHTTKGLPPHLMNTLKVAFDMASPSFSSIIKSLGPDLLIHDFLQPWAVEAAQSHSVPSVVFFSAGAGALSFMFHVIMNTGSKFPFEAIHLHDYERTKLIKLIDDSAGRLSNKDRALQSVERSLNFILLKTFRELEGKYMGYLSSLLGKIVEPVGPLAEDPINVEDGDSIIEWLDKREKSSTIFVSFGTEYFLTEKEREEIAYGLELSNVYFIWVIRFPVGESTELEEALPEEFFERVRDRGLVIDGWAPQGKILGHPSIGGFVSHCGWSSIMESMKSGVPIIAMAMQLDQPLNARMVKEVGVGLEVKRNKSGELERLEIVKVIKDVVVEKDGDSVRKKAKEMSDGIRKKGEGELDEVADALVQLCVGHKEQYVSKRSHVIGI

SEQ ID NO: 5637 - protein, 468 aa, Helianthus annuus
MAAIDDHKQLHVAMFPWLAFGHIIPFLELSKFIAQKGHKVSFLSTTRNIQRLPTLPSHLSPLIYLVKLTLPHVQELPHNAEATMDLRTGETHEYLKKAFDGLQPEVTRFLEEESPDWIIYDFAPYWLPSIAAGLGISKAFLSMPNAWFIAFRGPSMDLINNTDGRTTAEDFMTPPKWVTFPSKLYYRKHEAKWMVDRLSVNASGVSDAYRSGMVLKGSDCLFIRHSYEFEPQWLTLLEELHHIPVVPVGLMPPETPTNVGDETWVTIKKWLDGQQKGHVVYVALGSEVMLSKSELAELAVGLELSGLPFFWALRKPVGSTELSLPDGFSERTSDRGVVWKSWAPQLKILRHESVGGFLTHCGWSSIVEGLMFSHPLIMLPFVVEQGLNARILVDKQVGIEIPRNEEDGSFTKESVARSVRSVVVEDEGKIYKANAMKLSQIFGDTELEQNYINNFIDYLEKKRRVVSM

SEQ ID NO: 5638 - protein, 453 aa, Jatropha curcas
MAKAKQGQRCGRVVLVPCPFQGHISPMLQLATILHSKGFSISIVHTKFNSPKTSSHPEFDFRPIQEGLSSYEIASLNLVDIILVLNEKCKIPFQECLLQMIMQQNSDDEISCIIYDDLMYFSESVAYHLNIPSIVLRTSSAATVISRLAILQLSSEGYVPFPDAVSNDPIPEISTLRYKDLPIFKLGPRENFYQLMANACDIKTSCAVIWNTIDCLEESLLTKLQKTQFPIPIFTIGPMHKFAPAFSCSLLKEDTSCITWLDKQDPNSVLYISLGSVASTDETELAEMAWGLANSKQRFLWVIRPGSVSGSEWIEFLPKGFLETVGEKGCIVKWAPQREVLAHPAVGGFWSHCGWNSALESISEGVPMICRPCFGDQMVTARYVSHVWRIGLILENKIERKEIESAVRRLMMDEEGEEMRKKAEELKEKVEGCFKKGGSSYNSLNKLVEFMSA

SEQ ID NO: 5639 - protein, 496 aa, Cucumis melo
MPAVSETPCHVFLVTFPGQGHMNPTIRLGKKLASKGLYITISTTSEFGLSLKNAGSIGDQPSPVGSGFIDFEFWDDGWELDDPRRRDLDLYMPQLQITGKPALTQMLKSRAGENRPVSCLIGNPFVPWVCDVANDIGIPCSVLWVQSCSVFSIYYHYSRKSVDFPSESDPYCDVQLPSLPLLKYDEIPSFLHPHGQYKVIGRSILQQFRNVSIPFCILMDTFEELERDIIKHMSTICPIKPIGPLFKTLKFSDDNKKADLSGDFLKADDCFEWLDSKAPNSVIYISFGSIVHLSQKQIEEMAHALVNSGFSFLWVMKPLSKDMADCLGLKQHVLPDGFLEKAGERGKIVKWSPQQKVLSHPSIACFVTHCGWNSSVEALSSGVPLLVLPQWGDQVTNAKFLVEEYGVGIRLGRGESEKRLVERDEFEQHLRDAIVGVKAKELRENALKWKIAAEKAAADGGPSESNIQELVEEIRKKWSTQMSDIHNLVVNNVDGA

SEQ ID NO: 5640 - protein, 491 aa, Zostera marina
MDASNSAHFVMIPLVAIGTMNPMLDLASALALRGSVVTFVTTPVNAKRMESGIDHCTKTELPIQFAVIHFPCSQAGLPEGGENVDLIPSMSYKSNFLQAITLLKEPIMELLLKSQSPKPSCFITGSFFGSDVWVNELARFFGASWLIFDGPGVFSTLCYTLLEKCDTFPKNPAEPFHILIPFMLQGMPHDVTITRSQLPPNLTYRSQDYKIKEKNMEYFDGIIINSFTELEMEYAQVYEAVTGKNLWMIGPLSLHSNNEPSSDVSYTWNRGNKSEIDEQQCINWLDYHKPRSVIYACFGSREKLSLLQLVELGFGLKNSNHPFVWVVRQKEDENIDLWLSEFEGEMATESEDKKAQGLVIRGWAPQLHILSHPSIGGFLTHCGWNSIIEGISAGIPMITWPYCAEQFLNEKLVVEVLEIGVSVGVKHQKYFGILVENSTVTNAVKRLMNESEEAKIRRTKVKKLSIMAKMAMDEGGSSHTNLMKLNKYAAL

SEQ ID NO: 5641 - protein, 484 aa, Citrus clementina
MCTQTQVCTQMPKNKHMEQQQQPHFLLLTFPIQGHINPSLQFARRLTRIGTRVTFAIAISAYRRIANNPTPEDGLSFASFSDGYDDGFNSKQNDRTHYMSEFKRRSSEALAELITTSQNEGGQPFTCLVYPQLLPWAAEVARAYHLPSALLWLQPALVFDVYYYYFYGYGDLIEGKVNDLIELPGLPPLTGRDLPSFLDPRNSNDAYSFVLPSFKEQMEAIVEETNPRILVNTFDALEAETLKAIDKFNMIAIGPLVASALLDGKEQYGGDLCQNSSIEYYMEWLSSKPKSSVIYVAFGTICVLEKRQVEEIARGLLDSGHPFLWVSRESDNKDKDKDKGEDDVMMKYKEELNEKGMIVPWCSQVEVLSHEAVGCFVTHCGWSSSLESLVYGVPVVAFPQWTDQGTNAKIIVDFCKTGVRVKANEEGIVESDEINRCLELVMGEGDDFRRNSLKWKDLARDAVKQGGSSHKNLKAFVDDFSTSK

SEQ ID NO: 5642 - protein, 510 aa, Citrus unshiu
MKKFRVVLICTPEMGNLVPLVEFAHQLTNRDRRFCATVLIMTVPERPIVNAYVKSRDALATTTDANTINFVYLPSVDPPSPDQYKSTLGYLSLFIERHKPHVKNEITKLMETESDSEDSDRVAGLFIDMFCTSMIDVANQLGIPCYLYFASPASFLGFMLHFPNIDAQLANEFVESNTDFFVPKDSTTELVIPSFANPLPPSVLPSTVLKRKRDGYVWYLRHATRYMETEGIVVNTFQELEPYAIESNSVNGMPPVYPIGPVLDLNGPAQWHPDRVHHESIMKWLDDQPPSSVVFLCFGSMGSFVGPQLREIAIGLQRVGFRFLWSIREPSKSKIYLPGEYTNLKVKEMLPEGFLNRTAGVGLVCGWVPQVTILSHQAIGGFVSHCGWNSVLESLWYGVPIATWPLYAEQQMNAFELVKELRLAVEIRLDYRDGRGSDLVSAEEIERGLRRLMDGDDEVRKKVKEMREKSRTAVMEEGSSNKSLGSLIKKIVADVRNFEAQSKLINSTFQ

SEQ ID NO: 5643 - protein, 481 aa, Citrus unshiu
MDSKSSPVEMFFFPYVGGGHQIPMVDIARIFAAHGAKSTIITSPKHALSFQKSINRNQQSGLPITIKTLHLPDDIEIPDTDMSATPRTDTSMLQEPLKSLLVDSRPDCIVHDMFHHWSADVINSMNIPRIVFNGNCCFSRCILENVRKYKPHEKVSSDYEPFVVPGLPDKIELTSSQLPVCARQQEAGSVHKMFAKQEEKSFGIVVNSFYDLEPAYVEYFKQDLGNDKAWFVGPVSLCNRNIEDKAERGQKTSIDEGKILSFLDSKETNSVLYISFGSLARLSPEQLLEIAYGLEASNHSFIWVVGKIFQSPGTRKENGIEENWLPSGFEERMRESKRGLIIRGWAPQLLILEHTAVGGFMTHCGWNSTLESVSAGVPMVTWPITAEQFSNEKLISDVLKIGVKVGSVNWVSWSTEPSAAVGRDKVEVAVKRLMGAGEEAAEMRRRAGELGEKAKNAVEEGGSSFIDAEALLQELKSLSRI

SEQ ID NO: 5644 - protein, 404 aa, Branchiostoma floridae
MPFFDSHWFGLAKIGQALAGKGHTVTVVVPVGVAKERHAERPDFHFETFEDQGTGARLKEIQDRYFTVAGTMSLYQTFKLNIPGSVYITKHCDVLLGNRDLANRLKKPQYDVVIFDPIFPCGAILSALIDLSVPLIAIFRGDPYFLGERATGVPLPSSYVPFFTSDFTDQMTFAERVQNVFLSTLAPMVSGWLARKTYDGLVRKYLGEGHTIQSVTERTDLWLHRTDNVLDFLRPSMPNIVQIGGVNVQAVASLPKELEAFVQSSSKHGVIVVSFGSMYRTLSPEKTEIFAAAFARLRQKVLWRYTGEKPAGLGNNTKLMAWLPQNDLLGHRKTRAFVTHAGYNGLCEALYHGVPVVCLPLYGDQPANAARVVARGLGVKLDFGTVTADKLYQAVIHVLTNNRY

SEQ ID NO: 5645 - protein, 483 aa, Medicago truncatula
MELSKQEPLSKPPPMVVMLPSPGMGHLIPMIEFAKRIIILNQNLQITFFIPTEGPPSKAQKTVLQSLPKFISHTFLPPVSFSDLPPNSGIETIISLTVLRSLPSLRQNFNTLSETHTITAVVVDLFGTDAFDVAREFNVPKYVFYPSTAMALSLFLYLPRLDEEVHCEFRELTEPVKIPGCIPIHGKYLLDPLQDRKNDAYQSVFRNAKRYREADGLIENSFLELEPGPIKELLKEEPGKPKFYPVGPLVKREVEVGQIGPNSESLKWLDNQPHGSVLFVSFGSGGTLSSKQIVELALGLEMSEQRFLWVVRSPNDKVANASYFSAETDSDPFDFLPNGFLERTKGRGLVVSSWAPQPQVLAHGSTGGFLTHCGWNSVLESVVNGVPLVVWPLYAEQKMNAVMLTEDVKVGLRPNVGENGLVERLEIASVVKCLMEGEEGKKLRYQMKDLKEAASKTLGENGTSTNHISNLALKWTNKSTVIN

SEQ ID NO: 5646 - protein, 469 aa, Medicago truncatula
MNKKTYIAMVPSPGLSHLIPQVEFAKQLLQQHNEFIVTFIIPTLCPLTPSMQQVLNTLPPNIEFIVLPQVKHLPEINLEPATQMKLIVKHSIPFLQEEVKSLISKTNLVSLIFGLFSTDAHEVAKQFNLSSYLFYASGALSLSFFLTLPNLDDSVSSEAEFLESAYETVNIPGCVIPFHIKDIPEIILCERSNVNYKIFLEVCQKLTLVDGFIISTFTDLEPDVIRVLQEKEKPCVYPVGPIIRNESNCEDNINSMCLRWLENQPPNSVLYVCFGSGGTVSHEQLNELAFGLELSGKKFLWVVRVPSKDVNSAYFVGAKDDPLEYLPNGFLERNKENGLVVPSWAPQVEILGHGSIGGFLSHCGWGSTLETVVNGVPVIAWPLFAEQRMNARLLTDVLKVAVRPKVDDESGIVKREEVAKCVKRIMEGDESLEIQKRIKELSDGAAVATSEHGSSRKALSSLALKLHNF

SEQ ID NO: 5647 - protein, 477 aa, Unknown
  Description of Unknown: Pyrus x bretschneideri sequence
MNNTKHHFLLISCPAQGHVNPTLQLAKLLIQTGGGTRVTYATTVRALTQIKSFPSLQGLSFATFSDGFDDGVIPTHDPDLFMSEFKRVGSRTLTALIQKLSASSDGGDGEPVTFLIYAVLLPWAAQVAADLGIPSAFFCIQSTTSFALCHHYLTYFHKCHSVPSSITIDGLPPFAPQELPSYLLPSSPHATIVPTFQEHIQALEQVNVKPYPNFVLLNTFAALEETAMEAIRSQMKNANVVPVAVGPLVSSSSDAGFRCDLFDKSRDDDYLQWLDGKPDCSVVYVSFGSMVVLKRDQIEEMINELVDSGLQFLWVIRASENGDDRSMTMMIEERLKSKEQGLVVPWCSQVEVLGHRSVGCFVTHCGWNSTLESLVAGVPTVCCPQFSDQNTNAKLVEEVWGTGVRAKSNHEGVTEGGEIKRCLEIVMRGEEIKRNCQKWKGLANEALNADNYNLRHFIAGLECNKTPPILWAGAPGR

SEQ ID NO: 5648 - protein, 473 aa, Daucus carota
MSPVYQDSKKDLVHILLVSFIGQGHVNPLLRLGNLLASSGFLVTFSSCSEVGNSMRKANNNIDELVPVGDGMIRFEFFDDGLPESDPRRHDLDFYMPHLELHGKEAVTGIVKKHEKEGRPVSCIINNPFIPWVSDIAEALSIRNAVLWVQSCACFSAYYHYHNKLSQFPSESEPEIDVQLPSMPLLKHDEIPSFLHPSTPYPALRRTILAQFKNLSKPFCVLVETFQELESEVIDYMSKLCPIKAIGPLFKNPKSQLSNIQGDCLKPVDDCIDFLNSKSPSSVVYISFGSVISMNQKQTNELAQGLLNSGVSFLWVFRPPLPGFDVAVLPEKFLEAAGDKGKVVQWCSQKQVLASPAVACFLTHCGWNSTLEALTTGVPVITYPAWGDQVTNAKFLVDVLKVGVRLSRGNQSKKNVISRDDIEKSLREATIGENAAEIKRNALKWKEAAEDAVAEGGSSDRNLKEFVDKLMMN

SEQ ID NO: 5649 - protein, 475 aa, Barbarea vulgaris
MRNTELIFIPTPTVGHLVPFVEFARRLIDQDDRIRITILLMKLQGQSHLETYVKSIASSQPFVRFIDVPELEEKPTFAARQAVEAYFYDVMERNIPLVRDIIMAILSSPALDGVVVKGVVADFFCLPMIDVAKDVSLPFYVFLTTNSGFLSMMQYLADRHKKDTSIFVRNSEEMLSIPGFVNPVPVKVLPSALVFEDGYDAFVKLAILFSKAKGIIVNTSFDIEPYSVNRFHHQRNYPSVYDVGPLFNPKAHPHPDQDLTRRDELMKWLDDQPEASVVFLCFGSMGRLTSPLVKEIANGLELCQYRFLWSLRPEEEVANDELLPEGFLDRVSGRGMICGWSPQVEILAHKAVGGFVSHCGWNSIVESLWFGVPIVTWPMYAEQQLNAFLMVKELKLAVELKLDYMAHSDELVSAKEIDTAIRCVMNKDDNVARKRVMDISQMAQKATVNGGSSYSAIEKFIQDVIGIKPYPNFYP

SEQ ID NO: 5650 - protein, 475 aa, Hordeum vulgare
METTVTAVSGTTSSSVGHGAGGGAARVLLLPSPGAQGHTNPMLQLGRRLAYHGLRPTLVATRYVLSTTPAPGAPFDVAAISDGFDAGGMALCPDPAEYFSRLEAVGSETLRELLLSEARAGRPVRVLVYDAHLAWARRVAQASGVAAAAFFSQPCSVDVVYGELWAGRLALPATDGRALLARGVLGVELGLEDMPPFAAVPESQPAFLQVSVGQFEGLDYADDVLVNSFRDIEPKEVEYMELTWRAKMVGPTLPSYYLGDGRLPSNKSYGLDLFNSEVECMDWLEKQMNSSVVLVSYGTVSNYDATQLEELGNGLCNSSKPFLWVVRSNEEHKLSEELKEKCGKIGLIVSWCPQLEVLAHRAIGCFVTHCGWNSTLEALVNGVPFVGIPHWADQPTIAKYVESAWGMGVRARKNKNGCLKKEEVERCIREVMDGERKDEYKKNAMNWMQKAKEAMQEGGSSDKHVAEFATKYSSI

SEQ ID NO: 5651 - protein, 483 aa, Arachis duranensis
MVNQNRRHHRFLLAIYPAQSHINPALQLAKRLISMGAHVTLLITLHVYRRMANKPSIPGLSLLTFSDGYDAGFSVFSGGDDDYRLYSSELKQRGSDFIAHLIASRAMEGEPFTCLIYTLLVPWAHEVARAFQLPTALLWIQAATVMSIVHPYFHGCETYITDKIKSKDEPFTIPGLPLLLSSCDVPTFLLVSTTNPLSFIFPLSEEQFRVLHKETNPTVLVNTFEALEPEALGALDGINMIPIGPLIPSAFLDGSDPRDTSFGGDILHASNDYVKWLDSQEESSVVYVSFGSYHELPKKQTEEIARALLGCEHPFLWVVRENLIKVEGRKEEEDLSYMEELKMKGKIVKWCSQVQVLSHASLGCFVTHCGWNSTMETLISGVPVVAFPQWSDQNTNAKLMEDVWKIGVRVNPNVINEEGIVEAEEIRRCLDIVMGSGEKAKEVRKNAERWKMLSREAAKEGGPSDTNLRDFVNGVGQFMHVDG

SEQ ID NO: 5652 - protein, 309 aa, Arabidopsis thaliana
MADESSLDTKINWIPSMKNLGLKDIPSFIRATNTEDIMLNFFVHEADRAKRASAIILNTFDSLEHDVVRSIQSIIPQVYTIGPLHLFVNRDIDEESDIGQIGTNMWREEMECLDWLDTKSPNSVVYVNFGSITVMSAKQLVEFAWGLAATKKDFLWVIRPDLVAGDVPMLPPDFLIETANRRMLASWCPQEKVLSHPAVGGFLTHSGWNSTLESLSGGVPMVCWPFFAEQQTNCKYCCDEWEVGMEIGGDVRREEVEELVRELMDGDKGKKMRQKAEEWQRLAEEATKPIYGSSELNFQMVVDKVLLGE

SEQ ID NO: 5653 - protein, 285 aa, Genlisea aurea
LSSGMKLRTHEARAIHRRRNMKGPIGINLAQRLLISADQCDAMAFKSCNEMESKYLDFLSKKYKKAVLPAGPVLPEAAKLGKDDEKWSEWLDEYEAKSVIYCAFGSEARLEPIQFQELILGLELTGKPYLFAAKPPTGAETVEEGIPEGGLSGRGVVHGGWVPQQLILSHPNTGCFITHCGWGSLFEGILSECQLVLMPLLSDQPINARMIGGELGIGIEVEKGDEDGICRRESVRRAVDLAMDFAAGGIGDKIRANHTRWRQRMTKQGLEDSYIDDLLINLRAL

SEQ ID NO: 5654 - protein, 1420 aa, Citrus unshiu
MDQRKGRRLVLFPLPLQGHISPMLQLANILHSQGFTITIIHTSFNSPNPSSHPHLTFHFIQENLSESEASTDDLVAFVSLLNTKCLVPFRDCLAKLLADVEEEPIACLISDAMLPFTQAVADSLKLPRIVLRTGGASSFVVFAAFPLLKERGYFPIQDSKGQEPVVELPPLKIKDLPVINTRDPETLYEIVNGMVDGAKVSSGIIWNTFEDLEESALATLRQQFSIPIFPIGPFHVCIPASPSSLLTQDQSCIAWLDKQAPKSVIYVSFGSIAAVSEAEFLEIAWGLANCKLPFLWVVRPGLTRGSDCLEPLPSGFMEMVDGRGHLVKWAPQQEVLAHPAVGAFWTHNGWNSTLESICEGIPMICMPCFTDQKVNARYVSDVWKVGLQLENGLKREEIEKTIRRVMVEKQGEEIRSRIFRLKEKANHSWKQGRSSFESINSLVHINLTSNKVGTLKSKREADSMERQKESNVQQKKGRRVILFPLPLQGHINPMLQLASILYSKGFSITIIHTNFNSPNPSNYPHFSFNSISESLWESEVSTENAISLLTVLNDKCVVPFQDCLAKLISNGDQEEPVTCLITDAIWHFAQTVADTLRLPRIVLRTSSISSFLAFSAFQILLEKGYLAEQDSQLEKPVTELPPLRVKDIPIIVTHDTRNFHQLISAVVSKTKACSGLIWNSFEDLEQTELTRLHKDFPIPMFPIGPFHKYCLASSSSLLSQDQSCISWLDKQAAKSVMYVSFGSIVVVNVTEFLEIAWGLANSRVPFLWVVRPGLVPGVEWLEPLPKGFLEMLDGRGHIVKWAPQQEVLAHPAVGGFWTHNGWNSTLESICEGVPMICQPCFGDQLVNARYVSHVWRVGLHLERKFERREIETAIRRVTVEAEGQEMRERIMHLKEKLELSLLEAGSSYQSLERLDSSAAPLNIKLDAGAGKSVNKMEQVPRPGPKYACYPPHVLIWPLPALGHVNSMLKLAELLSHAGIKITFLNSEHYHERLVRHSSDVFSRYMNLPGFQFKTITDGLPKDHPQTVDNFHELLNSLASVTPPLLKDMLTDAKSPVHCIISDGLMSFAIDVAKQVGIPIIYFRTVSACAFWAYFCIPEIIDAGELPIKGNEDMDRLIKHVPGMEKFLRCRDLPSFCRAEDPMDMNLQLVVSETRSSVRADGLVLNTFEDLEGPVLSQIRAHCPKIYTIGPLNAHLKARIPENTHSSNSLWEVDRSCIAWLDNQPSKSVIFVSFGSVAVMQRDQLIEFWYGLVNSHKRFLWVIRPDLISGKDGENQIPKELDKATKERGYIAGWVPQEEVLGHKAVGGFLTHCGWNSTLESIVARMPMICWPSFADQQINSRFVDEVWKLGLDMKDLCDRKIVEKMVNELLVERRAAFMKSADRMANLAIKSVNEGGSSFFYRKFVNHDKTYYYKNLPQQN

SEQ ID NO: 5655 - protein, 479 aa, Arabidopsis thaliana
MASHAVTSGQKPHVVCIPFPAQGHINPMLKVAKLLYARGFHVTFVNTNYNHNRLIRSRGPNSLDGLPSFRFESIPDGLPEENKDVMQDVPTLCESTMKNCLAPFKELLRRINTTKDVPPVSCIVSDGVMSFTLDAAEELGVPDVLFWTPSACGFLAYLHFYRFIEKGLSPIKDESSLDTKINWIPSMKNLGLKDIPSFIRATNTEDIMLNFFVHEADRAKRASAIILNTFDSLEHDVVRSIQSIIPQVYTIGPLHLFVNRDIDEESDIGQIGTNMWREEMECLDWLDTKSPNSVVYVNFGSITVMSAKQLVEFAWGLAATKKDFLWVIRPDLVAGDVPMLPPDFLIETANRRMLASWCPQEKVLSHPAVGGFLTHSGWNSTLESLSGGVPMVCWPFFAEQQTNCKYCCDEWEVGMEIGGDVRREEVEELVRELMDGDKGKKMRQKAEEWQRLAEEATKPIYGSSELNFQMVVDKVLLGE

SEQ ID NO: 5656 - protein, 481 aa, Malus domestica
MGDVIVLYAAPGIGHIVSMVELGKLIVHRYGPHKFSITILYTCGSVVDITSIPAYIRRISHSHPSISFLQFPRVTNKITRNISGAAIMFDFIRQNDPHVRRALQEISKSAAVRAFIIDLFCTSALPIGKEFNIPTYYFYTSGAAALAAFLYFPKIDEQTTESFKDLRETVFEFPGWKSPLKAIHMVEPVLDRNDPAYSDMIYFCSQLPKSNGIIVNTFEELEPPSVLQAIAGGLCVPDGPTPPVYYVGPLIEEEKELSKDADAAEKEDCLSWLDKQPSRSVLFLCFGSMGSFPAAQLKEIANGLEASGQRFLWVVKKPPVEEKSKQVHGVDDFDLKGVLPEGFLERTADRGMVVKSWAPQVVVLKKESVGGFVTHCGWNSVLEAVVAGVPMIAWPLYAEQHMNRNVLVTDMEIAIGVEQRDEEGGFVSGEEVERRVRELMESEGGRALRERCKKLGEMASAALGETGSSTRNMVNFVSSIT

SEQ ID NO: 5657 - protein, 468 aa, Vigna angularis
MTNNAELIFIPSPGIGHLTSSLEFAQLLINRDNHLSVTILCIKIPLTPFADSYIKSALASQPQIKLIDLPLGELPPQELIFKSPEHYICTFIESLKPHVKATLENILSSYPRSESQPVVRLVLDFFCLSMIDVGNELGIPSYMFMTSNVAFSAFILSLLNRGIEDVFNVSEPDLLIRGFPDSVPLSVFPDAAFNKDGGYAAYYKLAQRFLDTEGIIVNSFSDLEKYAIDALSDGQSQVPPIYTVGPLIDLKGQPNPNLDQAQHDKILKWLDEQPPSSVVFLCFGSMGRFAPSQTREIAVALQGSGVRFLWAMNSPPTADNVDRTLPDGFLEWMEGRGMICGWAPQVEVLAHKAIVGFVSHCGWNSILESLWFGVPILTWPIYAEQQLNAFWMERQYGLAVELRLDYRRSSDLVTAKEIEEGLKKLMDKDSKVHKSVLAMKEKARKAVLTSGSSFISVGKLIDNILGRN

SEQ ID NO: 5658 - protein, 472 aa, Ricinus communis
MVASGSPVHVLLVSFPAQGHVNPLLRLGKRLASKGLLVTFAAPEIVGKQMRNANNITDHESIPVGDGFIRFEFFEEGLEEDDPRRKDLDQYIAQLELVGKQVIPEMIRRNSEEGRPVSCLINNPFIPWVSDVAEDLGLPSAMLWVQSCGCFSAYYHYYHDLAPFPSEENPETDVELPFMPVLKYDEVPSFLHPSTPFPFLRRAILGQFKNLEKPFCILMETFQELEHDLIEYMSKFCPIKPVGPLYKDPKALNSDVKGDFLKADDCIEWLDTKPPSSVVYVSFGSVVYFNQEQWIEIAYGLLNSDVSFLWVMKPPAKESVFEPVVLPDEFLEKVADKGKVVQWSPQEKVLAHQSIACFVTHCGWNSTMEALSSGVPVVCYPQWGDQVTDAKYLVDVFKVGVRMCRGMAENKLITRDEMKKCLLEATVGPKAAEIRQNALKWKEAAEAAVAEGGSSDMNMQGFVDKIKRMRNV

SEQ ID NO: 5659 - protein, 441 aa, Salvia splendens
MTSDSDQQNLRPPPHVLIFPMPVQGHLNSMLNLSHLFCLAEFDVTFIISDFSHRRLLQHTTVAATFARYPGFQFLAFPDGLPEDHPRSGHRAMEFMSSVNNVTVPLFKEMMIQENFLASATRRPVTCFVADGKSMDELIESIPGMEGFIRRRDLPSFYRVDDLNDPVLKDIVAVTMLIKRARVAIFNTCEDLEGQIVAEVRKHVPRVFSIGPIHEQVKYRLTEKKAESSIITASLWAEDRSCIDWLDAQPSKSVIYVSFGSLALVTTEQVLEVLHGLLDSSQRFLWVMRPDSITAGNDGEDPVLVELKELVKGKGLLVAWAPQEKVLNHPAVGGFMTHSGWNSTLESIAAGVPMVCWPYFGDQTTNSRFVSEVWRIGLDIKDTCDRKIIEKAIRDLMEVRKDEFMESSANLAKLVKNTVSKGGLSYDNLDGLTQYIKSLVI

SEQ ID NO: 5660 - protein, 433 aa, Solanum melongena
MTTSQLHIAFLAFPFGTHATPLLTLVQKISPFLPSSTIFSFFNTSSSNSSIFSKVPNQENIKIYNVWDGVKEGNDTPFGLEAIKLFIQSTLLISKITEEAEEETGVKFSCIFSDAFLWCFLVKLPKKMNAPGVAYWTGGSCSLAVHLYTDLIRSNKETSLKIPGFSSTLSINDIPPEVTAEDLEGPMSSMLYNMALNLHKADAVVLNSFQELDRDPLINKDLQKNLQKVFNIGPLVLQSSRKLDESGCIQWLDKQKEKSVVYLSFGTVTTLPPNEIGSIAEALETKKTPFIWSLRNNGVKNLPKGFLERTKEFGKIVSWAPQLEILAHKSVGVFVTHCGWNSILEGISFGVPMICRPFFGDQKLNSRMVESVWEIGLQIEGGIFTKSGIISALDTFFNEEKGKILRENVEGLKEKALEAVNQMMEVQQKISRF

SEQ ID NO: 5661 - protein, 480 aa, Vigna angularis
MAEEKEEVLLFPFMAQGHIIPFLALALHLEKRQKYHITIVNTSLNIRKLRSSLPPNSSITLSEIPFNPSQHGLPPNTENTDAIPYNLVIRLIQASTTLKPAFTNLLRSILLQNKNRRLLVIADIFFGWTAAVSKELGAFHVIFSGCGGYGLACYYSLWLNLPHRRVDPAQEYFTLPDFPEALDIHRTQLPNNIAEADGSDAWSLFQQQNLSEWVKSDGVLFNTVHGLDSVGLDYFKRKLNRPVWAIGPIISAGSGSRGKGGGINPKLCTEWLEAKPCKSVLFVCFGSMNTISASQMMELGKALERCGKSFIWVVRPPIGFDINSEFREDEWLPEGFVERVQESGKGLVVRDWAPQLEILSHSAVSVFLSHCGWNSVLESLSQGVPILGWPMAAEQFYNCKLLEEDVGVCVEVARGKSCEVKCDDIAEKIALVIEETEKGIAMRKKAGYVRDVIKDAVKDEDGFKGSSVNAMDEFLSAALS

SEQ ID NO: 5662 - protein, 441 aa, Trifolium pratense
MKKAEVVFIPSPGVGHLVSTLEFAKLLINRDNRLRITILVIKLPHTTETDVYTKSLPISDSLNVIHLPECSLPPTSNPGFAMVALLEAQKTNVKQAVSNLTTGKQHGHLAAFVVDMFCTNMIDIAKEFSVPAFVFFTSGVAFLGLSIYIHNLFERDNVDSTHLMQLTELAIPGFANLVPTKSLPSAVLRKEYESFFMSYAKGLKNTDGIIVNSFEELESHAVHSFSSHPDLVGLPIYPVGPILNLEPKTKGTVESADIINWLDDQPPSSVVFICFGSKGSFDEDQVKEIALAVENSGARFVWSLRKPPPKGTMAPPSDHPLSELVSVLPEGFLDRTADIGRVIGWAPQAQILAHPTTGGFVSHCGWNSTLESIYFGVPVATWPLSADQQTNAFELVTELKTAVEIALDYRVELSGAPNYLLTSDKIERGIRNVLEKDGEVI

SEQ ID NO: 5663 - protein, 412 aa, Citrus unshiu
METQNSKQIPRAHVAMVPTPGMGHLIPLAQLAKRLVRQHNFLVSIFIPTIDDGIGSFMQPQRQVLESLPTSISTIFLPPVSLDDLPDNVPIETRIILTLVRSLSSLRDALKVLTESTRLVALVVDCFGSAAFDVANEVGVPAYIFFTTTAMVLSFLFHLPELDVKFSCEYRDMPELVQLPGCVPVHGRDFIDPVQQRKNEAYRFLLSFRKQYRLAAGIMVNSFMELETGPFKALMEGESSFNPPPVYPVGPLIQTGSTNETNKRSPACLKWLDEQPSESVLFVCFGSGGTLSQEQLNELALGLEMSGQRFLWVAKSPHEEAANATYFSVQSMKDPLDGEGFFYRKGSWTGLKGEDIANYAKGLIQGEEGKLLRKKMRALKDAAANALSPDGSSTKSLAQVAQRWKNPEIETK

SEQ ID NO: 5664 - protein, 470 aa, Medicago truncatula
MEKTVHIAVVPGVGYSHLVPILQFSKRLVQLHPNFHVTCFIPTLGSPSNATKSILQTLPSNINHTFLPPVNPNDLPQGTTMESQILLTLTNSLPYLHQGLKSLAKEIPLVALVVDAFSVEVLNIGKELNMLSYIYFPSAATTLAWCFYLPKLDEETSCEYRDILEPIKIPGCVPLHGRDFLSIAQDRSSQAYKHFLPFVKLLSSADGVLVNSFLEIEMGPLSAMKEEGGDNPPVYPVGPIIETETKSGDDANGLECLAWLDKQQPCSVLYVSFGSGGTLSQEQIVELALGLELSNTKFLWVLRAPSSSSSSAGYLSAENDIDTLQFLPSGFLERTKEKGFVITSWAPQIQILSHNSVGGFLTHCGWNSTLESVVHGVPLITWPLFAEQKMNAVLLSEGLKVGLRASVNENGIVERVEVAKVIKYLMEGDEGEKLRNNMKELKEAASNAVKEDGSSTKTISQIALKWRNLV

SEQ ID NO: 5665 - protein, 468 aa, Glycine soja
MVSYPAQGHINPLLRLGKCLAAKGLFVTFTTSETAGKNMRTANNITDKSVIPVGDGFLKFDFFEDGMADDDDGPKKINLGDFSAQLVLFGKQYVSQMIKKHAEENHPFSCIINNPFVPWVCDVAAEHGIPSAMLWIQSSAVFTAYYSYFHKLVSFPSDSDPYVDVQLPSVVLKHNEVPDFLHPFSPYPFLGTLILEQFKNLSKPFCVLVDSFEELEHDYINYLTKFVPIRPIGPLFKTPIATGTSEIRGDFMKSDDCIEWLNSRAPASVVYISFGSIVYLPQEQVTEIAHGLTNSHASFLWVLKPPPKNFGVPPHVLPDGFFEETRDKGKVVQWSPQEEVLAHPSVACFLTHCGWNSSMEALTLGVPMLTFPAWGDQVTNAKFLVDVFGVGIKLGYGKAEKKVVSREEVKKCLLEATEGPKADELKQNALKWKKDAETAVAVGGSSARNLDAFVKEIKKRGAVGVSGR

SEQ ID NO: 5666 - protein, 484 aa, Citrus sinensis
MEQVPRPGPKYACYPPHVLIWPLPALGHVNSMLKLAELLSHAGIKITFLNSEHYHERLVRHSSDVFSRYMNLPGFQFKTITDGLPKDHPQTVDNFHELLNSLASVTPPLLKDMLTDAKSPVHCIISDGLMSFAIDVAKQVGIPIIYFRTVSACAFWAYFCIPEIIDAGELPIKGNEDMDRLIKHVPGMEKFLRCRDLPSFCRAEDPMNMNLQLVVSETRSSVRADGLVLNTFEDLEGPVLSQIRAHCPKIYTIGPLNAHLKARIPENTHSSNSLWEVDRGCIAWLDNQPSKSVIFVSFGSVAVMQRDQLIEFWYGLVNSHKRFLWVIRPDLISGKDGENQIPKELDKATKERGYIAGWVPQEEVLGHKAVGGFLTHCGWNSTLESIVARMPMICWPSFADQQINSRFVDEVWKLGLDMKDLCDRKIVEKMVNELLVERRAAFMKSADRMANLAIKSVNEGGSSYCNLDRLINDIRMMSSKSENS

SEQ ID NO: 5667 - protein, 488 aa, Jatropha curcas
MGNLGHQQLHISFFPFMAHGHVIPTVDMAKLFAFRGHKTTIITTPANEPLISKTIQRTKDLGFDINIQILKFPSVEAGLPEGCENLDSVISYDNSQDIMDRFWLATAKLEEPLEKLLQEFKPNCLVADMFFPWATDAAAKSGIPRLVFHGTSFFSLCAGESIRLYEPHKKVLSDSEPFVIPNLPGEIKITRKQLPVFFREEAENNFTKMIKASKESELKSFGVVVNSFYELEQAYADHYRNVLGRKAWHIGPVSLCNRGMEDKAQRGKEASIDEHECLKWLNSKKSNSVIYICFGSVSSFTDSQLKEIAIALEACGQNFIWVVRRNQNSERNEQEWLPEGYEKRMEGKGLIIRGWAPQMLILEHEATGGFVTHCGWNSTLEGVSAGKPMVTWPVSAEQFYNEKLVTEVLKIGIGVGAKEWVRLHGDYVKSEAIEKAISRVMEGEEAEEMRSRARKLGEMARQAVEEGGSSCSDFNTLIQELSCYHQLS

SEQ ID NO: 5668 - protein, 474 aa, Glycine max
MKDTIVLYPNVLRGHLVSMVELGKLILTHHPSLSITILILTPTTTSSTTSVSCNSNARYIATVTATTPAITFHHAPFATLPPSTPSLPSHILSIELTRHSTQNLAVALQTLAKASNLKALVIDFMNFNDPKALTENLNNNVPTYFYFASCASFLSLLLRLPTIHQTVTREKVKDQPLQIQIPGLPTISTDDFPNEAKDPSSESYQSLLQVAENMRCSVGIIANTFEALEEKSIRALCKDGTLPPLFFIGPLISAPYEEDKGCLSWLDSQPSQSVVLLSFGSLGRFSRAQLKEIAIGLEKSEQRFLWVVRSRLDDADSMEELSLDELMPEGFLERTKEKGLIMRNWAPQVQLLSHDSVGGFVTHCGWNSVLEAVCEGVPMVAWPLYAEQKMNRVIMVKEMKVALEVNENKDGLVSATELGDRVRELMDSVKGKEIRQRVFEMKKRAEEAMAEGGTSCVTLDKLAIKLWKGNMIDI

SEQ ID NO: 5669 - protein, 430 aa, Rosa chinensis
MLGLYLTVSFSGETISCKQRNDGERTRKAHCLVLTYPTQGHINPMLQFAKLHHHKGLKVTLVTTHFLLNTLQLHAGSSKCNIALETISDGYEEGGFATAESTDAYLNRFWEIGPQTLTKLLRRMSSSEYPVDCIVYDAFMPWSLDVAKKFGIFGAIFFTQTVEASFSGGDEEILIPGLQLPLEAVDFPSFLCDLGSYPAVYDMVVGQFSNVDEADWILCNTFHELEPEARPTIPSMYLDNRLKEDKDYGVSLFKQNNDACMKWLNEQPKVSVVYVSFGSGAELGAEQMEELAWGLRSSKSNFLWVVRESEAGKIPKGFVEETSENGLVVSWCPQLEVLAHEAVGCFITHCGWNSTLESLSLGVPLLAMPQWTDQGTNAKYIMDVWKTGLKALADEKGIVRKDVVEHCIIEIMEGETGKESKECYEMEASG

SEQ ID NO: 5670 - protein, 465 aa, Nicotiana sylvestris
MKQHHFLVISLPAQGHINPTLQMAKNLARAGARATFVTTVYGLKRMNNLPTQERLFYSSFSDGYDDDWISNTDHNDYMNNLKYEGSKNLKNLLRKFSDEGHPVTFLVYTILLPWVAVVARELHVPSAFLVIQCGTAFAIYNHLFNSINGVYSSSVSDITVTPSFAIEFPELPLFSSNDIPTIVLPNAPHSSVMIPIMREHIQNLEKDPNSCVLINSFDALEEKSMRIVDKLRIFSVGPLVPSAFSDGNDPKDKSFGCELFENREKNYRQWLDSKPEGSVIYVSFGSIAVLEKEQKEEILHGLLESERPFLWVMRKGKEEVEEGNNYKNEFDDILLNKKGIIIPWCAQMEVLFHKSVGCFVTHCGWNSTLESMVAGVPIVGCPQFSDQTTNAKMVEEVWGTGVRANAVEGVVGREELKRCLEILMGNGEKGEEIKRNVKKWRDLAVEAVKVGGSSYDNLKKFLEIL

SEQ ID NO: 5671 - protein, 481 aa, Elaeis guineensis
MDRGKNHQLHICFFPFMAHGHMIPMMEIARLFATRGLKISIISTPVNVPQYSKFTERSKILGYQVDILVIKFPCVEAGLPEGCEHLDMALSGDLNRNFFTAAGMLGPQLEQLLKKHRPDGLVADMFFPWATDIAHSLGIPRIVFHGTGFFSLCAAECVRLYEPHKKVSSDTEPFVIPNFPGEIKLTRNQLPHFAKIEGHHFAQLHIDIKESELKSFGVLVNSFYELEPAYADHFRNVFGRKAWHVGPVFLCNSDFEDKANRGKEASIEVLECLKWLDSKKPNSVVYISFGSLARFTSSQLLEIAMGLEDSGQHFIWVVKQEGDGQEGKEEWLPEGFEERMEGKGLTIKGWVPQVLILEHVAVGGFLTHCGWNSALEGIAAGVPMVTWPVSAEQFYNEKLVTEILGVGVGVGIQQWVVVVGDCVKKEAVAKAVNHIMVGKEAEEMRTRARELGELARRAVEEGGSSHSELNALIEELRNKKI

SEQ ID NO: 5672 - protein, 483 aa, Arachis duranensis
MGSEECNLHIFFFPFLAHGHMIPTVDMAKLFASRGAKATIITTPINEPFIFKTIEKAKTHGKGSIHIKTVEFRPVDFGLPEGCDNVDFIRSSDKIPLFFEATRFLQEPFERLLIQHNPDCVVSDMFYPWTTDSAAKFGIPRIMFHGTNFFFMCVSESTRLYEPHKNVSSDSEYFVIPNLPDEIKMTRMQMPPFALHNEGKGTHPIAKLSKEAIESEKKSYGTVVNSFYELEKDYADHFRNVLGRKAWHIGPLFLINKDDTQDKAQRRKDASIDENECLKWLDTKKPNSIVYVCFGSIANFPDSQLRDIAIGLEASGQHFIWVVKKSKEDGDEWLPEGFEKRMEGKGLIIRGWAPQVLILEHQAIGAFVTHCGWNSTLEAVTAGVPMVTWPIAAEQFYNEKLVTEILKIGVPVGAKKWLRLIGDTVKWEAVEKGVKKIMVGEEAEEMRNKAKVLSQLAKSAVEKGGSSYSDLDALIVELASHKH

SEQ ID NO: 5673 - protein, 483 aa, Medicago truncatula
MGSLGKKENKPHVVCVPFPAQGHINPMLKLAKLLHFKSDFHVTFVNTEYNHKRLLKARGPNSLNGLPSFRFETIPDGLPESDLDSTQDIPSLCESTSKTCLPHFKKLISKLNNAIDTPPVTCIIGDGVMSFTIDAAEELNIPAVLFWTTSACGFMCYMQFRQLIEKGLTPLKDSSYLTNGYLETTIDWVPGIKEIRLRDIPTFIRTTDPNDIVLNFALGECQRALKASAIILNTFDALEHNVLEAFSSIDNLPPVYSIGPINFLLKNVTDEELNSIGSNLWKDETDCLEWLASKEPNSVVYVNFGSITVMTNDQLVEFAWGLANSKKTFLWVIRPDLVSGKNAVLPQEFLEETKNRGLLSSWCPQEEVLGHSSIGGFLTHSGWNSTLESVCGGVPMICWPFFAEQQTNCRFCCNEWGIGLEIEDAKRDKIEILVKELMEGEKGKEMKEKALRLKELAHDNAYGAFGSSLVNLDNMIHHVLLLS

SEQ ID NO: 5674 - protein, 503 aa, Unknown
  Description of Unknown: Oryza sativa Japonica Group sequence
MAASASSSSPLHIVMFPWLAFGHMIPFLELAKRLARRGLAVTFVSTPRNAARLGAIPPALSAHLRVVPLDLPAVDGLPEGAESTADAPPEKVGLLKKAFDGLAAPFAGFVAEACAAGHGESTPTAAGFSRKPDWIILDFAQNWVWPIAEEHKIPCAMFSIFPAAMVAFVGPRQENLAHPRTKTEHFMVQPPWIPFPSNVAYRRRHGAEWIAAVFRPNASGVSDADRFWEMEHACCRLIIHRSCPEAEPRLFPLLTELFAKPSVPAGLLMPPPPPAAGVDDDDDDVSMDDQHIAMAMRWLDEQPERSVIYVALGSEAPLTVGHVRELALGLELAGVRFLWALRAPPSASSVNRDKCAADADLLLPDGFRSRVAAARGGLVCARWVPQLRILAHRATGGFLTHCGWSSIFESLRFALPLVMLPLFADQGLGVQALPAREIGVEVACNDDGSFRRDAIAAAVRQVMVEEKGKALSRKAEELRDVLGDEGRQEMYLDELVGYLQRYK

SEQ ID NO: 5675 - protein, 469 aa, Medicago truncatula
MSDEVVHVAMFPSAGMGHLTPFLRLASLFLNNNCKVTLITPLPTVSLAESQLLDHFHSSFPQVNFIPFHLQPSSPDSVVDPFFHRVQTLRDSTNLLPPLISSLSPPITVFISDIFLLSPLISITQQLSLPNYTLFTSSASMFSFFSHFPTLAQSISDASAEISEIPVPGIAFSPLPYSSIPPILFKPTIFRNLMMEDSPNLTKLQGVFLNTFKALESHSLQALNNGEVVKGMPPVYAVGPFVPLEFEKESQKETSSESPPLTKWLDEQPIGSVVYVCFGSRTALGRDQMREIGDGLMRSGYNFLWVVKDKIVDKEDKEVGLDEVLGVELVERMKKKGLVVKEWVDQSEILSHKSIGGFVSHCGWNSIMEAALNGVPILAWPQHGDQRINAGLVEISGWGIWNKNWGWGGERVVKGEEIGDAIKEMMKNELFKVKAIELKDGGLRAISIGGDCEVTIQKLIRKWKNNVNN

SEQ ID NO: 5676 - protein, 481 aa, Theobroma cacao
MEKGEQSEACPHVLIFPLPLQGHVNSMFKLAELLALTGFKVTFLYSEHNHGRLVKYTNVSAHFASYPGFEFRTVPDGLPDDHPRSGDWFLEMYYAMETKAKLSLREMLLNINPPVDCIIGDGFLGFVLDVAKELGIPVFYFRTSSACCFWAYYSIPDIIQAGEIPIRGIEDMNRLITTVPGMETFLRCRDLPSFCRASDMANSTIQLVVEQTRKSPQAHALILNTFEDLDRPILSHIRTKCPHVYTIGPIHALLNTRLKAKRGASSQFSNSLWEVDRNCISWLDKQPKQSVVYVSFGSITIPSREQLTELWYGLVNSKRRFLWVVRPNSVTGKDGQGEDVPVELLEGTKERGCIVGWAPQEEVLNHPAVGGFLTHSGWNSTLESVVAGVPMICWPYFADQQVNSRFVSEVWKLGLDMKDVCDRKVVEKMVNDLMMDRREEFVKSAAEMAKLAKESVNVGGSSYCNLDRLIEDIRLMSLKKP

SEQ ID NO: 5677 - protein, 529 aa, Cyprinodon variegatus
MTLNHFCGIITFSLNLVLFASHCNGGNILVFPVDGSHWINMKIVLEELHTRGHNITVIRSSNSWYIPEKSPIYTSITLEMDQGLENFFDIYLQEHMRAQREGASLMTFLKLTKDFLSMITKAHLLWCDATTQIFQNQTLVKKLKDSQYDLVLADPAMGPGALIAKHLKLPLVLNVRWITSGEGHFVLAPSPLSYIPVPGSGLTDKMDFIQRVKNMFFYSIVFFQEKFLIGPIYADLCNRHIEGGCDIVSLLQDADIWLFRSDFVFEFPRPTMPNVVYIGGFQCKPAKPLPADLEEFVQSAGEHGFIIMTLGTLVNALPKEVTDEIASIFAKMPQKVIWRHKGTRPSTLGNNTMIVDWMPQKDLLGHPNIKVFVAHGGTNGVQEAIYYGVPVLGIPLFFDQYDNLLRLQKREAAKVILLDNVNGPNFEKAIRELLYNDSYRQNMQRLSSLHRDQPMPPMDQATFWIEYVIRHKGATHLRTQAYKLPWYSYHCLDVLVVLIAVIMGLLFLVFAVFRFLFCRGGRNRKLKQY

SEQ ID NO: 5678 - protein, 436 aa, Vigna angularis
MDSEDTIHVLMVSYPGQGHINPFLRLAKFLAANGLFVTFSTTEIAGKQMRTTNNITHKSVTPIGDGFLKFEFFEDGGMKDVDADGSKMRSLTDFSAQVEHFGRQYVSQVIREHAEANHPISCIINNPFVPWVCDVAADHVLKYNEVPDFLHPFSPYPALGTVILEQFKNLSKPFCVLVDSFEELESDYIKYLSEFVDIRPIGPLFKIPTATDTSDIRGDFWKSDDCMEWLNSRAEASVVYISFGSIVCLPQEQVTEIAHGLLDSQVSFLWVLKPPVKEFGLPPYVLPDGFLEDTREKGKVVQWSPQEEVLGHGSVACFVTHCGWNSSMEGVALGVPMLTFPAWGDQVTNAKFLVDVYGVAIKLGYGQAEKKLVSRDEVKKRLLEATVGPKAEELKQNAFKWKKAAEVAVAANGSSARNLDAFLKDIKERGAVSINN

SEQ ID NO: 5679 - protein, 469 aa, Jatropha curcas
MAEPTHIAILPSPGMGHLIPLVEFAKRLAFQHNISVKFIVPTDGPPSKAQKSVLDSLPSTISYTFLPPVSFSDLPSDAKIETLISLTVTRSFPSLREELKSLVSTTRLAALVVDLFGTDAFDVAREFNVSPYIFYPSTAMALSLFFTLPKLDETTSCEYRELKEPVKIPGCIPIHGKDLLDPVQDRKDDAYKWVLHHAKRYRQAEGIMLNSFMEMEGGAIKALQEEEPGKPPVYPIGPLVNMDSKSKPEEAEILKWLDDQPHGSVLYVSFGSGGSLSYNQITELALGLEMSDQRFLWVVRSPNDGVANATYFSVQSQNDPFDFLPKGFLDRTKGRGLVVSSWAPQAKVLSHGATGGFLTHCGWNSTLESVVNGVPLIAWPLYAEQKMNAVMLTEDIKVALRPKPSENGLIVREEIANTIRSLMEGEEGKKVRNRMKNLKDAASDVLSENGSSTKALSRLALKWKTQNYN

SEQ ID NO: 5680 - protein, 507 aa, Unknown
  Description of Unknown: Oryza sativa Japonica Group sequence
MAATSDSTPAAAAAAAASSSSSPLHIVVFPWLAFGHMIPFLELSKRLASRGHAVTFVTTPRNAARLGATPPAPLSSSSRLRVVPLDLPAVDGLPEGAESTADVPPEKVGLLKKAFDGLAAPFARFVAEACAAGDGEAVTAAAGFLRKPDWIIPDFAHSWIWPIAEEHKIPYATFLIVPAALVAILGPRRENLTHPRTTAEDYMVQPPWIPFPSNIAYRRRHEAEWMVAAFRANASGVSDMDRFWESEQHPNCRLIIYRTCPEIEPRLFPLLTELYTKPAIPSGLLVPPALDDNDIGVYNRSDRSFVAVMQWLDKQPNKSVIYVSLGTEAPITADHMHELAFGLELAGVRFLWALRRPSGINCHDDMLLPSGFETRVAARGLVCTEWVPQVRMLAHGAVGVFLTHCGWGSTVESFHYGQPLVMLPFIADQGLIAQAVAATGVGVEVARNYDDGSFYRDDVAAAIQRVMVEEEGKELAHKAIELCGILGDRVQQEMYLYELIGYLQCYK

SEQ ID NO: 5681 - protein, 618 aa, Citrus unshiu
MDLKEEKEYGDHVLMVSLATQSHINPLLRLGKRLVSKGLSVTVATPEIAQHQLLKSFTSSKINDCVSDDIPCLYFSDGFDLDYNRKSDLDHYMETIEKAGPGNLSKLIKNHYHDKHKKLSCIINNPFVPWVVDVAAELGIPCAMLWIQPCSLFSIYYRFYNKLNPFPTSENPNSSVELPGLQTLHTHDLPSFVLPSNPFGSFSRILNDLFQNLNKQYKWVLANSFFELEKEATESMSQLCPIRPVGPLVPPSLLGQDEKLDVGVERWKPEDCCLEWLNKQSNSSVVYISFGSLTQLSANQMEVIATALKNIKLPFLWIVKQSESASSDGEGTLPLWFLEETKNRGLVVSWCPQTKVLAHPALACFVTHCGWSSLLETIVAGVPVIAYPQWSDQPTNAKLVADVFKIGLRLRPSEDGFVGNEELEKCVEEIINGPKSEYYKKNAVELKHAARQAVAGGGSSDQNIQLFADEILGNYSEGGARCGEKLASSMIVIKPTVQTPQVARRASQPASSEEAKSLRNLQRSMAMRPATAGPKAVELKENALKWKKEAEEAVADGGSSDRNIQAFVDEVRRTSVEIITSSKSKSIHRVKELVEKTATATANDKVELVESRRTRVQY

SEQ ID NO: 5682 - protein, 457 aa, Helianthus annuus
MFPLPYQGHVNPMFQLANLLYSKGFSITIFHTNFNKPKTSNYPHFTFRFILDNDPHDERYANLPLQGMGAFSRIILFNKCGADQLRHQLELELSAKDEPPVSCLITDASWHFAQSVADCLNLPRLVLRTSSLFCFLIYASIPFLDDLGYFNLSDNTATPLLDGLGYNNVPDDKRLEEQVAEFPVLKVKDVIKIGFKKDNDGMGDIISNMVKQTKASSGIIWNSFKELEQLQLETIRRDIPAPCFLIPFAKHFTTASSSLLDQDRSFLPWLDQQPRNSIVYISFGSVAQVEEKHFVEMVHGLVDSKQSFLWVVRPGFVSGSTWLEPLPDGFPGERGRIVKWAPQQEVLGHEAIGAFWTHSGWNSTVESVCEGVPMICSPFWGDQPLDARYVSDVWKVGVYLENGWKREEITNAIRRVMADEEMREKSRGLKQKLDASLIEGGSSYESVESLVDYISSF

SEQ ID NO: 5683 - protein, 483 aa, Helianthus annuus
MATTETNSSNDRKQLHVVMFPWLAFGHIIPFLELSKFIAQNGHKVSFLSTTRNIQRLPTLPSHLSPLINLVKLTFPRIQELPHNAEATMDIGTDDIPYLKRAFDGLQPDVTRFLEEESPDWIIYDFAPYWLPSVVAGLGISRAFFSIINAWFIAFQGPSPDDLINGSDDRTIANDFLAPPKWVPFPSKLCYRKHEASWMVGNLSVNASGVSDAYRGGMVLKGSDCIFIRHCYEFEPQWLTLLEKLLKLPVIPVGLMPPVTPTHVGDEKDATWVTIKKWLDGQQNGRVVYVALGSEVMLSKSELAELALGLELSGLPFFWALRKPVGSTESNLIELPEGFLERTRDRGVVWTSWVPQLQVLSHESVGGFLTHCGWGSIVEGLMFGHPLIMLPFLVDQGLNARILVDKQVGIEVPRNEEDGSFTKESVARSLKSVVVEDQGKIYKANAMELSQIFSNTNLEKRYINNFIDYLEKKRGVVAINDEA

SEQ ID NO: 5684 - protein, 466 aa, Helianthus annuus
MSTVEIAKLLVNRDQRLAITVLVIKPPSSSSGSAIDTYIESLAKSTMNRISFIQLPQDETPLVDPKSPMSTFSEFIPSHCKYVRNVVADMISQPGSGRIAGFVIDMFCTCMVDVANEFNVPTYLFFTSNATFLGFKFYIQTLSDDMNKDVIELGNSDTEISVPSFVKPLPTNAFWCLVHTREGLDFVLRSVRKLREVKAIMVNTFLELETHAMESLSADVSIPPVYPVGPILNLEGGSRGGKSFDHDIIRWLDGQPPSSVVFLCFGSMGSFDEAQVKEIARGLEQSGHRFLWSLRRPPSDQTSRVPGEYEDPSVVLPEGFMERTRGIGKVIGWAPQVAVLAHHAVGGFVSHCGWNSLLESLWFGVPLATWPLYAEQQMNAFQMVVELGLAVKIKLDYRKDAYTPKVNTVIVTAKEIESGIRRLMEDNEVRTKVKEISAKSRSTVVEGGSSYASLGCLIEDFVRNVS

SEQ ID NO: 5685 - protein, 486 aa, Morus notabilis
MKQTPPHIAILPGPGISHLIPFVELARRLVVHHELHVTCIIPCTPDDHPPSDATKAVLESLPKRNAHTIFLPPVNFDDLPNDTNPSRKNTLTMTRSLPSIHHVLKSLASSASTTALFVDPFGLDALDIAKELDISFYLFFPTNAMSLSLVLHLPKLDEIAASYDFMRDLPEPVKLPGCPPLRGGDLFASIQDRRTDTYKERVQFAKRIVSAGGIDGIIFNSFMDIEPDAIRALQERRIGGSVMPIYPVGPIVQTGSIGQINKDSECLTWLDNQPRGSVLYVSFGSGGTLSYDQVTELAFGLEMSGQRFIWVVKRPNNKFPNAAYLSHRPQGPFKPLDFLPHGFVERTKGRGLVVDFWAPQARVLGHSSTGGFLSHCGWSSTLESFLYGVPLIAWPLFAEQKLNAVLLVERLKVALRPKADEDGLIRRKEIACVVKALMEGTGEEGRIVRERTKALKDSTSKALDKDGSSARALSELASTLKTTASN

SEQ ID NO: 5686 - protein, 477 aa, Oryza sativa
MAAARRVVLFPSLGVGHLAPMLELAAVCIRHGLAVTVAVPDPATTAPAFSAALRKYASRLPSLSVHPLPPPPHPPASSGADAAAHPLLRMLAVLRAHAPALGDLLRGPHAARALVADMFSVYALDVAAELGVPGYLLFCTGATNLAVFLRLPRFCAGSSGSLRELGDAPVSFPGVRPLPASHLPEEVLDRGTDISAAMLDAFDRMADARGILVNTFDALEGPGVAALRDGRCLSNRATPPVYCVGPLITDGGAEEERHPCLAWLDAQPERSVVFLCFGSRGALSPEQVSEMATGLERSEQRFLWALRAPAGTKPDAAMSLLPDGFLARTADRGVVVTASWVPQVAVLQHASTGAFVTHCGWNSTLEAVAAGVPMVCWPLDAEQWMNKVFIVEEMKIGIEVRGYKPGALVQADIVDAILRRIMESDAQQGVLERVMAMKESAAAAWKEGGSSCTAFAEFLKDMEEGNVAMAHSNQVET

SEQ ID NO: 5687 - protein, 210 aa, Arabis alpina
MRLNLWEEEEEEAIQCLDWLDSKTKNTVVYVNFGSLTMLTKEQLIEFAYGLAGSGKEFLWVMRSGTVDSILPADFRSETANRAMLINGWCSQEKILSHPSIGGFLTHCGWNSILESLFVGVPMICWPFFADQITNRKFCCDEWRIGIEIGDEVKRERVEAVVKEVIDGEKGKRIRETVVKWRSMAEEASESPSGSSYLNFETVVNKVLMV

SEQ ID NO: 5688 - protein, 493 aa, Vigna angularis
MSSKVSPTKPTKMEKDTIVMYPAPGIGHIVAMVELAKLIQTHRFNITIILTTGLLDHPAIEVYIRRITAAHPSISFLRLPHIPLSASTSVSLAARAFGFIKANASSVATSLSQISQTSAVKAFVIDLFCTSTMESASSMGIPVYYFFTSGSAVLALFSYFPKLHEQRSESFKDMIGVELRVPGNAPLTAVNMPEPLLDRGDPAYWDMLYFCSSLPKARGIIVNSFPELEPLAVNAVAEGACFPNAESGPHVYYIGPLIAEAQQSDAKGSKGSDSKECLRWLEEQPSRSVVYLCFGSRGSFSVSQLKEIAKGLEKSGKRFLWVVKRPLEEEGAKQNKEAAKPGDAFDLASVLPDGFLERTKDRGMVVEAWAPQVEVLSHESVGGFVSHCGWNSVLEGVVAGVPMVAWPLYAEQHVNREVMVGEMKVAVGVNQRVEDGFVSAEEIEKRVREVMETKEIRERSFKLKQMAMAAVAQFGSSTTALANLLHSWTSFAS

SEQ ID NO: 5689 - protein, 466 aa, Sorghum bicolor
MAGSNNVSVRVLLVSYPAQGHINPLFQLGKRLAIHHGVRCTLAVARSALGSSVPPGPGAVPVVAISDGCDLGGYDEVGDVHEYLARLQSAGSRTLDELLGSESSHGRPVRVVVYDAFLLWVPRVARQHGASCAAFFTQACSVNVVYDHAWRGDVKLPVDKVLAELPGLPKGLQLEPRDCSSFLTQQDDSSSTSTYLDLLLQQCQGLEVADHVLINSFYELQTEEAEYMASRWAAKTIGPTLPSAYLDNRMPDDSSYSFSLHAPMATECKAWLAKRPARSVVYVSFGSIAAPGPDQLAEMAQGLYNSGKAFLWVVRGPETSKLPKSFVSKVKENEERGLIVAWCPQLEVLAHPAVGCFVTHCGWNSTMEGLGIGVPMVAMPQWSDQPMNAKYIEDVWRVGVRARPDMEGVIRKDEVERCVRQVMDGEKSKEYMENAMNWREKAKRAMSEGGSSDRNIIEFLGKFGWN

SEQ ID NO: 5690 - protein, 492 aa, Sorghum bicolor
MGSNAPPPPTPHVVLVPFPGQGHVAPLMQLARLLHARGARVTFVYTQYNYRRLLRAKGEAAVRPPATSSARFRIEVIDDGLSLSVPQNDVGGLVDSLRKNCLHPFRALLRRLGQEVEGQDAPPVTCVVGDVVMTFAAAAAREAGIPEVQFFTASACGLLGYLHYGELVERGLVPFRDASLLADDDYLDTPLEWVPGMSHMRLRDMPTFCRTTDPDDVMVSATLQQMESAAGSKALILNTLYELEKDVVDALAAFFPPIYTVGPLAEVIASSDSASAGLAAMDISIWQEDTRCLSWLDGKPAGSVVYVNFGSMAVMTAAQAREFALGLASCGSPFLWVKRPDVVEGEEVLLPEALLDEVARGRGLVVPWCPQAAVLKHAAVGLFVSHCGWNSLLEATAAGQPVLAWPCHGEQTTNCRQLCEVWGNGAQLPREVESGAVARLVREMMVGDLGKEKRAKAAEWKAAAEAAARKGGASWRNVERVVNDLLLVGGKQ

SEQ ID NO: 5691 - protein, 469 aa, Unknown
  Description of Unknown: Oryza sativa Japonica Group sequence
MAPPTATPHVLLVPFPAQGHALPLYDLAALLAARGLRLTVVTTPGNAAQLAPLLAAHPDSVRPLVLPFPSHPSLPAGLENTMNCPPVYIAVFIHALAALHRPILAWARSQPAHPVVAVVSDFFCGWMQPLAAEIGVPRVVFTPSGVLGTAVPHSLFRRLVKRPVGCDDGFPVAFPAIPGEPAFEWREISMLYKAYIEGLVEEQVGESLKQNCLWNLEGWGFVSNTFRALEGRYLDAPLEDLGFKRVWAVGPVAPDTDAAGERGGEAAVAAGDLSAWLDAFPEGSVVYVCFGSQAVLTPAMAAALAEALERSAVPFVWVVSGDGVVPEGFEARAAAAARGMVVRGWAPQVAALRHAAVGWFMTHCGWNSVLEAVAAGVPMLAWPMAADQFVNARLLVEDAGVALRACAGGAGVAPDAGELAAVLADAVGEKGSGARARAKELAADAAIAVRSGGSSYEDLERFVQEIQKL

SEQ ID NO: 5692 - protein, 213 aa, Cephalotus follicularis
EPSGSRSELFDWLDKQPSESVLYVSFGSGGTLSHEQTIELAWGLELSKQRFIWVARQPTKTTGDGCFFTVGNGGDDLSNYLPEGFLIRTHNLGLVVQEWAPQIDILSHPSIGGFLSHCGWNSTLESITNGVPMIAWPLYAEQRMNATLVTEELGIAVRSKTLASKGIVGREEIKTMVRSIMVDEEGHAIKAKVKELKHDAEKALNEDGSSYGA

SEQ ID NO: 5693 - protein, 295 aa, Medicago truncatula
MKDIRIKDLPSFVRVTDLSDILFNFVVSETQNCLRSSTIIINTFEELEGETLDTLRANNPNIYSIGPIHMLGRHFPEKEKGFKASGSSLWKSDPECIKWLSKWEPCSVLYINYGSITVMTNHHLKEFAWGIANSKLPFLWILRPDVAMGEETSTLPQEFLDEVKDKGYITSWCSQDEVLAHPSVGGFLTHCGWNSTLETISYGVPTICWPFFAEQQTNCRYLCKSWKIGMEINHDVKRDDITEIVMEMMKREKGKEMRHKCLEWKKKAAYTTDLGGYSYNNFHKLIRDVLHQNAI

SEQ ID NO: 5694 - protein, 370 aa, Ricinus communis
MAQGHMIPMIDIAKLLAKRGVIITIVTTPVNAARFKKTLARAQESDLSIRIIQLQFPCEESGLPKGCENIDLLPSSDIPKFMNFFTAANMLQEQVEILFQELMPRPSCIISDLCLPYTSHVACFFCAFVLSVSIMMLLKALIPLIQRAADLASFGVVINSFEELEPEYVEEYKKVRGGKVSCVGPVSLCNKDILDKAQRGNDASIAEHECLKWLDSQEPGSVVYVCLGSLCNVPPSQLVELGLGLEESEKPFLWVIRRNEKSKEIEKWILETGFEERIKGRGVGFLIHGFAPQVLKAGVSVGVERPMEWGEEEKIGILVKKEDVKKAVDMLMDEGEEGQARRERAKEIGNMAKRAVEEGGSSYRLYYNAN

SEQ ID NO: 5695 - protein, 458 aa, Cajanus cajan
MEKKSKANSVHCVVLAYPAQGHTNPMLQFSKLLQQEGVRVTFVSTLFYCNNLQKLPTGISHETISDGFDGGRIGEAKSFRVYLDRFWKIGPKTLVELLEKLMRSGYPVDCLIYDSFMPWALEVAKRFGIVGVPFLTQNLAVNSIYYHVHLGKLQVPLTNQEISLPALPQLQLGDMPSFFFNYLQDPAFLDFLVAQFSNIDKADWILCNSFYELEKEVADWTMKIWPKFRTIGPSIPFINLENQTQDGEDYGIAQFTSEECMKWLDDKPREFVVYVSFGSMAELSEEQIEELAYGLRDSGSYFLWVVRASEETKLPKGFEKNSEKGLVVTWCSQLKVLGHEAIGCFVTHCGWNSTLEALSLGVPMVAMPQEADQSTNAKHVEDVWKVGIKALVDGKHVVRREVLKHCVREVLESEGGKEMKRNAMHWRTLAANAVGNGGSSHANINEFVNSVQSECTQC

SEQ ID NO: 5696 - protein, 479 aa, Unknown
  Description of Unknown: Oryza sativa Japonica Group sequence
MERTVVLYPGLGVGHLVPMVELAKVFLRHGLAVTVAAVKPPLDSPDFSAAVARFAECNPAINFHVLPPPPPPPAPVGSGSDGKSASPIVGMLGFLNAMNAPLRDFLCSLPSVDALIVDMFCTDALDVASELRLPVYVFFTSAASDLAVFLHLTSMRDSINTSFGELGDSMIHIPGCPPFKASELPSDILSDNEASRLILLMFRRHPESRGILVNTFESLETRALRALEDGLCVPGRATPTVYSIGPIVSGGGGSDKDHDCLRWLDAQPDNSVVFLSFGSLGRFCKKQLEEIAIGLQKSEKRFLWVVRSPRIDEKNVFEPLAEPDLDALLPAGFMEATRGRGLVVKLWAPQVEVLRHRATGAFVTHCGWNSTLEGITAGLPLLCWPLYAEQRLNKVFVVEEMKLGVEMRGYDEEVVVAEEVEAKVRWVMESEGGQALRQRAAAVKDAAAQAIKEGGSSHAAFFKFLEDLPLQVSRGMVSA

SEQ ID NO: 5697 - protein, 469 aa, Vigna angularis
MGLIPSDGTRSHVLLFPFMSKGHTIPLLHFAQLLLRRSISVTVVTTPANHPFITEFLEGTTASVVTLSFPTVTNIPVGVESTDKLPSISLFYEFATATSAIQPQFEQLLQTLPPVNFMVTDGFLWWTLDSATMFGIPRFVYYGMNCYSSSVSIEAMTKGILNGSQPDNELVALTQFPWIRVCKEDFDPSFRNPNPNNVAHKFNMNSISSTHRSHGMLVNSFYELESTFVDYLKAGSSPKGWCVGPLCLAEWTPKVYPDEGLKPRWVTWLDQKLEEKRHVLYVAFGSQAEISVEQLGEIALGLEESEVSFLWVMRKEEWGVPDGFEERVKGRGMVVREWVDQREILMHGSVEGFVSHCGWNSVLESVCAGVPILAWPMMAEQYLNARMVEEEVKVGLRVETCDGSVRGFVKREGLKKTVMEMMEGDKGRKARQKVRELAEKAKFATQEGGSSWSTLESLLTEGCDSRDKE

SEQ ID NO: 5698 - protein, 492 aa, Beta vulgaris
MSSSTASLTVTADAELVFVPAPGMGHLKSAVELAKLIIQRNHRISIVILIINIPTTTSLINDFVHSQSRNNPYPTHLTFMTLPPLSNPPERSSPDFMRILIELHEPLVKQAVEERIRAGSSKLAGFVLDMFCTNMIDIATNLNVPAYIFFTSGANMLSLMFHFQSMNDEGVFDLTKDHISPNAEFDVPGFVNRVPEKVLPAVLIDKESGVPMLLNLVRGLRRSKGILVNSFTELETSGVQALLDQATEGGSIPAIYPVGPILELDSGSQGEDHVSILQWLDKQPSSSVVFLCFGSMGSFDANEVKEIANGLEKSGHRFLWSLRKPPSAGTTQPSQDQTFVEALPEGFVDRTAKIGKIISWAPQVSILSHPSVGGFVSHCGWNSTLESMWFGVPVATWPLHAEQQLNAFELIKELGLAVEIRMDYRHDWKTRKANFVVTAEEVENGVQKLMSLDEETKKRVRQMRDEGRKALEDGGSSHMSLARFIQDVLTFE

SEQ ID NO: 5699 - protein, 475 aa, Fragaria vesca
MVQHRFIMIAFPAQGHINPALQLAKCLIRTTGAHVTFVTAVSALRRMANGSTTPSGLTFSPFSDGYDDGVKPEDDKQHVLNELKHGSSQAIVGLVHSGANEGRPYTCIVYTLLLSWVAEVATELHLPTALAWIQPATVFDIYYYYFNGYKDLIKNNTGADNNDPSFALELPGLPLLFKSRDLPSFILASSPIIHRLVIQMFEDQFEDLGKLSKPIILVNTFDALEPGALKAIDKYNLIGVGPLMPSAFLDDKNSSDKSFGCDIFQKAKESSYMEWLNSKPEQSVVYVSFGSISVLSKNQMEELAKGLLDCGRPFLWVIRENQKKGEGKEEKEEEEELSCRAELEELGMIVPWCSQVEVLSNPSLGCFVTHCGWNSTLESLVCGVPVVAFPQWSDQGTNAKLIEDSWKTGVRVERNEEGVVVGEEIKRCLDLVMESDKMRRNAKKWKDLAREAVSEGGSSHKNLKAFLEEIEERLR

SEQ ID NO: 5700 - protein, 493 aa, Siraitia grosvenorii
MKKFELVFIPLPVMGHLAAMVEMANILVTRDQRLTVTILVIKLPLYGKTAEYIQSLSASFASESMRFIILPEVLLPEESEKEFMLKAFLESYKPIIREAIIDLTDSQMGPDSPRLAGFVLDMFCTTMIDVANEFGVPSYVFCTSNAGFLALSFHLQELYDENNSKEVVKQLQNSNAEIALPSFVNPIPGKMIPDIFSNDDTASWFHDQVERYRSGVKGILINTFAKLESHVMNSMSRSSSSRAPPLYSIGPILHLKNNNTVGPGGTLHCTDILKWLDNQPPVSVVFLCFGSMGSFDEDQVKEIAHALERSGVRFLWSLRQPPPKDKFEAPSEYTDIKYVLPEGFLERTAGIGRVIGWAPQVEILAHPATGGFVSHCGWNSTLESMWHGVPMATWPLYAEQQFTAFEMVVELGLAVDITLDYQKHPHGERSRVVSAEEIQSGIRKLMEEGGEMRKKVKAKSEESRKSLMEGGSSFISLGRFIDDVLGNGPEGGE

SEQ ID NO: 5701 - protein, 488 aa, Medicago truncatula
MYRTILVSLAQLIAQMVIEALEALTPNTITDRGLIASWCPQEKLLNHHSIGGFLTHCGWNSTTKNICAGVPMLCWPFFSDQPTNCRLICNELEIGVEIDRNVNRENVENLVNEIMVGEKGNKMRRKATELKKKAEEDTVPGGCSYMNLDKYYRYSLNAKLNRSGVENPWFFFSGSYSGALSAWFRLKFPHLTCECLASSAVVLAVQDFGEFDQQIGESAGPEYDLEIDGDFLYYLAAAAVIAFQYVKEYYIGTFGIAAKIYDQEYLKKTAIIEDTLLMGADYYETDADRGFLAAKGSVPIGIGKNSHIKRAIIDTNARINFLLIQSPPPLPKKPPDRHVSTVINSSSSMMQTGYEQKLKDLTTELADYKFKMEMLMDEHEKLSELVEDYKSRELKFKSTINSLESKLTDNEYERQQYMDESRNLNVQLQHACEFENEIMALKSELNTANTKKERLKASLCLKSDLNYVMIRRPKKQFILLKSLFVSKW

SEQ ID NO: 5702 - protein, 472 aa, Carica papaya
MEKKNQMKGATELTHLRVLVLPFPIQGHINPMLQFAKRLLSKGLTVTLLTPTSSAHNLIKPNPNSTSKSLHIQPIDDSFPPGTKPGVTAEYFNQFRAGITKSLTDLIRHDISATTTTTTTTTKPLPKFLVYDCFMTWALDVARESGIDAAPFFTQSCAVNAVYNDFKEAEVKGGDEGVSLPWKGLLSWNDLPSLVHETTVYGVLREFLMDQYYNVGEAKCVLANSFDELENQVMNWMPSQWRIKNIGPTVPSMFLDKRLEDDKDYGLTLFKPQAVTCLTWLDSKQPSSVIYVSFGSLASLSGEQMTELARGLQMSCDHFLWVVRDLEKLKLPESFKEETSDKGLVVSWSPQLEVLAHKSMGCFMTHCGWNSTLEALSLGVPMVAMPQWTDQPTNAKFITDVWQVGIRVEVNEEGIVTREEISKCINEIMEGEKGKDIKKNSEKWRDLAIAAMNEGGSSDKNIGEFIALLASN

SEQ ID NO: 5703 - protein, 536 aa, Caenorhabditis remanei
MEVKNLFILFYLFLFSFNNVSGYNFLVISPVYGFSHMKCMAAIANQLADAGHQVTYFQPFVVELFQNHDLIKNPNIKVIDFWHDEEGRKNLPSDGVLSDAWTSVKYQSDIGVKIFAPRVLHSAFQHMCRRMFEDKELHKMLKEQKFDVVLSETFDFCGLYLADYLEMPAIISVFTGSKLSAITDALGEPSFLHYYPSPSSNFGPKISLYDRMNNLWYKLLSTSAFGELFDRQYSDISKIMNGTVRHWKPILGDVTYHFANSNPYLDFVVPTIPKVVPIGGYTMDYKQVPPVSKELDTILNLRPYNVFISYGTMVASKYMPDDYKHAMINLFKHNQNVTFLWKYENAEKKYIKENIPENVHLSKWFPQQSLLADKRVNLFITHGGLGSTMELAYAAKTGIVTPLFAEQPSNAQMLARHGSVEVYSKHDIPNWKKQSDLLRKMLIDEKYQIAANRLAEILNHQPINPKDLVLKHAENAARFGKMPSLTPFAKDMGFLEFYNLDIIVYCISFALFAIYGAIETFLFVKKCFVTRRVKTE

SEQ ID NO: 5704 - protein, 206 aa, Rhodamnia argentea
MAADPGLDEGSNWIKFVAILDGLETDERKDSTKQLESMSRFYELTHGLEQLALPFLWVVHPNLTKGPVTEFHDRFLQRVRNYGKVVQWAPQEEVLAHPLVACFFPHCGWNSTMDGLGNGVPLLCKPFSANQHLNRSFICDVWRVGLGVGGGENGLITGHEVRDKVLALLGSEEIRANCLRVKEMARKSVSEGESSLKNLQSLIEPM

SEQ ID NO: 5705 - protein, 451 aa, Salvia splendens
MLKLAEMLSLAGIRVTFINSHHVHRRLPDSAYFSKYPNFRFETLPDGLPDDNPRTGDQILDLLQAMEAASQPVFREILSSGSPAATCLIAEGVFVWAASVAADVGVPLLYFDTISPCGLWGLLSLPNLIQSGEFPFTDEELDEVVAGTDGVMRRRDLPSFCRIKDVNDPIIQLVIEEANHIPLAQGLIFNTFHHLEAPILSQMLTISPNIYAVGPLHAHLKSRLAGGEPSIASDSIWEEDKSCISWLDKQPSKSVIYVSIGSLAVMTRDQLYEIWHGLVDSGSRFLWARRPGSVSVPRPGPEHDDDDVVVPLDLSQGTKARGCLVGWAPQEEVLAHPSVGGFLTHSGWNSTLESVVAGQPMICWPFHADQQVNSRYVEEVWRLGLDMKDSCDRVVVAEMVREVMGSRKDEFSERASEMAKFAKMSVNPGGSSFLDFDRLIEDIKTMKILSI

SEQ ID NO: 5706 - protein, 443 aa, Zea mays
MFQLAGLLHLRGFSVTVFHTDFNAPNKSRHPAYDFVPVPVRGCLPKGSSDALQVTVERILAVNRACEAPFRERLAALLAREDVACLVADAHLLTLLDVARGLGVPTLVLRTGSAACLRMFAAFPALCDKGTHVIHALTLLFVFQSDVESQLETPVTELPPYRVRDLPSTTSACHGVISEVISRLVTAVTTSSGLILNTMDALECGELASLRRDFGVPVFDIGPLHMLSPAASSSLLLQDRGCLEWLDAQAPASVLYVSFGSLASMSAAELVETAWGIANSGYTFLWVLRPGLVRGSQTSEAAPPLPDGFDAATRGRGMVVSWAPQEEVLAHPAVGAFWTHCGWNSTLESLCAGVPVIARPCFGDQMGNARYVDHVWRTGLTLDGVLERGEVEAAVAALMAPGEPGDGLRRRARELKSSAAECMAKDGSSCTNVDKLVDHILTL

SEQ ID NO: 5707 - protein, 361 aa, Genlisea aurea
VLFFPWLAHGHLSPFYELAKRLSEKNFKTYVCSTPINLMSIQASPDSAIELVELHMPPSPELPPEFHTSRNAPPNLGQTLMHEFQLCKSNFLDILKSIKPDLLIYDFLQPWSAKQASSMGIPSVFFATSSTACYSYYHHLYSNGFAKKYPFEDLYVHHHEKIVVRGYGNIIEDVGDGFLFGSFNLSTEIVLVKTYGKFEAKYVSHLSALSNKKLVVTGPLIAESVDLDGIEKSNEIMNWLNDQRKFSVVYISFGSEYFPSKEQIYEISKALELSRVKFLWVIRFDAGKKETSLKDVLPKGFMDRSKDDGMIVTEWAPQKKILSHPSIGAFISHCGWSSVMESLYFGVPIIAMPIHIDQPIN

SEQ ID NO: 5708 - protein, 471 aa, Medicago truncatula
MAKTIHIAVIPSPGFSHLVPIVEFTKRLVTNHPNFHVTCIIPSLGSPPDSSKSYLETIPPNINSIFLPPINKQDLPQGVHPGVLIQLTVTHSLPSIHQALESLTSKTPLVAIIADTFAFEALDFAKEFNSLSYLYFPCSSFVLSLLLHLPKLDEEFSCEYKDLQEPIKLQGCVPINGIDLPAATKDRSNEGYKMYIQRAKSMYFVDGILINSFIELESSAIKALELKGYGKIDFFPVGPITQTGLSNNDVGDELECLKWLKNQPQNSVLYVSFGSGGTLSQTQINELAFGLELSGQRFIWVLRAPSDSVSAAYLEATNEDPLKFLPKGFLERTKEKGLILPSWAPQVQILKEKSVGGFLSHCGWNSVLESMQEGVPIVAWPLFAEQAMNAVMLSNDLKVAIRLKFEDDEIVEKDKIANVIKCLMEGEEGKAMRDRMKSLRDYATKALNVKDGSSIQTLSHLASQMEMIGGI

SEQ ID NO: 5709 - protein, 450 aa, Medicago truncatula
MNFSGEDVCHIVAMPFPGRGHINPMLSLSKFLISRKPNNILITFVVTEEWLGFIGSDPKPKSVRYATIPNVVPPEREKTIDSFPQFYEAAITKMEAPFEQLLDQLELPVNVIVGDVELRWPVDVGNRRNIPVASLWTMSASFYSMLHHLEVFSRHQHLTHDKLENIPEISSVHMEDLRTVVRRNDQPTMQLALECISEVNKANYLLLTTVQELEAETIDTLKSIFPFPIYPIGPAVPYLELEEKISTNSNHSHDYIKWLDSQPAESVLYISFGSFNSASSAQTDEIIEALKNSEIRYLYVACGETSRLKDKCGGKGMVIPWCDQLKVLSHASIGGFWSHCGWNSTLEAVFSGVPILTFPLAYDQFPNSTQIVDEWKNGWKVEKSSKLESDVFFAKEDMEELVKRFMDLESQEGKKIRDRARELRIMCGKAICKGGSSDRNLDAFISDISS

SEQ ID NO: 5710 - protein, 519 aa, Bicyclus anynana
MHFILQLVFIIITMLFGTINAYKLLVMSPLPFKSHSILGEAMVEHLTNAGHEVTYVTVFLPEKPIPRVNVVDLSDNIKLIPPGGISIQAVMDNKHEGMSFFESVPLIMNLSRNTIAHPNVQKLINDKNQQFDAVIAEWMFNEVYSGFSGIFNCPLIWFSTVEPHWMVLRLVDEVTNPAYSVDVASNSVPPLTFVQRVEELGTQIVGRLTQALWVSGIENNLYDEYFVPVIEKRHSTAPSFETLRFNASLLLSNSHVSMGVPAVLPANVIPIGGYHIKPNVKQLPEDLQKLMDNAKHGVIYFSMGSNLKSKQFPEVIKLDLLKMFGKLKQTVIWKFEEDLPNRPSNVHIVQWAPQQSILAHKNCILFITHGGLLSTTETMHFGVPIIGIPVFADQFVNVARAVKKGYAQKVDLSYSMAADIELAINKLLDNPSYKTRVKELSQIYHDRPVPPARELVHWVEHVVKTRGATHLRSPASMVAWYQKLYLDLVLVLVVLVLVLKRVYIFIKSIFIAKRKVKTN

SEQ ID NO: 5711 - protein, 484 aa, Linum usitatissimum
  MOD_RES (106)..(106): Any amino acid
  MOD_RES (151)..(151): Any amino acid
MEDVVAAASPEPNLRVVMVPSPGHGHLIPFVELSKRLLLRHNFSTTIIVPDNGSGMIPQRQLLQTLPPTVSPLYLPPVSLSDVPSDANVITRVTLTMIRSFPAIRXAIINLQHSGEGLCGRVVAVVVDFLGADALQVATQLQIPPYVFYTXSAFHLTLGLNAPQLLHPTHQEDSTKLLKLPGCIPLLGADLPEPYIDKKKDAYKWMVHSHERISSDAVGIIINSFVDLESDIFKALTEERFRTGSGPTVYPIGPLKRLDSDEDLNQFSNESIDCLEWLDKQPESSVLLISFGSGIGARQSKAQFDELAHGLAMSGKRFIWVVKPPGNDVVPWNSSFLPEGFLKKTKGVGLVIPDWVPQIRILSHGSTGGFMSHCGWNSSLESITNGVPVLAWPQHADQKMNAALLVEDAKVALRVDQSSGEDGIVGREEIARYVKAVLDGDEAKLLRKKMRELKVAANNATGNDGSSTKSLDEVANLWKNQNPY

SEQ ID NO: 5712 - protein, 497 aa, Crocus sativus
MEQHQPNILVVTYPAQGHINPALHLAKHLAADTKGLLITFSTAISAHRKMFPESTEPDQEVEDGPITYIPFSDGYDDGFQRDKHDGKQFRSRFKTVGSNTLSAIIQNLEHRGRKVSCVIYTFFVSWAADVARQHAIPSVQYWIQPATVFAIYYHYFHGYESVVAAHSHDPSYPINLPGLSPVQVRDLPSFLTIKPDDPYAVVLSMIRDSFEGLDREETKTKVLVNTFGQLEADAILAVDKMDIIPVGPILPCKGGVSRGDLLKEDEKGYMEWLDSKPENSVVYVSLESLAVLKKQQKFLILKGLKDSGRPYLWVVRRDSGLEGVELGDWDGDGDGDNGMVVGWCSQVSVLSHPSVGCFVTHCGWNSTMESLASGVPTIGVPQWSDQPTCAALAEKDWGIGVRSEVNGDGILEGGELKRCLDLVLGDGERGVEIRRKVEFWKDKATEAISFGGSSDKNLRTFVDQITGYDPNVSSVGFWKDKAIHRQHCEESESASPS

SEQ ID NO: 5713 - protein, 471 aa, Nelumbo nucifera
MSHPHFLLVTFPAQGHINPSLQFAKRLIRIGAQVTFATSVSAHRRMSNACNPDGLTFAPFSDGYDDGFKLTDSVEHFLSELKRRGSETLRELILSLAREGRPVSCLVHTLLLPWAADVARNLDVPWALLWIQPATVFDIYYYNFTGYGDLICNNKNDNSYTVELPGLPPLTSRDLPSFLLPSNTYAFALPIFHEQIETLERETKPRVLVNTFDALEPEALRVVEKIDLIGVGPLIPSAFLDGKDPSDKSFGGDLFHGSADYMEWLNSKADSSVVYVSFGSIALLPKRQMEELASALIESGRPFLWVIRKNENASEETKKEEEAFLSRIEEQKREGMIVPWCSQVEVLSHPSVGCFLSHCGWNSTLESLVTGVRVVAFPQWTDQATNAMLIEGVCGTGVRVRAKEGEGDGVVEREEIMRCLDMVMEGENGEEMKRNARKWKELAKKAVKEDGSSDKNLRRFVEEIRKDCWIV

SEQ ID NO: 5714 - protein, 479 aa, Cicer arietinum
MGSEAPMKILLVSYPAQGHINPLLRLAKSLAAKGSSVIFTTTEQAGKSMLTVKNITNKTVTPIGDGSLTFELFHDGLSDDDPIKINLGAYSDQLELVGKQFVSQIIKNHAESNKPISCLINNPFLPWVCDVAAEHEIPSALLWIQSSAVLAAYYNYSNKLVRFPTETEPYIDVQLSSVVLKYNEIPDFLHPFSSYPFLRALILEQIKNLSKVLYILVDSYEELEHEFIDYLSKKSIFIKPVGPLFNNPKAKDASNIPSDFVKSNDCDTIEWLNSKSPDSVVYISFGTIVYLPQEQVDEIAYGLLSSKVSFLWVLKQPLKELGLKPHVLPDGFLEETNGRGKVVNWSPQVEVLAHPSVACFITHCGWNSSLEALTLGVPMLTFPAWGDQVTNAKFLVDVFGVGIRLGYGMAANKLVTRDEVKKCLLEATSGEKAEELKQNAIKWKKAAEEAVAVGGSSDRNLDAFLKDIKKRGAFNIQKI

SEQ ID NO: 5715 - protein, 324 aa, Helianthus annuus
MVCTPKIRSLFPLDRIAKCLLLTTTYELEADAIDEIVNNTFIPVYVLGPNIPYFRIRTSFPSSKSSYYSWLESKPPRSVLYVSLGSLVRVENNQIAEILAGLKQSGVAFMWAAGGEALRLSGDYGSDGLVVERCDRLRVLSHSSVGGFISHCGWNSTKESLFSGVPLLTFPTRGDQAFNGKRVCEDWKVGRRLKTCNAFVSRDVVKDVVREFMGLEGDLRACLMEHVKRVEGICRESVVEGGQVEKEIDSFMRDSETNWLMSSSNLGLTGSCGETFRILIQFDNKSVYTIYISILKTNIELQYLLLTSLEVLLHPRTHQLISKI

SEQ ID NO: 5716 - protein, 419 aa, Trifolium pratense
MMKKAEVVIIPSPGVGHLVSTLEFAKLLINRNNHLRITILVIKLPHTTETDIYTKSLSNSNSLNIINLPECSLPTNSNLGSAMNAILEAQKQNVKQAVADLITEREDGVLAAFVVDLLTCSALTLLMLLENSPSLRLCSSLPLIQLTELAIPSFANSVPTKSLPSSVLHKEYESFFMNYAKGIKNADGIIVNSFEELESYAIHSFFSHPGLAGLPVYPVGPILNPEPTTKGVVDSDDIIQWLNDQPHSSVVFICFRSRGYMDEEQVNEIALAIENSGAHFVWSLRKPPPKGTMVEPSDYTLSDLGSVLPVGFLDRTAKTGRVIGWAPQAQILAHQATGGFVSHCGWNSILESIYFGVPVATWPLFADQQTNAFQLVGELKMAVEIALDYSVHLNGERDYLLTADKIERGIRNVLEKDGE

SEQ ID NO: 5717 - protein, 481 aa, Gardenia jasminoides
MGSISLPEKHHAVCIPYPAQGHINPMLKLAKILHHKGFHITFVNTEFNHKRLLKSRGPDALNGLPDFQFKTIPDGLPPSDVDATQDIPSLCESTTTRCLDPFRNLLAELNGPSSSQVPPVSCIVSDGVMSFTLEAAAELGVPEILFWTTSACGFLGYMHYAKLIEKGLTPLKDASYLSNGYLEQSLDWIPGMKDIRLKDLPSFLRTTNPDDYMVKFVLQETERAKKASAIILNTFQELEDDVINALSAILPPIYTIGPLQFLQKEVKDERLSVLGSNLWKEEPECLDWLDSKDPNSVVYVNFGSITVMTPGQLVEFAWGLANSKQTFLWIIRPDLVSGDSAILPPEFLEETKDRGLLASWCPQEQVLSHPAIGGFLTHSGWNSTLESICSGVPMICWPFFAEQQTNCWFCCTKWYNGLEIDNNVKRDEVESLVTELMVGEKGMDMKKKALEWKNKAEEAAKSSGGSSYSNLEKVVQVLLSK

SEQ ID NO: 5718 - protein, 478 aa, Vigna angularis
MGSSIEQHSLHIFFFPFLAYGHIIPTVDMAKLFAEKGVKATIITTPGNAPFISKAIGKAKTENEIQIQTINFSSAEVGLPDGLEITDSITNPYLIESFFIATSLLQEPLEQLLHKQRPNCVVADMFFPWATDSAAKFGIPRLVFHGTSLFSLCATTCMQLIDPNNDVSSDSESLTIPNLPGEIKIARTSLGSYGMGDRTSMIKLLREANESELRSHGVVVNTFYALEKDYADLYSKVLGRKAWHIGPLSLCNRDVEEKAHRGKEASVHEYECLKWLDTKKPNSVVYVCFGSTTLLSDSRLREIAIGLEASGQPFIWVVRKSKEDEVEWLPDGFERRMEGKGIIIRGWAPQVLILEHKATGAFVTHCGWNSTLESVTAGVPMITWPIYADQFFNEKLVTEVLKIGVPVGAKKWNGLEGDSVSWDAVEKAVKSIMTGEAAIVMRNSAKNLSKQARLAMEEGGSSDSDLIALIEELSSMTF

SEQ ID NO: 5719 - protein, 284 aa, Ricinus communis
MLDVLDLNNQMCVEYIRMGVEIQTADGILVNTWHDLEPKTLFALGDEMKLGWVSQVPVYPVGPLVRPANATLRSKVFDWLDMLSEKSVIYVSFGSGGTLSAKQTMEMVGDWTATVFKTGHRSDDTPDFLPDGFLTRTKRMGMVVPTWAPQTEILNHPAVGGFLSHSGWNSTLESIVSGLPMIAWPLYAEQRINAAMLTEDNGVAVQSKAKPLREVVSRDEIETMIREIMELKGGARRARLETLKLSAEKALRNGGLSHNSLAQVANDCKIKVLRNRTHEHDHLL

SEQ ID NO: 5720 - protein, 527 aa, Cephus cinctus
MKFQYFLMLIGITFLSECPSGDAYRILGLFPLHGKSHFIMCNYLMKTLAARGHQVDVVSHFPLEKPVANYTDINISGSLPQIVNNLPFDVIQQFSSIDLTYLTNIAGLDICRLMDHPEIQKIIRNPPQDPPYDLVIHEMFAAECYLAFGHHLKVPVVGIITSVLFPWLNEPMGNPSNPAFVPSPFSDFQLPMTFWQRVKNVFMENMMTYSFRKNTEIQNEIVKKHFGPDAPTVRELERNISLILVNSHFSFNNPRPLTPAVVEVGGLHLQGDDGLEFSPDLKKWLDEADDGFIFFSLGSMARFETFPREIIEVFYEAFRKVAPVRILMKIAKKEDLPAGVPENTMILPWLPQTKVLKHKNIKAFISHGGLGSVQESLYYGVPLIGMPLFGDQIINIDHCARKKLAVPIDYATVDQKILTEAISTILHDPTYRDNMKKVSKLFQDRPTNPLDLAVYWVEYVIRNGNVLRSPALDLEWWQVALIDVYAFFFSCVAVVVFLIAMILRLLYGKLLAPRSTAGNRDQGKKRQ

SEQ ID NO: 5721 - protein, 485 aa, Medicago truncatula
MSNFAERIKPHAVITPYPLQGHINPLLKLAKLLHLRGFHITFVNTEYNHKRLLKSRGPKAFDGFTDFTFETIPDGLTPIEGDGDVSQDIISLSDSIRKNFYHPFCELLARLKDSSNDGHIPPVSCLVSDIGLTFTIQAAEEHGLPSVLFSSASACSLLSALHFRTLIDKGVIPLKDESYLTNGYLDTKVDWIPGLGNFRLKDLPDFIRTTDPNDIMIKFIIEAADRVHEANSIVFNTSDELENDVINALSIKIPSIYAIGPLTSFLNQSPQNNLASIGSNLWKEDMKCLEWLESKEQGSVVYVNFGSITVMTPDQLLEFAWGLANSKKPFLWIIRPDLVIGGSVILSSDFVNETSDRGVIASWCPQEKVLNHPSVGGFLTHCGWNSTMESICAGVPMLCWPFFAEQPTNCRYICNEWEIGAEIDTNVKREEVEKLINELMVGDKGKKMRQKAMELKKKAEEDTRPGGCSYVNLEKVIKEVLLKQN

SEQ ID NO: 5722 - protein, 483 aa, Ricinus communis
MGSEANVPHIFFFPFMAHGHMIPTVDMAKLFASRGLKTTIVTTPLNESFISKPIQRTKNLGLEINIKILKFPTVEAGLPEGCENLDFITSQNMDMEIVNKFLKAIALLQEPLEKLLSACRPDCLVADMFFPWATEASSKFRIPRLVFHGTSFFSLCATISVVLHEPHKKVASDSEPFIVPNLPGDIKLSGQQLPGFMREDGSYVAKFMEASIKSELTSFGVLANSFYELEPTYADHYKNVLGRRAWHIGPVSLCNRDMEDKARRGKEASIDEHECLKWLNSKKPNSVVYLCFGTIANFTASQLKEIAMALESSGQEFIWVVRKNKNPEEDNQDWLPEGFEERIEGKGLIIRGWAPQVMILDHEALGGFVTHCGWNSTLEGIAAGVPMVTWPVGAEQFYNEKLVTEVLKIGVSVGVQHWTVYGDSIKRECIEKAIIRIMEGAEAEEMRSKTKKLGKMAREAVEDGGSSFCDFNALIHELTFNYH

SEQ ID NO: 5723 - protein, 232 aa, Hordeum vulgare
MGANSSSRHQHELMCKLLSRAVEAVRSSAGFVFNPFDALEADDLAATRRDLAGVPVFAVGPLHKLSPASSSSLLQQDRSCLDWLDAQAPASVLYISFGSLASMSGAALAKVAWGVANSGRPFLWALRRGLARDAAVPDGFAAATGDRGLVVGWSPQEEVLAHGAVSGFWTQGVELGAGGRVRGRADALPAMLRRRDGQREARGARVSRGHRAGRRRALAGSGGGGHSTVDAG

SEQ ID NO: 5724 - protein, 465 aa, Polygala tenuifolia
MGMDASNLKRTHVVAMPFPGRGHINPMMNFCKLLTSRQPNNLLITFVVTEEWLGYIGSDPKPSNVRFATIPNVLPTERLKAVDFPGFYEAVMTKMEAPFEQLLDGLEPSVNVIIGDIELRWPIGLGNRRNIPVAAFWTMSATFLTMLYHYGIFLSDRHLPVDFLGHDDQTTQIPGISSMHLVDLKTVIHETDKRVMELALECILEVRKTQCLVFTSVQELEDQEFNSLKVLFPFPVYSIGPCIPYLELDEKIPKLLTGDDRLCHLQWLDSQPVGSVLYISLGSFLSVSPAQMDEILVALNSVGIRFFWIARGEATRLKEKCGERGLIVPWCDQLKVLSHCSIGGFWSHCGWNSTLEAVFAGVPMLTFPLFLDQVPNSRQIVQEWKNGVELKRDKGSKQILLGKKEISERVKGFMEAQTTQGKKMRENARGLRNMCQRAIAEGGSSYRNLDSLITSFSEGNCQFNV

SEQ ID NO: 5725 - protein, 561 aa, Frankliniella occidentalis
MQHASPARATARQNVVVLVAALLLPLLLMQCVSSAAPEVKTTAAAPAAGAVPARKPLRILALMTFDTMSHHIWMSALTVELAKRGHLVTSIDIHKHSENPPTLNTTVIETAFQFIDQEYMKLFMASTVPGQISMLQDMGEIDCKRDLASPTMQRLLDPAFKGAFDPIIIDYHADCMLGFVHRFNYPGVLAVSAFPVAPWVDDLMHNPQVPSILAHTLQPFPHPMNLWQRAWTLYLHAHQKFLVWWRRPVENSLIKRFFGDDAPSVEQLRQHVHVALVNENPVLEAPRPLLPSQIPVGGMHVKPADLGRIPAGLLKWMDDSKDGFIFVSFGSVMKGKSIDPVKKRALVNSFAALAPLRVLWKIEPDAVAAEPVTANVRVEAWAPQNDLFGHPNLRLFVSHCGGLSVQEASYHGVPVLGTPFVVDQFVNLEKVVGVGMGRRMPFKDITTERFVGEINEMLTNPRYLKAARHTRTLIHDQKETPLERAVWWAEYVGRHRGAPHLRSPARDLYWHQVMMLDIAALLALAVLAVLLVAFLVVKYTVYFVRKGSQQHKTPLKRAKKD

SEQ ID NO: 5726 - protein, 462 aa, Glycine max
MTMKDSIVLYSALGRGHLVSMVELGKLILSHHPSLSITILFLTPPPNQDTPTSPTAFTCDATAKYIAAVTAATPSIAFHRIPQISIPTVLHPHALNFELCRATGHHLRRILNSISQTSNLKAIVLDFMNYSAARVTNTLQIPTYFYYTSGASTLAVFLQQIIIHENNTKSIKELIIPGLPKIHTDDLPEQGKDQVFIDIATCMRDSYGVIVNTFDAIESRVIEAFNEGLMEGTTPPVFCIGPVVSAPCRGDDNGCLSWLDSQPSHSVVFLSFGSMGRFSRTQLREIAIGLEKSEQRFLWVVRSEFEEGDSAEPPSLDELLPEGFLERTKEKGLVVRDWAPQAAILSHDSVGGFVTHCGWNSVLEAVCEGVPMVAWPLYAEQKLNRVILVEEMKVGLAVKQNKDGLVSSTELGDRVMELMDSDRGKEIRQRIFKMKISATEAMSEGGSSVVTLNRLVDIWREH

SEQ ID NO: 5727 - protein, 214 aa, Moniliophthora perniciosa
MEKQFGGKSVVYISFGSLWYPPEVDTVYAILDELIVEKVPFLFASASPLAQVPDEVKQRVRDSGIGLSVSWAPQERVLGHPATGWFLTHGGWNSVQEALAYKIPLIFWPMGGDQCLNAVLLTLKYKAGFELVEVRTGESGKKRPYRCGPDGPFPRFTVESARDEFRGVLKSIREEEGEVVRANFTRIAEQVAKVWDDGGEAREQLETLLKIFVD

SEQ ID NO: 5728 - protein, 457 aa, Antirrhinum majus
MGEEYKKTHTIVFHTSEEHLNSSIALAKFITKHHSSISITIISTAPAESSEVAKIINNPSITYRGLTAVALPENLTSNINKNPVELFFEIPRLQNANLREALLDISRKSDIKALIIDFFCNAAFEVSTSMNIPTYFDVSGGAFLLCTFLHHPTLHQTVRGDIADLNDSVEMPGFPLIHSSDLPMSLFYRKTNVYKHFLDTSLNMRKSSGILVNTFVALEFRAKEALSNGLYGPTPPLYLLSHTIAEPHDTKVLVNQHECLSWLDLQPSKSVIFLCFGRRGAFSAQQLKEIAIGLEKSGCRFLWLARISPEMDLNALLPEGFLSRTKGVGFVTNTWVPQKEVLSHDAVGGFVTHCGWSSVLEALSFGVPMIGWPLYAEQRINRVFMVEEIKVALPLDEEDGFVTAMELEKRVRELMESVKGKEVKRRVAELKISTKAAVSKGGSSLASLEKFINSVTR

SEQ ID NO: 5729 - protein, 470 aa, Solanum lycopersicum
MGQLHFFFFPMMAQGHMIPTLDMAKLVACRGVKATIITTPLNESVFSKAIERNKHLGIEIDIRLLKFPAKENDLPEDCERLDLVPSDDKLPNFLKAAAMMKDEFEELIGECRPDCLVSDMFLPWTTDSAAKFSIPRIVFHGTSYFALCVGDSIRRNKPFKNVSSDTETFVVPDLPHEIRLTRTQLSPFEQSDEETGMAPMIKAVRESDAKSYGVIFNSFYELESDYVEHYTKVVGRKNWAIGPLSLCNRDIEDKAERGRKSSIDEHACLKWLDSKKSSSIVYVCFGSTADFTTAQMQELAMGLEASGQDFIWVIRTGNEDWLPEGFEERTKEKGLIIRGWAPQVLILDHEAIGAFVTHCGWNSTLEGISAGVPMVTWPVFAEQFFNEKLVTEVMRSGAGVGSKQWKRTASEGVKREAIAKAIKRVMASEETEGFRSRAKEYKEMAREAIEEGGSSYNGWATLIQDITSYR

SEQ ID NO: 5730 - protein, 374 aa, Helianthus annuus
MFQLANLLYSKGFSITIFHTNFNKPKTSNYPHFTFRFILNNDPHDERYANLPLQGMRLFSRIILFNKCGADQLRHQLELELSAKDEPPVACLITDASWHFTQSVADSLNLPRLVLRTSSLFYFLIYASIPLLDDLGYFNLSDNTATPLLDGLGYNNVPDDEQWNFVCRVTTASSSLLDQDRSFFPWLDQQPRNSVVYISFGNVAQVEEKHFMEMVHGLVDSKHSFLWVVRLGFVSGSTWLEPLPDGFPGERGRIVKWAPQQEVLGHEAIGAFWTHSGWNSTVESVCEGVPMICSPFWGDQPLDARYVSDAWKVGVYLENGWKREEITNAIRRVMADEEMRERSRVLKQKLDASMIEGGSSYESVESLVDYISSF

SEQ ID NO: 5731 - protein, 477 aa, Rosa chinensis
MENTIVLYAAPGMGHMISMVELGKLILKHYSHKFSVTVLYTTGSMVDTPSIPAYIDRITQSHPSISFRRFPRASPTNHHDQTRSLAAVMFDFIRQNDPNVRCALQELSKTFRVRAFIIDLFCTSAMAIAKELNIPTFYFFTSGAAALGAFLYFPTIHARVNESFKDMTDTVFEFPGLGTPLRAVHMPEPMLDRNDPAYLDMVYFCSHLALSDGIIANTFEELETPTAIKAISEGRCVPDAPTPPVYYIGPLIDEEKTSSSAHSEEDCLLWLDKQPSRSVVYLCFGSRGSFSEAQVREIASGLERSGQRFLWVVKKPPVDNTKQSHGVDDFNLEALLPEGFLERTIDRGLVVKSWAPQVPVLNKEAVGGFVTHCGWNSVLESVIAGVPMVAWPLYAEQHLNRSVLVNDMKMAIDVEQREEDGFVTGDEVERRVRELMESKKGRELRERSLKIGEMALGALGELGSSRRALANFVNAIE

SEQ ID NO: 5732 - protein, 441 aa, Helianthus annuus
MYPTHNNHNSKMTSEVAVVMVPFVAQGHLNQLLHLSHLISAYNIPIHFISTATHIRQARIRLHGWNSHNNLIQFHELPDPDFISPHPNPNGTVSFPTHLQPVFNSSLRLRGPVADFVRSLAETSRRVAVVHDSAMSYVVQDVKFMSNVETYIFRALSVFYTYCSNLDRLRRELPFAPKMLPRLPSSDETMSGEFMEFVKLQYEHQTFHVGNIYDSSRVIEGTFLESLEREGICGKNHWAVGPFNPVEIQTDVSNSDRHASLKWLDKQPERSVVYVSFGTTTTFTVSQIRELAMGLEKSEQRFLWVVEGRGLVVREWAPQVEILGHLSVGGFVSHCGWNSCMEAMTCGVAVAAWPIHSDQPRNAFLFVEVLKVALMMREWACRDKLLTSVMVEKVVRRLMDTKEGAAIRKRAAEVGGELRRSLANGGISRKELDSLIAYIRR

SEQ ID NO: 5733 - protein, 518 aa, Unknown
  Description of Unknown: Oryza sativa Japonica Group sequence
MADTDHRRRGGATRAHVVLFPFMAQGHVAPFRCIAALVRRCRPDARLTVVATPGMAEAFRAHLVADGVGDGRLAGVHELPFLPAEHGLPAGADTSASIGFQQLITLFLASESLRPAFRRFVDDLRAANPGDDIHVMADMFLGWAVDVARDAGASSSIVLTCGGYGSALYFSLWDSVPLPATASPDDGFPLPRFPDVRVQRSQLTNHLAAADGKDAWSTFIQRQIAAFSRADALLVNTAENLEPKGLSMLRQWLNVPTYPVGPLLRAPAPSPEAKKTSPILEWLDEQPPGSVLYISFGSLYRITAPQMMELARGLEQSSHRFVWVIRPPAGNDANGEFSPEWLPEGFRERAEAEGRGLVVRCWAPQVEILAHTATGAFLTHCGWNSVQEALGHGVPLLGWPLSAEQFYNSKLLAEEMVCVEVARGSAAVDAAKVAAAVEAVLGETSMERAAMKRRAAEMKEAIDAARDGDKSSVTVMRRFLDEVLPPRGAQFMASWALQSACFRDGAMSHQLRSSHPMM

SEQ ID NO: 5734 - protein, 308 aa, Helianthus annuus
MDYITNGYLETSLDWIPGMNNIRLRDFPSFIRTTDINDILLNYIMTQAEALPRGSAVVLNTFDALEQDSVKPLTARNPRIITVGPLHLMQQHLHDEGVKQVGSNLWKEDASCIHWLDTKDDGSVVFVNFGSITVMTKEQLIEFGWGLANSKKDFLWITRPDIVGGNEVVMPPEFLDETKGRGMITSWCPQEQVLKHPAIGGFLTHSGWNSTLESISSGVPVLCWPFFAEQQTNCRYSCVEWEIGMEIDTNVKRKDVEAQVRELIDGGKGKMMKAKVLELQKKAKEAVVNGGSSYLNFNKLVTEFLLKN

SEQ ID NO: 5735 - protein, 480 aa, Helianthus annuus
MGSTEANQPHVVCIPLPAQGHINPMLKLAKILHSKGFFITFVITEYNYQRLLGSLGSDALPDLPSFHFDTISDGLPPPENPDVGHDVVTTLKSLHENSLGPFKSVLSKVSTLYSPVTCIVADFIMSFTLSAAEELGIPAIPFWTSGAGSLVCYDHYPNLIQKGLMPLKDQTYLEDGYLDTTIDFIPTMTGIRLKDIPPFVRVVNPGDEFMVGFSQGEIERAKSAPAIIFNTFDDLECDILDVLSLKLPFCYGIGPLSLLENNISDKSLDSIKSNMWVEDPSCLKWLDAKEPLSVIYVNFGSVAVMTPQQLVEFCWGLAKSNNSFLWIIRPDLVIGDSAVLPPEFLAETSNRGLLASWCPQEQVLNHPSIGGFLTHSGWNSTIESISSGVPMICWPFFADQQPNCWWSCNKWMIAMEIDNNVKSDEVSKLVIELMSGERGNEMRKNAIAWKNKAKEACTFPSGSSVINLDKLIHLLQTSPK

SEQ ID NO: 5736 - protein, 482 aa, Gentiana triflora
MDQLHVFFFPFLANGHILPTIDMAKLFSSRGVKATLITTHNNSAIFLKAINRSKILGFDISVLTIKFPSAEFGLPEGYETADQARSIDMMDEFFRACILLQEPLEELLKEHRPQALVADLFFYWANDAAAKFGIPRLLFHGSSSFAMIAAESVRRNKPYKNLSSDSDPFVVPDIPDKIILTKSQVPTPDETEENNTHITEMWKNISESENDCYGVIVNSFYELEPDYVDYCKNVLGRRAWHIGPLSLCNNEGEDVAERGKKSDIDAHECLNWLDSKNPDSVVYVCFGSMANFNAAQLHELAMGLEESGQEFIWVVRTCVDEEDESKWFPDGFEKRVQENNKGLIIKGWAPQVLILEHEAVGAFVSHCGWNSTLEGICGGVAMVTWPLFAEQFYNEKLMTDILRTGVSVGSLQWSRVTTSAVVVKRESISKAVRRLMAEEEGVDIRNRAKALKEKAKKAVEGGGSSYSDLSALLVELSSYPHN

SEQ ID NO: 5737 - protein, 495 aa, Barbarea vulgaris
MVSEITHKSYPLHFVLFPFMAQGHMIPMVDIARLLAQRGVKITIVTTPHNAARFENVLSRAIESGLPISIVQVKLPSQEAGLPEGNETFDSLVSMELLVPFFKAVNMLEEPVQKLFEEMSPQPSCIISDFCLPYTSKIAKKFNIPKILFHGMCCFCLLCMHVLRKNREILENLKSDKEHFVVPYFPDRVEFTRPQVPMATYVPGEWHEIKEDIVEADKTSYGVIVNTYQELEPAYANDYKEARSGKAWTIGPVSLCNKVGADKAERGNKADIDQDECLKWLDSKEEGSVLYVCLGSICSLPLSQLKELGLGLEESQRPFIWVVRGWEKNKELLEWFSESGFEERVKDRGLLIKGWSPQMLILAHHSVGGFLTHCGWNSTLEGITSGIPLLTWPLFGDQFCNQKLVVQVLKVGVSAGVEEVTNWGEEEKIGVLVDKEGVKKAVEELMGESDDAKERRKRVKELGQLAQKAVEEGGSSHSNITSLLEDIMQLAQSNN

SEQ ID NO: 5738 - protein, 435 aa, Citrus unshiu
MQPRKQVLECLPPTSISTIFLPPVSFDDLPDHEDVSIEVRITLTLTRSLSSLRETLNNLTTDQSTRLVALVVDLFGLEAFTVTREFGVPIYVFFSTTAMDLSLVFYLPELDHKFTCDFKDLPEPVQLPGCVPICGPDLEDCLQERNNETYQSIIHLAKQYPLAAGILVNSFMDLEPGAFKALMESRESSFRLPPVYPVGPLILTGSINESDKTDCLKWLDDQPNGSVLFVCFGSGGTLSQKQLNELALGLEMSGQRFLWVVKCPDEKATNATYFGVHGMKEENPFDYLPKGFLDRTKGVGLVVPSWTPQIQVLSHGSTGGFLSHCGWNSVLESIVHGVPIIAWPLYAEQKMNAVLLTDDLKVAWRVKVNEDGLVGREEVATYARGLIQGEDGKLLRDKMRVLKDAAANALSPDGFSTKSLANVAQKWKNLENDTN

SEQ ID NO: 5739 - protein, 464 aa, Arabidopsis thaliana
MEERKVKRIIMFPLPFTGHFNPMIELAGIFHNRGFSVTILHTSFNFPDPSRHPQFTFRTITHKNEGEEDPLSQSETSSGKDLVVLISLLKQYYTEPSLAEEVGEGGTVCCLVSDALWGRNTEIVAKEIGVCTMVMRTSGAATFCAYTAFPLLIDKGYLPIQGSRLDELVTELPPLKVKDLPVIKTKEPEGLNRILNDMVEGAKLSSGVVWNTFEDLERHSLMDCRSKLQVPLFPIGPFHKHRTDLPPKPKNKDKDDDEILTDWLNKQAPQSVVYVSFGSLAAIEENEFFEIAWGLRNSELPFLWVVRPGMVRGTEWLESLPCGFLENIGHQGKIVKWVNQLETLAHPAVGAFWTHCGWNSTIESICEGVPMICTPCFSDQHVNARYIVDVWRVGMMLERCKMERTEIEKVVTSVMMENGAGLTEMCLELKEKANVCLSEDGSSSKYLDKLVSHVLSFDSSAFAS

SEQ ID NO: 5740 - protein, 485 aa, Citrus unshiu
MKKAQLVFIPSPGAGHLVSTVEVARLLVDRDDRLSVTVLIMKLPHDNTVAAYTQSLAASNLSSRIKFINLPDDQPDKESTPPKRFFGHFVESKKPHVKEVVANLTDESPDSPRLAGFVLDMFCTCMIEVADEFKVPSYLFFTSGAAFLGFMLRVQALHDEENTTITELKDSDAVLEVPGLVNSVPAKVWPSVVFNKEWAEVLNQQARTFRGTKGIMVNTFEELESHAVRSFSDGKSKTPPLYPMGPILNIKGENYDLGEGGADKKADIMAWLDDQPESSVVFLCFGSWGSFGEDQVKEIACALEQSGHRFLWSLRRPPSKDTFEKPSDYEDPTEVLPEGFMDRTANIGKVIGWAPQIAVLAHPAIGGFVSHCGWNSTLESIWFGVPIATWPMYAEQQFNAFELVVELGLAVEIKMDYRKDILMENPTVVNAEEIERGIRCLMEHNSEMRKRVKEMSEKARKALSDGGSSFSSMGRLIDDFLDNIA

SEQ ID NO: 5741 - protein, 471 aa, Panicum hallii
MASVHEARTGGGGDAGGRKSRRPRRVLVFPLPFQGHINPMLQLADALHARGLAVTVLHTHFNALDPARRPEFRFVPVPDGVPAGVAASGDAIDILHAMNAGMEAEESAALRGVLESVLADEEKTPAACIVFDANLLAVPRAAAAVGLKTVVLRTASAACLGCFMAYPMLHQKGYLPPQESKMYMPVKELPPLRVRDLFYSSWSDQEKMRNLLARAMEAVNNSSGLVINTFDALEPAELERIRDELRIPMVLAPGPLHKLSSKNTASSLLDEDCDCIKWLDKQPPKSVLYVSFGSLASLDPNEFLEVAWGLATSGHPFLWVVRPDSVRGLDGPGFPNGFEAAVEGRGKVIRWAPQQEVLAHRAVGGFWTHNGWNSTLESISEGVPMICRPQFADQMMNTRYVEKTWGVGFELEGELERGKIEKAIRKLMEEREGAEMRERAMELKMKVADCLKPGGSSEIAIDKLVRHILSL

SEQ ID NO: 5742 - protein, 491 aa, Unknown
  Description of Unknown: Citrus x paradisi sequence
MDTQANQLHFVLFPFLAQGHMIPMIDIARLLAQRGVIITIVTTPVNAARFNGILSRAIESGLQIKIVQFQLPCEEAGLPEGCENLDMVASLGLAFDFFTAADMLQEPVENVFAQLKPRPNCIISDMCLPYTAHIAGKFNIPRITLHGTCCFCLVCYNNLFTSKVFESVSSESEYLVVPCLPDKIEFTTQQVDSSLGSRFNVFQKKMGAADTGTYGVIVNSFEELEPAYIKEYKKIRHDKVWCIGPVSLSNKEYSDKAQRGNKASVDEHQCLKWLDSKAPKSVVYACLGSLCNLIPSQMRELGLGLEASNRPFIWVIREGETSKELKKWVVEDGFEERIKGRGLVIWGWAPQVLILSHPSIGGFSTHCGWNSTLEGVSAGLPLLTWPLFGDQFMNEVFVVQILKIGVKVGVESPMIWGEEQKIGVLMKRDDVRNAVEKLMDEGKEGEERRNRAVKLGQMANMAVQEGGSSHLNVTLVIQDIMKHVHSSSQAN

SEQ ID NO: 5743 - protein, 406 aa, Ricinus communis
MHSDPSCPIDIETISDGFDEGGSAQAESIEVYLSTLRIVGAKSLANLIKKLNESDCPVTAIIYDGFMPWALDVAKQYGILAVAFLTQACAVNNAYYHVQRSFLPVPVSSPTVSLPGLPMLQVSELPSLISDCGSYPGFRYLLVDQFRNIDGADWVLCNTFYRLEEEVVDWMAKSWRLGTIGPTVPSRYLDKRLEDDKDYGINLFKPDSSTCMNWLKTKPSSSVVYVSFGSMVELGTEQIEELALGLKGSNCYFLWVVRTSERSKLPENFIEETSEKGLVVSWCPQLEILAQEVIGCFVTHCGFNSILEALSLGVPIVAMPQWTDQPTNAKYVEDVWKVGIRARRNEKGIVRRETVELCIREVMEGQKGKEIKKNANKWKELAKEAIDEGGTSDKNIDELVTKLSSS

SEQ ID NO: 5744 - protein, 278 aa, Unknown
  Description of Unknown: Oryza sativa Japonica Group sequence
MSVAKRCSLAMERCTLAAMRSCPEWEPDAFQQVAAGLKNKPLIPLGLVPPSPDGGRRRAGMTDNSTMRWLDVQPAKSVVYVALGSEVPLPLEQVHELALGLELAGTRFLWALRKPHGVDLSDVLPPGYQERTKSHGHVAMGWVPQITILAHAAVGAFLTHCGRNSLVEGLLFGNPLIMLPIFGDQGPNARLMEGNKVGSQVRRDDMDGSFDRHGVAAAVRAVMVEEETRRVFVANAIRLQELVADKELHERYIDEFIQQLVSHGADGSCNTAAPVPSS

SEQ ID NO: 5745 - protein, 505 aa, Brachypodium distachyon
MPAMAREEKVAETKAKAKPAPPHYLVVTFPAQGHISPARHLAQRLLRATPGSRVTLSTAVSACRKMFPENNAAEVELVDGAGIHYAAYSDGHDEGFDREKGDNAAYMRALRLVGAQTLDALLGRFRDEGRPVTRIVYTLLLSWVAAVARAHGVPSALYWIQPATVLAAYFHYLRRTDGVDKAIADAARAGDLWAEVQIPGITAQLRVRDLPSFLISGAVVDDPASSDDPYVMVLAEFLEDLAALAREDDPKVLVNTFDAMEPDAVATLREHGLGVVPVGPLLSFLDAGLGTPAPASNNDLFQQDGKDYMAWLDAQQEGSVVYISFGSLSVMSERQVAEIARGMADSGRPFLWVLRKDNRAGAGIDVDGISEKGGNGMVVEWCEQGKVLGHAAVGCFVTHCGWNSTVESVACGVPAVGVPQWTDQGTNAWLLERIGVGVRAAVSEDDGVLEAEELQRCLAFAASEPVRAQAALWRDKARAAAAQGGSSEKNLRAFMEQAIAPGGGN

SEQ ID NO: 5746 - protein, 480 aa, Helianthus annuus
MGLDQEKKPHALCIPIPVQGHITPMLKLAKILHSKGFLITFVNTEFNHQRLLRSQGPDAVHGLPSFQFETIPDGLPPAQNLDATQEASILARAIEENFLGPFKTLVTKVNASYSPVTCIVADMLMGFTFAVASELGIPEFLLWTAGAGSLLCFDQYPYLLEKGLMPLKDSSYLLNGYLDTVLDTIPTMHGIRLKNIPPWITYINPGDEYMAQYFCLQLERAKAASAIFFNTFDELDRDILDAISAKFGPSYGIGPLNLLENKIVDNSVASFKSNLWKEEPECLKWLDLKEPSSVIYVNFGSITVMTSQQLVEFGWGLAKSNYPFLWIIRPDLVTGESAVLPPELLMEVGGRGLLAGWCPQDQVLSHPSIGGFLTHSGWNSTIESISSGVPMICWPFFADQQPNCWLGCNKWGIAMEIDNNVKSDEVQKLVIELMKGEKGNLMRKKVDELKKKAKEACAFPSGSSVVNLEKIINLMQTSSK

SEQ ID NO: 5747 - protein, 485 aa, Unknown
  Description of Unknown: Oryza sativa Japonica Group sequence
MAAAAAAAADHDAAPRAHALILPYPAQGHVIPLMELAYCLIDRGFAVTFVNTEHNHRRVVAAAAGAGGVQAPGSRARRLRLVAVADGMGDGDDRDNLVRLNAVMEEAIPPQLEPILDGAGGEGQLGKVTCVVVDVGMSWALDAVKRRGLPGAALWAASAAVLAVLLGAQKLIRDGVIDDDGAPLKLENNSFRLSEFTPPMDATFLAWNFMGNRDAERMVFHYLTSSARAAAAKADILLCNSFVELEPAIFTLKSPATILPIGPLRTGQRFAHQVEVVGHFWQTNDDTCLSFLDEQPYGSVVYVAFGSLTIMSPGQLKELALGLEASGHPFLWVVRPGLAGNLPTSFLDATMGQGKGIVVEWAPQEQVLAHPAVGCFVTHCGWNSTVESIRNGVPMLCWPYFTDQFTNQIYICDIWRIGLKMVQTCGEGIVTKEIMVERLKELLLDEGIKERVQRLKEFAETNMSEEGESTSNLNAVVELMTRPMS

SEQ ID NO: 5748 - protein, 484 aa, Brachypodium distachyon
MRQSDDDAVAAPRMYFIPFPTPGHALPMSDLARLFASRGADATLVLTHGNAARLGAPVARAAAAGLRIRIHGLTLPADAAGLKGGHESADDLPTREAAGPFAVAVDLLAPLFADLLRSQPADAVVFDGVLPWAATAAPELGIPRYAFTGTGCFALSVQRSLLLHSPQEAVGSSEHEPFLVPGLPDEVRLTRSRLAEATLPGAVSREFLNRMFDGERATAGWVVNSFSGLEERYVAHYERETRKPVFAVGPVCLINSDGDDALDRGGRRGEAAARVLRWLDGKPARSVVYACFGSLTRFPREQVAELGAGLANSGASFVWVVGEHTDMAALVPEDEERGLVVRGWAPQVAILRHAAVRCFVTHCGWGAVTEAAAAGVPVVAWPVFAEQFYNEALVVGVVGTGVGAGAERGYVWGAEETGGVVVGRETLAEKVRAAMADEGLRRRAGEMGERARRAVEDGGSSYQAVGALLEDVRRRRRSRGGRGG

SEQ ID NO: 5749 - protein, 482 aa, Vitis vinifera
MGNETDQLHVLFFPFMALGHMIPTIDMAKLFSARGVRATIITTPLNAPVVSKTMERGHYLGAQIGLRVIQFPSVQAGLPQGLENLDQDASPEIRLKFFLAMSLFQQPLEQLLQEYRPHGLVADAFFPWALDVASKFGIPRLAFQGTGFFAMCALQSLTAHKPYKGVGSDTEPFLLPDLPDEIKLTRLQISNDLTLGLENDFTRFFKEARESEERSYGTIVNTFYELEPAYAEHWRKVLGRKAWHIGPVSLCNRDAQDKTQRGKAASIDEDECLKWLNSKYPDSVIYVCFGSVSKFPAAQLLEIAMGLEASGQQFIWVVRKNKDEGDEEEWLPQGYEKRMEGKGLIIRGWAPQTLILDHEAVGGFVTHCGWNSTLEGVSAGVPMVTWPVFADQFYNEKLLTDVLKIGIGVGAQRWVPFVGDFVKQDAIEKAVKAVMAGEKAEELRSRAKSLGGMARRAIEKGGSSYTDMDALIEELKLYHAQI

SEQ ID NO: 5750 - protein, 241 aa, Manihot esculenta
CNKLKLDKAERGDKASVDNTELLKWLDLWEPGSVIYACLGSISGLTSWQLAELGLGLESTNQPFIWVIREGEKSEGLEKWILEEGYEERKRKREDFWIRGWSPQVLILSHPAIGAFFTHCGWNSTLEGISAGVPIVACPLFAEQFYNEKLVVEVLGIGVSVGVEAAVTWGLEDKCGAVMKKEQVKKAIEIVMDKGKEGEERRRRAREIGEMAKRTIEEGGSSYLDMEMLIQYVSERSPSRA

SEQ ID NO: 5751 - protein, 482 aa, Cyclamen persicum
MERAELAFIPIPGAGHLVPMVELAKALTTRDERISVTVFIMEVPFQSKLNSYTQSLLSNPPPSRVRFVHLTLDEPTTEDIRSKPGSFWLLDLIQINKSRVKDFYSSDSTRYELAAFVVDMFCSQFAEVASEFGVPDYVFFTSNAYFLSLMFYLQAIQDYQNRDIAEFKDSDVELSIPGFMNPVPTKVLPHVAFDKEKGGALFFVDVPRKLRKTKGILANTFEEFESYTIKCLAEDDKVPPIYTIGPVLNLKAETSNDQKDLVQYEEIMAWLDCQPSTSVVFLCFGSMGTFEAEQVVEIATALEHSGHRFLWSLRRPPPEGKKEPPSDYENLSDVLPEGFLDRTKEVGKVIGWAPQTAVLSHPAVGGFISHCGWNSIMESLWFGVPIATWPLYAEQQINAFEMVKELQLAVEISLDYKKENHAILTAEEIERGIKQLMDGNESVEIKKKVKAMSEKSRSAVEEGGSSYAAVGRFIEEVLNRSS

SEQ ID NO: 5752 - protein, 487 aa, Arabidopsis thaliana
MKITKPHVAMFASPGMGHIIPVIELGKRLAGSHGFDVTIFVLETDAASAQSQFLNSPGCDAALVDIVGLPTPDISGLVDPSAFFGIKLLVMMRETIPTIRSKIEEMQHKPTALIVDLFGLDAIPLGGEFNMLTYIFIASNARFLAVALFFPTLDKDMEEEHIIKKQPMVMPGCEPVRFEDTLETFLDPNSQLYREFVPFGSVFPTCDGIIVNTWDDMEPKTLKSLQDPKLLGRIAGVPVYPIGPLSRPVDPSKTNHPVLDWLNKQPDESVLYISFGSGGSLSAKQLTELAWGLEMSQQRFVWVVRPPVDGSACSAYLSANSGKIRDGTPDYLPEGFVSRTHERGFMVSSWAPQAEILAHQAVGGFLTHCGWNSILESVVGGVPMIAWPLFAEQMMNATLLNEELGVAVRSKKLPSEGVITRAEIEALVRKIMVEEEGAEMRKKIKKLKETAAESLSCDGGVAHESLSRIADESEHLLERVRCMARGA

SEQ ID NO: 5753 - protein, 459 aa, Helianthus annuus
MENTFAELVFIPAPAVGHIMSAMEMAKVLVNRHQSLSVTVFLMNPPLSMLALSTYIESLAKKAIERIRFIKLPQDQTPPKLDSKAPLMSFYEFINSHCKYVKNILEEMINQSSSRRVVGLVADWFCTGMIDVANEFNLPSYVYFTSSAAFLGFKLHFETLYVDQKQDLLELANSENGLDFLICAIGSMRKAKGILINTFLELETHAINWFSGTNFPPVYPVGPLLNLDSVAGKADDTNVFRWLDSQPWASVVLLCFGSMGCFDEAQLKEIARGLERSGHRFVWSVRRPPPQEKSFEVLQDDYDDPRVVLPDGFLERTSGVGKVIGWARRVSLLANEAVGGFVSHCGWNSMIESLWFGVPTTTLPIYCEQQMNAFEMVVDLGLAVDLKLDYKINVINPEGDTVIVMAEEIERGIRSVMEDNEMRAKVKEMSNMSRATVVEGGSSYTSVGYLIKDMMRNII

SEQ ID NO: 5754 - protein, 479 aa, Unknown
  Description of Unknown: Oryza sativa Japonica Group sequence
MAAAAAAADSPCSRAVRHDAQLPHVAIFPFMARGHTVPPIHLAHLLRHRGLAAVTLFTTPANAPFVRRVLDDDAVAVAELPFPDHLPGVPPGVECLDGLSSFPAFVEAVSALRPRLEACLAAARPRVGLLVADALLYWAHDAAAALGVPTVAFYATSMFAHVIRDVILRDNPAAALVAGGAGSTFAVPEFPHVRLTLADIPMDAKMANAIAGSHGLIVNTFDAMEGHYIEHWDRHHVGHRAWPVGPLCLARQPCHVAGDGAGAVKPSWLQWLDEKAAAGRAVLYVALGTLIAVQEAQLRELAGGLEASGVDFLWVVRPSDADVGAGFEERVEGRGLVVREWVDQWRILRHGCVKGFLSHCGWNAVVEGVAAGVPLATWPMGVEQPLHATLAVDELRIGVRVPAAATTGHGVVSGEEIARVARELMGMDGEGENGAGGEAARNAAALAAKAREAVAEGGSSWKTLEEMLAVVCLPTDPSE

SEQ ID NO: 5755 - protein, 489 aa, Polygala tenuifolia
MGSLENTNKPHAVCIPYPAQGHINPMLKLAKILYSRGFHITFVNTEFNHRRLLKSRGPDALNGFPSFRFETIPDGLPYSDADATQDVPSLCYSTSHNCLAPFKKLLHKLNQQSESSDVPPVTCIVSDGVMSFTVDAAEELGLPVVLFWTPSACGFMSYLHYSHLIEKGLVPLKEMSQISDGYMDSVVNWIPGMKDMRLRDIPSFIRTTDINDVMLNYILGECSRAPRASAIVMNTFDDLENDILKSFSCVLSPPVYSIGPLQLLLNQVEDNVELKSLAANLWKEEPECLDWLETKEPNSVVYVNFGSITTMTNEQLVEFAWGLANSRKPFLWVIRPDLVGGDTAVVPAEFVTETKDRGLLASWCPQEQVLKHSAVGGFLTHNGWNSTLESICGGVPMLCWPFFAEQQTNCRYCCTEWGIGMEIEGDVKRDGVEDLVRELMDGPKGKEMRIKATEWKTLANQSVQGPNPTSCKNLNDVISKFLLSARNDN

SEQ ID NO: 5756 - protein, 492 aa, Ricinus communis
MAPRRENIVMFPFMAQGHIIPFLALAFHIEQTKKYKITFVNTPLNIKKLKSSLPPNSSIRLLEIPFDSCDHGLPPNTENTDVLSYPRIIQLLHASTSLEPAFKKLILDITNEQEGEPPLCIIADIFFGWTATVAKELGVFHAIFSGAGGFGLAVYYSVWSSLPHRNAKSDEFELQDFQEVSKLHLTQLPLSILEADGTDSWSVFQRKNLSAWFDSNGILFNTVQEFDHVGLSYFRRKLGRPAWAVGPVLLSMENRNRGGKEAGISPDLCKEWLDNKPVSSVLYVSFGSHNTISPSQMMQLALGLEASGRNFIWVVRPPIGFDINSEFRVKEWLPEGFEERIKESGKGLLVHKWASQVEILSHKSTCAFLSHCGWNSVLESLNNGVPLIGWAMAGEQFFNVKFLEEELGVCVEVARGKTCEVRYEDIKDKIELVMSETGKGEEIKRKALEVKEMIKNAMKEENGIKGSSLKALEDFFQAAMSIGEKTDKNFTY

SEQ ID NO: 5757 - protein, 468 aa, Medicago truncatula
MEKTVHIAVVPGVGYGHLFPILQFSKLLVQLHPYFHVTCFIPSIESLPTDSKTIIQTLPSNINCTFLPSVSSKDLPQGIALVLQIQLTVIHSLPSIHQALKSLTLRTPFVALVVDSLAIDALDFAKEFNMLSYVYFPSSVTSLSSYFYLLKLNKETSCQYKDLLEPIQIPGCVPIHGQDLVDQAQDRSSQSYKFLLERVEKFRLFDGILINSFLEIEKGPIEALTEDRSGNPDVYAVGPIIQTPTKSGDDDNGLKCLAWLDKQQTCSVLYVSFGSGGTLSQEQINELALGLELSNHKFLWVVRSPSNTANAAYLSASDVDPLQFLPSGFLERKKEQGMVIPSWAPQIQILRHSSVGGFLTHCGWNSTLESVLHGVPLITWPLFAEQRTNAVLLSEGLKVGLRPKINQNGIVEKVQIAELIKCLMEGEEGGKLRKNMKELKESANSAHKDDGSFTKTLSQLALKWRNLV

SEQ ID NO: 5758 - protein, 466 aa, Ricinus communis
MAKNLHVMILPWSAFGHLIPFFQLSIALAKAGVSVSFVSTPNNIRRLPKIPQNLETLIKLVEIPLPTLESQSLPIGAEATVDLPSDKIDHLKIAYDLLQYPLKQYVMDQQLDWIIIDVIPHWMVEIAVEMKIPLMHFSVYSASAYLFLCDPGCLAGDNMRTSWESMTSPAERINFPSSVAYRKHEAIGAFEGIYGTNASGITDAERVAKILNSCQAIAIRSCTEFEIDSLNSFQKLMGKPVVPVGLLPLEKPKAREITDGSWGEVFKWLDQQKTKSVVFVSFGSEFKLSQEQVYEIAYGLELSGLPFLWALRKPSWANHGFDVLPSGFRERTSGKGVVSIGWAPQMEILGHRAIGGSLFHSGWGSIIETLQFGHSLVLLPFIIDQPLNARLLVEKELGVEVERSEDGSFNRDGVANALRLAMVSEEGKKLRAGASEAAQVFGNNNLHQDYYIEKFVEFLRNKDYQN

SEQ ID NO: 5759 - protein, 480 aa, Cephalotus follicularis
MEVSKPHAILLSSPGMGHLIPMLELGKRLVTLHSFEVTIFVVSSGTSPAESQTIQSSMSPKLCQVIELPPVDISSLVESKAKVVANLTVMMREIKPALRSAISTLKVPPTALIVDLFGTEALVIAHEFKIPKYVFIPTHAWFIAFSIYVPILDKVVKGEYVDQKEDFVIPGCRPARPEDVVEPMLDRTNQQYYEYLRMCKEFTMGDGILLNTWEELESSTLAALRDDKLFGDINRPPIYPVGPILRPNGSAGSRSHELFDWLDRQPSESVVYVSFGSGGTLSNEQMTELAWGLELSQRRFIWAVRQSTVRTGDGSFFITGKGGDDLSSNLPEGFLIRTQGLGVVVRDWAPQVDILSHPSVGGFLSHCGWNSALESVTNGVPMIAWPLYAEQRLNAALLTEELGVAVRSKILPSKGIVGREEINMTVRRIMADEEGHGIRARVKELKHKAEEALSEGGSSYHSLSQFTQNILMSMQKSPSP

SEQ ID NO: 5760 - protein, 471 aa, Cephalotus follicularis
MAHGHMIPSLDMAKLFASQGVKATIITTPLNVPFFSKSIQRASDHLGIDIDIRTLKFPAAEAGLPEGCENADAITSNEQAMGLLMKFLPATAMLQEPLEHLLQECRPDCLVADMFFPWATDAAAKFGIPRLVFHGTGFFAFCAAECIRLYEPHKKVSSDSDPFVVPNLPGDIKLTIRQLPTSFINQDNRNGLTRLLEEARESELKSFGVVVNSFYELEQAYADHFRQVMGRKAWHIGPLSLCNREIEDKAERGKEASIDERECLKWLDSKKPMSVVYVCFGSVANFISAQLMEIAVGLEASGQPFIWVVRRDKNDKGNEDWLPEGFEKRVEGKGLIIRGWAPQVLILDHEATGGFVTHCGWNSTLEAVSAGVPMVTWPVSAEQFYNEKLVTQVLENGVAVGVQRWVRFVGDFVESEKIEKAVKEVMVGDKAEEVRSRAKALADMAKRAIDKGGSSYSSLQALIEELSQSRH

SEQ ID NO: 5761 - protein, 798 aa, Helianthus annuus
MGSEESSEHNQLHFLVVPIGSPGHYIPIIDIAKLLAQHGVRVTIISTPVNTRRYGSVLDQAIQSGLPIRFIEFPFPYAEFGLPEGCESVDDLPNYALIPALTNAYNSLQQEVEHYIEKLDRMPDCIVADSFILWPGDTAKKFQIPRVIFDSMNCFTQMCNHVLYQSKVYENAGEDSFVVPGLPDRFELKRSQLPSTLNPNLKYTNDYYEKLRVSESEAYGVVVNSFEELEQAYVDEFKKLRGGKVWCIGPLSLCHNDESEKVQRGNKSSISKHECLEWLDSQETGSVIYVCLGSISRVEPEQLIELALGLESSNKPFIWVIRAGPNTKKVEQWIDEQGYAERTKDRALLIHGWAPQLLVLSHPAIGGFLTHSGWNSAFEGVAVGVPLITLPLFQEQFYNEKQIVQVLRTGVSVRDQHKSGMAIKSDDVKKVIEMVIEGGEDIRKRAKELGDTTKKFQIPRVIFDGMSCFTQMCNHVLYQSKVYENVGEDSFVVPGLPDRFELKRSQLPSALNPNLKYANDFFEKLRVSESEAYGVVVNSFEELEQAYVDEFKKVRGGKVWCIGPLSLCHNDESEKVQRGNKSSISKHECLEWLDSQESGSVIYVCLGSISRVEPEQLIELALGLESSNKPFIWVIRAGPNTKKVEQWIDEQGYAERTKDRALLIHGWAPQLLVLSHHAIGGFLTHSGWNSTFEGVSVGVPLITLPLFQEQFYNEKQIVQVLRIGVSVRDQKVGEHKSGMAIKSEDVKKAIEMVIEGGEDIRKRAKELGKMARNAVEEGGSSYRNMTRLIEDIKNYART

SEQ ID NO: 5762 - protein, 481 aa, Unknown
  Description of Unknown: Oryza sativa Japonica Group sequence
MAGPTIVLLPAWGSGHFMSALEAGKRLLVAGGGAVSLTVLVMQAPTEIEASVVEAHVRREAASGLDVTFRRLPAVEHPTGCEATEEFMSRYVERHAHHVKAAIAGLASPVAAVVVDLFFTPLLDAAHELSLPAYVYFASTAAFLALMLRLPELRDDLTVGFDGMEGTVDVPGLPPVPPSYMPVCLVSKTVKNYDWFEYHGRRFTEAKGIIVNSSVELEGAVLAAIADGRRPAPAIHAIGPVIWFDATLPPEQPHECVRWLDAQPAASVVFLCFGSIGFLDAAQVRELAAGLERSGHRFLWVLRGAPAGGVRYPTDADPGELLPEGFLEATAGRGMVWPRWAPQKDILGHAAVGGFVTHCGWNSVLESLWFGVPMATWPLYGEQHLNAFEAVASMGVAVELRRTTAKDGDAARSLVEAAEVERAVRRLMAPQGGGSSEAREKAAEVSAACRKAVEEGGSSHAALQRLVREIVRVVAGHTRPE

SEQ ID NO: 5763 - protein, 477 aa, Consolida orientalis
MASSSPKTPHIVCVPAPAQGHINPMFKLAKLFHSRGFYITFVHSEFSYQRLLQASALDHLKGLNNFRFETIPDGLPPENKRGVSDVPELCKSMRNTCADPFRSLILKLNSSSDVPPVTCIVADVAMDFTLQVSEELGPPVVLFFTLSGCGVLGYMHYGELLERGYFPLREESFLSNGYLDTEIDWIPAMKGIRLKDLPSFLRTTDPDDIMFNCKIIEVNSAFKAKGVILNTFDDLEQEVLDAIKSKIPQLYTIGPLSMLCDHMLQPDSKLCEASLWEEDTSCLEWLQEKDPKSVLYVNIGSLATMTSQQLGEFAWGLANSMCPFLWVIRPDILDRASGIVSEDYKKEIGGRGLLVSWCQQEKVLKHPSIGGFLTHCGWNSTLESLCEGVPMICWPFFAEQQTNCFYICNKWGIGMEIDFDVKRVEIGMMVKELMKGEKGLEMRNKVEDLMSKAIKATTPGGSSHTNFEMLMEDVAKW

SEQ ID NO: 5764 - protein, 358 aa, Ricinus communis
MTEMGQINCLITDAFLLFGGAIAEDLNVPWIPVWIPVPHSLSAHIYSDMIRKHYNINNLSSDNDSRDPENILEKIPGLGELRIADLPDEVLLNETQESLLCYMLSQVGNVLPQASALVMNFYKELYSTPLLDDLKTKFPSLLNVGFLTLSIPPCPLPLSNADATGCLSWLDSQKPTSVAYISFGTVVNIPSSEIVELAEALEETKLPFLWSLRDNLISKLPQGFLDRTKLDGKVVPWAPQNQVLAHNSINVYITHCGANSVYESMANGVPMICRPVFADNRINARIVEDIWGIGVRIDDGVFTKKGVIKSLELVLENEEGRRIRRKVHALQQLVFKAAKANGHAAQDFKTLVEKCSLK

SEQ ID NO: 5765 - protein, 424 aa, Theobroma cacao
MEELFSLTISLQAPFHRLLSDIKEKEGRPPLCTISDIFMGWAVEVAKSVGTINITFTTTGAYGGLAYFSLWLNLPHLRADSEELTIPGLPDRCRFHISQFHKFVRMADGSDPCSRFLQPQISQTFQSFGYLCHTAEEVEPLALEWLRNYIKLPIWAIGPLLPPVMLNKSPYSGSSMSKHRAGKQPGISLERCIEWLDLHCPDSVLYVSFGSQNTISPSQMMELAKGLEESRNPFIWVIRPPFGFDMKGEFKAEWLPEGFEERMSESKQGLLVRKWAPQVETLLHKSTGAFLSHCGWNSVLESLSQGVPIIGWPLVGEQPFNSKMLVEEMGVSVELTRGHDSTIEAKEAKKVIEMVMNKKGKGGEMRKKAVEIAEKIRAAVTEEGERKGSSITALDDFISAVLTKRFTSSLAANHSQGTSLILCH

SEQ ID NO: 5766 - protein, 478 aa, Unknown
  Description of Unknown: Oryza sativa Japonica Group sequence
MKKTMVLYPGLSVSHFLPMMKLADELVEHGYAVTVALIDDPLQKQIAFTATVDRVISSKPSICFHRLPRVDHLPAVTTNDGEFYLPGYLDLVRRHNEPLHGFLSSHFRGGIQALVVDMMSVEALDIAERLKVPGYLFHPSNASLFAFFLQIPSICAESKRSFSELGDTPLEIPGLPPMPASHFIDNRPEEPPESEVYKAVMDLVRRYTNKCSNGFLVNTVDSLEARVVNTLRHARRQGGRALPPFYCVGPLVNKAGERGERPERHECLAWLDRQPDRTVVFLCFGSTGIGNHSTEQLREIAVGLEKSGHRFLWVVRAPVVSDDPDRPDLDALLPAGFLERTSGQGAVVKQWAPQVDVLHHRATGAFVTHCGWNSVLEGITAGVPMLCWPLHSEQKMNKVLMVEEMGIAVEMVGWQQGLVTAEEVEAKVRLVMESEAGVELRARVTAHKEAAAVAWTDVGSSRAAFTEFLSNADSRQTS

SEQ ID NO: 5767 - protein, 456 aa, Crocus sativus
MNGSKGHVMVFCYPIQGHITPFVQFAKRLGNKGIVTTFIVADNHCDEGFTCNHFNLTAMASYPLDDGMFESDGFKVNFLEMINKFDSGANDEVTRMLDEYKIAIDPAKGLIHSPFLCFLSDIARNFQIYAVAMFTQPWLGVAGYYHLNRSAYDLPASHDCHTLASFPSMPVLCANDLPSFVSNLSCYPSLHELIIEQMSNLERGTGILPNTFGNLEEKVLKWMAQLWPVSLIAPLAPMFRMSKALQPDKSYDMDCATPRNADNCMEWLNSEPGDSVVYLSFGTIVNLCQKQLNEIAGLINCGRPFIWAVREEDQHTLPEGFLEEIKGRALVVGWGPQEKILAHGAVACFVTHCGWNSSLELLAAGVPAIAYGKLGDQITNAKFLTDVYGVGVRLRAPVTREEFLICVEEVTEGEKAERIRERSSEMKRAATEAVAEGGPSDKNIQAIGDEIMAIHE

SEQ ID NO: 5768 - protein, 481 aa, Vigna angularis
MESFHSSKPHIVCVPYPAQGHVNPLMKFAKLLHCKGFHVTFVNTEFNHNRFVRSHGADFVKGLQDFVFETIPDGLPPSDKDATQDIPLLCDSTRKNCYSPFKELVLKLNSSGDVPSITCIVADGVMGFAATVAKDLGIPEVQLWTASACGFVGYLQYDDLVDRGIVPFKDENFEIDGSLNQSLDWISGMKNIRLKDIPSFIRVTTLDDIMFDFLGSEAKNCWRSSSIIINTFEDLDGEALDALRAKNPNIYTIGPLDLLGRHFPEKDKGFMSGGSSLWKNDSNCLTWLDQWEPNSVVYVNYGSITVMTNHHLKEFAWGLANSNLPFLWIKRADVVLDESAALPQEFFDEIKDRGYITSWCMQEEVLSHPSVGVFLTHSGWNSTLESISAGVPMICWPFFAEQQTNSRYVSANWGIGMDVNHDVKREEITKLVTEMMKGEKGMQMRRKSLEWKKKAVRATDVGGSSYNNFYKLTKEVFHHAI

SEQ ID NO: 5769 - protein, 478 aa, Unknown
  Description of Unknown: Oryza sativa Japonica Group sequence
MRSRVVLYTWMVRGHLHPMTQLADRIANHGVPVTVAVADVPSSGESRKTVARLSAYYPSVSFQLLPPAAPARSGADTADPDADPFITLLADLRATNAALTAFVRSLPSVEALVIDFFCAYGLDAAAELGVPAYLFFVSCASALASYLHIPVMRSAVSFGQMGRSLLRIPGVHPIPASDLPEVLLLDRDKDQYKATIAFFEQLAKAKSVLVNTFEWLEPRAVKAIRDGIPRPGEPAPRLFCVGPLVGEERGGEEEKQECLRWLDAQPPRSVVFLCFGSASSVPAEQLKEIAVGLERSKHSFLWAVRAPVAADADSTKRLEGRGEAALESLLPEGFLDRTWGRGLVLPSWAPQVEVLRHPATGAFVTHCGWNSTLEAVTAGVPMVCWPMYAEQRMNKVFVVEEMKLGVVMDGYDDDGVVKAEEVETKVRLVMESEQGKQIRERMALAKQMATRAMEIGGSSTASFTDFLGGLKIAMDKDN

SEQ ID NO: 5770 - protein, 273 aa, Hibiscus syriacus
MFTTSMIDVANQLGIPCYLFFASPACFLGFMFHLPELGRQLTVDFVDLLPTSVLKRNKDGYFWYLEHACRYDETMGIVVNTFLELEPHAIDSLSFNGVPPAYPVGPIIDHAGAAQWHPDGAKQDSIMKWLDDQPPSSVVFLCFGSMGSLEVSQLREIAFGLEHSGYRFLWSIRKPPEGKLDLPGEYTNVADVLPLGFLDRTAGLGLVCGWVQQVRVLSHQAIGGFVSHCGSDYRDGSDLVASYEFERELRRLMDGEDEVKAKIKEMKIKSRWH

SEQ ID NO: 5771 - protein, 470 aa, Arabidopsis thaliana
MKVELVFIPSPGVGHIRATTALAKLLVASDNRLSVTLIVIPSRVSDDASSSVYTNSEDRLRYILLPARDQTTDLVSYIDSQKPQVRAVVSKVAGDVSTRSDSRLAGIVVDMFCTSMIDIADEFNLSAYIFYTSNASYLGLQFHVQSLYDEKELDVSEFKDTEMKFDVPTLTQPFPAKCLPSVMLNKKWFPYVLGRARSFRATKGILVNSVADMEPQALSFFSGGNGNTNIPPVYAVGPIMDLESSGDEEKRKEILHWLKEQPTKSVVFLCFGSMGGFSEEQAREIAVALERSGHRFLWSLRRASPVGNKSNPPPGEFTNLEEILPKGFLDRTVEIGKIISWAPQVDVLNSPAIGAFVTHCGWNSILESLWFGVPMAAWPIYAEQQFNAFHMVDELGLAAEVKKEYRRDFLVEEPEIVTADEIERGIKCAMEQDSKMRKRVMEMKDKLHVALVDGWIFELCSKEVCSRRGR

SEQ ID NO: 5772 - protein, 492 aa, Trifolium pratense
MKKAEVVFIPFPGVGHLVSTLEFAKLLINRDNRLRVTVLVIKFPHSTETDVYTKSLPISDSLHVINLPECSLPPNSDPVSARKALLEAQKPNVKEAVSNLTTGAENGVLAAFVVDMFCTTMIDVAKEFSVPTLVFFTSGVAFLGLSLHLHTLRERDNVDSTQLQQLTELAVPSFTNLVPSKSLPSSVLRKEWESFMMDFWKGLKNADGFIVNSFEELESHAVHSFLSDPSLAGFPIYPAGPLLNLEPKTKGTVVSNDIIKWLDDQPPSSVVFLCFGSMGSFDEDQVKEIACAIENSGARFIWSLRKPPPKGTMNIPPTDYTLSDLGSILPEGFLDRTAEIGRVIGWSPQTQILAHPATGGFASHCGWNSTLESIYFGVPIATWPLYAEQQTNAFELVHELKMGVEIALDYRVEFNGVPNYLVTADKIERGIRSVLDTDGEVRKNVKEMSEKSRKTLLEGGSSYTYLGRLIDYIMNQINNFHGDFGQEAYNHS

SEQ ID NO: 5773 - protein, 469 aa, Brachypodium distachyon
MDSTGKSAMATSEGPSILFLPFPGAQGHTNPMLQFGRRLAYQYGFRPTLVVTRHVLSRAPPPDAPFHVAAISDGFDASGMPSCFDMAEYLRRLEAAGSDALARLISDEARAGRPVRVLVYDPHVAWARRVAGDAGVPAAAFFSQPCSVNIFYGELHAGRMAMPVTEADARALLARGALGVELGMEDLPPFVAVPELQPVLTKASIGKFEGLEDADDVLVNSFRDIEPTEVEYMESTWRAKTIGPSLPSFYLDDDRLPSSKSYGFNLFNGDDVVCMEWLEKQTISSIVLASYGTFSEYDESQLEELGNGLCSSGKPFLWVVRSNEAHKLSEELKTKCKKNGLIVSWCPQLEVLSHKAIGCFLTHCGWNSTLEAMVNGVPLVGIPHWADQLTIVKYVESAWDMGVRVQKGLNGQVRREEVERCIKEVMDGERKDEYKRNVAKWMQKAKEAMRPGGSSDNHIAEFAAKYSSS

SEQ ID NO: 5774 - protein, 471 aa, Citrus unshiu
MAQVKHHVACMPSPGMGHLIPHVELAKQLVLRHDISVTFLVPTIGPPSKAITSVLQGLPEHINHVLLPPVNFEEDVKAEIQIVLAIKRSLSSVRDVFKSLVASTHLMALVVDPFGTDVFDVAREFYVPSYLYFLTNALSLSLLHYMPKLDEVISCEVRDMEQPLKLPGFTIPIHGRDFPDPLQDRKNDAYRFMIQMRKRYSLADGILINTFMELEPGVIKALQEEPSMRSIYPIGPIIRTVSDGELVDGSESHQCMCIRWLDNQASGSVLFVSFGSGGTLSYDQLEELALGLELSEQQFLWVVKSPDDKSASGSFFDVHSKTDPFGFLPTGFLDRTKEQGLVVPSWAPQVEVLGHPSTGGFLTHCGWNSTLESIVHGVPLIAWPLYAEQRLNAVILSEDLNVALRPPENENGLIRREEIAKVIKGLMHGEDGVIIRDRMNRLKDAAAAAVSDGGSSTKTLSQLVHKWKNQN

SEQ ID NO: 5775 - protein, 477 aa, Centella asiatica
MKTAEVVFIPAWGISHLVPMVEMAKLFITRHEQLSVTILIMKYDTDNGISPYVNSLLVSKIQRLSIVEVPQRDSKTYVSKHRSTRFSAFVETQKAHARDIILSIASSKTTRLVGCIIDMFCFTLADIADEVNVPTYVFSPASASFLGLMFYLQNLSDDHNQDITLFKNSETKFSVPSYTDPVPAKVLPLVLLDEEGGSDLFLSIARRLRDVKGILVNTFMELESHALESLASDCKIPTFYPVGPILNFTREGGNVEETVTVLCWLDKQPPSSVVFMCFGSHGSFQVHQVKEIALAVERSGRRFIWSLRPPPSEGETEVPREYSYLDEVLPSGFLDRTAEFGKVIGWAPQVSVLSHQAVGGFVSHCGWNSILESLWFGVPMAAWPLYAEQQVNAFKLVIELGLAVDIKMDYRNESGANKKVIVSADEIDRKISELMMDGSENEVRKKVAEMKEKSRLAVSENGSSYTSIGRLIKEMIS

SEQ ID NO: 5776 - protein, 473 aa, Cyclamen persicum
MANGTSPHVVLVPSPGMGHLIPLGELAKRLVLNHGLTATFVIPTDSPLSAAQKGFLEALPRGIDHLVLPPADLDDLPSDVKAETVICLTIVRSLHNLRAAIKSLKATNRLVAMVVDLFGTDAFEIAKEVNISPYIFYPSTAMALSFFLYLPTLDHSTPSEYRDLPDPVQIPGCIPIHGSDLLDPAQDRKNDAYKWLLHHAKRYTLAEGIMVNSFKELEPGAIGALQEEGSGNPPVYPVGPLVKMGHARGMVDRSGCLEWLDGQPHGSVLFISFGSGGTLSSEQTTELALGLELSEQKFLWIVRSPNDKTSDAAFFNPNAENDPSTYLPKGFLERTKGVGLVLPSWAPQAQILSHGSTGGFLTHCGWNSTLESVVNGVPLIAWPLYAEQKMNAVMLTEDIKVALRPKCSKSGLVERAEIAKIVKSLMEGEEGKRLRSRMRDLKNVSEKRLSADGESTKMLRELTQKWKNKAVGN

SEQ ID NO: 5777 - protein, 482 aa, Cephalotus follicularis
MQPTKPHAALLASPGMGHLIPVLELGNRLVSNYGFNVTIFVLQADDSTAQSQFLKSLHPTLLNIVSLPSVDISSLVAPDAQVAAKVAVMMRESLPALRSTINSMNFRPTALIVDLFGTEALAIANEYDMLKYVLIASNAWFLAATIFFPTLNRKEEDEIIKQKQALKIPGCKPVRFDDTLEAFLDRKNQGYDEYVRVGLEIPMADGILVNTWEDLEPTTLKALRDSKLLGRVTRVPVYPIGPLTRSVKPQVLGNQLMDWLNMQPLQSVIYISFGSGGTLSANQTTELAWGLELSKQRFIWVVRPPMDDDVSGAFFDVGNGHDGTPTYLPDGFVSRTKNVGRLVPMWAPQAEILSHSSIGGFLSHCGWNSTLESIVNGVPMIAWPLFSEQHMNATMLTEELGVVVRSEELPSKRILGREEIGKMVRKIMVYKEGHGIRNRVKELKYSASKALSIGDSSFNSLSQVANDVNSGLQFLKSMPQGA

SEQ ID NO: 5778 - protein, 476 aa, Trifolium pratense
MKKAQVVFIPFPVPSHLVSTLEFAKLLINHDNRLRITILLIKFPHTTETDVYTKSLPISDSLNFINLPECSLPPDTKPNLAMHALIEAQKPNIKQTVSDLTAGEGQHGHLAAFVVDMFCTNMIDIAKEFSVPTLVFSTSGVASLGLNLYLHTLREKVDLNQLLKHTEFSIPSFANSVPSYSLPGSVLNKEWEMFFMSYCRGLKNADGIIVNSFEELESYAVQSFYSHPELASLPIIYPVGPILNPEPKTKGTVDSDDIIKWLDDQPPSSVVFLCFGSMGSFDEDQVKEIAHAVENSGARFVWALRKPKPKGVMPAPTDYPLSELLSILPEGFLDRTAEIGKVIGWAPQTQILAHPATGGFVSHCGWNSTLESIYFGVPIATWPLFAEQQTNAFELVHELKIGVEIALDYKVDFNGGPNYLVTADKIEKGITNVLDTDGEVRKNMKEMSEKSKKTLSEGGSSYTYLGRLIDYIMNQV

SEQ ID NO: 5779 - protein, 484 aa, Cephalotus follicularis
MGSTGINKPHVVCIPFPAQGHVNPFMQLAKLLHARGCHITFVNTEFNHSRLVRSKGPDAVKDMPGFRFETIPDGMPPSNPDATQSVTYLLYYTKKHSVAPLRDLIVKLNSMEGLPPISCIISDGIMSFGIKVARELGIPEIQLWTASSCGFLSYLQFGELVKKGIFPLKDESDIINGHLETPLEWIPSMAHMRMKDMPSFVRSTDPHDIAFNRWLEEGEDNLKADAILFNSFYEFEHEVLKEISSFYPQIYCIGPLSTLCKTLPQSEITSRRSSLWKENTDCLTWLDKHKPNSVLYVNFGSIAMMTEDNFKEFALGLTNSGHPVLWILRSDVVMGHAATLTQDFLKETSERLLIVSWCPQDRVLTHPSIGAFLTHSGWNSTLEGICGGVPMICWPFFAEQQVNCRYACTTWGVGLEIDNNVTRREVEEVVREMMDGEKGMELRNKALEWKNKSDVAATQGGSSHHDFNRFVDYLFQLSINGKRP

SEQ ID NO: 5780 - protein, 495 aa, Vigna angularis
MVLQTNNIPHFVLFPMMAQGHIIPMMDIARILAQRGVIITVFTTPKNASRFNSVISRAVSSGLKIRLVQLNFPSKEAGLREGCENLDMVSSNDMSKIFQVIHMLQKPAEEFFQTLTPKPSCIISDFCIAWTLQLAEKYHIPRVSFHGFSCFCLHCRYVIHTSDFCRSITSESKYFTIPGIPDKIQVTKEQLPGSLATDLDDFKDQVRDAEKKSYGVIVNTFEELEKAYVRDFKKVKNNKAWFIGPVSLCNKDGLDKAQRGKQASINENHCLKWLDVQQAKSVVYVCFGSICNLIPSQLVELALALEDTKRPFVWVIREGSQLQELEKWFSEEGFEERTKGRGLIIGGWAPQVMILSHPSIGGFLTHCGWNSTLEGICAGVPLVTWPLFGDQFLNEKLVSDVLRIGVSVGAEVPLKWGEEEKRGVMVKKDDIKRAICMVMDDDEEGKERRERVCKLSEMGKRAVEEGGSSHLDVTLLIQDIMQQTNTKEDENLSDV

SEQ ID NO: 5781 - protein, 472 aa, Pueraria montana
MKDTIVLYPNIGRGHLVSMVELGKLILTHHPSLSITILILTPSTTPSTTTFACDSNAQYIATVTATIPAITFHHVPLATLPSNTPSLPPHLVSLELARHSTQNVAVAFQTLAKASNLKAIIIDLLNFNDPKTLTQNLNKNIHTYFYYTSGASTLALLLHYPTIHETLTKNYVKDQPLQIQIPGLRANITTDDFAKDSKDPSNYSSQAFLKIAETMRGSFGIIINTFEAIEEELIRALSEDGTVPPLFCIGPVISAPYGEDDKGCLSWLDSQPSQSVVLLCFGSMGSFSRTQLKEIAVGLEKSEQRFLWVVRAELDCADSVDEQPSLDELMPGGFLERTKEKGLVVRDWAPQVQILSHDSVGGFVTHCGWNSVLEAVCEGVPMAAWPLYAEQRVNRVIMVEDMKVALAVNEDKAGFVSATELGDRVRELMESDKGKEIRQRTFKMKISAAEAMAEGGTSRVALDKLAKLWKES

SEQ ID NO: 5782 - protein, 583 aa, Rosa chinensis
MANEIWIVPFFGQSHLFPLMELCKHLASRNFKAVFVISSEFSSSIPSSLRQYPLVEIAEISEAPPSDSSSPPQEPSSQPLHKHHARYSQIAVGLDKLLHDPDSVRRPLCAVVDMMMSWTSEIFNRYEIPAVNFFTSGACSAAMDYAMWKSHPLDDFKSGETRLLSGLPEEMAITVSDLKRQSRDGPQGGSSEGFPRLQPPRTKFGPQRHHPACPGAKPPWVEEVEPCVAVMINTCDDLEHPFIKYVSDKIEKPVWGVGPLLPEQYWKSVGSVLHDREIRTNRKSNLTDDEVNRWLQGRSQDKGYLGYSPRENLPQNRPGVVDSPLLTFSASPPVALCSCPHFASPSRVPAFQVRLVSPAVRQSAEPPPPPPSHLHSSTASLRLPQFQGFNPDPRDEHEILAEALEASARPFIWVVQANAGLWPGPRRPALPDSEPEEAYFPHGLDARVGKRGLIIPGWAPQLLILSHPSTGGFLSHCGWNSTVEAIGRGVPFLAWPFRGDQYPNAKLVVSHLKVGYLISEDLSQTIEEEDITRGIEKLLSDEDMKQRAVKLSAKFEHGFPTSSVAALDAFGDFLGRKNKASCR

SEQ ID NO: 5783 - protein, 491 aa, Vigna angularis
MAISRTHHHAFLLPSPGMGHIIPALELAKRLVTHKIIPKLTFFYTPIANSNPSKAETLVLHSAIKENLFDIIQQHPLDLTSEVDPDASAEDKIAILMHELPLLFVSTISTMNLNPTIIITDFFICQALPLVQNLNLPMFAFSPTNAWLVALGLHTPTLDKQIQGEYVDEIEPISIPGCKPIYPKDMFDMLKDRTHRLYREFIGACEGAALANAIFVNTFHELEPKTLEALGSGGISTVPVYPVGPIIREPSPRSPSPSPSPSSDEGKRSEIVEWLNRQEEESVVFVSLGSGYTMSGEEIKEMALALELSENKFVWSLRPSVNKAGHDHYLTAGDETGSTTSTVSNVEKSDLFPDEYHRIQRNGIVITDWAPQLDILKHPSIGGFVSHCGWNSVMESVSCGVPIVGLPIFADQMMNATMLVEEVGNAVRVKASPSTNMVQGDELGKAIRKIMNKDDKEGCVIRERAKQLKHLAERAWSHDGSSYSALSKIAL

SEQ ID NO: 5784 - protein, 469 aa, Vitis vinifera
MGSPHFLLVTFPAQGHINPALQFAKRIIRTGAQVSFATSVSAHRRMAKRSTPEGLNFVPFSDGYDDGFKPTDDVQHYMSEIKRRGSETLREIVVRNADEGQPFTCIVYTLLLPWAAEVARGLGVPSALLWIQPATVLDIYYYYFNGYGDVFRNISNEPSCSVELPGLPLLSSRDLPSFLVKSNAYTFVLPTFQEQLEALSQETSPKVLVNTFDALEPEPLRAVDKLHLIGIGPLVPSAYLDGKDPSDTSFGGDMFQGSDDYMEWLNSKPKSSVVYVSFGSISVLSKTQKEDIARALLDCGHPFLWVIRAPENGEEVKEQDKLSCREELEQKGMIVSWCSQIEVLTHPSLGCFVSHCGWNSTLESLVSGVPVVAFPQWTDQGTNAKLIEDMWKIGIRVTVNEEGIVESDEFKRCLEIVMGGGEKGEEMRRNAEKWKNLAREAVKDGGSSDKNLKGFVDEVGHGCYESIGS

SEQ ID NO: 5785 - protein, 319 aa, Unknown
  Description of Unknown: Oryza sativa Japonica Group sequence
FVGGNVWWWVHAEPRKDTITYVPGVEAIEPGELMSYLQDTDTTTVVHRIIFRAFEEARGADYVVCNTVEELEPSTIAALRRERPFYAVGPILPAGFARSAVATSMWAESDCSRWLAAQPPRSVLYVSFGSYAHVTRRELHEIARGVLASGARFLWVMRPDIVSSDDPDPLPDGFAAAAAADGRGVVVPWCCQVEVLAHPAVAAFLTHCGWNSILESAWAGVPMLCFPLLTDQFTNRRLVVREWRAGVAVGDRGAVDAGEVRARIEGVMHGEEGEVLREQVGKMRATLHAAVAPGGSSRRGFDELVDELKRRCGGGGGRH

SEQ ID NO: 5786 - protein, 487 aa, Unknown
  Description of Unknown: Fragaria x ananassa sequence
MAMETKSCQQLHIFFLPFMARGHSIPLTDIAKLFSSHGARCTIVTTPLNAPLFSKATQRGEIELVLIKFPSAEAGLPQDCESADLITTQDMLGKFVKATFLIEPHFEKILDEHRPHCLVADAFFTWATDVAAKFRIPRLYFHGTGFFALCASLSVMMYQPHSNLSSDSESFVIPNLPDEIKMTRSQLPVFPDESEFMKMLKASIEIEERSYGVIVNSFYELEPAYANHYRKVFGRKAWHIGPVSFCNKAIEDKAERGSIKSSTAEKHECLKWLDSKKPRSVVYVSFGSMVRFADSQLLEIATGLEASGQDFIWVVKKEKKEVEEWLPEGFEKRMEGKGLIIRDWAPQVLILEHEAIGAFVTHCGWNSILEAVSAGVPMITWPVFGEQFYNEKLVTEIHRIGVPVGSEKWALSFVDVNAETEGRVRREAIEEAVTRIMVGDEAVETRSRVKELGENARRAVEEGGSSFLDLSALVGELNDLAFGGLVE

SEQ ID NO: 5787 - protein, 498 aa, Helianthus annuus
MSTHKHKHIQSHKQMASSLPVDSTHRPHIVLFPFMSKGHTIPLLHLARMLVTRGITVTIFTTKANKPFIAQVLETCPDGNSISIIHLPFPSNIDGIPHGIESTDKLPSISLFPQFAAATKHMQPHFEMSLKNLGNVTCIVSDGFLSWTLASANKFGIPRLSFYGMNAYSTAVQHSVTVNQSLWGPESDDELITVPGFPWIQITRNDIDYPFTQRNPSGPFHDFIMESFVTSINSYGTIVNTFQELEPRFIDYINREMKPTPWCVGPLCLAEPFGCSDKQPNGSNSSKWITWLDQKLLQGCSVLYVAFGSQAEISTQQMEAISKGLEQSEVNFLWVVRNCESNVLSELGDKVGDRGMIVTEWVNQMEILKHESVNGFVSHCGWNSVLESICAGVPILAWPMMAEQPLNARMVVDEIKIGLRVETCDGSVRGFVKADGLKKMVKELMEGEKGKEVRKRVKEVGAAAKAAVADGGSSWRTLNELINEVESVRNKGKSDGEM

SEQ ID NO: 5788 - protein, 462 aa, Helianthus annuus
MEPEPPQTKHIIMLPFMAQGHLIPFLELAHHILNHNPTFTITIVNTPLNIHYLRSATTNHPSPPTQLHLKPLPFNSSDHHLPPNSENTDGLPLTQIIKLFHASAALEQPFRKFIHDVVVSEKRNKVCIVSDIFMAWANDVAKSFNIFNYTFSTGGAYGTAAFCSIWLNLPHRSLSGGTHDEFSVPGFPESSRFSITQLHQFLRAADGKDEWSRFFQVQISLSLKSNGWLCNTVEEMEPLGLDVLRNYIKLPVWCIGPLIPFKMLKKNLGSDTGVIGPRSGKQPGIQPEHCIEWLDSRATGSVLYISFGSQNTIGESQMMELAKGLEETKRPFIWVIRPPIGFDLKGDFRAKWLPNGFKDRIGKQGLVVHNWAPQLEILCHRATGAFLSHCGWNSVMESLSQGVPIIGWPMAAEQGYNAKMLVEEMGVCEVLTRGVHSRITKEEVSRVINVVLDKSEGGKVKI

SEQ ID NO: 5789 - protein, 346 aa, Manihot esculenta
FCTPMMDLADEFGIPSYIFFASGGGFLGFMLYVQKIHDEENFNPIEFKDSDTELIVPSLVNPFPTRILPSSILNKERFGQLLAIAKKFRQAKGIIVNTFLELESRAIESFKVPPLYHVGPILDVKSDGRNTHPEIMQWLDDQPEGSVVFLCFGSMGSFSEDQLKEIAYALENSGHRFLWSIRRPPPPDKIASPTDYEDPRDVLPEGFLERTVAVGKVIGWAPQVAVLAHPAIGGFVSHCGWNSVLESLWFGVPIATWPMYAEQQFNAFEMVVELGLGVEIDMGYRKESGIIVNSDKIERAIRKLMENSDEKRKKVKEMREKSKMALIDGGSSFISLGDFIKDAMEG

SEQ ID NO: 5790 - protein, 476 aa, Citrus unshiu
MAAESLQPHVAVLPSPGLGHLIPLLEFAKRLVLNHGVHVSFLVITTNEASAAKDKLLRSLPHGLDVVDLPPVDVSAVTSDDMPVVTRLHAIVEESLSKSLKSVLTELCNPNALVIDLFCTQAFEICSQLSIPTYSFVTTSVHFFAFITYLPTLDHEVQGEFVDLPEPIKIPGCPPVRPEDLLDQVRNRKIDEYKFFLLHVSRLPLAAGIFLNSWENLEFVPLKAIGEHSFYLQIPTPPINPIGPLIKQDEPLSASDEECLAWLDKQPPDSVLFAVPGSGGTLTAEQVTEMAWGLEQSKQRFIWVVRMPSDASASATFFNVGSDVNDPKAYLPEGFLQRTRAQGAGMVVPSWAPQVHILRHPSTGGFLSHCGWNSTLESICHGVPMIAWPLYAEQRMNAAMLTAEETGVAVKPETEPGKKVIGREEIERVVRLVMESEEGKVMRRRVQELKESASRELGDGGSSSDSLASFIKKCKH

SEQ ID NO: 5791 - protein, 466 aa, Nicotiana sylvestris
MAKMKENCHVLLVTFPSQGQINPSLQFAKRLIKLGVNVTFSTSLSALNCMSNNLSSIKGLTFAPFSDGYDNGYPNVGKSLDEYREFYASFIALGSEFVSEIFADRAKEGRPFSRIIYTTVLSWVGIVAKRLNAPATLLWIQPATLLDLYYYYFTSYKDAFKNCPDEDKSLEIPGLPFLVSIREIPSFLLSSDGLMDWLIQTMKEHVELINSESNEIVLVNTFDALEFEALRAIKNVNMVGIGPLVPSSFLDGKNPSDTSHGGDLRQRSKDYMEWLNAKPNASVVYVAFGSYSELPKQMMEEIAQGLIGSERPFLWVINGEKPMENLSCKEELEKQGKIVSWCSQVEVLQHPSLGCFLTHCGWNSTLESLVFGIPVVACPLWTDQGCNSTLIQDIWKTGVRVNANEEGVEGAEFKRCIEIVMGDGKEGEELRKKAKKWRDLAKDAMKEDGSSNENLKAYVDEILNHA

SEQ ID NO: 5792 - protein, 543 aa, Citrus unshiu
MGLGVTDLWSLHSSSSCTGQKCYVMMCVDNYSTELIGIHDVIRMSHSYLASFLSTRNLKPKAVNKNRRHVVLLPYPSQGHINPLLQFAKRLASKGVKATLATTHYTAKSICAPHVGVEPISDGFDEGGYAQAKNEDLYLKSFEDNGSRTLSELIKRYKNSSFPVNCVVYDSFLPWALDVAKEYGLYGAAFFTNSATVCNIFCRMHHGLLTLPVKLEDTPLSIPGLPSLNFIDLPTFVKFPESYPAYLAMKLGQYSNLDKADWIFGNTFQELEGEGARSISELWPGKLIGPMVPSAYLDGRIKGDSGYGSSLWQPLSEECSEWLETKPQQSVVYISFGSMVSLTAEQMEEIALALKDSSLDFLWVVRESQQEKLPNWFMDSTKQKGLVVSWCNQLEVLEHPAVGCFVTHCGWNSTLEGLSLGVPMIGLPQWADQLTDAKYIEEVWGIGVRAKEDEKGIVRKEEILKCFKEVMEGERSQVIKKNASEWKKKSEKAMREGGSSDQNICDFVNALMCSSNGKLKHSNDNCVQAWMPVAKRCLRQTPR

SEQ ID NO: 5793 - protein, 457 aa, Zostera marina
MANNPPHVVILPSPGMGHLIPLAEFAKLLTTNYGVNVTFLTLDDSPQIKSFINALPDTITYIPLPIPDLPPTEIAVKRMILIVAHCLPFLREVMAKLKASTNLVAFVVDLMGTKTFEVAKELGVSPYIMFPSTATFLNLIFHLPELDRTIQGEYKDHPHLIQIPGSAPIHGKDFPMPFLQDRKSQAYISSFQICVRFKEAAGIFINSASAIESGPIKALMNMNSPPVYPIGPLVHDTNSEDDSSGCIKWLDEQLPGSVLFVSFGSGGRLSSEQFTELAVGLEMRGHRFLWIARSPTETEERGFFEVKSKSDPLLFLPDGFLERTKEIGLVVDSWAPQLAILKHAAIGGFLTHCGWNSSLESIVHSVPMIAWPLYAEQNMNAAMLAGELKIAIRPVVDEKRGLIGRDEISKVVRELMEGEEGKKLRIHVKRIAENAIKEDSYRSLDPIVNIWKNNIST

SEQ ID NO: 5794 - protein, 476 aa, Helianthus annuus
MANTVAELVFIPAPAVGHIMSTIEMAKVLLNRDQRLSINVLLISPPYPVPALTTYIESLAKNTIERIQFIELPKDQTPPKLDPKAFLTSLYEFYSSHCKHVRNIVADMINQTGSGRVVGFVVDVFCTGMIDVANEFNLPTYVFFTSSSAFLGFNLYIETLCVDHNQDHVMELSNSGGEMVVPSFVNPVPKKAFPAMYEIQDGLDMLINSFRELRKAKGIMVNTFLELETHAMKSFTDTNFPPVYPVGPLLNLDGVAGKADDMDVIKWLDSQPPLSVVVLCFGSMGSFSEVQVKEIALGLEQSGHRFVWSLCLTPSKEQLLDDPRELLPDGFLERTVGIGKVIGWAPQVSLLSHEAVGGFVSHCGWNSMLESLWFGVPTATWPMYAEQQLNAFEMVVELGLAIDLKMDYKIDMFNPAAIVVVTAEEIENGITRLMEDNNVRAKVKEISKLSRVTVAEGGSSYALVDYLVQEIMSNII

SEQ ID NO: 5795 - protein, 644 aa, Drosophila guanche
MRLLQLLLPLSLLCGAISCANILAVLPSVWKSHYLFGRRLLQELVASPRNHSVTLISPHAVEAGGMDGDVELPNIREIRIEGLKDNWVGMGMSFEPEQMRAQSVMERFTRLIYAGTTNVDLLLSDQQVRKLMNSGEMFDLLIVDLFLSDALLGLAYYYGIPTVAISPTGANSWLNNMFGNPQSSSLDPSNFLPFTERMNTQQRIVNSLMSTFERLTYNFFHLISQQTVYSKHFELLVQELPQYRDLTKNLSLALINSHPGLSYPRAYLPNMVEVGGLHLTQHKEQLLLPNHLLSFMEGAAGGVIYMSLGADVQTAKLPNEKLAIVMDVFGHLKEFHFVLKWENEDFVSNLELPENVMIANWWPQQAILSHPLVKLFISSCGQLSVWESIMGDTPILAIPILAEQEVMAKRLQLHGVSLTVNYDTIAYDSLLHGIRQLTLNTSYAESLTQLKKRLMGGSSPSVLAVGQIELILDSGGADFLKSHANTLNYWRLEGLDVLVIITIGFVGILTVPFLVISCILRKSYYSETCQQPVHRSTLKVVGRVHSYGEPGTFSTATSTEPLRRTRSAQSLSARSSTSSFSSETTASTTPLDMTPPPPVAQLLGHVPSPLQLYVNQQQHQQQRHQRRIYSNKASQEDNTERRFS

SEQ ID NO: 5796 - protein, 482 aa, Medicago truncatula
MNLASNFMDKTIHIAVVPGVGYGHLVPILHFSKLLIQLHPDIHVTCIIPTLGSPPSSSETILQTLPSNIDYMFLPEVQPSDLPQGLPMEIQIQLTVTNSLPYLHEALKSLALRIPLVALVVDAFAVEALNFAKEFNMLSYIYFCAAASTLAWSFYLPKLDEETTCEYRDLPEPIKVPGCVPLHGRDLLTIVQDRSSQAYKYFLQHVKSLSFADGVLVNSFLEMEMGPINALTEEGSGNPSVYPVGPIIQTVTGSVDDANGLECLSWLDKQQSCSVLYVSFGSGGTLSHEQIVELALGLELSNQKFLWVVRAPSSSSSNAAYLSAQNDVDALQFLPSGFLERTKEEGFVITSWAPQIQILSHSSVGGFLSHCGWSSTLESVVHGVPLITWPMFAEQGMNAVLVTEGLKVGLRPRVNENGIVERVEVAKVIKRLMEGEECEKLHNNMKELKEVASNALKEDGSSTKTISQLTLKWRNLVQKNQI

SEQ ID NO: 5797 - protein, 478 aa, Unknown
  Description of Unknown: Oryza sativa Japonica Group sequence
MKQTVVLYPGGGVGHVVPMLELAKVFVKHGHDVTMVLLEPPFKSSDSGALAVERLVASNPSVSFHVLPPLPAPDFASFGKHPFLLVIQLLRQYNERLESFLLSIPRQRLHSLVIDMFCVDAIDVCAKLGVPVYTFFASGVSVLSVLTQLPPFLAGRETGLKELGDTPLDFLGVSPMPASHLVKELLEHPEDELCKAMVNRWERNTETMGVLVNSFESLESRAAQALRDDPLCVPGKVLPPIYCVGPLVGGGAEEAAERHECLVWLDAQPEHSVVFLCFGSKGVFSAEQLKEIAVGLENSRQRFMWVVRTPPTTTEGLKKYFEQRAAPDLDALFPDGFVERTKDRGFIVTTWAPQVDVLRHRATGAFVTHCGWNSALEGITAGVPMLCWPQYAEQKMNKVFMTAEMGVGVELDGYNSDFVKAEELEAKVRLVMESEEGKQLRARSAARKKEAEAALEEGGSSHAAFVQFLSDVENLVQN

SEQ ID NO: 5798 - protein, 276 aa, Vigna angularis
MMMEDSLKLTKLDGVFINSFEELEGEALAALNEGKVVRGMPPVYAIGPLMTCEFENVDQGQKGCMSWILEWLNERAEGSVVYVSLGSRTETRREQIKDMALGLIECGYSFLWVVKLKRVDREEDEGLEDVLGSELMGKVRERGVVVKEFVDQMKILGHPAVGGFVTHGGWNSITENIREGVNILTWPQGGDQKINAEVVRMSGVGIWAEEWGWGTQKVVEGKEIAKRIKEMMSNESLRVKAGEMKEAARKACGVGGSCEVIVKRLIEEWKRNAQVN

SEQ ID NO: 5799 - protein, 468 aa, Gossypium raimondii
MSQPHFLLVTFPAQGHINPTLQFAKHLIRIGVRVTFITCISAHRRMSKVPTAQGLTFLPFSDGYDDECQPGDDIDHYLSELRRRGKEAVSEFITSSENEGKPVTCIVYTLFIHWASEVARKHHIPTALLWIQPATVFDIYYFYFNGHESTFKAQADEKNPKRSIKLPGLPLLATRDLPSFLTALNVYRWALSLIQEQMDVVADESNPKILVNTFDALEHEALNAIENFIMVGIGPLIPSSFLNSNDSLDNSLRTDLFQSDSKDYLQWLDSKPKSAVVYVSFGSIAVLTEQQVEEIARALISSRRPFLWVVRNRKDGGEEEKEEDKLTCREELEQFGMVVPWCSQVEVLFHPSLGCFVTHCGWNSRLESMVAGVPVVAFPQWTTAKLIEDVWGNGVRVSANEEGMVERDEIVRCLDLVMGDDEKGMEVKKNVEKWKGLASEAAMEGGSMDMNLKAFVDDIAEGCLLTDE

SEQ ID NO: 5800 - protein, 768 aa, Citrus unshiu
MADHNNKTIVLYPSPGRSHLVPMIELGKLILTHHPSFSITMIVPTFPNTVAGDTSHYIFAVSGITFHHLPTVSDELGLKYYPSIDEVTRLRDRLAELNNSNLRQTLLTLFKTLTLKALVIDFFCKAALQVSSSLNIPTYFFFTSGATALAQILHYPNLKNITDNDCFRVDAESEMLLDHIPGLPPIRAKEMFPPDDSVLKNTIDTAIQMTKSCGIIINTFETLEQRASQALKDGKCVPNGETMPPVYCLGPVLAATVDNKNDYHMCLSWLDLQPKQSVVFLCFGSMVFFSSKQLKEMAIGLERSRVRFLWVVRVPPPEDEFRRNLAVADAEVSVEMFLPEDFLERTRDRGLVVKSWAPQTDVLSHDSVGGFVTHCGWNSVIEALCAGVPMVAWPFIGDQMVNRSFLVEDIEVAVPVVESEDGLVYGAELEKRVIELMDSENGKGKVLRERTRALKEKAMGALREGGCSLAALAELAARFDKEWRSSHLLSMDELGKLILTHYPYFSVTIIISTFPTPNLHKTLIIQSKTSNLKTLIIDFFHKVALQVSCSLNIPTYLFYASSASALAQVLYLPNTYGTTNGLKDPQMQMPPLYCTGAILAATSSDNKNDDHTCFSWLDKQPKMAMRLKRSGAAFLWVVLFPPLEDEFRQTLTVADAEASAELFLPEGFVERTRDWGLPVKSWAPQVDVLSHDSVVAVRTGVPMVAWPSNGDQMVNMAFLVEKIRDPLTVAERRVIEGIRAPKEQAVGALSEGGRSLAVVAELAESFRK

SEQ ID NO: 5801 - protein, 301 aa, Vigna angularis
MCNPTWFPFQTTLHLRPYEIIRAMISRKDVDTGRTASFDLGKVYSSCDMFLLRTCRELEGEWLDYLAGRYNMPVIPVGLVPPSIQIKDVGEEDRNPDWVKIKEWLDSRESSSVVYIAFGSELELSQEDLTELAHGIEFSKLPFFWALKKVKGDSAELPEGFEERTKDRGFVWKSWAPQTKILGHAAIGGCITHCGTNSLVEMLNFGHVLVTIPYLLDQALFSRVVEEKKVGIEVARSKEDGSFTRESVAKTLRFAMVDEEGSSYRNNAKQMGKLFSSTYIHNQYIDDCILALQNYKAPSNT

SEQ ID NO: 5802 - protein, 233 aa, Spatholobus suberectus
MNALSSILPHVYRVGPFLSFLNQSPQNHLASLGSNLWKEDTEFLKWLESKEPESVVYVNFGNTTVMSPEQLFEFAWDEGLIGSWCPQEQVLNHPSVGGFLTYYGWNSTIESICAGVPMLCWPIVADRPTNCRYICNEWGIGIEIDTNVKREEMEKVINELMVGKKAKTMRQKVMELRKKAEEYTKLGGRSYMNLDIVISEVLLKQNLMLLKQNLIEESFFSIMQYCDNSLFFP

SEQ ID NO: 5803 - protein, 495 aa, Cephalotus follicularis
MASQSYQPHFILIPLMTQGHLIPMVDIARLLAQRDVTVTIVTTPHNFARFGSIIDRDIRSGKQINVLQLPFQSTENGLPEGCENVDTLPSPSLIPNLMAAIAMLQKPLEQLFEELKPSPSCIVTDKYLAWTADTAAKFKIPRIVFDGTSCFASLCSHNLDISKVYEKVSESSETFVVPGLPDRIEFTRAQLPGSFNPGSLLDLKKFRDKIRAAEAEEYGVLVNTFEELEPEYAKGYQKAKGKKVWCIGPVSLCNKELLDRAQRGNKASTDENQCLKWLDSWAPNSVIYACFGSINRITPPQLIELGLGLEATNRPFIWVIRGAYKKEDIEKWLIEDGFEERVRGRGLIIRGWSPQVLILSHPAIGGFLTHCGWNSTTEGICAGVPMITWPLFAEQFYNEKFVVQILDIGVRVGAEVVVHMGEEDKVGVVVKREQVKEAIEKIMGEGKEREERRERAKNLAKMANKAVDEGGSSYLHLTLFIEDVIHQVRDKNVRL

SEQ ID NO: 5804 - protein, 486 aa, Helianthus annuus
MAKTVAKLVFIPAPGLGHIMSTIEIAKVLANRDQRLSVTVLIIKPPNSSSNSPVTTYIGSLAKRSMDRISFIELPQHETPTTRDSKGPLASFAEYMNNHREYVRNIVGGMISQPGQSRIVGFVIDMFCLCMIDVANEFDIPTYVFFTSSAAFLGLKLYIQTLCDDHNQDVVELSHSNTEIAVPTFVKLVPTKVFPNMAQTRETLEFLLSSARRLREVKAIIVNSFSELETHAIESLSSDNSIPTLYPVGPILNLESGSGAEKPLDDDLIRWLDNQPPSSVVFLCFGSMGSFEEVQVKEIARALEHSGHRFVWSLRQPPVDKRSRLTRDYEDPGVVLPEGFLERMAAIGKVIGWAPQVAVLGHCAVGGFVSHCGWNSLLESLWFGVPVATWPMYAEQHMNAFELVVELGLAVEITMDYKKNLSKPMAEAVVVKAEEIENGIRRLMEDDLVRTKVKKISEKSRSTVVEGGSSYSAFGYLIQDFIKNVS

SEQ ID NO: 5805 - protein, 475 aa, Rosa chinensis
MGSYSPTNIPSEPPQRRHVVLFPFMSKGHTIPLLHLSRLLLSRGLNVTVFTTPANRPFIDQFLYGTTAASVVDIPFPQNIHPEIPAGVESTDKLSSVDERLFYPFALATRHMQADFEKALGSLPRVSFMVSDSFLWWTLDSATKFGFPRLAFYGFNNYAGSVTRFVAQNGLLHGPESDNELITLTRFPWIKITKEDFGSSFRNHSPEGSEFLMNVVGAVVNSFAVVTNSFYELEPVFVDCWNTESSPKSWNVGPLCQLKPKSVLQDDKPVWIEWLDKKKVEGSRVLYVAFGTQAVISSEQLQEIANALEKSDVNFLWVIRKKESYTWWDSEFEERVRGRGMVVSEWVDQTEILNHESVEGFLSHCGWNSAMEAICAGMPILAWPMMAEQPLNARMVVEEIKVGLRVETCDGSVRGFVKAERLEKMVKKLMEGEEGEVVRKKVKEVGEVARKAVEEGGSSWRTLGLLIDEVCSKEN

SEQ ID NO: 5806 - protein, 510 aa, Quercus robur
MGSEALVHVFLVSFPGQGHVNPLLRLGKRLAAKGLLVTFSTPESIGKQMRKASNITDEPAPVGEGFIRFEFFEDGWDEDEPRRQDLDQYLPQLELIGKDIIPKMIRKNAEMGRPVSCLINNPFIPWVSDVAESLGLPSAMLWVQSCACFCAYYHYYHGLVPFPSEAEPFIDIQLPCMPLLKYDETPSFLYPTTPYPFLRRAILGQYGNLDKPFCILMDTFQELEHEVIEFMSKICPIKTVGPLFKNPKAPNSVRGDFMKADDCLEWLDSKPPQSVVYISFGSVVYLTQKQVDEIAFGLLQSGVSFLWVMKPPHKDAGLELLVLPDGFLEKAGDNGRVVQWSPQEQVLAHPSVACFVTHCGWNSTMESLTSGMPVVAFPQWGDQVTDAVYLVDVFKTGVRMCRGEAENRVITRDEVEKCLLEATVGPKAVEMKQNASKWKAAAEAAFSEGGSSDRNIQAFVDEVRARSVAITGKSTANGVALDLAEKSAEINGKVDLVETKTNGKVELVEA

SEQ ID NO: 5807 - protein, 291 aa, Citrus unshiu
MSNMRLKDFPSLMRVTDANDILFNYMKTEVQNCLESSAIIFNTFDEHEGKVLEAIASKSPNIYTVGPLHLLCRHLPESEFKSFRSNLWKEDPECLKWLNEKEPNSVAYVNYGSITVMTDEQMKEFAWGLANSGHPFLWIVRPDMVTGDSAILSQEFYEEIKDRGMIANWCPQDKVLSHPSVSVFLTHGGWNSILESVSGGVPIICWPFFAEQQTNCRYASTTWGIGMEVNRDASREDIAALVKEIMEGDKGKLIRQNVQDWRKKAEAATDVGGASFNNFNKCIKEVLHYHH

SEQ ID NO: 5808 - protein, 486 aa, Medicago truncatula
MASQTNQQHFLLIPLMSQSHLIPFTEMAKLFASNGVTVTIVLTPLNAARFNMVIDQAKSSNLKIQFQLLPFPCVEAGLPKGCENMDTLPSPKYQPLFFAACNMLKEPLENWLSGLEKLPSCIVSDICLPWTSNVASKFNIPRVVFHAISCFTLLCSHNISLSKVHEKVDSMSTPFVVPDLPDTIEFTKAQLPEVMKQDSKAWKGAIDQFKESELSAQGILVNTFEELEKVYVRGYEKVAKKVWCIGPLSLHDRLTFNKFGKDDKGFIDDSETKCLKFLISNKACSVIYACFGSLSFIPTSQLKELALGLEASNHPFIWVIGKNDCSIELEKWLKEENFEERTKGKGVIVKGWAPQVEILSHPSTGGFLSHCGWNSTMEAISSGVPMITWPMFAEQFFNEKLIVQVLKIGVRIGVEAFVDPMEIYKGEKVLVKKEDVKRAIENLMENGVEGEQRRNKAKEIKDMAYKAVEDGGSSDSNCKLFIQEKL

SEQ ID NO: 5809 - protein, 272 aa, Corchorus olitorius
MKYQVVFISTPAMGNQVPTLEFAHHLTHRDPRFLATVLIITLHQRTIVNAYIRSRSSSATYNDRIKFIYLPTVDPPTPDQYQSSLGYFSRLLDKQKPHVKQAISNLMSTSPPPSFDNQTTLPSSPCIPTVDATKLQLCSTQPPISESVLGFLRIWPKIVESRLNSLCSIAIDLQIKPSDGFEFQVPLPFGNGIDELAGSVLDDGSMSLKHNGIDHDAMKRAKPSRPLKEEPLESQQLYFSNPFSVVEDDKNGKGNGLANEQVRGYVVNFPFN

SEQ ID NO: 5810 - protein, 473 aa, Panicum hallii
MGSNTGGDGERKASGGGSHVLLLPYPSQGHVHPMLQFGKRLALHGLRPTLAVTRFILATCAPDAAALGGVRLAAVSDGFDRGGFGECGDVTAYLARLEAAGSATLAELLRDEAAGGRPVRAVVHDAFLPWARAAARRHGAAAAAFFTQPCAVNVTYGHVWRRRVGVPADKGMVRLPGLPALEPEGLPWFLRVGPGPYPAYFELVMRQFQGLEEADDVLVNSFHELEPEEAEYMASAWRAKTIGPTVPASYLGDGRLPSDTKYGLHLFELTSAPCVAWLDAHPPRSVVYASFGSLSDLDPSEMREVARGLLDTGRPFLWVVRASEAHKLPAGYEEEARGRGGLVVSWCPQLEVLAHRAVGCFLTHCGWNSTAEALVAGVPMVAVPQWTDQPMNARYVEAAWRVGVRVRPAAADGLVRRAEVAGGIEEVMAGERSGEYRRNAAAWMEKARAASREGGSSDRNIAEFVGKYSSNSK

SEQ ID NO: 5811 - protein, 469 aa, Unknown
  Description of Unknown: Oryza sativa Japonica Group sequence
MASSERGGGGGIHVVLLPYPSQGHINPILQFGKRLAGHGGVRCTLAVTRFILRQGEPPSTGAVHVAAYSDGYDAGGFHEAGSAGEYLSRLESRGSDTMDALLRAEAEQGRPVDAVVYDSFLSWAPRVAARHGAATASFFTQACAVNAAYESVFTGRVELPLAADGEEPLRLPGISVGLTLDDVPTFMANTEDSPAYLDLLVNQFKGLDMADHVLVNSFYELQPQEAEHMASAWRAKTVGLTVPSAYLDNRLPDDTSYGFHLFSPTTETKAWLEARPPRTVAYVSFGSVATPSPAQMAEVAEGLYNTGKPFLWVVRASETSKIPEGFAAKAAKQGRGLIVTWCPQLEVLAHPAVGCFVTHCGWNSTTEGLSAGVPMVAVPQWSDQTMNAKYIEDVWRVGVRVRPDGEGVVRKEELERCVREVMEGERSKEFMENANGWKEKARNAMCEGGSSDKNIVEFIAKIGVDRKFK

SEQ ID NO: 5812 - protein, 462 aa, Oryza sativa
MSEAVQAAADASSSSSSSSSSSSSSPLHIVVFPWLAFGHMIPFLELSKRLASRGHAVTFVSTPRNAARLGAIPPALSANLRVVPLDLPAVDGLPEGAESTADVPPEKVGLLKKAFDGLAAPFASLVAEACGGGSAGDGEEAAAGFSRRPDWIILDFAQNWTTWLRHRGSHSPPPSPTGAMKQSGSLLHSSLTPLECPMLTVCWKWNAPAAALSSCPEAEPRLFPLLNKLFARPAVPASLLLPADIVHDEDAPNTTSNQSFVSAIQWLDKQPNGSVIYVALGSEAPITTNHVRELALGLELSGVRFLWALRPPSGINSQTGTFLPSGFESRVATRGIVCTEWVPQVRVLAHGAIGAFLTHCGWGSTVESFCFGHPLVMLPFVADQGLIAQAMAARGIGVEVARNYDDGSFYRDDVAAAVRRVMVEEEGKVLARKAKEVHSILGDRAREEQYLDEFVGYLQRYK

SEQ ID NO: 5813 - protein, 423 aa, Unknown
  Description of Unknown: Oryza sativa Japonica Group sequence
LQPPQKAIVASQLHKVEEEEKGDRQIWLRVTSSCCRCHARATSSRSWSSPTASPTRASRSPSSTRRWTTRWWWPRCRRAAPRSSGSGGSTSPPSPTASPATRTARTSTSSSTPTRAKLIEDGVLNEKGWPERQETLQLAPGMPPLHTSLLSWNNSGAAEGQHIIFDLVCRNNKFNDDLAEMTVCNSFHEAEPAVFKLFPDLLPIGPLVADRELRRPVGHFLPEDAGCLDWLDAQPDGSVVYVAFGSLAIFDARQFQELAVGLELTGRPFLWVVRPDFTPGLSTAWLDAFRRRVAGRGVIVEWCSQQRVLAHAAVACFVSHCGWNSTLEGVRNGVPFLCWPYFCDQFLDRSYITAVWRTGLAVAAGEEDGVVTRDEVRSKVEQVVGDGEIRERARLLRDTARACVSEGGSSHKNFRKFIDLLSE

SEQ ID NO: 5814 - protein, 465 aa, Solanum lycopersicum
MNKQHFLVISLPAQGHINPTLQLAKNLARAGARATFITTVYGLSRMNNLPTQDGLFYSSFSDGCDDDSWMNSNSTVDYFMNDLKINGSKNLRDLVRKYSDEGHPVTFLVYTILLPWVAVVAREIHVPSAFLVIQCGTAFAIYYHLLNSTNGVYSNSSSDFTVMPSFPIEIPELPLFSCNDIPTIVLPNNHLSSIMIPILREHIQNLENDPNSYVLINTFNALEEKSMRVIDKFRLFSIGPLVPSAFSDGNDPKDKSFGCELFDKPEKNYHQWLDSRHEGSVVYVSFGSLAVLKKEQEREILRGLLESERPFLWTRRKGEDEGKKKNLECDDVITDEKLGLIVPWCSQMEVLCHKSIGCFVTHCGWNSTLESLVSGVPIVGYPQFSDQTTNAKMLEEVWGIGVRVKEVEGLVKKEELKRCLGILMENGEKGEEIKKNVKKWRNLALDALKIGGSSHDNIKKFIEGL

SEQ ID NO: 5815 - protein, 473 aa, Cucumis sativus
MEAHPSIPHLAILPSPGMGHLIPLIEFAKRLLSHHRLTFTFIIASDGPPSQPQQALLNSLPSGIHHLFLPAVTFDDLPPNSKIETIITLTISRSLPSLRNVLKSMVSQSNLVGLVVDLFGTDGFDIAREFDISSYIFFPSTAMFLSFALFLPKLDESIVGEFRDHPEPIKIPGCIPIQGKDLLDPVQDRKNEAYKWTLHNARRYALADGIFLNSFPELEPGAIKYLQEEEAGKPLVYPIGPLVKIDADEKEERAECLKWLDEQPHGSVLFVSFGSGGTLSSAQIDELALGLEMSGQRFIWVVRSPSDKAADATYFSVHSQSDPLDFLPEGFVERTKNRGMVVPSWAPQAQILSHGSTGGFLTHCGWNSTLESVVNGIPLIAWPLYAEQRMNAVILTEEINVALKPKRNDNKGIVEKEEISKVVKSLLEGEEGKKLRRKMKELEEASKKAVGEDGSSTKIVTDLVNNWKAKIST

SEQ ID NO: 5816 - protein, 344 aa, Solanum lycopersicum
MGCFSLLCLHNLKDWEGLEKIESDTEYFRVPGLFDKIELTKNQLGNAARPRNEEWRVMSEKMKKAEEEAYGMVVNTFEDLEKEYIEGLMNAKNKKIWTIGPVSLCNKEKQDKAERGNEAAIDEHKCLNWLDSWEQNSVLFVCLGSLSRLSTSQMVELGLGLESSRRPFIWVVRHMSDEFKNWLVEEDFEERVKGQGLLIRGWAPQVLLLSHPSIGAFLTHCGWNSSLEGITAGVAMITWPMFAEQFCNERLIVDVLKTGVRSGIERQVMFGEEEKLGTQVSKDDIKKVIEQVMDEEMEGEMRRKRAKELGEKAKRAMEEEGSSHFNLTQLIQDVTEQAKILKPM

SEQ ID NO: 5817 - protein, 481 aa, Eucalyptus grandis
MEPSVTKPHALCIPLPAQGHINPMLKLAKLLHHKGFHITFVHTEFNHQRLEESLGEGALRGLDDFRFEVISDGLPPSNPRGILDLPSLCLTLPVDGLRSFRELVMKLMNSDAPPLTCIVSDGVMSFTLKVARELGVPEVMFFTPSGCGMLGYLHFEELVDRGLFPLKDESCLSNGFLDTAVDWIPAMQGIRLRDLPTFIRTANPDDIMFKYNSESVNNAFKADGVILNTFDDLEGEVVLAIKAKYPQLYTLGPLPMLHQQLLPSPNSLESIQSSLWREDGGCLGWLDGREPESVLYVNFGSLITVTREELREFAWGLANSRCPFLWVIRPNVVDGGEDVISEEFREEIRDRGLIVGWCAQERVLGHSSVGGFVTHCGWNSTLESLCAGVPLVCWPFFAEQHMNCLYACARWGIGLEMIDGGSDGLKRGRVEGVVRELMEGEKGREAREKAVEWKERGEAATRPGGSSHTNLEMLVNKLRGL

SEQ ID NO: 5818 - protein, 473 aa, Unknown
  Description of Unknown: Rosa hybrid cultivar sequence
MGGDAIVLYPYPGLGHLISMVELGKLLLTHHPSFSITILASTAPTTIAATAKLVASSNDQLTNYIKAVSADNPAINFHHLPTISSLPEHIEKLNLPFEYARLQIPNILQVLQTLKSSLKALILDMFCDALFDVTKDLNIPTFYFYTSAGRSLAVLLNIPTFHRTTNSLSDFGDVPISISGMPPIPVSAMPKLLFDRSTNFYKSFLSTSTHMAKSNGIILNTFDLLEERALKALRAGLCLPNQPTPPIFTVGPLISGKSGDNDEHESLKWLNNQPKDSVVFLCFGSMGVFSIKQLEAMALGLEKSGQRFLWVVRNPPIEELPVEEPSLEEILPKGFVERTKDRGLVVRKWAPQVEVLSHDSVGGFVTHCGWNSVLEAVCNGVPMVAWPLYAEQKLGRVFLVEEMKVAVGVKESETGFVSADELEKRVRELMDSESGDEIRGRVSEFSNGGVKAKEEGGSSVASLAKLAQLWKQK

SEQ ID NO: 5819 - protein, 490 aa, Unknown
  Description of Unknown: Oryza sativa Japonica Group sequence
MENGKCNGSSTTKCNGAAAAAMHVAMLVTPGMGHLIPLAELAKRLAARHGVTSTLLTFASTASATQREFLASLPPAIESVSLPPVDLSDLPADAAIETLMSEECVRLVPALTAILSGIRERRRLVAFVADLFGADSFDAARDAGVPRRYLFFPTNLHALTLLLHLPDLDVSIPGEFRDLDEPVRLPGCVPIPGKDILMPLQDKSRACYGWMVHHGTRYRDADAILVNSFDAVEPDAARVLRHPKPGVPPVFPIGPLIQTHCAGDDDAAAPPSPRAACLDWLDRQPDRSVIFVSFGSGGALPTEHMRELALGLELSGQRFLWVVRSPSDEGEVSANYYDAETKKNPFGYLPEGFVERTKEVGLLVPSWAPQTKVLAHRATGGFLTHCGWNSVLESLVHGVPMVAWPLFAEQRQNAVMLTEGAGAAIRVPESKGKEKIAAVVREMMVGEGRGAAVRAKVAELQKMATDGLRDGGAATSALDEVVDKWTGGEK

SEQ ID NO: 5820 - protein, 482 aa, Ricinus communis
MEMTSMANKPHAVCIPYPAQGHINPMLKLAKLLHQRGFYITFINTEHMQRRLLKSRGPDALNGLPDFQFETIPDGLPPSPDLDSTQDILALAQSVTNNCPVPFRNLLAKLESSPNVPPITCIVSDGIMSFTLDAAEEIGVPGVLFWTASACGFLAYAYNKQLVERGLIPLKDESYLTNGYLDTTVDWIPGMKGIRLKDLPTFRTTDPNDFFLNFSIQEVYGALRASGIILNTYDELEHEVLVALSSMFPPIYTIGPLDLVGAKNAEKDQNTSIGSNLWTDDLECLKWLDSKEPNSVVYVNFGSMTNMTRQQLVELAWGLGNSKQTFLWIIRTDIVKGESTILPEEFVDETKERGLRTSWCPQERVLKHPSIGGFLSHMGWNSTIESLSNGVPVICWPFGGEQQINCWFACNKWGIGMEIENEVKRDEVEKLVRELIEGEKGKEMRKKAMEWKRKAEEATDPNGKSSMNLDRLVNEVLLSQHK

SEQ ID NO: 5821 - protein, 476 aa, Rosa chinensis
MGTIRSETPTHIFLVCFPAQGHINPMLRLGKHLASKGLLVTFSTTEDYGNKMRKATGIVDNKTSPVGNGFIRFEFFDDGLPDPEDPRRTQLDFYIPLLEKVGKELVTGMINKHGEQGGVRVSCLVNNPFIPWVCDVATELGIPCATLWIQSCAVFSAYYHYNAGAVAFPTEAEPDLDVQLPSMPLLKHDEIPSFLHPFAPFRILGMAILGQFKKLSKSSYVLMDTIQELEPETIEEMSKVCIVKPVGPLFKIPEANNTTIRGDLMKADDCLDWLSSKPPASVVYISFGSIVYLKQEQVDEIAHGLLSSGISFLWVLRPPRKAAGFDMHVLPEGFLDKVGDNGKLVQWSPQEKVLAHPSLACFLTHCGWNSSVEALTLGVPVVTFPQWGDQVTNAKYLVDVFGVGLRLCRGEAENRLVLRDEIEKCLLEAMVGEKAVELKQNALRWKKVAEEAVAEGGSSQRNLQDFLDEIARTCIA

SEQ ID NO: 5822 - protein, 468 aa, Citrus unshiu
MKKTIALYPGPAFHHMISMVELGKLILQHRSDVSITILVPSMPLEESKTCSYINSISHRLNPIISFYYLPTIQMPSETLSRADIAIESIKLNSSNVFQALENISLTSKILSFIITSTTSFSYHPNIPTYTYFNSCASTLAAILYLPTLHNQITSSFKDHPSSLLFIPGLPPVKSSFMPEPVLDRQKPIYDFFLNYSTSLSKSNGIIINTFDFLEQQAIKAIVHGACVTNGTTPPLHCIGPLIVDAKDRAGGVSDDVSSDCLTWLDSQPSGSVVFLCFGSRGTFSAPQLKEIAIGLERSNQRFLWVVRNPSNAAEAELPEGFLERTKERGLVVKSWAPQSTILGHESVGGFVTHCGWSSVVEAVTYGVPMIAWPLYAEQFLNSVALVQEMKVAMPMFLNGEEETIGNGEGVVSAERVEERVRELMMGKALRERSLEMRMMAATAWNNNDGGSSFTAFSNLVASWNSLYS

SEQ ID NO: 5823 - protein, 473 aa, Stevia rebaudiana
MATSDSIVDDRKQLHVATFPWLAFGHILPYLQLSKLIAEKGHKVSFLSTTRNIQRLSSHISPLINVVQLTLPRVQELPEDAEATTDVHPEDIPYLKKASDGLQPEVTRFLEQHSPDWIIYDYTHYWLPSIAASLGISRAHFSVTTPWAIAYMGPSADAMINGSDGRTTVEDLTTPPKWFPFPTKVCWRKHDLARLVPYKAPGISDGYRMGLVLKGSDCLLSKCYHEFGTQWLPLLETLHQVPVVPVGLLPPEVPGDEKDETWVSIKKWLDGKQKGSVVYVALGSEVLVSQTEVVELALGLELSGLPFVWAYRKPKGPAKSDSVELPDGFVERTRDRGLVWTSWAPQLRILSHESVCGFLTHCGSGSIVEGLMFGHPLIMLPIFGDQPLNARLLEDKQVGIEIPRNEEDGCLTKESVARSLRSVVVEKEGEIYKANARELSKIYNDTKVEKEYVSQFVDYLEKNTRAVAIDHES

SEQ ID NO: 5824 - protein, 502 aa, Medicago truncatula
MYYTQLQETFGMPFYSVPTNLRVQSQERKKKQNKRKMASNEAPIHILLVSFPAQGHINPLLRLGKCLAAKGASVIFTTTEKAGKDMGIVDDITNKLATPIGDGSLIFEFFDHSLLDNGSVNHAELERIGRQFVSQMIKNHADSNKPISCVINNPFLPWVCDIAFEHNIPSALLWTNSSAVFAVCYDYVHKLVPFPSNEEPYIDVQLNSSIVLKYNEIPDYIHPFNPFPILGTLTTAQIKDMSKVFCVLVDTFEELEHDFIDYISKKSITIRHVGPLFKNPKANGASNNTLGDFTKSNDDSTIIEWLNTKPKGSVVYISFGTIVNHTQEQVNEIAYGLLNSQVSFLWVLKQHVFPDGFLEETSGRGKVVKWSPQEQVLAHSSVACFITHCGWNSSMEAITLGVPMLTFPAFGDQLTNAKFLVDVFGAGIRLGYGDKKLVTRDEVKKCLLEAITGEKAERLKQNAMKWKTAAEDAMAVGGSSDRHLDAFIQDIKKHGTGNIQKM

SEQ ID NO: 5825 - protein, 274 aa, Helianthus annuus
MLKVKDIVKMGFKREKDGAGGMIDNMVKQMKASSGIIWNSFKELEESELETIRRDIPAPSFPIPFAKHFTASSSSLLEHDRSFFPWLDQQPPKSVVYVSFGSVAQVEEKHFMEMVHGLVDSKQLFLWVVRPGFVSGSTWLEPLPDGFPGERGRIVKWAPQQEVLGHEAIVAFWTHGGWNSTLESVCEGVPMICSPFWGDQPLDARYVSDVWKVGVYLENGWKREEITGAIRRVMTDEEMRERARVLKQKLDVSLMKGGSSYESVESLVAYVSSF

SEQ ID NO: 5826 - protein, 468 aa, Helianthus annuus
MAKPHVIVIPYPAQGHVIPTLELAQCLVTQGVKVTFINTEVSHNLVTNNCLDKDGFGGLMQMVSLPDGLEPWDDRSDPCKLALSILQTMPLKLEELIVRINKEEESSRVSCVIADDCLGWAIKVAKKMGVRRAAFRPASVATLATILSCQKLIDEGIINKNGIPLSDEMIQLSETMPPIKPQNLAWACFEDSTITQVFFKFVVQTEEASRLIERFICNSCPELEAAAFSMYPQLQPIGPLLARNRLADQAGQFLQEDTTCLTWLDQQPPCSVIYVAFGSSTTFNQTQFEELALGLELSNRPFLWVVRPGMTKETATGYPDGYVKAVGSRGRIVKWAPQQKVLARPSVACFMSHCGWNSTLEGVTNGVPLLCWPHFCDQFQNASYACDIWKTGLEFEKDEEAGIVTRIEIISKVEQLLSDKTYKVKALEIKEKVTSSVSKGGYSHRNLDSFVQWIHKNDADAKDEPDFM

SEQ ID NO: 5827 - protein, 466 aa, Medicago truncatula
MIPTIDMAKIFASKGVKATIVTTPLNKPFFSRSIEQFKIHFNNIDIQTIKFPCVEGGLPEGCENVDAIPTISLLPTFFTATKLLQQPFEELLLQQKPHCIVADMFFPWATDSATKFGIPRIVFHATGFFSLCVSQCLEQYEPFKNVSSETEEFFIPNLPGNIKMTRLQLPNIFTKNDAITQNIAKLYAEMRESEARSYGVIVNSFYELDGVYADYYREVLGKKEWHIGPFSVYNRDMDTSYCRKEPSINKHECLKWLDTKDINSIVYVCFGSKNHFLNSQLKEIAMGLEASGKDFVWVVKKNAEDREIKGLLEFEKRMKGKGLIIRGWSPQLLILQHKAIGAIVTHCGWNLTLESVAAGVPMITWPIAPEQFYNEKLVTDVLKIGVPVGAKTWDGKVSDKVHWDAVEKAVKKVMEGEEAKEMRNKAKVLAKMAKKAVEEGGSSYSQLNALIEELGSLCHHQHISKE

SEQ ID NO: 5828 - protein, 319 aa, Genlisea aurea
MMAVPFFTECAGVDAVCYHLNKGNVTFPYEEEFLYRLPCLPALEAGDLLYLPEKIDKRGGIVRYLAAQFDRLENADYIFVNTFYHLEPEVLDWLEERYPKLRTIGPTFLLPGIATESVAPQQESYAEWLDSKQPNSVIFVSFGTIVAIGSNQMEEVAHALLMSNFNFLWVVRDTEEVEKLPEEIRGSKAGMIVNWCNQLSVLSHPAVSCFVTHCGWNSTLEALSIGVPIVAVPWWVDQLTNAKFIEDTWRVGVRLQRGWKSDEIFGRERIAKCIEEVVNDVELRKNSLKWKALADEAVRKGGTSIDNVDEFVQKLLLID

SEQ ID NO: 5829 - protein, 202 aa, Genlisea aurea
LMDHMGKYVAMKAIGPTVPSMYSDERLPEDREYGLSFFLPESTLCTDWLNRQPPASVVYVAFGSMAQLSQRQMEELARALEQIRRPFIWVVRSSERNKLPPGFPADIAAGLIVSWSPQLDVLAHRSVACFVTHCGWNSTLEALCLGVPVVALPQGSDQTTNSKFVADVWRTGVRAVACDGDGGVVDRITIERCVRDVIEGEE

SEQ ID NO: 5830 - protein, 474 aa, Unknown
  Description of Unknown: Oryza sativa Japonica Group sequence
MAAISPASDGVGRRRRRVLMFPIPFQGHVTPMLQLADVLRSRAGLAVTVFHAPVNAPAAAEQSAAEEDYRFVTVGAGVAGEAAALMPTGGSGSDFAGALMRLDALLRAPFDDALRQALLADDEEEAAATCLVVDSNLRGVQEVAERRGVRTLALRTGGACCLVAYMAFPELCGKGVLPPLSRDQLQLDMPLDELPPLRLRDMMFSATTTHGTMATCLERLLDSARCSSGVILNTFDDLENSDLRKIANGLSVPVYAIGPLHKISIGQESSLLTQDQSCLEWLDKQEAESVLYVSFGSLASMDSQELLETAWGLVDSEIPFLWVIRPNSVQGSEQTCLPDGFEEATRGRGMVVSWAPQQDVLKHRAVGGFWTHNGWNSTLESICDGVPMICRPQFADQMINARYVQEVWKIGFELEGKLERRMIERAVRRLLCSEEGKEMRHRAKDLKNKATTCIEKGGSSNTAIDMLVNLIMSF

SEQ ID NO: 5831 - protein, 485 aa, Ricinus communis
MRKLQVLFISTPAVGNLVPTVEFAQRLTDHDPRFSSTVLIISMAQRPIVNAYIQSCCSTASSATAINFIHLPSPEDPPSPDQYQSSFGYMCLLIDRHKVHVKHAISQLLHNEVQVSGLFVDMFSTSMVDVADELNIPCYLYFASPASFLGFMLHLPILDTQLATDFIDSDNDSIVPKDPSTKLIIPGFANPLPPQVLPTYVLRRKQDGYSWFLYHASRYKETKGMVVNTFQALEQHAINSLSASGLPPIYPIGPVLDLGGPIQWHPNRGQHHTILKWLDDQPMSSVVFLCFGSMGSLGSSQLREIAIALERTGFRFLWSIREPGKGKLDVPADYANAKEILPEGFLDRTAGIGLVCGWVPQVTILAHQAIGGFISHCGWNSILESLWRGVPIATWPIYAEQQMNAFQLVKELGLAVEIRLDYRNEGNDLVPSEEVERGIKCLMEGDNEVRKRVKEMSQKSRIAAVENGSSYASLTSLTDRLAAGI

SEQ ID NO: 5832 - protein, 293 aa, Medicago truncatula
MMFPWTVEAAAKLGIPRIHYYSSSYFSNCAEHFIMKYRPHDNLVSDTQKFTVPGFPHSIEMTPPAASFLKISYGTLYNSFHELESDYEKLGSTTMGIKSWSVGPVSAWTNKNDEKKANRGHIEELGKEEEWLNWLNSKENESVLYVSFGSLIRLDNAQIVEIAHGLENSGHNFIWVVRKYERDESENTFLQDFEERMKESKKGYIIWNWAPQLLILDHPATGGIVTHCGWNSILESLNAGLPMIAWPIFAEQFYNEKLLVDVLKIGVPVGAKVNEFWNSTSETVAVKREDVTP

SEQ ID NO: 5833 - protein, 462 aa, Medicago truncatula
MEQQKEIAKGHKIILMPSPFQGHITPLLQLATILHSKGFSITIVHTVFNSPNPSSYPHFTFHPLHGALSDTEASKVDAVHLTEVINVRCVQPLKECLTMLLDKEDDGVCCFVSDAALYFTQAVCVEFGIPRIVLRTGGASSFLVFASFPILREKGYFPVQESRMEEAVEDLPPLKVKDLPVFQSKEPEAFYKLVCRFIDECKKSSGIIWNTFEELESSALTKLRQDFSVPIYPIGPFHKYSLAGSNSTSLLTPDKTCISWLDKQEHKRVVYVSFGSIVAISEAEFLEIAWGLVNSNQPFLWAIRPGTIRGSEWLEPLPSGFLENLGERGYIVKWAPQEQVLKHPAVGAFWTHNGWNSTLESVCEGVPMICMPSFGDQKINAKYASDVWKVGVQLEGKLERGEIEKVIRKLMVGDEGNEIRENVMNLKEKANVCLKEGGSSYSFLDSLVSEILSLKSSTSRAH

SEQ ID NO: 5834 - protein, 465 aa, Erythranthe guttata
MEQQRHVLLVTFPVQGHINPSLQFAKRLTAMGIKVTFATSLYARRRMSRTAAGLPKGVTFAAFSDGYDDGFNPGNDDAGKYMTEIRSRGSQSLRDTILAAAEQGCPVTQLVYTLLLPWAPEVAREFHVPSALLWIQPATVLNIYYYYFNGYGDEIAANSNDATWQIQFPGIPALNFSKRDLPSFILPSSSDKHSVELPSFKEQLETLDAEKTKPKVLVNTFEALEPHALKSIDNYELIGVGPLIPSAPSDKSFRGDLFEKSDDNSVELWLNAKPESSVVYVSFGSILKLPKAQMEEIAKGLLESDRPFLWVIRINEDNKNEEEEEKLSCLDELEKIGKFVPWCSQLEVLTHASVGCFVSHCGWNSTLESLSSGVPVVAFPQWTDQGTNAKLIEDVWKSGVRVRGVGGDGVVESGEINRCIEEVMDGGERSRELRANAREWKSLAREAMDENGSSCNNLKAFLEDN

SEQ ID NO: 5835 - protein, 493 aa, Morus notabilis
MTQPPRFLLVTYPAQGHINPCLQFAKRLVGAGADVTFVTTYFAHRHMTKSRGDTTAAANRNGVVSISYVPFSDGHDDGFKPGDSVDHYLNEIRRRGSQAISDLVISAAKEGHPYTCLVYSLLLPWAALTAEELCLPSVLLWIQPATVFDIYYYYFHGYEDIIIENSTKDPSTDHNSSTTLPGLSLTLTRRDLPSFMDAANTYSFAIPLFKEQLEVLDKIKNPKILVNTFDQLELEALKAIEKLNLIAIGPLIPSAFLDEKDPSDTSFGGDLFHVDNQNYIEWLNSKPKGSIIYVSFGSMVELSRPQMEEIAKGLLDCGRPFLWVIREKAKKKESEKKNEEREEEEEKLSCHEELSKLGMIVPWCRQVEVLSSASLGCFVTHCGWNSTLESLVCGVPVVAFPQWTDQGTNAKLIEDMWKTGVRVKPNEKGIVESQDIKRCLDLVMEGEELRRNAVRWRDLAREAAKEGGSSDKNLKAFVAEMIGEGDHDHGFLD

SEQ ID NO: 5836 - protein, 481 aa, Medicago truncatula
MDLLAGTKKPHALLIPFPTQGHINPFLKLAKILHNKGFYITFVNTEFNHKRLLKSIGPNVVNCLQDFQFETIPDGLPPTNNMDATQSIPDLCDSTSKNCLVPFCKLVSKLNDPPVTCIISDGVMSFTIQASRQFGLPNVLFWAHSACVFMSYKQIKNLTERGLTPLKDASYLTNGHLDTIIDWIPGMKNITLRNLPGIYHTTDPNDTLLDFVTEQIEAASKASAIILPTFDALEYDVLNELSTMFPKLYTLGPLDLFLDKISENNGFESIQCNLWKEESECLKWLDSQEENSVLYVNFGSVIVMKYNQLVELAWGLANSKKKFLWVIRPDLVKGESETLLVPQEIVEETKDRGLMVGWCPQEKVLKHKAVGGFLSHCGWNSTIESISNGVPLICCPIFNDQILNCKYICSEWKFGMAMDSDNVTRDEVEKLVVELIEGEKGKEMRIKAIEWKKMAEEATNVDGSSSLNLEKLVSEVLLFKS

SEQ ID NO: 5837 - protein, 606 aa, Artemisia annua
  MOD_RES (436)..(436): Any amino acid
MGSKQDLVHVFLVTFPAQGHVNPLLRLGKLLASKGNLLVTFSASKSIGNKMKKAGAAVSGDPTPVGNCGGMIRFEFFDDGCSEDNDDERYDLDAYLPKLEAYGKSSLTGIINHHAEHGQPVSCLINNPFVPWVVDLAEELNIPCAMLWVQSCACFSSYYHYENSLVPFPTEEQPDIDVQLPHMPLLKSDEVPSFLHPSTPYPFLRRAVLGQFKNISKVFCVLMETFQELEGDLINYMSQICPIRPVGPLFKNPLLETSSNISGDLIKADDCLEWLDSKDPSSVVYISFGSVVSLSQEQVTEMAYGVLNSGVSFLWVMRKGATSTGESGVLPEGLLEKAGDRGLVVHWSPQAQVLAHPAVSCFLTHCGWNSTMEALSSGVPVVAFPGWGDQVTDAKYLADEWKVGIRMCRGEAENRVIGRDEVEVCLREATSGLKAXRKYCVSFLWVMRKDANSTGVLPEGFLEEAGDRGMVVHWSPQAQVLAHPAVSCFLTHCGWNSTMEALSSGVPVVAFPQWGDQVTDAKYLADEWKVGIRMCRGEAENRVIGRDEVEVCLREATSGLKATELKKNALNWKKAAEEAVAKGGSSDRNIQEFVDEVRKIRAKKSV

SEQ ID NO: 5838 - protein, 379 aa, Linum usitatissimum
MPALKEAFDDSRPEFCKILKRLKPDLLVYDVLQPWAAEAAAESNVVGIKCVLFVPGGAACYSFLAHYSIKPAGAQYPLQDWGIASREGFLKKRATYPNGLRDEDLDTYTDCMKRSSDIILIKTSRNIEAKYIDYLSELLGKEVVPVGPLVNDKPEDHRTGAEGDDDNKILKWLNSIDSDSPVVYVSFGSEYFPSKEEMGEIARGLEMNQALIRFIWVVRFPPDDHHREKNNKTLLLQEALPEGFLERVEGRGLLVEGWAPQAEILRNERVGGFVSHCGWSSVIEAVVYGVPIVAMPMQLDQPWNANLVEEIGVGVEVKGNKDGMIKRIDGDEMGRVIGEVLGDMEMRNRVRELSEKLKGDADAEMDCVVDRLRSLVEGV

SEQ ID NO: 5839 - protein, 432 aa, Punica granatum
MQPDTTSMTQPHLQQQQQERRPHVAVLAFPFSSHAASLLTVIRHLASAAPASTAVFSFFSTHKSNRSLFPIPPQPTTSTITTTTTTTTTTTTTTTTSSSSSSAFNMIKAYDVTDGVPEGYVFHGKPQEDIGLFMRAAPEGFRKAMEAAAVDSGKRITCVVADAFFWFAEEIAAELRVPWVAFWTSGPSSLAAHLYTDLLRNKLHITDGIAGLGDERLNDFIPGAPRGSDEYGCLPWLDNQKPAPASVAYISFGSVTVPPRSELVAIAEALEASGVPFIWSLKEEVWDHGLPDGFLGRTREQGMLVPWAPQVDILSHGAVGAFVTHCGWSSLLEGIAGGVPMICRPFFGDQRLNGRMIGDVLGIGLTVEGGAITKEGLVRSLGMILNGDEGKRMREIVRHLRLQAGKALSPTGSSTGNFNKLLQVITTGAPPC

SEQ ID NO: 5840 - protein, 499 aa, Oryza sativa
MAINGVAGAGAGDVDVDVDVDASAPPPPLHLVMFPWLAFGHLIPFLQLAKRLAARGHAAVTFLATPRNASRLAALPPELAAYVRVVSLPLPVLDGLPEGAESTADVPPEKVELLKKAFDGLAAPFAAFLADACAAGDREGRPDPFSRRPDWVVVDFAHGWLPPIADEHRVPCAFFSIYSAAALAFLGPKAAHDAHPRTEPEDFMSPPPWITFPSTIAFRRHEAAWVAAAAYRPNASGVSDIDRMWQLHQRCHLIVYRSCPDVEGAQLCGLLDELYHKPVVPAGLLLPPDAAGDDDDGHRPDLMRWLDEQPARSVVYVALGTEAPVTADNVRELALGLELAGARFLWALRDAGERLPEGYKARVAGRSVVEAGWVPQVRVLAHAAVGAFLTHCGWGSTVESLRFGGLPLVMLPFIADQGLIARAMADRGLGVEVARDDDGDGSFRGEDVAAAVRRVMAEEEGKVFARNAREMQEALGDGERQDRYVDELAERLRRRRSLS

SEQ ID NO: 5841 - protein, 494 aa, Centella asiatica
MDSKSNQLHLVLIPLMSPGHLIPMVDMAKLLTQRAVNVTIITTPRNATRSAAVIGRAIESGLPIRVLQVRFPSMAAGLPEGCENMEDVPSHDMFINFFKAIGMLQEPMEKLFEEIKPSPSCIISDKNVLWTAETAKRFQIPWIIFDGMSCFTQLCTHNIYTTSVHTSVPESEPFDVPGLPDRIQFTNAQLPGLFRSSPVTEYRTRIREAEGGAHGVVINSFEELEKDYLNEFKKVRGDKVWSIGPLSLCNIDNLDKAQRGSEASIDKHKCLEWLDSCEPGSVVYACLGSLSSLSPAQLMELALGLEAQAHPFIWVVKTIESKQKEIEKWISEEGFEERIKGRGLVIRGWALQVLILSHPAIGGFLTHCGWNSTMEGVCAGVPMVTWPLSAEQFFNEKLIVQVLGTGVSVGARVAMNFREEENYGVKVRREDIKEAIECLMFEGEEGEKRRKRARKLAEMAVQAVEEGGSSHLNLTLLIQDIIQYKTSKLSMNTA

SEQ ID NO: 5842 - protein, 486 aa, Arachis duranensis
MPYHHFLLITYPAQGHINPSLQLAKRLINLGARVTVSTTVHVHRRMSDKPSIPGLSFAPFSDGYDDGFTRSDDSSYAHYAAEYKRRGTEFVTDLINSAAEEGQHPFTCVVYTFLQNWVAEVARAFHLPAVVLWTQPAVLLDIHYFYFHGYRDYVNEKITQEPSSCSLELPGLPPLQPSRDLPSFYLESNSSTKFRNSFIVSRIEKQFRDLDQEVKPRILANTVEALEPDALRAVDDKLDVIPIGPLIPSAFLDDDQDGGGDSSYGGNIFKRSDDYVEWLDSQAEKSVVYVSFGSFCVLAKKQMEEMARALLDLGHPFLWVIREKVKKEKEREEEEEEELSCREELEARGKIVEWCSQVEVLSHGSLGCFVTHCGWNSTMESLASGVPMVAFPQWLDQKTNAKLVEDVWKTGVRVDREEEKEEGVVEAGEIKRCLDMVMGSGEKAKELRENADKWKRLAREAVKEGGSSDKNLKTFLHHVHDLMPRS

SEQ ID NO: 5843 - protein, 280 aa, Helianthus annuus
MKSSTVILYPSPGIGHLVSMVEIGKLIHTHHPSLSVVILIIPAHYETGSTGKYINTVSTTTPSITFHRLPAIPLPPDFSSDFNDLAFGIPELYNPVVYDTLVSISQISTIKAVILDFYVDAAFQVTKSLRLPTYYFYTSGASGLCGFLYSPYAHKTTCKSYKDVNDFLDIPGVPRMHSSYMPTAVSDRESNSYKYFLKSAINMAKSSGVIANSFFELEERAAQTLRDGKCIPEGPTPPTYLIGPLLASGEQVDDDDDDDEHECLKWLKTQPSKSQWRASG

SEQ ID NO: 5844 - protein, 241 aa, Citrus unshiu
MIGWAPQQKALNHPSIACFLSHCGWNSTLEGVSNGIPFLCWPYFAEQFLNEKYICDSWKVGLRFDKKESGIITREEIKNRVDQVLGDRDFKARALGLKEKAMSSIREGGSSRKAFQNFLEWVKTNALAHNSPVMGEDEIPLVSSSRAIYTLRFEHKLSTRSHPQTSEVEEHLIRLRTSLAASTSSLGHELNDLQDSCDSVEKILQLQILNVCSTAQNALLQIKESTLGIRSVLCKRGDEEN

SEQ ID NO: 5845 - protein, 502 aa, Cephalotus follicularis
MEKQKSRGRRLLLVPCPFQGHINPMFQLGTILHSKGFSIAIAHTLFNFPNPSDHPDFDFLPIADGISKEESTEDFITFILSLNVNCRIPFQESLCGMIENQDLLDEIPCIIYDSLMYFAGDVAHHLKLPNIILQTCCVTNLVLYKIYPRLQEEGYLPVKDFTFLPMYNEQVSSQDVVELIKGFNINCKAPLQELLAPRASKDSISLDLVPGFHPLRFRDLPIFNYKNSDALLQVLADFCSLIRYPSAIIWNTIEFLEHSSLEKYQQRHQIPFFTLGPLNKFAPASSSSLLEEDISCISWLDKQRPNSVLYVSLGSLASMDKKQLNEMAWGLANSKQPFLWVIRPGSVSGSEWIELLPDGFVEVVCERGCIVKWAPQKVVLAHDAVGGFWSHCGWNSTVESISEGVPMICWPYFLDQRVHARYLSHVWRLGIAYENELESGEVKETVRRLMVSEEGQEMRQRAMEFKEKVELCIKPGGCSYNSLNELAKYISTLKKSPTDSIL

SEQ ID NO: 5846 - protein, 436 aa, Cajanus cajan
MLQFSKRLVQRGVKVTLITVVSNWKTMSNKNITSIEVESISDGYDDGGLAAAESLEAYIDTFWRVGSETLAELVHKLAGSSHPPDCVIYDAFMPWALDVAKKFGLLGATFFTQSCSTNNIYLHAYKKLLELPLSQTEYLLPGMPKFAAEDFPSFLNKYGSYPGFFGVVVNQFANIYKADWVLANTFYELEQGAVDWLVKIWPLKTIGPCLPSMYLDKRLQDDKDYGVNMYNPNSEACIKWLDDKPKGSVVYVSFGSMAELSEEQTEELAWGLRDGGNYFIWVIRDSEQGKLPKDFVGTSEKGLIVAWCPQLQVLIHEALGCFLTHCGWNSTLEALSLGVPLIAMPLWTDQITNAKLVRDVWKIGVKAVADEKEIVRRETITHCIKEILETEKGNEIKKNSIKWKNLAKNYVDEGGNSDKSTTEFVTELAHRCAASK

SEQ ID NO: 5847 - protein, 477 aa, Barbarea vulgaris
MVKKIELIFIPVPSTGHLLVHIEFAKRLINLDNRIHTITILNLTSPTSPHASVFARSLIASQPRIRLHDLPSVDDHPPLDLYQRAPEAYIVQLVKKTTPLIKDAVSSIVASRRQGSDSVPVAGLVLDFFCNSLIAVVGNQLNLPSYIFLTCNARYLGMMKYLPDRHRNIASAFDRSSGDEELPIPGFVNSIPAKFMPPGLFNREAYEAYVELAPRFGDAKGILVNSFAELEPHPFDYFSHLESFPPVYPVGPILSLEDRASPNEEAADRDQIVRWLDDQPESSVVFLCFGSKGSVDEPQVKEIARALELVGCRFLWSIRASGVETNPNDMLPEGFMGRVAGKGLVCGWAPQVEVLAHKAIGGFVSHCGWNSTLESLWFGVPIATWPMYAEQQLNAFTLVKELGLAVDLRMDYVSGLGGLVTCDEITRAVRSMMDGGEGKRKKVKEMADAARKALVDGGSSSLATARFIGELLDNGSC

SEQ ID NO: 5848 - protein, 460 aa, Ricinus communis
MAQPKSSNFHIVMFPWFAVGHMTPFLHLANRVAERGCSTTFLLPNKAKLQLEHFNTHPDLITFHSITVPHVEGLPLGTETASDIPIHLTHFLAIALDRTRRQVEKVIVDTRPKLVIFDVAHWIPKITKDLGIKAINYNVVCAASIAIALVPARNVTKDRPVTEAELLQPPAGYPSSNVVLRGHEVRSLLFVSLPFGEGITFYERIYTAIKGSDAIAIRTCHEIEGKLCDYIASQYEKPVFLTGPVLPEPSKAPLEDQWTKWLGGFEKDSVIFCAFGSQIKLEKNQFQELVLGLESTGLPFLAALKPPNGASTVEEALPEGFEERVNGRGVIWGGWVQQLLILDHPSVGCFLNHCGFGSMWESLMSDCQIVLVPHLGDQILNTRIMAEELKVGVEVVRDESGWFSKESLRKAITSVMDKNSEVGSMVKENHRKWTEILGGEGFMTSYIDKFVQNMQDLVNN

SEQ ID NO: 5849 - protein, 455 aa, Hordeum vulgare
MTMTTTPVRPHALLVSTPFQGHINPLMRLGRRLAAKGVLVTFTTALRAAVRVEEDSDGHERAGFRFERLHGGGLWEPEDPRFSDAGDMARHVEAAGPAALKELIRREAEAGRPVTCVVTNAFVPWALRVAGELGLPCGMLWIQSCALLSVYYHYVHSLAAFPEADDDAPGRSLLVAIPGLPDLAMDELRPLLIYASDQYMWRKMLVEDLGGIRERVSWVFVNTFDELEHEAIAALGEHVQVIPVGPLIEPETDGPSDDDGCIAWLDAQAPRSVVFVAFGSLVKTDDDETAEIAEGLVSTGRPFLWVMRDDNRAVLFQGTLDGLKAATLCGRGKVVPWCKQAHVLAHGAIGCFVTHCGWNSTAEALAAGVPVVASPRWSDQNINAKFLVDVYRIGVRAPTPVTREALHLSIEEVMSGPEAGEMELRAASWKEKARAALAGGGSSDNGVQAFVDQIK

SEQ ID NO: 5850 - protein, 478 aa, Glycine max
MLDRVEMINTEMEPLKLYFIHYPTAGHMIPLCDIATLFASRGHHATIITTPVNAQIIRKSIPSLRLHTVPFPSQELGLPDGIESLSSLIDDIRHFPKVYHAISMLQPPIEQFVEQHPPDCIVADFLFPWVHDLANKLNIPSVAFNGFSLFAICAIRAVNLESSDSFHIPSIPHPISLNATPPKELTQYLKLMLESQLKSHAIIINNFAELDGQDYIRHYEKTTGHKTWHLGPASLISCRTAQEKAERGMKSAVSMQDCVSWLDSKRVNSVLYICFGSLCHFPDEQLYEIACGMEASGHEFIWVVPEKKGKEHESEEEKEKWLPRGFEERNAEKGMIIRGWAPQVIILGHPAVGAFITHCGWNSTVEAVSEGVPMLTWPVHGEQFYNEKLITEVRGIGVEVGAAEWTTTGFGERYQMLTRDSIQKAVRRLMDGADQALEIRRRAKHFQEKAKQAVRVGGMPSFHLQIPQKAKQFIFIRY

SEQ ID NO: 5851 - protein, 480 aa, Eutrema halophilum
MEEQKAPHVAIIPSPGMGHLIPLVQFAKRLVHRHGFTVTFLVVGEGPPSKAQRTVLESLPSSISSVFLPPADLTDLPQTTRIETRISLTVSRSNPELRRVFDSFAAEGRLPTALFVDLFGTDAFDVAVEFHVSPYIFYPSTANVLSFFLHLPKLDETVSCEFTELTEPVMIPGCVPVSGKDLLDPAQDRKNDAYKWLLHNTKRYKEAEGILVNSFLELEPNALKTLQEPGLDKPPVYPVGPLVNIGKQESNGVEESECLKWLDNQPIGSVLYVSFGSGGTLTCEQFNELALGLADSEQRFLWVIRTPSGIANASYFDSHSQNDPLTFLPPGFLEHTKGRGFVIPSWAPQAQILAHPSTGGFLTHCGWNSTLESIVSGVPLIAWPLYAEQKMNAVLLTEDIHVALKVRAREDGIVGKEEVARVVKGLMEGEEGKGVRNKMKEMKEGASRALKDDGSSTKALNLVVLKWKAHQKELEQNGKH

SEQ ID NO: 5852 - protein, 491 aa, Medicago truncatula
MEDQTKPKLKSIFLPFLSTSHIIPLVDMARLFALHGVDVTIISTKYNSTIFQNSINLDASRGRSIRTHIIDFPAEKVGIPAGIEAFNVNTPKEMIPKIYMGLYILQPDIEKLFETLQPDFIVTDMFFPWSADVAKKLGIPRIMFHGASYLARSAAHSVEVYRPHLKAESDTDKFVIPDLPDELEMTRLQLPDWLRSPNQYAELMKVIKESEKKSFGSVFNSFYKLESEYYDHYKKVMGTKSWGLGPVSLWANQDDSDKAARGYARKEEGAKEEGWLKWLNSKPDGSVLYVSFGSMNKFPYSQLVEIAHALENSGHNFIWVVRKNEENEEGGVFLEEFEKKMKESGKGYLIWGWAPQLLILENHAIGGLVSHCGWNTVVESVNVGLPTVTWPLFAEHFFNEKLVVDVLKIGVPVGAKEWRNWNEFGSEVVKREDIGNAIRLMMEGGEEEVAMRKRVKELSVEAKKAIKVGGSSYNNMVELIQELRSIKLAKV

SEQ ID NO: 5853 - protein, 464 aa, Setaria italica
MAGQEQRRRRHRVVLFPLPFQGHVTPMLQLAALLHSRGLAVTVLHTAFNAPDPARHPELAFVPIHEALPDEVTCPGADIARQLLALNTACEAPFRDALASLLLLRGRRGQDQDQGSVACAVVDGQCYAAVDAAAQLGVPVLALRTDSAATFRTMLAFPRLRDAGYVPIKEEMLDELVPDLEPLRVRDLIRVDGSDADALCGFIARVAGAVRSSASGVVVNTFEGIEAPELAKIRRELSLPVFAVGPLHLMSRAPAEQTTLRAPDGGCLAWLDTRPPRSVLYVSLGSVATVGHAAFEEMAWGLAGSGVPFLWVVRPGLVAGGEEEAPPPLPDGFSEEIKNRGKIVTWAPQREVLAHAAIGAFWTHCGWNSTLESVCEGVPMLVQPCFADQTVNARYVTHVWGVGMEVGEVIERGIVAEAVAKVMVGEEGARMRERAHRLKMEASAATSLSIDSLIHYISSLPTAN

SEQ ID NO: 5854 - protein, 469 aa, Brachypodium distachyon
MDSTGKSVMATSEGPSILFLPFPGAQGHANPMLQFGHRLAYQYGFRPTLVVTRYVLSTALPPDAPFRVAAISDGFDAGGIRSCLDMAEYWRRLEAVGSETLSRLISDEAREGRPVRVLVYDPHVAWARRVAREAGVPAAAFFSQPCAVDIFYGELHAGRMAMPVTEADARALLVRGAIGVELALDDVPPFVVVPESQPVFTKASIGQFEGLEDADDVLVNSFRDIEPMEVEYMESTWRAKTIGPTLPSFYLDDDRLPSNKSYGFNLFNGGDAVCMKWLDQQSMSSVVLVSYGTVSNYDESQLEELGNGLCSSGKPFIWVVRSNEAHKLSGELKAKCEKKGLIVSWCPQLEVLAHKATGCFLTHCGWNSTLEAIVNGVPVVGIPHWADQPTIAKYVESAWDMGVRVKKSLNGQLRREEIERCIKEVMDSERKDEYTRNAAKWMQKAKETMHAGGSSNKHIAEFAAKYSSS

SEQ ID NO: 5855 - protein, 456 aa, Ricinus communis
MATHQCQKTLHLNVQTALKPTRVIVVMVPLPAQGHLNQLLQLSRLILSYNIPVHFVGAATHNRQVKLRDHGWDTQNKFPSHLQPAFLASSNLRDPVSLLLRSLASKARKVVVIHDSLMGSVIQEVRYISNAESYTFHSVSAFTIFLFHWERMGKHIRPNGLIPKDVPSLEGCFTSEFLSFIYSQYKHQDFCSGYVYNTCRLIEGSYMDLLEKQHKETTVKEKKTHWALGPFNPVSITERTDSDQRHSCLDWLDKQARNSVIYVSFGTTTTMNNEQIKQLATGLKQSQQKFIWVLRDADKGDVFNGEHGQRVELPTGYEDSLSGMGLIARDWVPQLEILGHPATGGFMSHCGWNSCMESITMGVPIAAWPMHSDQPRNAVLITEFLKIGIYVKDWTCRDEIVTSKMIETCVKKLMASDEGDAVRKRVAELGGSVQRSMGEGGVSRMEMDSFIAHISS

SEQ ID NO: 5856 - protein, 446 aa, Rhodamnia argentea
MSRENKTVHVLMLPWLAHGHISPFLELGKRLSKRNFHIYLCSTPVNLSSIKPKISEKYSSSIELVELHLPSLPDLPPHYHTTKGLPPHLMNTLKVAFDMASPGFSNITKDLSPDLIVYDFLQPWAPEIARLHNIPAVNFWSAGAGIASFFFHAIKNIDGEFPLEAISLHDQERRKIDRMYENSAGGIKDRDRALQCVGKSSGIILVKTFRELEGKYMDYLSSHVGKRVVPVGPLVQDPSQEDGDDNIIGWLDRKEKCSSVFVSCGTEYFLTEREREEIAYGLELSSVNFIWVIRFPVGESMELEEALPVGFLERVGDRGLVREGWAPQVKILEHRSISGFVSHCGWSSIMESMKLGVPIIAVPMQLDQPLNAQIVEKVGVGLEVKRSKSGELERGEIAKAIRSVVVEKDGEGVRKKAREMSASIRNKGERELDEVVDALVDVLHAA

SEQ ID NO: 5857 - protein, 445 aa, Unknown
  Description of Unknown: Oryza sativa Japonica Group sequence
MDTGRSKSSSRLHLVIFPWLAFGHLLPYLELAERVASRGHRVSFVSTPRNLARLPDGTECTNDVPSGKFELLWKAFDALAAPFAEFLGAACDAAGERPDWIIADTFHHWAPLVALQHKVPCAMLLPSASMMAGWATRSSEPAGASIFQVLGVWAQKASFFVDHGASGMSVAKRCSLAMERCTLAAMRSCPEWEPDAFQQVAAGLKNKPLIPLGLVPPSPDGGRRRAGMTDNSTMRWLDVQPAKSVVYVALGSEVPLPLEQVHELALGLELAGTRFLWALRKPHGVDLSDVLPPGYQERTKSHGHVAMGWVPQITILAHAAVGAFLTHCGRNSLVEGLLFGNPLIMLPIFGDQGPNARLMEGNKVGSQVRRDDMDGSFDRHGVAAAVRAVMVEEETRRVFVANAIRLQELVADKELHERYIDEFIQQLVSHGADGSCNTAAPVPSS

SEQ ID NO: 5858 - protein, 276 aa, Medicago truncatula
MSFYDFEGAYEEHYKNAFGTKCWGIGPVSLWANQDVSDNDESGGTKVEEGNNDLLKWLNSKKENSVLYLSFGSLNKFPTSQLIEIAHALEASSHDFIWVVRKNNDKEGEGFMEEFEKRVKESNKGYLIWGWAPQMLILENKAIGGIVTHCGWSTIMESIKVGLSMVSWPLFADQFFNEKIIIDVLRIGVSVGAKEWRNWNEFGSEVVKREEIGKAIALVMENGKESEEMRLRAKALSENAKKAILVGGSSHANLMQLIHELKSLKLQRLKANTKDL

SEQ ID NO: 5859 - protein, 474 aa, Cephalotus follicularis
MEEAIVLYPSPGIGHLIPMVELGKLILTHQSSLSIHILITPPPYSAGPAAPFIASVSSKFPSIIFHHLPIITLPPSITSSSRHHETLTFEVARRNNLNVHQAILSISKTFAINCLILDFFCIAALSVANELNLPAYCLFTSPAGFLAGLLYLPTLHSKTSKSFKDLNAPLDIPGVPPIPSSDMPTPTLERNDLAYQGFFEVSTKLPKVSAIIVNSFEPLEQRTVRAITDGLCVPDGPTPPVYSIGPLIAEERGHTNGSDAILDCLSWLKMQPSKSVVFLCFGSLGLFSKEQLHEIAIGLERSGQSFLWVVRNPPPQNQSLATTALPDPDLASLLPDGFLDRTKDRGFVVKSWVPQVTVLSHDSIGGFVTHCGWNSVLEALSEGVPMVAWPIYAEQRYNRVLLVEEMKIALPMNELENGFVSAAEVEKRVRELMDSVEGNLVRERTMAMKNAAMYALSEGGSSRIALAKFVESWK

SEQ ID NO: 5860 - protein, 482 aa, Vigna angularis
MASSATIKKPHAVCVPHPTQGHINPMLKLAKLLHFKGFHITFVNTEYTHKRLLKSRGPDSLKGLSSFRFETIPDGLPEPAVDATQDIPSLCDSTRRTCLPHLNNLLAKINSSDAPPVTCIVADGVMSFTLDAAEELGVPLALFWTPSACGFMCYVQFQQLIQKGIIPLKDSSSITNGYLETTIDWIPGIKEIRLRDFPSFIRTADSEDFMIEFLQWECGRAREASAIILNTFDAMEHDVLEALSSILPPVYSIGPLNLLVKDIDDEDLNAIRSNLWKEEFECVEWLDTREPNSVVYVNFGSITVMTSEQLNEFAWGLANSNKSFLWVIRPDVVGGENVVLPPEFVEQTKDRGLLSSWCSQEQVLAHPAVGGFLTHSGWNSTLESVCGGVPMICWPFFAEQQTNCRFCCREWGIGLEIEDVKRDKIESLVKELMDGKKGREMKEKAMQWKDLAVSATSGPYGSSFLNLENMIREVLVRGNDKN

SEQ ID NO: 5861 - protein, 453 aa, Vigna angularis
MNIPNLLVVPFPVQGHVNPLMNFSQKMVEHGCKITFVNTDFSQKRMMSSEGKQESLEESPTIKLVSIPDGLEADDDRSDLGKLCDSVLSTMPSMLEKVIEEIHVNSGERITCIVADVIMGWALEVGRKLGIKGILFCTASAATFALEYKIPKLIQDGIIDSHGCPITKGTFQISPSMPSMDVKAIWWSNVYNPTTERKIFKYLVHCMQNSNLAKWCICNTTYELEPSALSCVPKLLPVGPLLRSYDKTNVTARSLGQFWEEDHSCIDWLNQQPRCSVLYIAFGSFTLFDQNQFNELALGLDLTNRSFLWVVRQDNKMAFPSEFLGSKGKIVGWTPQLKVLNHPSIACFLSHCGWNSIIEGFSSGVPFLCWPYFTDQFQNRNYICDELKVGLGLNSDENGLVSRWEIKKKLDRLISDEQIRTKSLELKETVMSNIAEGGGSSENVSRLLSWLKS

SEQ ID NO: 5862 - protein, 491 aa, Sorghum bicolor
MAIKDELQPLHILFFPFLAPGHLIPIADMAALFAARGVKCTILTTPVNAQVIRSAVDHANDASRGTDGALAIDIAVVPFPDVGLPPGVESGPALNSMEDREKFSHAAQLLRDPFDRFLVENRPDAVVSDSFFDWSVDAAAEHGVPRIAFLGISLFARSCSDTMLRNNPVEAAPDDPDAPVLLPGLPHRVELKRSQMMEPKKRPEHWAFFQRVNAADQRSYGEVFNSFHELEPDYLEHYTTTLGRRAWLVGPVALASKDAATRGAGNGLSPDADGCQQWLDTKPEGSVLYVSFGTLSHFSPPELRELARGLDMSGKNFVWVINGGAETEESEWMPDGFAELMACGDRGFIIRGWAPQMVILTHPAVGGFVTHCGWNSTLEAVSAGVPMVTWPRYADQFYNEKLVVELLKVGVGVGSTDYASKLETRRVIGGEVIAEAIGRVMGDGEDAEAIREKAQELGGKARRAVAKGGSSYDDVGRLVDELMARRSSVNV

SEQ ID NO: 5863 - protein, 554 aa, Capsella rubella
MESVKYRVSIRTNRLLSNFILLPSNFFIHNTFNFFFNLFSTEPQILISYQQDMGTSSEVSNKLHFLLFPFMAHGHMIPTLDMAKLFATKGAKSTILTTPLNSKLFFEKPIKSFNQENPGLEDITTQILDFPCTELGLPEGCENTDFIFSSPDLDKGDLGQKFLLAMKYFQEPLEHVLETMKPDCLVGNMFFPWATKVAEKFGVPRLVFHGTGCFSLCASHCLRLHKPYKNVASSSELFVIPELPGDIVITEEQVIEKEEESVMGKFMKGIRESERESFGVLVNSFYELEPAYAGFLKRFVARRAWHIGPLSLGNRKFEEKAGRGKKASIDEHECLKWLDSKKCDSVVYLSFGTMSSFNKDQLIEIAAGMEMSGHDFVWVVNKYGSQGEKEEWLPEGFEEKTKGKGLIIRGWAPQVLILEHQAIGGFVTHCGWNSLLEGVASGLPMVTWPVGAEQFYNEKLVTQVLKTGVSVGVKKMMKVVGDFISREKVERAVKEVMAGDERRKRAKELGEMAKTAVKEGGSSYIELNTLMEELKLVKLQKEKESQQKTERFAR

SEQ ID NO: 5864 - protein, 499 aa, Polygala tenuifolia
MDYLNSLEKPHAVFIPYPAQGHINPMLKLAKLFHFRGFHITFVNTEYNHKRLLKARGSNSLDGLPDFCFETIPDGLPPSDADATQDIPTLTFSIRDTFFFPFLRLLTKLNESASAGFLPKVSCIVSDSTTTWISVKAADQLGIPTVSFWTVSASTFNCFAHIPHLIDRGLIPLKDKSCLTNGYLDKKLEWIPCLKNVRLRDLPSFFNSTEPNDLDSKITDFVREAMVMTTKATAVIINTFSELEQDVVSSLSTMFPKLYTIGPVHLLADQVIKKHLESIGSNLWKEEAECMQWLDTKQPNSVVYVNYGSITVMTPDQLTEFAWGLANSKKPFLWIIRPDLVNGSSDILSSEFENEIKERGLITGWCPQEQVLSHPSIGGFLTHCGWNSTIESMTQGVPLVCWPFYGDQQTNCRFACTEWGIGIEIDTNVKRGEVETLVNELMEGDKGKAVKANVMEWKKKAEQAVRPDGSSSMNLDKLIEEVLLKARHDSEFMIHPPEL

SEQ ID NO: 5865 - protein, 519 aa, Heliothis virescens
MKLLIFFIFYCIIKCESYKILAIFPYSGRSHHIYFTALVEELALKKHDVTVINYHPVPALPTLRHISLQEGKENSSDDVNIEEHLKVLSNSDFLTVAYDGAQAFKHLAHTNCKKLINNREVRELIQSEVSFDIVIVEQFVTDCGLAVAYKLNAPVIGMTAHILMSWTYSRLGAPNHPAYVPNHFFASGKKPNLWNRIKSAIINFGMNMYYAHVIQKQDQEIVHAVYPDTPLLEELGKNISLLLINQYFPLTGSRLHGSNVVEVGGMHIKENAQIEDKRLKTFLDNADRDVVFISFGSVAKNFPQKIINEIKNLIKSNGDILFIWKSDASDWEPPTNAYVDKWMPQKAILCHPKVVAFITHSGMLSTSEAMYCGVPIVGVPLFGDQFANAQFAVENGLGVAVDILSLNERVLTDALNVILQDKYRQQANVLSQQWKDRPQSPMDTAIFWIEYVAKYKGVENLKPSSVDLPMYQYLIIDVILVLGSVFLLLLFIIVKIIFLIVKINSKQKDLKKEKRKKRD

SEQ ID NO: 5866 - protein, 494 aa, Morella rubra
MRPETPTHVLLVSFPGQGHINPLLRLGKRLAAKGLLVTFSTTENFGKEMRKANNIPDQPTPVGDGSLRFEFFEDGWEEEEPRRKELDEYLPQLEHGGKEAIHQIIKKYAEDHPVSCVINNSFIPWVCDVANDLGIPNAVLWVQSCTVFSVYCHYFHNLVPFPSEAEPKIDVQLPCMPLLKYDEIPDFLHPSSPFPFIGRLILSQFKNLSKPFCVLMDTFQELEPDSINSMSKFYMIKPVGPLFVKPKASNTSIRGDFLKADDCIEWLNSKSPASVVYISFGSIAYIGQEQVDELAHGLLNSGISFLWVMKPPNKTTNFKPPVLPDGFMEKVGNKGKVIQWSPQEEVLAHASVACFVTHCGWNSSMEALTLGVPVVTFPQWGDQVTNARFLVDVFGVGVRLSRGVAENILILRDDIERCLLEAMVGPKAVEMKHNALKWKMAAKEAVEEGGSSNQNIQAFVDEIRKRCVAVASETTTQKQENNINPTCFMDKPTI

SEQ ID NO: 5867 - protein, 408 aa, Cajanus cajan
MLRLGKCLAARGCYVTFSTTKGTQNLLDYTAHLDRIGKQFVSEMLKKHAEAKRPVSCIINNPFFSWVNDVAAEHGIPTALYWIHSAATFTACHRYFQKLSPFPTDSSPYTLVELPGGVVLKHSEIPDFLHPFSRTPFLKTLVRQQFENLSKTFCVLMDTFQELEQGYLDYLSQFHLVRPVGPLFKNPSSAALRNDDCMEWLNSKPRASVVYISLGTIVSLSVEQIGEFAHGLLNSRVSFLWVLSGSEREEALKANVMPDGFFERTSERGKVVQWSPQVEVLAHPSVACYLSHCGWNSTMEALASGVPMLTFSQISDQVTNAKFVVDVYGVGIRVRGDETEEKVISRDEIQRLLVEAMVGPKAEELKQNALKWKSAAEAAWAHGGSSHRNLDAFVEDLKKLSHVTKTPQ

SEQ ID NO: 5868 - protein, 447 aa, Aegilops tauschii
MARGHVALFPLPFQGHLSPALQLADALYGRGLAITVLHATFNAPDPAAHPEFGFVAVADGGMPDAKDGIGKILAMNDAMEASGCVRDALAALAPRPACLVIDTSLPAAQKAAAELDMPTVVLHTGSAAAIRLFRSYAMLHDKAYLPAQEHELDKPVKELAPIRVSDLFDPSKYPNPEMANRLLDTATEVTDNSSGVVINTFEALETPELEAIRSELAASGVRVFAIGPLHKLSTIGGAGSSLLKEDRSCIEWLDAQAAGSVLYVSFGSVAPVSREDFEEVAWGLANSGRPFLWVVRRGLVIGSGAEDIELPEGFQRAAEGRGKVVRWAPQQEVLGHRAVGGFWTHSGWNSTLEGICEGVPMLCRPLFGDQLANGRYVEEVWRTGALLVGKLERGKVEEAIARFMDGEDGAAMRERAKELQIKAMEALSSAGSTQLAVDKLIDHILSL

SEQ ID NO: 5869 - protein, 481 aa, Arabidopsis thaliana
MADGNTPHVAIIPSPGIGHLIPLVELAKRLLDNHGFTVTFIIPGDSPPSKAQRSVLNSLPSSIASVFLPPADLSDVPSTARIETRISLTVTRSNPALRELFGSLSAEKRLPAVLVVDLFGTDAFDVAAEFHVSPYIFYASNANVLTFLLHLPKLDETVSCEFRELTEPVIIPGCVPITGKDFVDPCQDRKDESYKWLLHNVKRFKEAEGILVNSFVDLEPNTIKIVQEPAPDKPPVYLIGPLVNSGSHDADVNDEYKCLNWLDNQPFGSVLYVSFGSGGTLTFEQFIELALGLAESGKRFLWVIRSPSGIASSSYFNPQSRNDPFSFLPQGFLDRTKEKGLVVGSWAPQAQILTHTSIGGFLTHCGWNSSLESIVNGVPLIAWPLYAEQKMNALLLVDVGAALRARLGEDGVVGREEVARVVKGLIEGEEGNAVRKKMKELKEGSVRVLRDDGFSTKSLNEVSLKWKAHQRKIDQEQESFL

SEQ ID NO: 5870 - protein, 513 aa, Mucuna pruriens
MKKEARLVFIPSPEVGHIVATIEFAKLLTKRDDRLWITLLVINLPFDPTIGDYTHSHASQRIEIINLPECPSESTTIIDLLEKHKPNVKQVVSNLPSTPPLAAFVVDMFCTTMIDVAKHFEVPSLVFFTSGVAFLGLLLRLHTLREQDNIDFKDSHTDLVIPSFANPVPSMALPTFTLHKEWESFFLAFGRGLKEADAIIVNSFQELESHAVHSFSDGPLPIFPVGPILNPKPKPHAQADNTQIFNWLDHQPPSSVVFLCFGSVGFLPEDQVREIALALEHSGARFLWSLRKPPPKGSHIRTPPSDYLLSDLDAVLPGFLDRTAGIGKVIGWAPQAQILAHPATGGFVSHCGWNSTLESIYFGVPIATWPLFAEQQSNAFELVRELKIAVEVALDYRMDVKVGITTLLSADKIEKGIRSVLNIDEDKRKRVKEMSEQSKKTLLEGGWWDGNRCWSGGLPLDFSKGLYLEGLDAVSFILLTLYIYFIQAMKTDRLQNVLNVMKNVPDVECVVHQ

SEQ ID NO: 5871 - protein, 211 aa, Unknown
  Description of Unknown: Oryza sativa Japonica Group sequence
MWQADSTCIRWLDAQPAASVVYVSFGSWVGPIGHDKIRELALGLEATGRPFLWAIKDDPSWRAGLPAGYAGSVAGRGKLVDWAPQDDVLGHAAVGCYLTHCGWNSTVEAIQHGVRMLCCPVSGDQFINCAYITRVWEVGLKLGSVRRDVVRDCIERIMGGAEGTRLQEKMDALRQRAVTAEARCLAQGNLRSFVNEIKRDHPLLTQIYNIL

SEQ ID NO: 5872 - protein, 438 aa, Arabidopsis thaliana
MVALAFQGHLNPMLKFAKHLARTNLHFTLATTEQARDLLSSTADEPHRPVDLAFFSDGLPKDDPRDPDTLAKSLKKDGAKNLSKIIEEKRFDCIISVPFTPWVPAVAAAHNIPCAILWIQACGAFSVYYRYYMKTNPFPDLEDLNQTVELPALPLLEVRDLPSLMLPSQGANVNTLMAEFADCLKDVKWVLVNSFYELESEIIESMSDLKPIIPIGPLVSPFLLGNDEEKTLDMWKVDDYCMEWLDKQARSSVVYISFGSILKSLENQVETIATALKNRGVPFLWVIRPKEKGENVQVLQEMVKEGKGVVTEWGQQEKILSHMAISCFITHCGWNSTIETVVTGVPVVAYPTWIDQPLDARLLVDVFGIGVRMKNDAIDGELKVAEVERCIEAVTEGPAAADMRRRATELKHAARSAMSPGGSSAQNLDSFISDIPIT

SEQ ID NO: 5873 - protein, 484 aa, Unknown
  Description of Unknown: ACX17726.1 Sequence 45306 from patent US 7569389 sequence
MNREVSERIHILFFPFMAQGHMIPILDMAKLFSRRGAKSTLLTTPINAKIFEKPIEAFKNQNPDLEIGIKIFNFPCVELGLPEGCENADFINSYQKSDSGDLFLKFLFSTKYMKQQLESFIETTKPSALVADMFFPWATESAEKLGVPRLVFHGTSFFSLCCSYNMRIHKPHKKVATSSTPFVIPGLPGDIVITEDQANVAKEETPMGKFMKEVRESETNSFGVLVNSFYELESAYADFYRSFVAKRAWHIGPLSLSNRELGEKARRGKKANIDEQECLKWLDSKTPGSVVYLSFGSGTNFTNDQLLEIAFGLEGSGQSFIWVVRKNENQGDNEEWLPEGFKERTTGKGLIIPGWAPQVLILDHKAIGGFVTHCGWNSAIEGIAAGLPMVTWPMGAEQFYNEKLLTKVLRIGVNVGATELVKKGKLISRAQVEKAVREVIGGEKAEERRLWAKKLGEMAKAAVEEGGSSYNDVNKFMEELNGRK

SEQ ID NO: 5874 - protein, 480 aa, Vigna radiata
MANKNASLHIFFFPFLAHGHMIPCVDMAMVFAAKGVRTTIITTPLNAQTISKAIQKTKIHQTKEINIQTINFPSTTETGLPEGCEHVNTLPSLASLSAFHKATRLLEEPFEQLLLHHHPNCVVADMFFPWATDSAAKFGIPRLVFHGMSFFSLCAYEVMRLYEPYKNTSFDSELFVLPNFPGEIKMTRLQVGSFFRKDDVEAKRFWEEIHESEVRSYGVVVNSFHELEKDYADHYVKKFGRRAWAIGPLSLCNKDKEKKRYRGGKEDEHECLKWLDTKATGSVVYVCFGSMTKFPDSQFREIALGLEASGKEFMWVVGKREKNEEEWVPEGFEDRTKEKGVIIRGWAPQALILEHEAIGAFVTHCGWNSTLEGVVAGVPMITWPVGAEQFYNEKLVIEVLKIGVPVGARKWSNFVADEDCCIKWDAVEKAVKRVLAEEEAEGMRKRAKLLAHTAKRAVEEGGSSYSNLDSLVQELIPLSL

SEQ ID NO: 5875 - protein, 473 aa, Glycine max
MKDTIVLYPNLGRGHLVSMVELGKLILTHHPSLSITILILTPPTTPSTTTTLACNSNAQYIATVTATTPSITFHRVPLAALPFNTPFLPPHLLSLELTRHSTQNIAVALQTLAKASNLKAIVMDFMNFNDPKALTENLNNNVPTYFYYTSGASPLALLLYYPPINQVLIEKKDKDQPLQIQIPGLPTITADDFPNECKDPLSYVCQVFLQIAETMMGGAGIIVNTFEAIEEEAIRALSEDATVPPPLFCVGPVISAPYGEEDKGCLSWLNLQPSQSVVLLCFGSMGRFSRAQLKEIAIGLEKSEQRFLWVVRTELGGADDSAEELSLDELLPEGFLERTKEKGMVVRDWAPQAAILSHDSVGGFVTHCGWNSVLEAVCEGVPMVAWPLYAEQKMNRMVMVKEMKVALAVKENKDGFVSSTELGDRVRELMESDKGKEIRQRIFKMKMSAAEAMAEGGTSRASLDKLAKLWKQS

SEQ ID NO: 5876 - protein, 491 aa, Medicago truncatula
MAEKQSIILFPFMAQGHIIPFLALALNLEQKSKNYNITIINTPHNIQKLKTSLPPNSSINLLTIPFISSDHNLPPNTENTDTVPYNLVIKLIQASLSLKPSFKYIIQNILTQQPNHKLCIISDIFFGWTSTVAKELGVFHVVFSGASGYGLACYYSLWMNLPHRFTDSDEFPLSDFPEARLIQRNQLPNNISQADGFDDWSIFQRKNNLCDWVNSDGIIFNSVSDFDSVGLNYFTRKFNIPVWSIGPVVLSTGSRGKVGGINPKVCKEWLDTKPSNSVLFVCFGSMNTISATQMMQLGTALEKSGKNFIWVVRPPIGFDINSEFKYEEWLPLGFMEKIVETKRGIIVNDWAPQVEILSHGSVSAFLSHCGWNSVLESLSHGVPILGWPMAAEQFFNCKLLEEEMGVCVEVARGKSCEVKYEDIVEKIELVMGESSESGVKIRENACKIKDMIRNAVKDGEEDGVKGSSVRGIDEFLSAAGKSNKTTLNDRE

SEQ ID NO: 5877 - protein, 475 aa, Ricinus communis
MGKAELIFIPAPGVGHIVSTIEFANSLIKQDGQLFITILVMKLPITPFLDAYTKSLTASQPNINLIDLPQVDLPSLQLFKKSVESYVVDLIDRYKPHVKNVVTDIMSSRTSSDSVSVVGIVLDFFCGCMIDIGNEMGLPSFIFLTSGSGFLNLMLYLPSRHEQIGTEFSSSDPDVSIPGFVNSVPVTVLPAAVFNTDGGYDAYIKVAQRFKDAKGIIINTFTELEPYAIEPFNNGQAPKVYPVGPVLNLKGQPHPDMNRSQWDKIMEWLDEQPESSAVFLCFGSAGFFNVPQVKEIALGLEQSGCKFLWSLRVPLIQDEGTQIIKKPEEMLPEGFLERVEGRGMVCGWAPQVEVLGHKAIGGFVSHCGWNSILESLWHAVPIVTLPIYAEQQLNAFTMARELGLAVDLKLDYRPNGEIAKAEEVERALKCLMDSDSEVRKKVKDMAGMARKAGMEGGSSFNSILQFIEDIKGSSY

SEQ ID NO: 5878 - protein, 476 aa, Barbarea vulgaris
MKKAELIFIPLPETGHLLSTIEFGKRLINLDPRISMITILSMNLPYAPHADASLVSLTASEPRIRLISLPKINDPPPIKLLDTSSETYILDFVDKNIPILRKTIQDLVSSSSSECHVAGLVIDFFCVGLIDIGHEVNLPSYIFMTSNFGFLGFLQYLPERHRLKPSEFDDSSAEEELPIPAFVNRVPAKVLPPGVFDKLSYGSLVKIGERLKVSKGILVNSFSEVESYAAEHFSRGQDYPHVFPVGPVLNLTGRANPGLASAQYEEMMKWLDEQPDSSVLFLCFGSMGVFPAPQITEIAHALELVGLRFIWAIRTNMAGDGDPHEPLPEGFVDRTKGRGIVCSWAPQVDILAHKATGGFVSHCGWNSVQESLWYGVPIATWPMYAEQQLNAFEMVKELGLAVEIRLDYVADGDRVTLEIVSADEIAVAIRSLMDGDNPIRKKVKEISAVARKAVGDGGSSMVATGDFIRDILGDHF

SEQ ID NO: 5879 - protein, 511 aa, Eucalyptus camaldulensis
MGSEALVHVLLVSFPGQGHVNPLLRLGKRLASKGLLVTFTTPESIGKAMRKASNIGEELSPVGDGFIRFEFFEDGWDEDETRRQDLDQYLPQLEKVGKVLIPEMIRRNAEQGRPISCLINNPFIPWVSDVADSLGLPSAMLWVQSCACFTSYYYYYHGLVPFPSETAMEIDVQLPCMPLLKHDEVPSFLYPTTPYPFLRRAIMGQYKNLDKPFCILMDTFQELEHEIIEYMSKISPIKTVGPLFKNPKAPNATVKGDFMKADDCVGWLDSKPASSIVYVSFGSVVYLKQDQWDEIAYGLLNSGVNFLWVMKPPHKDSGYEVLKMPEGFLEKAGDRGKVVQWSPQEQVLAHPSVACFVTHCGWNSTMEALTSGMPVVAFPQWGDQVTDAKYLVDVFKVGVRMCRGEAENKLITRDVVEQCLREATSGPKAEEMKQNAKKWSAAAEAVVAEGGSSDRNIQAFVDEVKRRSLEVLAASGKSTANGGADLANKVAGNGVAELGEPKVNGELKVVS

SEQ ID NO: 5880 - protein, 476 aa, Medicago truncatula
METKTHIALVTVPVYSHLRSILEFTKRLVHLNQNIHVTCINPTFGSSICNNVKSLFESLPSNINYMFLPPINLEDLPKDIHPALKVEATLHRSIPSIYDVLNTLHSSSKLVAVISDGLINEVLRLTKKLDILAYSYFPSTTMLLSLCLHSSNLDKTISSANKDLLEPLEIPGCIPINSTDLPDPMLDRSSEGYKIFLEANDRFYLADGIMINSFLALEETTIRALQEKEDEGIPSIYPIGPFVQNVSCDNGSDLEYLQFLDKQEKKSVLYVSFGSGGTLFSEQIIELAFGLELSGQNFLWVLRPPNKHGVIDDLDSGEYEDEILYNFLPNGFLERTKGKGLVVPYWAPQIEILGHSSIGGFLTHCGWNSTLESVVNGIPIIAWPLFAEQKMNAVLLSDGLKVAIRPKVNENGIVEREEIAKVVKNLMVGEEGKEIHQRMEKLKGNAIDALKENGSSTMTLTHLALKLESLGSHLGT

SEQ ID NO: 5881 - protein, 479 aa, Barbarea vulgaris
MKIELVFIPSPGVGHIRSTTALAKLLVDSDDRLSVTLIVIPSQFSKDASSSVYTESEDRLRYCLLPANRDQSTQQDFISYILSQKPHVRAAVSELVREVSTRSGSPRFAGIVMDMFCTSMMDIADDLNLPAYIFYTSNASYLGLQFHVQTLYEEKKLDVSELKDDSDVKFDVPTLTRPFPANSLPSMMLDKEWFPYIVRRAKSMRGTKGVLVNSVAEMEPQAVKFFSDGNGNTPPVYTVGPILDFKTNGDGEDEKRREILCWLEEQPPSSVVFLCFGSMGGFGEEQTREIAVALERSGHRFLWSLRRAYPVKSMTGSRPGEFTNLEEVLPEGFLKRTSGIGKIISWAPQVAVLESPAVGGFVTHCGWNSILESLWFGVPTAAWPIYAEQQFNAFQMVEELGLAADIRKEYRRDSLIPKPEIVSAEEIERGINCAMEQDSEIRKRVIDVRDKLHVALLDGGSSNAALRKFVQDVIENIPS

SEQ ID NO: 5882 - protein, 470 aa, Helianthus annuus
MEKPAHIAIVPSPGMGHLIPLVEFAKKLTAQHNLSATFIIPNEGPLSHSQSEFLDSLPNAINYTLLPPVNFDDLPQDAKIETRISLMVTRSVTALHATISSMMADKNIVAFFVDLFGTDAFDAAVELGVPRYLFFPAAAMTLSLCLHLPKLDQMVSCEYRDVPDPIQIPGCIPVHGKDLPDPLQDRSNDAYKRVLHNVKRYFMADGIVVNSFKGLESEAIEALQQVEPDKPPVYPVGPLIQSWSVQSNKGVNESSCLKWLDDQPSGSVLYICFGSGGSLSSEQFTELAMGLEMSEQRFIWVVRKPNDKVADATYLNSHGDEGTFDFLPKSFLERTKNRGLVVLNWAPQAQILSHSSTGGFLTHCGWNSILETIVLGVPMIAWPLYAEQKMNALMLTEGLKVAMRAKLNESGIVDHSEIVRVVKALSKGDQGKAIRVRIKELKEAALSALRKDGCSTKTLDQLVSKLKNKI

SEQ ID NO: 5883 - protein, 454 aa, Centella asiatica
MLKLAKLLHKKGFHISFVNTEFNHNRLIKSRGPDALDGLPDFRFYAIPDGLEVTNPDATQDIPTLCKYISINCLAPFTDLITKLNDRSSGSDGVPPVSCIVSDGIMSFTLKAAEKFGIPEVLLWTTSACGLLAYTQYRQLVERGYTPLKDMSYVTNGYLDTKLSWVPGTKDFKLRDFPSFIRTTDIDDVILNFILTECEALPKARGLILNTFDALEQDVLHALSAIQPRIYTIGPLLLDQDDKLKFMGSNLWAEDRSCIDWLDTKDPNSVVYVNFGSITVMSAQQLTEFAWGLANSKKHFLWIIRPDVVVGDSAMLPPEFVTATENRSILASWCPQEEVLRHRAVGGFLTHSGWNSTLESIAGGVPVICWPFFAEQQTNCRYSCVEWGIGMEIDNDVKRDEVELLVRELMDGEKGLEMKNNAMEWKNKAQVARGPRGISLANFDKLVDEVLLEK

SEQ ID NO: 5884 - protein, 492 aa, Unknown
  Description of Unknown: Oryza sativa Japonica Group sequence
MDAGSKSSSSGPLHLVIFPWLAFGHLLPYLELAERVASRGHRVSFVSTPRNIARLPPVRPAAAARVDLVALPLPRVDGLPDGAECTNDVPSGKFDLLWKAFDALAAPFAEFLGAACRDAGDGERRPDWIIADTFHHWAPLVALQHKVPCAMLLPSASMMVGWAIRSSEPAGASMFEVLGAVEERRMDMPCYEWEQKAALFVADGASGMSIMKRCSLAMERCTVAAMRSCPEWEPEAFQQVAAGLKKKNKPLIPLGLVPPSPDGGRRRAGSMSTDNSTMQWLDAQPAKSVVYVALGSEVPLRLEQVHELALGLELAGTRFLWALRKHAGVDAADDVLPPGYRERTNGHGHVAMGWVPQIAILAHAAVGAFLTHCGRNSLVEGLMFGNPLIMLPIFTDQGPNARLMEGNKVGLQVRRDDTDGSFDRHGVAAAVRAVMVEEETRRVFVANALRMQKIVTDKELHERYIDDFIQQLVSHVADSSCNIATPVPSSSS

SEQ ID NO: 5885 - protein, 467 aa, Citrus unshiu
MDLQNRQKLHIAMFPWLAYGHIMPFFQVAMFLAEKGHHVSYISTPKNIDRLPQIPTNLSSRLSYIQLPLPQLDGLPEGAESTAELPIHKVPYLKKAHDLLQLPLTNFLQDSRVNWIIHDFISHWLPPVAAQLGVNSVFFSIYSAATLCFTGPPSDVIAGRRQKPEDFTVVPEWIDFQSNLAFKPYETLINQDGMDDSVSDYLRAAFVLQDCRVVILRSCAEFEPDALRLLGKMLQKPVLPVGLLAPSLQDSAAGEHWPVLKDWLDSMENNSVVYAAFGTEMTLSQELLHELAYGLEKSGLPFIWIIKNRPLVEGESGLDHLLPPGFQDRVSGTGLVWTDWAPQLRILAHPSIGGFLTHSGWSSVIEALGLGRPLILLPGSSDTGLVARLMHSRRLGLEVERNEQDGSFTRDSVADCIRRVVVDQEGEPLRANARAVRDIFGSTHLSYKHLDEFTRFIENYTASTKSL

SEQ ID NO: 5886 - protein, 479 aa, Vigna angularis
MSNEVHSLHVFIIPFLAYGHLIPTVDMAKLFAEKGVKTTIITTPLNEPFIIKTIGKPKTSSTMIHVQTIELPCAEAGLPKGCENTNSITSGALFPAFLRACGLLQDQFEQLLLEQRPNCVVADVMFPWAINSAAKFGIPSLVYDGTSFFSICANECMGLYEPYKNVSSDSEPFLIPNLPGEITMTRMQVSPHVLSDESAGVTKLLEEVRESELKSYGMVVNSFYELEKDYADHLRKVLGRKAWHIGPMFLSNRVKEEQAHRGEEHECLQWLDTKKPNSVVYVCFGTTTKMTTSQLKDIATGLEASGEKFIWVVRKSEEDGVEWLPEEFEKKMEGKGLIIRGWAPQVLILEHEAVGAFVTHCGWNSILEGVVAGVPMVTWPIAYEQFFNEKLVCEILKIGVPIGAKKWAAGVGDTVKWEAVEKAVKRIMSGEEADEMRNKVKVLSHLAREAVAEGGSSNSDLNALIAELGSLTDRNKSIL

SEQ ID NO: 5887 - protein, 469 aa, Zea mays
MAADAARTPAPHALLLPYPAQGHVIPFMELADRLLDRGFAVTFVNTEFNHRRVVVAAAGGRAPDGRLRLVGVADGMGDGEDRDNFVRLNACMKEAMPLRLDALLDADDERLGRVTCVVVDVGMSWALDAVKRRGLPAAALWPASAAVLAVLFGAKKLIRDGVIDDDGAPVKLENHSFRLAESMPPMDAVFLAWNYMGNRDVERMVFHYLTTTAWAAVAKADVVLCNTFEDLEPDIFGAHSPAAASILPIGPLRTWQRRTSEAPAGHFWRADDEACASFLDAQPRGSVTYVAFGSLTVMSPAQLQELALALLASARPFLWVFRPGLAAELPPAFTDLLPRHARGKVVEWAPQEKVLAHPAVGCFLTHCGWNSTLEGVRHGVPLLCWPYFSDQFTNQAYICDIWKVGLRVVPDGGDGIVAKERIMERLTSLMGDSGVKERVKRLKELAERSMGPEGKSLKNINAFMESMTK

SEQ ID NO: 5888 - protein, 477 aa, Malus domestica
MKKVELVFIPSPGAGHHLPTLQFVKRLIDRNDRISITILAIQSYFPTTLSSYTKSIAASEPRIRFIDVPQPQDRPPQEMYKSRAQIFSLYIESHVPSVKKIITNLVSSSANSSDSIRVAALVVDLFCVSMIDVAKELNIPSYLFLTSNAGYLAFMLHLPILHEKNQIAVEESDPDWSIPGIVHPVPPRVLPAALTDGRLSAYIKLASRFRETRGIIVNTFVELETHAITLFSNDDRVPPVYPVGPVIDLDDGQEHSNLDQAQRDKIIKWLDDQPQKSVVFLCFGSMGSFGAEQVKEIAVGLEQSGQRFLWSLRMPSPKGIVPSDCSNLEEVLPDGFLERTNGKKGLICGWAPQVEILAHSATGGFLSHCGWNSILESLWHGVPIATWPMYAEQQLNAFRMVRELGMALEMRLDYKAGSADVVGADEIEKAVVGVMEKDSEVRKKVEEMGKMARKAVKDGGSSFASVGRFIEDVIGQN

SEQ ID NO: 5889 - protein, 501 aa, Unknown
  Description of Unknown: Oryza sativa Japonica Group sequence
MQATSLNTQSLSLSRTQATPTPAMARQHFLVVAYPGQGHINPARALAARLARATGAHVTLSVAVSAHRRMFPSLAAPDEEVHDADAGGGGISYVPYSDGYDEGFRLFASDGEAAWRHSETFGRVGREAFAGVVDRLAARGRPATCVVYAFLMWWAADVARERGIPRVLYWIQPATMLAVYYHYLHGLEELVTEHAGEPEFTVDMPSLPPMAIRDLPSFFTDLADTRLAAAFHGVRTTIEQLDIDRRSSSKPPMVLVNTVEELELDVLAASFPDLDILPIGPAATSLDGGGAAAAARASHDLYRHDEKGYMEWLDAKPAGSVVYVSFGSMSVVSRRQKEELRRGLAATARPYLWVVRSDDRDDGDGDGDGGGMVVEWCDQVRVLSHGAVGCFVTHCGWNSTLEAVACGAPMVAVPQWSDQDTNARLVAGWGVGVRAATGADRVVEAGELARCVETVMADTEAAAAVRRSSVAWKAKVREAVAEGGSSDRNLKAFLDRIANVA

SEQ ID NO: 5890 - protein, 359 aa, Arabidopsis thaliana
MFCSSMIDIANEFGVPCYMIYTSNATFLGITLHVQEMYDDKKYDVSDLDESVNELEFPCLTRPYPVKCLPHILSSKDWLPFFAAQGRSFRKMKGILVNTVAELEPHALKMFNNVDLPQAYPVGPVLHLDNGDDDDEKRLEVLRWLDDQPPKSVLFLCFGSMGGFTEEQTREVAVALNRSGHRFLWSLRRASPNIMMERPGDYKNLEEVLPDGFLERTLDRGKVIGWAPQVAVLEKPAIGGFVTHCGWNSMLESLWFGVPMVTWPLYAEQKVNAFEMVEELGLAVEIRKCISGDLLLIGEMEIVTAEDIERAIRCVMEQDSDVRSRVKEMAEKCHVALMDGGSSKTALQKFIQDVIENVA

SEQ ID NO: 5891 - protein, 485 aa, Vigna angularis
MAEMKKKAGLIFFTIPGIGHLGSSLELAQLLINRHNHLSITMICMKLPHAPYSDAYIRSITASQPQIQAIDLPHVEPPPQELLNRSIPHYIWTLLQILKPQVKATVQNILSSSQSNPVIGLVIDVFCSPMIDVGNDLGIPSYLFMPSNVGFLSLMLSLQKRQVGDVFCDSDSKWLIPGFPDPFPSSVMPDAVFSKEGGYAAYYNLAKRFQDSKGIIVNTFQELEQYAINALCNGQIQTPSIYAVGPLINLKGHPNPNLDHAQHDRILKWLDEQPDSSVVFLCFGSRGSFDPPQTREIAQALQRTGVRFLWTKRSPPTTTKKEERTLPEGFLEWTEGRGMLCDWAPQVEVLAHKAIGGFVSHCGWNSILESLWFGVPILTWPIYAEQQLNAFRMVREFRLAVELRLDYRRGSDLVMAEEIENGLKQLMDRDNMVHKKVKEMQEVARKVVLSGGSSFSSVEKLIDVMTLNFMVGLPSHFDESINEKA

SEQ ID NO: 5892 - protein, 486 aa, Amborella trichopoda
MVVEHVVMMPFMAQGHLIPFAALAELLSELHPLKITLVNTPHNASKLRSMMNPKAAGAIDVAEIPFSSADHGLPPDAENTDALPYPLILRLCEASETLEPAFESLISDIARKDGRLPLCIVADVFCGWTVLVAERLGIHHVVFTTCGAFGTLGYASTWLHLPHVGTDADEFPVPGMPGVRLHRKQIPSHLRVADGKDGWSIFLQKHISLSMHRSRGDMLCNTVAELEPDVLRLLQAMTGRRVLPIGPLLPLSLFSENWARERGGKPLGISAESCIAWLDTQPLRSVLYVSFGSQNTVSGWQLKELGLGLEASGAGFIWVVRPPLEFPMTAEFRSEWLPEGFEERVKDRGLIVKGWAPQLAILSHKGTGAFLSHCGWNSVLESLSQGVPLIGWPLAGEQFYNTIMLGDEKVGVCVEVGRGKEVGVDREKVARVVAEVVKGEKGAEMRRKAGEMREALRKGMAEEESGGGSSLRALDEFVASIVSPHV

SEQ ID NO: 5893 - protein, 482 aa, Unknown
  Description of Unknown: Oryza sativa Japonica Group sequence
MAASTSAAAAGDEPCRCHVVAVPFPGRGHVNAMMNLSRLLAARGAATVTFVVTEEWLGLLSSSSAPPGVRLRAIPNVIPSENGRAADHAGFLDAVGARMEAPFERLLDRLRLEEEEETAAPVAAFVADFYVPWVVDVGNRRGVPVCSLFPMAAVFFSAYYHFDSLPSWLAKPPHQPVAGATTDNPDQRLEHYISSLASSSIMLSDLKPLIHSERTVEYILACISSIRKAQCLLFTTIYELEASVIDSLESLVTCPVYPIGPCIPYMTLENEHTKSNGEAPGRIDYFAWLDCQPENSVLYVSLGSFVSVSSSQLDEIALGLATSEVRFLWILREQSTRVRELVGNTNKGMILPWCDQLKVLCHPSVGGFLTHCGMNSTLEAVFAGVPMLTLPLFFDQPINGRLIVEEWKIGVNLRDSTDKDRLIRREEIARAVKRLMASEEAEMKAIRRHALEWKEISHRAVDKGVSSHCNLASLMEMICPSR

SEQ ID NO: 5894 - protein, 490 aa, Jatropha curcas
MEKSSNNSSSHVLIFPFPAQGHVNSMLKLAELLSLSGLTITFLNTQHSQECLARFTDIKARFLKYPGFRFVTVPDSLPIDSGNVAKVLDALKLESKPVIEKLLIESNPRINCFIVDGILGFVTDLASELAIPIIYFRTISACAFWSYFCIPDMIEAGELPIKGEEEMDRLITKVPGMETFLRKRDLPSFCRANGMTEPTFYMIMNETQQTTRAQALIMNTFEDLESPILSQIRNHCPKTYTIGPLHELLKSIKIRSTNKQELHQSSNSLWEVDRTCIAWLDNQPSQSVIYVSFGSFANLTLDQLIEFWHGLINSNRRFLWVIRPSSVTDKEGIVVEKFPEELQEGCKENGYIVKWAPQEEVLAHKAIGGFLTHSGWNSTLESIVAGVPMICWPYFADQQTNSRFVSEVWKLGLDMKDVCNRKVVEKMVNDLMVNKREEFVRSAARMAELARKSISEGGSSFCNLNRLIEDIRLMSVQTHHNSQEDNKTSF

SEQ ID NO: 5895 - protein, 502 aa, Unknown
  Description of Unknown: Oryza sativa Japonica Group sequence
MDCHRNESQRELEMGTKPHFVVIPWLATSHMIPIVDIACLLAAHGAAVTVITTPANAQLVQSRVDRAGDQGASRITVTTIPFPAAEAGLPEGCERVDHVPSPDMVPSFFDAAMQFGDAVAQHCRRLTGPRRLSCLIAGISHTWAHVLARELGAPCFIFHGFCAFSLLCCEYLHAHRPHEAVSSPDELFDVPVLPPFECRLTRRQLPLQFLPSCPVEYRMREFREFELAADGIVVNSFEELERDSAARLAAATGKKVFAFGPVSLCCSPALDDPRAASHDDAKRCMAWLDAKKARSVLYVSFGSAGRMPPAQLMQLGVALVSCPWPVLWVIKGAGSLPGDVKEWLCENTDADGVADSQCLAVRGWAPQVAILSHRAVGGFVTHCGWGSTLESVAAGVPMAAWPFTAEQFVNEKLIVDVLGIGVSIGVTKPTGGMLTAGGGGGEETAEVGTEQVKRALNSLMDGGVEGEERAKKVHELKAKAHAALEKEGSSYMNLEKLILSAV

SEQ ID NO: 5896 - protein, 490 aa, Unknown
  Description of Unknown: Oryza sativa Japonica Group sequence
MAPAMASSAATVVLIPFCVSGHLTPMLEVGKRMLRSRCCGDDDDGRPAMSLTVLLAQLPESHRAPEIDEIIRREAAGASEHSGFDVRFHCLPAEELPDFRGGEDFISRFMQQHASHAREAIAGLESRVAAVVLDWFCTTLLDVTRDLGLPGYVFFTSAASMLSLLLRLPALDKEVAVDFEEMGGAVDLPGLPPVPAALLPTPVMKKGCNYEWLVYHGSRFMEAAGIIVNTVAELEPAVLEAIADGRCVPGRRVPAIYTVGPVLSFKTPPEKPHECVRWLDAQPRASVVFLCFGSMGSFAPPQVLEIAAGLERSGHRFLWVLRGRPPAGSPYPTDADADELLPEGFLERTKGRGMVWPTWAPQKDILAHAAVGGFVTHGGWNSTLESLWHGVPMAPWPLYAEQHLNAFELVRDMGVAVEMEVDRKRGNLVEAAELERAVRCLMDEGSEEGRMAREKAAAAKAACRNAVDGGGSSIAALRKLTQEMAHMSSI

SEQ ID NO: 5897 - protein, 458 aa, Actinidia chinensis
MSDHSKALHVAVLAFPFGSHAAPLLALVCRLATSNPTVRFSFLSTAQSNTHTFPSTRTNEFDNVRPYNVWDGVPEGHQISGNPHVGTGFFLKALPHNFKAGMAKAEEESGATINCLLTDAFFWFAGDLAEEMGVPWVPYWTAGACSLSAHVNTDVIRITLGSTRTTQNTNQTLNFIPGLSAVHMNDLPGGVLHGDLESPFAQMLHKMGLNLPRATAVVLNSFEELEPAITTDLKLRLQKVLHVGPPSLSSSPTSSLDESGCLLWLDKHEAASVAYISFGTIITPPPNELLALAEALRASKIPFLWSLRDHSRPIFPEGFLENVLAFGKVVSWAPQSQVLAHPSIGVFVTHCGWNSILESITGGVPMICRPFFGDQTLNSRMVQDAWRIGVRLDGGVFTKSSMMSAVELIFSREEGKKLRENIILLKQKATDAVGASGSSTENFNVLLEVIKTCKHPKS

SEQ ID NO: 5898 - protein, 483 aa, Arachis duranensis
MKPPQTSSAHVLIFPCPAQGHVNSMLNLAQLLALRHLHVTFLNTEHTHNRLTRFADIESLLARYPTLRFKTIPDGLPEEHPRSGERAAEPLLSLKVHGKPLLRDILVKEKVTCLVADGLFAKLANDMAEEVGVATIHFRTIGASCFWTYFWAPYLFQSNELPVTGEEDMDRVITSIPGMENLLRCRDLPSFFRPNRDTGKPHVHFETVVSETQQSLRASAVILNTFDDLEAPALSHIRRHFPTIFTVGPLHQHRESRAPTSITTSNNSMWEEDMSCMEWLDSHPFRSVIYVSFGSLTTMTKESLMEFWCGLVNSKMRFLWVVRSDMIAAGEGKDESVPAELVEGTKERGLMVGWVPQVEVLSHKSVGAFMTHCGWNSTIESVVAGVPMICWPYFADQQVNSRLVGESWKIGLDMKDVCDRKVVENMVKDVMVNRKEEFLQSAEKLAVLAKKSVSEGGSSYDNLDRLIDFIELISQEHLPTETS

SEQ ID NO: 5899 - protein, 500 aa, Brachypodium distachyon
MAMKDEQQPPLHILFFPFLAHGHLIPIADMAALFAARGVRCTILTTPVNAAIIRSVIDRANDASRQGTGFPEIEISVVPFPDVGLPAGVENGMALTSRGDRDKFYEAVKLLREPFDRFLAVHSHFDAVVSDSFFSWSVDAAAEHGIPRLGFLGTSMFARSCSDSMLRNNPLETAPDEPDALVALPGLPHRVELRRSQMMDPKKLPDHWEFFQSVNAADQRSFGELFNSFHELEPEYVEHYHTTLGRRTWLVGPVGLASKDMAARGTNTLSPDADSCLRWLDTKDANSVVYVSFGTLTSFSTGELRELARGLHLSGKNFVWVLRGAGAESSEWMPEDFAELMERGERGFIVRGWAPQMLILNHAALGGFVTHCGWNSTLEAVSAGVPMVTWPRYADQFNNEMLIVEVLKVGVSIGAKDYASSVETHEVIGGEVIAESISRLMGNTEEGDAIQKKAKDLGVKARSAVENGGSSYNDVGRLMEELMARRSSAKVERARTADGL

SEQ ID NO: 5900 - protein, 473 aa, Glycine max
MTMKDSIVLYSALGRGHLVSMVELGKLILSHHPSLSITILFLTPPPNQDTPTSPTAFTCDATAKYIAAVTAATPSITFHRIPQISILTVLPPMALTFELCRATGHHLRRILSYISQTSNLKAIVLDFMNYSAARVTNTLQIPTYFYYTSGASTLAALLYQTIFHETCTKSLKDLNTHVVIPGLPKIHTDDMPDGAKDRENEAYGVFFDIATCMRGSYGIIVNTCEAIEESVLEAFNEGLMEGTTPKVFCIGPVISSAPCRKDDNGCLSWLNSQPSQSVVFLSFGSMGRFSRTQLREIAIGLEKSEQRFLWVVRSEFEEGESAEPPSLEELLPEGFLDRTKEKGMVVRDWAPQAAILSHDSVGGFVTHCGWNSVLEAICEGVPMVAWPLYAEQKLNRVILVEEMKVGLAVEQNNNGLVSSTELGDRVKELMNSDRGKEIRQRIFKMKNSATEAMTEGGSSVVALNRLVEIWREH

SEQ ID NO: 5901 - protein, 545 aa, Vollenhovia emeryi
MSSCFILSFYFICCISIGLVTSKPLSVLLIQSIPSTSHHIWTEHLVKGLLRKGHHVHTVSVLETKIEGKLAENLTYDVFADVMTSHDKFEDYCPDQWEEFNEFYMAYVAYLWGIIKCDTVIKTKAAKELLEMIKTVEFDVIVHDVTLQQCFYGLWEDAKGKPPIVGLIPLGSAPWLKDFTGGPSYPTVRPYTSSVIAKPVGLWQTTWNTLYFMVDDLLRHYYFLPNAQRIAEKYVGHAIRPLHEIEKDSINIVLINSYCAFEPAIPVPPNTLETGGLHVQTVQPIAGDKVVTYPKNVHVFLDEAKSGAIVISLGTNVRWKCFGPDKIKAVILALSKLKQRVLWKLDIIDRDIEASFQMPDNVMTMKWIPQKEVLSHKNVKAVWMHAGLLSTQEAIWEGIPMIVTPFFMDQKSNAEVLVAKGVGIRLDFKILSTQSVLHAIEKILYNKSYTRNMKRLSSEFRDRPIPPLDLAVWSIEYTARHPNGSLATPLRSQSWMVQNLIDVYAVLFLIFFIILLSIYFLTRKLINFCYNYTYIVFKLCKSKQA

SEQ ID NO: 5902 - protein, 458 aa, Medicago truncatula
MENKSKKHAPHILVFPYPLQGHINPMLQFSKRLSQKGVKITLVNTISIWNKINNNIDLNSIETESISDGYDNGGMSSAENMESYKDTFWKVGPKSLSQLLHKLQSSNNPVDCVVYDAFLNWTFDVSKSFEIPVAVFLTQACSVNTINFHAFMKWIELPISKSEIVLPGLPTLQDADLPSFLYQYGTYPGYFDILTNQFSKIDQVDWVLVNTFYELEPEVVDWMAKKWRLKTIGPCIPSMFLDKRLEDDNDYGISTFGPNSEACIKWLDNKPKDSVVYVSFGSLAGLSEDQTKEMAYGLRDCGMYFLWVVRDSEKSKVPKEMLESSIEKGLIVNWCSQLQVLTHEAVGCFVTHCGWNSTLEALSVGVLVIAMPLWTDQITNAKFIVDVWKIGVKAHADEKGVVRRETIMDCLKEIMEIEKGDAMKKNAMKWKNLARISVGEDGSSHKNIVEFVNELTLC

SEQ ID NO: 5903 - protein, 464 aa, Sorghum bicolor
MESVAVVAVPFPAQGHLNQLLHLSLQLASRGLPVHYAAPAAQVRQARARVHGWDETALRSVEFHDLGISEYVSPPPDPTAPSPFPTHLMPLFEAYTAGARAPLAALLARLSASHRRVVVVHDRINAYAAEEAARLHNGEAFGLHCLAASTLAGKTDAGLRLLRERGLAFLDVAHHASREFADYVAKRAMPTKDISPGAGILVNSCRALEGEFIDVVAGDLAADGKKYFAVGPFNPLLDLRADAQTQSKPRHECLDWLDKQPPASVLYVSFGTTSSLRTEQIAELAAALRDSDQRFIWVLRDADRGNESADDGESQNRHAELLSKFTDQTEGRGRVITGWAPQLEILAHGATAAFMSHCGWNSTMESLSNGKPILAWPMHSDQPWDAELVCKYLNAGILVRPWEKHGEVIPAEVIRQVIEDAMLSDQGVAVRQRAKVLGEAVRACLADGGSSRKDLDDFIAHITK

SEQ ID NO: 5904 - protein, 499 aa, Eucalyptus grandis
MEQESDRGVHVLFFPLMAHGHMLPTLDMARLFTARGARATIITTPHNAPVFQNSLQIDAGSRIDLRTIEFPTREVGLPEGLENLDMVTTQDIQLKFFRAISMLSRPLEALVEELAPDALVADIFFPFANDIAAGHGIPRLAFHGTSFFSMCAAESVQRHRPHEKVSSDDELFRLPGLPDEIMMTRSQIRDELKISVETDFTRLLKRSHQAAGRCFGMIVNSFHELEPSYVDHYRNALGKRAWHIGPVSLCNRNLQEKAQRGGKGVSIDGHECLKWLDSRGPGSVVYVCFGTTSKFSDAQLQEIATGLEASGQDFVWVVSRDRKQEKGNEGEGQDDWLPEGFGKRIQGRGLIIRGWAPQVLILDHRSVGGFVTHCGWNSVLEGISAGLPMVTWPIFAEQSTTRKLVTRGPWRIGGRGSGPRRWGKWVGIVADREIVSKDRIEKALRQVMVGDEAEAMRDRAKLLADKARRAIEDGGSSYSDMNALIRELALHRIARDAKK

SEQ ID NO: 5905 - protein, 499 aa, Helianthus annuus
MKHKLINNKQAPNTPLMENTFVELVFIPAPAVGHIMSAMEMAKVLVNRHQSLSVTVLLMNPPLSMLALTTYIESLAKKAIERIRFIKLLQDQTPPKLDSKAPLMSYYEFINSHCKYVKNILEEMINQTGSRRVVGLVADWFCTGMIDVANEFNLPSYVYFTSSAAFLGFMVHFETLYVDQKQDLLELANSEGEIVIPSFVNPVPMRVFPELYQKQDGLDFLICTIGSMRKAKGILINTFLELESHAINWFSGTNFPPVYPVGPLLNLDSVAGKADDTDVFRWLDSQPRASVVLLCFGSMGCFDEAQLKEIARGLERSGHHFVWSVRRPPPLEQSFEVLPDDYDDPRVVLPDGFLERTLGVGKVIGWAPQVSLLAHEAVGGFVSHCGWNSMIESLWFGVPTATLPIYCEQQMNAFEMVVDLGLAVDLKLDYKINVINPEGDTVIVMAEEIERGIRSVMEDNEVRAKVKEMSKMSRATVVEGGSSYTSVGYLIKDMMRNII

SEQ ID NO: 5906 - protein, 480 aa, Helianthus annuus
MVNECAPKPHVALLASPGMGHITPLYELAVRLVTQHNFQVTFLVITAGSTVAQDSYLTAYPIPDLHIVDLPPPDMSNELLNNMKTVARLCYIVEQSIRPLRSVLNGLKRPKVKALIIDMFCTGVFEACKDLSIPVYSFFTASAALLTFSLYLPTLDCKADGEYVDLPEPVKVPGCNPIQTQDLMYLVPKSMINEYQQWFMHVSRLPMVTGIFVNSWEDLESVSLKAVKHEPFFANIPTPRVYPIGPLTKQAEPVLTKYEKETIAWLDKQPKDSVLFVALGSGGTLTSEQLTELAWGLELSQQRFVLVVRKPSDCAISGFFSAGSDVDDPIAYLPDGFVERSKGVGLVVSGWAPQVGVLSHPSTGAFLSHCGWNSTVESVKYGVPIIAWPLFAEQGINAALLSNEVGVAMRMPMVGEGGEAVVVRRKKIESVVKAVMEGEEGKKLRRRAKELQASGRETLSRGGSSYETLARVAESWNIET

SEQ ID NO: 5907 - protein, 487 aa, Unknown
  Description of Unknown: Oryza sativa Japonica Group sequence
MAMASANVLLLPEAGSGHLMSLIEAGKRLLAHGGRGDGEGPAVTVTVLVVRPATSESAAEVDAHVGRVEASGLGVRFHRLPAVEPPPMGCAAGNVQEFKSRYMQLQAPHVRAAAAELGAAALVVDFFATGVLDAAREAGVPTYVYFTSTAALLALMLRLPALEEEVPVDFEEFDGTVDVPGLPPVPAGSLPAFMGRKESPNFKWFLYHGRRFMDADGIIINTVAELEPALLAAIADGRCVPGRTAPPLYPIGPVLDLEDKPSSNARCVRWLDAQPPASVLFLCFGSMGWFDAAKAREVAAGLERSGHRFLWALRGPPAAGTVHPTDASLDELLPEWFLERTKGRGLVWPTWAPQKEILAHAAIGSFVTHCGWNSTLESLWHGVPLVPWPLYAEQRLNAFELVRDMGVAVPLGVDGKRRDSFVEAAELERAVRSLMDDASEVGRKVREKAAEMKAVCRNAVAPGGGSSYAALQRLLGAIRGGFSTMTQ

SEQ ID NO: 5908 - protein, 482 aa, Nicotiana tabacum
MKETKKIELVFIPSPGIGHLVSTVEMAKLLIAREEQLSITVLIIQWPNDKKLDSYIQSVANFSSRLKFIRLPQDDSIMQLLKSNIFTTFIASHKPAVRDAVADILKSESNNTLAGIVIDLFCTSMIDVANEFELPTYVFYTSGAATLGLHYHIQNLRDEFNKDITKYKDEPEEKLSIATYLNPFPAKCLPSVALDKEGGSTMFLDLAKRFRETKGIMINTFLELESYALNSLSRDKNLPPIYPVGPVLNLNNVEGDNLGSSDQNTMKWLDDQPASSVVFLCFGSGGSFEKHQVKEIAYALESSGCRFLWSLRRPPTEDARFPSNYENLEEILPEGFLERTKGIGKVIGWAPQLAILSHKSTGGFVSHCGWNSTLESTYFGVPIATWPMYAEQQANAFQLVKDLRMGVEIKMDYRKDMKVMGKEVIVKAEEIEKAIREIMDSESEIRVKVKEMKEKSRAAQMEGGSSYTSIGGFIQIIMENSQ

SEQ ID NO: 5909 - protein, 795 aa, Unknown
  Description of Unknown: Oryza sativa Japonica Group sequence
MARRQQAHFLIVTYPSQGHVTPARHLARRLVHGAGVRATVCVPVSAFRKMFPADDGEVVVEEEGGAVAYAAYSDGYDGGFDRAVDDHTRYMAQLSTVGARTVAGVLRRLRGEGRPVTCAVYTLLLPWVAGVARDHGVGAVAVFWIQPTTALAAYYHYFRGGRDAVVAAAASGDASAEVNLLPGLPPLRVRDIPSFLAITSDDDPFAFVLSEFAELIDTLERGGGGGGELPTYVLANTFDAMERDALASLRPHIDVVAVGPVLSFLHDADETKTASSPNDLFDHDGGGYLDWLGTKPARSVVYISFGSSSVMSKNQVAEIAAAMAESKKPFLWVIRKDNCKDDDDDNEAIKKLVAAAAAADTGGGGMAVEWCDQARVLSHASVGCFVTHCGWNSTVEAVACGVPVVAAPQYSDQGTSAWVVERIGVGVRAAARAGDGVVEAAELGRCVGAAMSEAVAGRAAAWREEARAAVARGGASERNLRFKSQWMKSCTHNSTATPLVLPCIFAMLIVCVMNARVLGGGGGGGGDGETTVVLAHGYGGSSHIWDDVAPALAKTFRVVVFDWSFSGDVVVDDDDDAAAVSEDISCSYFGFADELVAMMDELALTAVVFVGHSMAGMIGCIASVARPELFRHLVLVGASPRYINDDGDGYVGGFERGEVDAMLAAIEADFAAWAPLFAEAVVGPAPSPGAGAVAKFAKQLGRMRPAAALRVMRAVLTCDVRAVLRDVAAPCTIVHCARDAVAPLAVARYMQRAMARGVDGAPAPAVVVMDSSGHFPQLTAPMEFVRVMEAILLDH

SEQ ID NO: 5910 - protein, 473 aa, Prunus mume
MGSETPSTHIFLVCFPAQGHINPMLRLGKRLAAKGMLVSFSTTENYGKEMRKANSDINDQATPVGSGFIRFEFFQDGLPEDDPKRSDMDYYVPKLELVGKELVAQMIKRHATEGRPVSCLVNNPFIPWVCDVAVELGIPQATLWIQSCAVFSAYYHYNSKTVSFPTEAEPNIDVQLPGMPVLKHDEIPSFLHPSDPYQVLGRAILGQFKKISKSFYVLMDTFQELEPEIIEHMSQVCIVKPVGPLFKNPKAPETSIRGDLMKADDCLDWLDSKPPASVVYISFGSIVHLKQEQVDEIAHGLLSSGVSFLWVLKPPAKAYGLEKHVLPQGFLEEVGDKGKLVQWSPQEQVLGHTSVACFLTHCGWNSSVEALTSGVPVVTFPQWGDQVTNAKFLVDVFGVGLRLSRGMAENRLVTRAEVEKCLLEATVVDKAVELRQNALKWKKEAEKAVGEGGSSDRSLEDFLGEISKITSVA

SEQ ID NO: 5911 - protein, 493 aa, Oryza sativa
MAAATADGHGGRRRLRVFFLPFFARGHLIPMTDLACLMAAASTDAVEVEATMAVTPANAAAIAATVAGNAAVRVVCYPFPDVGLARGVECLGAAAAHDTWRVYRAVDLSRPAHESLLRHHRPDAIVADVPFWWATGVAAELGVPRLTFNPVGVFPQLAMNNLVAVRPDIVRGGADGPPVTVPGMPGGREITIPVSELPDFLVQDDHLSMSWDRIKASQLAGFGVVVNTFAALEAPYCDEFSRVDARRAYFVGPVSQPSRAAAAAVRRGGDGDVDCLRWLSTKPSQSVVYVCFGSWAHFSVTQTRELALGLEASNQPFLWVIRSDSGDGGGERWEPEGWERRMEGRGMVVRGWAPQLAVLAHPSVGAFVTHCGWNSVLEAAAAGVPALTWPLVFEQFINERLVTEVAAFGARVWEDGGGKRGVRAREAETVPAGVIARAVAGFMAGGGGRRERAAAMATALAESARVAVGENGSSWRDIRRLIQDLTDATASQP

SEQ ID NO: 5912 - protein, 465 aa, Cephalotus follicularis
MATPSTPTPHVVIFPFMAQGHILPLLDISKAMASNGVRVTIITTPSNSPFILSKTSHYSQISLSIIPFPKVEDIPEGCENVTDLPSLQFFNPFVKATRNLKQPFEDILAKMSKAGCLPICVISDMFLGWTVETCRSFGIPRIVSHGMGVLPMLIAKDGVLHAPYIRSLLDSDNVELLSIPKLPFPLIKADLPDAIRSYDPDLISLEIQEADKNSWGVIVNSFEELEGEFVVALESFFQKGAKAWCVGPTFLYDQVDQHYEKQSCPYIKWLDKQVGLDVVIYVSFGTQSHISNTQMDEIALGLEMAGQPFILVERSKTWVPPEGWMERIDEKGLVVRDWVDQRSILSHRATGGFLSHCGWNSVLEGLSMGVPLLAWPMGAEQKLNAKYVAMGLGAGLMVPQGSLIDRHVICDGVKGLMEGERGREARERAKFWSEIAIKAVEKGGSSRRNLDELVQCLVHRERRVI

SEQ ID NO: 5913 - protein, 486 aa, Eucalyptus grandis
MGSEARDNPHAVVIPFPAQGHINPILMLARILHHRGFHITFVHTEYNHKRLLKSRGLTSLDGLPRFRFETIPDGPQSDSDEDVTQHIPSLCESTSKNCLVPFMDLLGRLNDKSVDDTEVPKVSCVIADGGMSFALDAAEKLRLPGVLFWTPSACGSLVYTQYHMLREKGLFPLKDASYLTNGFLDTTIDWIPGMKNIRLRDLPGFIWTTDGNDIMVNYIIRQVERTHKASAVILNTFDCLEKDVLMALSSIFPNLYTIGPIHLLLNEIEDDNSSCIGSNLWKEDPACLGWLDSKEPNSVLYINFGSIAVVTSEQLIEFAWGLANSRKPFLWIMRPDLVAGDTAVLPSEFLAETKERAMLAGWCPQERVLRHPSVGGFLTHCGWNSMLESICGGVPVLCWPFFAEQQTNCFYSKNEWGIGMEIDNSVKRDEVEKLVRELMDGEKGKAMKKKAMEWKRKAEEATEPGGSSYEDLEKLLSQVLVKKLNG

SEQ ID NO: 5914 - protein, 369 aa, Genlisea aurea
LIGRQKSAVRDAVVGAFHGRESNIPAGFVVDMFCTAMVDVADELGIPSYVFFTCGAATLGLCFHVQGLKDYLNEDISKFDVPGEFFAVPGYRNPFPTNVMPGMLYDKERREDFVESVRIFRRLKGILVNSFLELEEDAIKFMSEDTRTPPIYAVGPVLQDSGDETRQGFREIMDWLDEQPDSSVVFLCFGTRGAFDEDQVKEIAAGIQRSGHRFLWSLRKPPPNGHRGFPSEYENFEEILPAEFLNGNGKVIGWAPQAAVLAHRAVGGFVSHCGWNSTLESVWFGVPVAVWPLGAEQQANAFQLVKEFETAVEIKMDYRVGSGEKIPAEKIEAAIRELMDLNNPIRLKAKELKEKSRTTLLPNQSSSNF

SEQ ID NO: 5915 - protein, 476 aa, Nicotiana tabacum
MGQLHFFFFPVMAHGHMIPTLDMAKLVASRGVKATIITTPLNESVFSKSIQRNKHLGIEIEIRLIKFPAVENGLPEECERLDLIPSDDKLPNFFKAVAMMQEPLEQLIEECRPNCLVSDMFLPWTTDTAAKFNMPRIVFHGTSFFALCVENSIRLNKPFKNVSSDSETFVVPNLPHEIKLTRTQLSPFEQSGEETTMTRMIKSVRESDSKSYGVIFNSFNELEHDYVEHYTKVLGRRAWAIGPLSMCNRDIEDKAERGKQSSIDKHECLKWLDSKKPSSVVYVCFGSVANFTASQLHELAMGIEASGQEFIWVVRTELDNEDWLPEGLEERTKEEGLIIRGWAPQVLILDHESVGAFVTHCGWNSTLEGVSGGVPMVTWPVFAEQFFNEKLVTEVLKTGAGVGSIQWKRSASEGVKREAIAKAIKRVMVSEEAEGFRNRAKAYKEMARKAIEGGGSSYTGLTTLLEDISTYSSTGH

SEQ ID NO: 5916 - protein, 421 aa, Unknown
  Description of Unknown: Oryza sativa Japonica Group sequence
MDASPLHVVVFPWLAFGHLLPALELAGRLASRGLRVSFVSTPRNIARLRRPCPSVEFVELPLPRVDGLPDGAEATTDVPDHMSSALWKASDGLTAPFSAFLDAAAAAGNKVDWLILDGMLSWAAASAADRKVPCVLMMPYTATACAHFGVPDEARDADRFPSAIARRFVSAFRSSELLAVRSCVEFEPESVPLLSNIFGKPVVPIGLLPPPQVDGDGDGDTALMSSWLDRQPPKSVVYVALGSEAPLTAEQRRELALGLELSGAPFLWALRKPHGGDDDGGLLPPGFEERTRGRGMVKTEWVPQLKILAHAAVGAFLTHCGHSSVIEGLRFGHPLVMLPLFLDQFTNASYLEGARGVGVQVARDGEHGGAFDRDGVAAAVRAAVVDEESKKAPPARHPHHVSCAAPATCPHHAGRCNKSPL

SEQ ID NO: 5917 - protein, 515 aa, Caenorhabditis briggsae
MRFLILLTLIFSFSNALNILFYQAVIGPSHIAYLRTTIKKLLDRGHTVDVVFAVYNEMTNLELSPEVRRVYYNRHADPDYWKKNANHFSNMFEKPSTPIGEFEIYHESGYQLCRIAINDNELFDFLKTGEYDIGFSSDYDPCGNILMTAAKIPSIGSLMATPIFYPQIVSAGLPTVASVFGTPFFPENDGSLYHKTFSLLRLTYYHYVIAPNLEQKYNQLIRQRFGNVFPDVSKIERDLDIVFVNSHDFLETQRPMSPKIKYIGGMAIREAKNLPEEFDRLLSVPASACVLFSFGTQVPTHKMPFQIRKNFVEAFKKFPNVTFLWKYDNMELDTEIFEGVDNVHRLEWLPQTELLHDDRVKLFISHMGLNSYLETATAGKPVLAIPLFADQQNNAQNAKNREMGLLLDRDQLTVRKIESTLRELLENPKYLSNAKSISKMILEQPEKPTEKFIKWLEFAARNPGLNKVFRMPGSDLSPFYYYCGDILMILIFITFMVFQFFLKQVSAFTRKIKTD

SEQ ID NO: 5918 - protein, 443 aa, Unknown
  Description of Unknown: Oryza sativa Japonica Group sequence
MESAPATTTSSSTQHGGGGGHIFLLAFPEAHGHVNPILQLGRHLAAHHGLLPTLVTTRHVLSTLPPPPAPFRVAAISDGFDSGGMAACGDAREYTRRLAEVGSETLRALLRSEADAGRPPRVLVYDPHLPWAGRVARGAGVPAAAFFSQPCAVDVIYGEAPESYPPFLEAVLGQFDGLEDADDVLVNSFQELEPKEADYLASAWRFKTVGPTVPSFYLDDDRLQPNKNYGFNISDSTSPCLAWLDNQPPCSVVYASYGTVADLDPTQLDELGNGFCNSGKPFLWVVRSCNEHKLSEELRDKCKERGLIVSWCPQLEVLSHKATGCFLTHCGWNSTTEAIVTGVPLLAMPQWTDQPTTAKYIESAWGNGVRVRRDKEGMVRKEEVERCIREVLESERKADYMKNANRWMKKAKEAMKKGGSSYNNIVEFASKLLIGQMMTNQVG

SEQ ID NO: 5919 - protein, 404 aa, Papilio xuthus
MNVFQFLILFTLYIPYGDVHKILVITHLPIKSHAILSHVLVKLLLEAGHEITHIAMFPFNYSHPNLHQIDASWNEKYTRGNDLQFYSQISSKIFTVTLQHKDVDKLFRDTTQRFDLIIAEWMFNDICIGVAALYDCPLIWFSASECHWSLLQLIEESTSTYTMGRTSRRIESFESASLRKEAYLRSFDKESFNKIFEPLMALRGQPLRPYVELMYYSSLVLVYSRVLLGDATRWPENFKPVAGYHIDQKVKPLPKDLKSIMDNAKYGVIYFSLGSHLKSKDLPEEFKQEIINMLRELKQTVLWKLESEYPDLPNNVHIMKWAPQQSILAHQNCVLFITQGGILSLTEAIYFGVPIIGIPIFADQFTNVDRAVKEGYGKKVDFSTKETVKSIKDAIEEMLHNPSK

SEQ ID NO: 5920 - protein, 474 aa, Arabidopsis thaliana
MAKQQEAELIFIPFPIPGHILATIELAKRLISHQPSRIHTITILHWSLPFLPQSDTIAFLKSLIETESRIRLITLPDVQNPPPMELFVKASESYILEYVKKMVPLVRNALSTLLSSRDESDSVHVAGLVLDFFCVPLIDVGNEFNLPSYIFLTCSASFLGMMKYLLERNRETKPELNRSSDEETISVPGFVNSVPVKVLPPGLFTTESYEAWVEMAERFPEAKGILVNSFESLERNAFDYFDRRPDNYPPVYPIGPILCSNDRPNLDLSERDRILKWLDDQPESSVVFLCFGSLKSLAASQIKEIAQALELVGIRFLWSIRTDPKEYASPNEILPDGFMNRVMGLGLVCGWAPQVEILAHKAIGGFVSHCGWNSILESLRFGVPIATWPMYAEQQLNAFTIVKELGLALEMRLDYVSEYGEIVKADEIAGAVRSLMDGEDVPRRKLKEIAEAGKEAVMDGGSSFVAVKRFIDGL

SEQ ID NO: 5921 - protein, 485 aa, Arabidopsis thaliana
MKLELVFIPSPGDGHLRPLVEVAKLHVDRDDHLSITIIIIPQMHGFSSSNSSSYIASLSSDSEERLSYNVLSVPDKPDSDDTKPHFFDYIDNFKPQVKATVEKLTDPGPPDSPSRLAGFVVDMFCMMMIDVANEFGVPSYMFYTSNATFLGLQVHVEYLYDVKNYDVSDLKDSDTTELEVPCLTRPLPVKCFPSVLLTKEWLPVMFRQTRRFRETKGILVNTFAELEPQAMKFFSGVDSPLPTVYTVGPVMNLKINGPNSSDDKQSEILRWLDEQPRKSVVFLCFGSMGGFREGQAKEIAIALERSGHRFVWSLRRAQPKGSIGPPEEFTNLEEILPEGFLERTAEIGKIVGWAPQSAILANPAIGGFVSHCGWNSTLESLWFGVPMATWPLYAEQQVNAFEMVEELGLAVEVRNSFRGDFMAADDELMTAEEIERGIRCLMEQDSDVRSRVKEMSEKSHVALMDGGSSHVALLKFIQDVTKNIS

SEQ ID NO: 5922 - protein, 495 aa, Arabidopsis thaliana
MKFELVFIPYPGIGHLRSTVEMAKLLVDRETRLSISVIILPFISEGEVGASDYIAALSASSNNRLRYEVISAVDQPTIEMTTIEIHMKNQEPKVRSTVAKLLEDYSSKPDSPKIAGFVLDMFCTSMVDVANEFGFPSYMFYTSSAGILSVTYHVQMLCDENKYDVSENDYADSEAVLNFPSLSRPYPVKCLPHALAANMWLPVFVNQARKFREMKGILVNTVAELEPYVLKFLSSSDTPPVYPVGPLLHLENQRDDSKDEKRLEIIRWLDQQPPSSVVFLCFGSMGGFGEEQVREIAIALERSGHRFLWSLRRASPNIFKELPGEFTNLEEVLPEGFFDRTKDIGKVIGWAPQVAVLANPAIGGFVTHCGWNSTLESLWFGVPTAAWPLYAEQKFNAFLMVEELGLAVEIRKYWRGEHLAGLPTATVTAEEIEKAIMCLMEQDSDVRKRVKDMSEKCHVALMDGGSSRTALQKFIEEVAKNIVSLDKEFEHVALK

SEQ ID NO: 5923 - protein, 319 aa, Unknown
  Description of Unknown: Spirochaetales bacterium sequence
MKILFYAVNGLGLGHVTRLLAMAREIRKLKPRWEILFITTSESDALYREGFASVKLPSKTVARATGMSVPGHLSILHQAAWSVFASFKPDTTVVDTFPEGFAHELDQVLRWEESKFVYVFRQRREVKLNDRYFQSLLRRYRLILVPHNPGEEGIRITGNDRVVHTGPILIRGRRDLRDADEVKRAYGLPQDKKLILINMGGGGQAGLETILGKIVRAVNGVPGCYPVAALGGLSPDMALSGCGIIRGCYPVCELYKAFTGIIAGCGYNTVHEVLYFRKPGIFIPFERTVDDQERRALWVKEKGAGLTADPGNLDMISGL

SEQ ID NO: 5924 - protein, 463 aa, Ziziphus jujuba
MFNPPRIIVVTYPAQGHLNPALQFSKNLTAIGAEVTFLTSLSAYRRMNTLSFPNSLTFFPFSDGHDDSVGFDPKNSLDHYMFELSHCGSQALSDLIVSGEKEGRPFCCVVYTLLLPWAGKVAKELRVPSALLWIQAATVFDIYYYYFHGYDGVMSNNYSDGSSLIELPGLPLKLTGIDLPSLMDSANIYTFAMPTLKDLFEMLDKEGNPKVFVNTFNDLEPKAIKAIGKFDLIGIGPLIPSAFLDGKDPSDTSFGGDLLQHPKDYYMEWLSSKPKGSVIYVSFGSMSKLSKPQMEEIGRALLDIKRPFLWVNIGEEGEDELSCREELEKLGMIVPWCSQMEILSNPSLGCFVTHCGWNSTLESLVCGIPMVGFPQWSDQGTNAKLVMETWKSGVRARANQDGIVEGDEIKKCLELVMGDGEKGEEIRRNAKTWKDLGREAAMDDGSSYKNLKAFLDDIIQDRN

SEQ ID NO: 5925 - protein, 505 aa, Medicago truncatula
MVSQDPKVHFVLFPMMAQGHMIPMMDIAKILAQHQNVIVTIVTTPKNASRFTSIVARCVEYGLDIQLVQLEFPCKESGLPEGCENLDMLPALGMASNFLNALKFFQQEVEKLFEEFTTPATCIISDMCLPYTSHVARKFNIPRITFLGVSCFHLFNMHNFHVNNMAEIMANKESEYFELPGIPDKIEMTIAQTGLGGLKGEVWKQFNDDLLEAEIGSYGMLVNSFEELEPTYARDYKKVRNDKVWCIGPVSLSNTDYLDKVQRGNNNNKVSNDEWEHLKWLDSHKQGSVIYACFGSLCNLTPPQLIELGLALEATKRPFIWVLREGNQLEELKKWLEESGFEGRINGRGLVIKGWAPQLLILSHLAIGGFLTHCGWNSTLEAICAGVPMVTWPLFADQFLNESFVVQILKVGVKIGVKSPMKWGEEEDGVLVKKEDIERGIEKLMDETSECKERRKRIRELAEMAKKAVEKGGSSHSNISLFIQDIMKKNKDMMSSFIHGNANSK

SEQ ID NO: 5926 - protein, 479 aa, Arabidopsis thaliana
MVKETELIFIPVPSTGHILVHIEFAKRLINLDHRIHTITILNLSSPSSPHASVFARSLIASQPKIRLHDLPPIQDPPPFDLYQRAPEAYIVKLIKKNTPLIKDAVSSIVASRRGGSDSVQVAGLVLDLFCNSLVKDVGNELNLPSYIYLTCNARYLGMMKYIPDRHRKIASEFDLSSGDEELPVPGFINAIPTKFMPPGLFNKEAYEAYVELAPRFADAKGILVNSFTELEPHPFDYFSHLEKFPPVYPVGPILSLKDRASPNEEAVDRDQIVGWLDDQPESSVVFLCFGSRGSVDEPQVKEIARALELVGCRFLWSIRTSGDVETNPNDVLPEGFMGRVAGRGLVCGWAPQVEVLAHKAIGGFVSHCGWNSTLESLWFGVPVATWPMYAEQQLNAFTLVKELGLAVDLRMDYVSSRGGLVTCDEIARAVRSLMDGGDEKRKKVKEMADAARKALMDGGSSSLATARFIAELFEDGSSC

SEQ ID NO: 5927 - protein, 426 aa, Unknown
  Description of Unknown: Oryza sativa Japonica Group sequence
MSQETPARRSLPHLLLVSAPLQGHVNPLLCLGGRLSSRGLLVTFTTVPHDGLKLKLQPNDDGAAMDVGSGRLRFEPLRGGRLWAPADPRYRAPGDMQRHIQDAGPAALEGLIRRQANAGRPVSFIVANAFAPWAAGVARDMGVPRAMLWTQSCAVLSLYYHHLYSLVAFPPAGAETGLPVPVPGLPALTVGELPALVYAPEPNVWRQALVADLVSLHDTLPWVLVNTFDELERVAIEALRAHLPVVPVGPLFDTGSGAGEDDDCVAWLDAQPPRSVVFVAFGSVVVIGRDETAEVAEGLASTGHPFLWVVRDDSRELHPHGESGGGGDKGKVVAWCEQRRVLAHPAVGCFVTHCGWNSTTEALAAGVPVVAYPAWSDQITNAKLLADVYGVGVRLPVRRRGHERAGGGGDAAEGAGVERQGERGGG

SEQ ID NO: 5928 - protein, 478 aa, Medicago truncatula
MEAKTHIALVTIPVFSHQVSLLEFAKRLNHLYKNSFQVTCIIPTISDSPSISSKHYFDDLPSNIQCIFLPPINFEDLRSESLVLESQVQIAVTRSMPLVCETLRSISSSSNVVALIVDSFVHEAHEFAKELNILSYIYFPCSAMVLSMCLYSSKLDETITCEYKDHPQPIEIPGCMSVQGTDLPDSLQNRSSLAYKLFLHRSQQLRQADGIIINSFHEMESKALKAISLISPKNLYGTTFDVYPVGPIIQTRPNIKKHACECWLDNQQPKSVLYISFGSGGTLSQDQINELALGLELSNHKFLWVNVRPPNNKATASYLSNEEMDPLHFLPLGFLQRTKGQGFVMCGWAPQVEVLKHKAIGAFLTHCGWNSILESIVHGVPMIAWPLFAEQRSNAALVTNGLKIAMRTKYNSKGIVVKEEVANIIKGIMEGLESGEIRRRMKELQKFANCAIMENGSSMKTFSLLALKWKSLSRPIED

SEQ ID NO: 5929 - protein, 411 aa, Medicago truncatula
MSDEVVHVAMFPSAGMGHLTPFLRLASLFLNNNCKVTLITPLPTVSLAESQLLDHFHSCFPQVNRVPFNLPPPPPSSSISVDPFFLRVQTLRNSTHLLPSLISSLSPPITVFISDILLFSPLNKITQKLSLPNYILNTSSSAMFSLFSHFPTLAQSLSSQEQEYDASDGVLVPGIPFSPLPYSSIPPFLLQPTSILRNLAMEDSPKLVYLHGVFANTFEALESHSLEALNSGKVVKNMPPVYAVGPFVPFEFEKGQKEASSPRSIKWLDDQPIGSVVYVCFGSRTTLGREQMKEIGDGLMRSGYKFLWVVKDKIVDKEEEVGLDEVLGVELVEKMKDRGLVVKEWVDQSEILSHKSVGGFVSHCGWNSITEAALNGVPILGWPQHGDQKINAKLVEISGWGVVEQELGLGW

SEQ ID NO: 5930 - protein, 1714 aa, Frankliniella occidentalis
MKHASPARAVAPKNVAVLVATLFLPLLLMQCITSAASEVKSTAAAPAVAPAAAPAGAPVAAATPAREPLRILSIMTVGTMSHHIWMSALTVELAKRGHLVTSIDIHKHGENPPTLNTTIIETAFKLANPEHMKRWLAATVVQQISLLQEIVEKECIRDLGAPAMQRLLDSAFESTYDLIIIDYMSDCMLGFAHRFNYPGMIAVSPFPISPWIDDLMYNPQVPSILAHTMQPFPHPMNLWQRAWTLYLHAHSKLVVWWWRPVQDSLIKRFFGEDAPSVEQLRQHVHVALVNENPILEAARPLPPSLIPVGGMHVKPADLGRIPSDLRKWMDDAKDGFIFVSFGSIMKGKFIDPVKKRALVDSFAALAPVRVLWKIEPDSVAAEPVAANVRVEAWAPQNDLFGHPNLRLFVSHCGGLSVQEASHHGVPVLGTPFIVDQFVNLEKVVGIGMGRGMPFNELTKERFVAEIKEMLTNPRYLKAARHTRTLIHDQKETPLERAVWWAEYVGRHRGAPHLRSPARDLYWHQVMMLDIAALLALAMLVVLLIAFLVAKCAVYVSRSIGLQLKDPLKSTKKDCWAQRCPLGLRPSESTSQVAGPAVRPSASEMQHASPARASARQSVAVLVIALIMPLLLKQCVSSAAPEVKTTAASHAREPLRILALMTIDTMSHHIWMSALTVELAKRGHLVTSIDIHKHSENPPTLNTTIIETAFRVFDDPEDMGRWFAASVVKQISMLQSMSEEDCKRDLGSPTMQRLLDPAFKGAFDLIIFDYMSDCTLGFAHRFNYPGMLAVSPFPVSPWIDDLMYNPQAPSILAHTMKPFPHPMNLWQRTWSLFLHAQYKLTVWWRRPVQDGIIKRFFGDKAPRVEQLRQHVHVALVNENTVLGAARPLPQSLIPVGGMHVKPADLGRIPADLRKWMDEAEDGFVFVSFGSIMRGKDIDLVKKRALIESFAALAPVRVLWKIEPDAVAAQPVAANVRVEAWAPQNDLLVHPNLRLFVSHCGGLSVQEASYHGVPVLGTPVAVDQFVNLEKVVSIGMGRRMPYTEITKERFVNEIKEMLTNPRYLKAARHTRTLIHDQKETPLERAVWWAEYVGRHRGAPHLRSPARDLYWHQVMMLDIAALLTLAVLAVLLVALLVVSLPAKTKRTSRDNGLAVRPSASDMQHASPARAAARQNVAVLVIASLLPLLLMQCVSSTAPEVKTTAAGTARKPLRILALMTFDTMSHHIWMSALTVELAKRGHLVTSIDIHKHSENPPTLNTSIIETAFRIFDDPEDMGRWFAASVVQKIGIVQSLLEEDCKRDLGAPAMQRLIDPAFKGTFDLIIIDYQADCMLGFAHRFNYPGMLAVSPFPIAPWVDDLMHNPQVPSILAHTMQPFPHPMNLWQRASTLFLHAHSKLTVWWRRPVQDSLIKSFFGEDAPSAEHLRQHVHVALVNENPVLEAARPLLPSQIPVGGMHVKPADLGRIPADLRKWMDEAEDGFVFVSFGSIMKGKDIDPSKKRALVDSFAAVAPVRVLWKIEPDAVGEQPLAANVRVEAWAPQNDLLVHPNLRLFVSHCGGLSVQEASYHGVPVLGTPVAVDQFVNLEKVVGIGMGRGMPYTEITKERFENEIKEMLTNPRYLKAARHTRTLIHDQKETPLERAVWWAEYVGRHRGAPHLRSPARDLYWHQVMMLDIAALLALAVLAVLLVAFLVVKCAVQVVRKNMQQRKESLKSAKQD

SEQ ID NO: 5931 - protein, 203 aa, Rosa chinensis
MSKLWPLKTIGPTIPSMYLDNRLKEDKDYGVSLFKQNNDACMKWLNERPKVSVVYVSFGSGAELGAEQMEELAWGLRSSKSNFLWVVTESEAGKIPKGFVLAHEAVGCFITHCGWNSTLEALGLGVPILAMPQWTDQGTNAKYIVDVWKIGLKALADEKGIVRKDVVVHCIIEIIEGATGKERRRNAMKWKQVARKAMDEGGS

SEQ ID NO: 5932 - protein, 496 aa, Triticum aestivum
MTFAGSGDGQSGSARAHFVLVPMMAQGRTIPMTDMACLLAEHGAQVSFITTPVNAARLEGFAAKVEAAGLVVQLVELHFPSVEFGLPDGCENLDMIQSKNLFFNFMKACAALHEPLMAYLREQQRSPPSCIISDMAHWWTGDIARELGIPRLTFSGFCGFSSLVRYIVFHNNVLENVTDDNELITIPGFPTPLELTKAKLPGTLCVPGMEQIREKMFEEELRCDGEITNSFKELETLYIESYEQITRKKVWTIGPMCLCHRNSNRTAARGNKASMDEAQCLQWLDSRKPGSVIFVSFGSLACTTPQQLVELGLGLEASKKPFVWVIKAGAKLPEVEEWLADGFEERVKDRGLIIRGWAPQLMILQHQAVGGFVTHCGWNSTIEGICAGVPMITWPHFGEQFLNEKLLVDVLQIGMEVGVKGVTQWGSENQEVMVTRDAVETAVNTLMGEGEATEELRMRAEDCAIKARRAFDEEGSSYNNVRLLIQEMGNKTNACG

SEQ ID NO: 5933 - protein, 489 aa, Medicago truncatula
MEEKTKMDMEEGEEKALTIYFIPYLAPGHMIPLCDIATLFALRRQKVTIITTPSNAQILGKSIPLNQHLRIHTVPFPSHEVGLPDGVESLSAATDLENLRKIFQATTLLQPPIQHFVEQHPPDCIVADFLFPWVDELANKLQIPRLSFNGFSLFAICAIESVKAHSLYESASFVIPGLPHSIAMNAAPPKQMSDLLEALLETVFKSNGIIVNNFSELDGEEYIEHYEKTTGHKAWHLGPASLIRRTVQEKAQRGQQSVVSVHECLSWLDSKPDNSVLYICFGSLCLFPDKQLYEIACGIEASGHKFIWVVPEKKGKEDESEEEKGKWLPKGFEERNIGKKKGLIIRGWAPQVMILSHKALGAFMTHCGWNSTVEAVSAGVPMITWPVHGEQFYNEKLITQVRRIGVVVGAAEWSSTGIGEREKVVGRDSIEKAVRRLMDGGDEAEKIKKYAREFGDKAKHAAQEGGSSHRNLTAVIDDLKILRDRKLRV

SEQ ID NO: 5934 - protein, 482 aa, Capsella rubella
MNRERTHILFFPFMAHGHMIPTLDMAKLFASRGAKSTLLTTPINAKILEKPIEAFKVQNPDLEIGIKIFDFPCVELGLPEGCENVDFINSYKESDSGDLFFKFLFSIKYMKQQLESFIETTKPSALVADMFFPWATESAEKFGVPRLVFHGTSFFALCCSYNMRIHKPHKKVATSSTPFVIPGLPGDIVITTDQANVVVDEETPFGNFWKEVRESEISSYGVLVNSFYELESTYVDFYRSFVAKRTWHIGPLSLSNRELAEKAGRGKKANIDEQECLKWLDSKTQGSVVYLSFGSRASFTNEQLLEIAFGLEGSGQNFIWVVSKNENQGESEEWLPKGFEERTKGKGMIIRGWAPQVLILDHKAIGGFVTHCGWNSTMEGIAAGLPMVTWPMGAEQFYNEKQLTKVLRIGVNVGATELVKKGKLISREEVEKAVKEVLVGEEAEERRIRAKKLGEMAKAAVEEGGSSYSDVTKFMEELNGRK

SEQ ID NO: 5935 - protein, 355 aa, Medicago truncatula
MDALDFAKEFNLLSYVYYPASATSLSSYFYLLKLDKETSCEYRDLPGPIQIPGSVPIHGRDLFELAQDRSSQSYKYLLQGVEKLRLFDGILINSFIEIENGPIEALTDEGSENLLVYAVGPIIQTLTTSGDDANKFECLAWLDKQRPCSVLYVSFGSGGTLSQEQINELALGLELSNHKFLWVVRSPSNTANAAYLSASDVDPLQFLPSGFLERTKEQGMVIPSWAPQIQILRHSSVGGFLTHCGWNSMLESVLHGVPLITWPLFAEQRTNAVLLSEGLKVGLRPKINQNGIVEKVQIAELIKCLMEGEEGGKLRKNMKELKESANSAHKDDGSATKTLSQLVLKWRNFGIEKQV

SEQ ID NO: 5936 - protein, 487 aa, Polygala tenuifolia
MEKNQPRLHAIMFPLPFQGHVNPLMQLAIKLASMGVTVTFVNTQFIDQQINKARAYDYTAGDDMFAEARQSGLDIRYTTITDGFPLKFDRNAIDKFWPGLEIVFPAHVDELLSNMMGSDLDPTLTCLIADTFFNWTSDLARKHNLVNVSCWTQPALTYSINYHMDLLKMNGHFGSHDIREDAITYIPGVPAIDLEDLPSFFQQNDPSDLIVRIAETSFQCCRRADFVLFNTIEELESETISALQHDQQQIYAVGPLVSSLELAKGMVPSASFHFESDCAQWLNTKPHGSVLYVSFGSACLIGKLDIMELAYALFLSEVNFVWVLPPHLVGSDPISFLPAGYEEDIKDKGLIVQWCNQVAVLSHSATGGFLSHCGWNSTLESIWCGIPLLCSPLSYDQTPNRKLIVDAWKIGLNLCQKKSIRREEAARNIQKLMHGEIADELRSNVSVMRQTMKHATVAGGSTERNLDRFINSVKAKSNMKFDNDRKI

SEQ ID NO: 5937 - protein, 597 aa, Papilio xuthus
MFPVPGRSHAILGEGFVRHLLNDGHEVTYITPIIMKMTHPRLRQIDISNSKLMPPDQMFDTQNILMNKWDFKNIKFMLFVTTNFVNGTLTHPNIQRLIHDPSEQFDAVIVEWLYSELYAGFASVFDCPLIWSSSLDPHWLVLDLIDEIPNPAYNPQHLADIVTPLGFWNRAEELWHVIHTKYFKWRLRHKENHIFDNAFASSVALRGRILPPLNEVRYNGSLILGNSHLSAGTAMRLPPNYIPIGGYHIKENIDPLPPNLQDIADNARNGFIYFSMGSMLKSSRIPDEMKKGLLNVFSKLDQTIIWKFEQELPDRPNNVHIVSWAPQLSILAHPNCKLFITHGGLLSVLETLHFGVPIIGVPMFGDQHMNINRVVEKGFGMRVDLNDDVVGNMEIAIREILDNPRYAQKVKEYSFIYHDRSTSPGQELTHWVSHVIRTKGAPHLRSPGYMLPWYQKLYLDLAIVIFITHVTGIPYNISHPNLRRFEVDYFLESIPNMDSSRAFGRIIRELFISSLREKDVNMLLRDTKERFDLVVAEWMFNDLYAGLSALYDCPLLWFSATESHWMMLRLLEDTINSQDTTSKYIPPFITSYIIQDM

SEQ ID NO: 5938 - protein, 464 aa, Zea mays
MAERVSQHIVHVLLLPNPTQGHINPILEFGKRLAAHRGVQCTLAVTRFVLSKSGQSSAGGAVHIAPISDGCDRGGYGEAGGIEACTARLESAGSATVGELLRSKAERGRPVRALVYDAFLPWAQRVGRRHGAACAAFFTQPCAVDVAYGHAWAGRVEPPLPLGEEQLEPLPGLPGGLRPCDLPTFLTDKDDRAYLDLLVSQFVDLDTADHVLVNSFYELQPQESDYMASTWRAKTVGPAVPSAYLDNRLPDDTSYGFHLYTPMTETTKAWLDARPARSVVYASLGSIAKPDAAQTAEMAEGLYGSGKAFLWVVRASESAKLPENFAGRTTEERGLVVTWSPQLEVLAHPAVGCFVTHCGWNSTMEALGAGVPMVAMPQWSDQTMNAKYIEDVWRVGVRVRPDGRGVVRKEELERCVREVMEGERSLDYIRNAAGWKEKARSAMSEGGSSDKNVLDFLGALGLKK

SEQ ID NO: 5939 - protein, 478 aa, Ricinus communis
MKNKAELVVVSMPGVGHVVSTIEFAKNLIERNDQLHISIIVMKFPTTPFVDQYAKSLTASQPNLQLIHLPDQVEGLPTLQVFAKSVQSYYSAVIACYKPHVRKIVSDMISSRSSPDSVPVVGLVLDLFCVSLIDVGNEFDLPSYIFFTTGTPFLSLMLHLPPRHEQVGTEFSFSDPDVSLPGIANPVPIKCLPDAVFNKDGGYDTYLNVGRRLKDVKGILVNTVSELESQALQYLNSAQITSIYTVGPVLHLKSQPHPDMEQGRWGKIKTWLDEQPESSVVFLCFGSSGSLSVSQVKEMALGLEQSGHRFLWSLRLPPVKLQETMYKSAEEMLPEGFLERVRGRGMVCGWAPQVEVLAHKATGGFVSHCGWNSILESLWYGVPIVALPIYAEQQINAFAMVKELGLAVELKMDYRQSDVIPAEEVKTTLTRLMDNEEELKRKVKNMSEISRKALKEGGSSSISISRFMKDLLGSSYFD

SEQ ID NO: 5940 - protein, 469 aa, Cephalotus follicularis
MATKMQPTGSSPKQHVGVMVFPFGSHVISLFHLVRKLATAIPNTHVSFFNTAKSNNSIFLASKSTHEDIPSNIKAYNIGDGVPMNHVFTSYPGEAVELFLKATPDNFYQGFDTAVSEIGLKISCLITDGLLSFAGDISKEMHVPWIPVWSPVPHSLYVHVYTDLIRQHYANVEGSDSGDKTLEFIPGLSKIHMDDLPDGILPKSSSNLEESLFHSMLSKLGHMLPQSATVVMNYYQELYPVPLLDDLKFKFPGLLNVGYVTLSMPPPPLLPSNLDATGCLSWLDGQKDMSVAYISFGTVAVVPPNETLELGEALEASGVPFLWTLKDDLKDHLPNGFLERTSMQGKVVPWAPQTQVLAHSSIGVCVTHFGANSVNESIANGVPMIGRPFFADHHINGRIVEEIQGIGLRVEALTKSGVIESLELVLVHEQGKEMRKKVQSLKEIVLKAAGPTGSATKDFQTLVEKISIL

SEQ ID NO: 5941 - protein, 483 aa, Prunus mume
MSPVASKEKPHAVFVPFPAQGHINPMLQLAKLLNYKGFHITFVNTEFNHKRMLESQGSHALDGLPSFQFKTIPDGLPPADADARRNLPLVCDSTSKTCLAPFEALLTKLNSSPDSPPVTCIVADGVTSFTLDAAEHFGIPEVLFWTTSACGLMGYVQYYRLIEKGLTPFKDAKDFANGYLDTEIDWIPGMKDIRLKDMPSFIRTTDPNDIMLHYMVSETERSKKASAIILNTFDALEQEVVDALSTLLPPIYSIGPLQLPYSEIPSEYNDLKAIGSNLWAENTECLNWLDTKEPNSVVYVNFGSTTVMTNEQLVEFSWGLANSKKPFLWIIRPGLVAGETAVVPPEFLEETKERGMLASWCPQEQVLLHSAIGGFLTHSGWNSTLEALCGGVPLICWPFFAEQQTNVRYSCTQWGIGIEIDGEVKRDYIDGLVRTLMDGEEGKKMRKKALEWKKLAEEATAPKGSSYLALENVVSKVLLSPRD

SEQ ID NO: 5942 - protein, 455 aa, Vigna angularis
MTIMMARPHVMVVPYPAQGHVIPLMDLSLILVKQGIKITFVNTKENHDRIKSALPCGDGLLSQIYLVWISDGLESSEERKKPGKSSGAVLKVMPEKVEELIECINGSESEKITCVLADQSIGWALDLAEKKGIRRAAFCPASAAQLVLGLSIPKFIHNGIIDKDGTPLEKKGIQLSPTMPSVSTEKLVWVCVGNKTIQRHIFQLMVKNIESMKKTEWLLCNSSHELESEAITMAPEIIPIGPLLSCDQFGHSAGNFWPQDLSCLKWLDQQSPNSVIYVAFGSFTKFSPPQFQELCFALELSNRPFLWVVQPEESKLAYPEGFVERVVERGRVVGWSPQKKILIHPSVACFISHCGWNSTLESVSNGIPVLCWPYFADQFLNKSYVCDIWKVGLGLEPNESGMITQGEIQSKIHQIFIDEQLKSRARDFKEKIHIGTGQGGLSNKNLDSFISWIKS

SEQ ID NO: 5943 - protein, 484 aa, Eucalyptus grandis
MGESHQVHIFFFPFMASGHMIPMIEMAKLFAIRGCKSTLIATPHDKPTFLKSITKTKDAGFDIDVVTVTLPLKEVGLPEDSDNMNKITTEEIRKQFYRAIRMLDQQLERLIEKLAPNCLVSDMFLPWTTEIAAKWGIPRLVFHGSSAFSSAGAGCVRIYEPHKKVSHDSEPFIIPNFPGEITMSRMQLPDFYREETEFTKFFNEVKESEKRSFGVVMNSFYELEPAYADHYRTFLGRRSWFVGPLSLCNKESEDKAHRGNQASIDQHECLKWLDSRQPNSVIYICFGSMANFNASQLHEIVVGLEASGQQFIWVVKKDPNVEEGKEEWLPDGYESRIRNKGLIIRGWAPQVLILDHEAIGGFVTHCGWNSTLEAITAGVPMVTWPVAAEQFFNEKFVTQVLKVGVSIGVKQWVRLFGDSVKSERVEDAVKRVLVSEEAEEMRRRAKALAEMARGAVEEGGSSWSDLGALLQELGQLRLAHIKKI

SEQ ID NO: 5944 - protein, 472 aa, Unknown
  Description of Unknown: Oryza sativa Japonica Group sequence
MTTKTFVMYPSLGVGHLNPMVELAKHLRRRGLGVVVAVIDPPNNDAVSADAMARLAAANPSITFRLLPAPDSPDVGAHPIKRSHDTLKLANPVLREFLRSLPAVDALLLDMFCVDALDVAAELAIPAYFFFPSQASALAVFLHLPYYYPNLPTFMEMGKAALLRFPGMPPIRTVDMPAMLRDKDSEATKVRLYQFKRMTEAKGVLVNSFDWLQPKALKALAAGVCVPDKPTPRVYCIGPLVDAGRKSRIGGERHACLAWLDAQPRRSVVFLCFGSQGAFPEAQLLEIARGLESSGHRFLWTVRSPPEEQSTSPEPDLERLLPAGFLERTKDRGMVVKNWVPQAEVVQHEAVGAFVTHCGWNSTLEAIMSALPMICWPLYAEQAMNKVIMVEEMKIAVSLDGYEEGGLVKAEEVEAKVRLVMETEEGRKLREKLVETRDMALDAITEGGSSEMAFDKFMRDLEESSLENGVRS

SEQ ID NO: 5945 - protein, 503 aa, Medicago truncatula
MASQDPKLHFVLFPMMAQGHMIPMMDIAKILAQHHNVMVTIVTTPHNASRYTSILARYLESGLHIQLVQLKFPFKESGLPEGCENLDMLPSLGAATNFFNSSKFLQQEVEKLFEELTPSPTCIISDMCLPYTVHIARKFNIPRISFGGINCLYLLCLHNLHVNNIMQTMANNEFEYFDVPGIPDKIEINIAQTGLGLKGEAWEQFNSDLAEAEMGTYGVIMNSFEELEPAYAREFKKVKNDKVWCIGPVSLSNTDYLDKIQRGNNNKVSIDEWEHLKWLDSQKQGSVLYACLGSLCNITPLQLIELGLALEATKIPFIWVLREGNELEELKKWIEESGFEERINGRGLVIKGWAPQLLILSHLAIGGFLTHCGWNSTLEAICAGVPMVTWPLFADQFLNECLVVQILKVGVKIGVKSPMKWGEEEDGVLVKKEDIERGIEKLMDETSECKERRKRIRELAEMAKKAVEKGGSSHSNISLFIQDIMKKNKDMMSSFTNGNANSK

SEQ ID NO: 5946 - protein, 457 aa, Unknown
  Description of Unknown: Oryza sativa Japonica Group sequence
MAAPPPPRPQPHVMVLPFPAQGHVMPLMELSHRLVGLGFEVEFVHTDFNRDRVINAMANETGAIPDGIHMVSFPDGMDPAGDRANIAKLGDGLPAAMLGGIEEMIRSEGIRWVIADVSMAWVTELAATVGVHVALFSTYSAAVVAHRLQVPKLIQDGVLDEIGNVRRNEMIQLRPTMPPVLAVELPWVTLSGTPDGRRMVIQNVFKTNPTISSAEVIICNTFQDIEPGALALVPNVLPVGPLEAPATSRLAGHFWPEDTTCLAWLDEQDACSVVYVAFGSFTVFDMARVQELADGLVLSGRPFLWVIRQNFTNGAGEGWLEEFRHRVSGKGMIVGWAPQQSVLSHPSIACFVSHCGWNSTMEGLRHGVPFLCWPYFADQYCNQSYICNVWGTGVKLQADERGVVTKEEIKNKVEQLVDDKEIKARAAKWKHAACTSIAEGGSSHENLLKFVNLLREQ

SEQ ID NO: 5947 - protein, 489 aa, Unknown
  Description of Unknown: Oryza sativa Japonica Group sequence
MEPFTSAAVEPAPPTADDQRDAPRPHVVLLASPGAGHLIPLAELARRLADHHGVAPTLVTFADLDNPDARSAVLSSLPASVATATLPAVPLDDIPADAGLERMLFEVVHRSLPHLRVLLRSIGSTAALVPDFFCAAALSVAAELGVPGYIFFPTSITALYLMRRTVELHDFAAAGEYHALPDPLELPGGVSLRTAEFPEAFRDSTAPVYGQLVETGRLYRGAAGFLANSFYELEPAAVEDSKKAAEKGTFPPAYPVGPFVRSSSDEAGESACLEWLDLQPAGSVVFVSFGSFGVLSVEQTRELAAGLEMSGHRFLWVVRMPSLNDAHRNGGHDEDPLAWVPDGFLERTRGRGLAVAAWAPQVRVLSHPATAAFVSHCGWNSTLESVATGVPMIAWPLHSEQRMNAVVLEESVGMALRPRAREEDVGGTVVRRGEIAVAVKEVMEGEKGHGVRRRARELQQAAGRVWSPEGSSRRALEVVAGKWKAAAQK

SEQ ID NO: 5948 - protein, 470 aa, Medicago truncatula
MEKTIHIAVIPGAWYSHLVSILEFSKLLVQLHPDFHVTCFIPTLGSPSSASKSFLQTLPSNIGYTFLPPVNPNDLPQGTSVECQIHLATTLTLPYLHQALNSLTLRTPPVALVVDSLSAEALDLAKEFNMLSYVYFPPAATTLSFYFYLLKLDKETSCEYRDLPEPIQAPGCVPIRGRDLVAQAQDRSSQSYKFLLQRIKRFCSVDGILINSFLEIEKGPIEALTEEGSGNPAVYPIGPIIQTRTESGNNGMECLTWLHKQQPCSVLYVSFGSGGALSQEQIDELAIGLELSNHKFLWVVRAPSSSASGAYLSAENDVDLLQFLPPGFLERTKEQGMVIPSWAPQIETLSHRSVGGFLSHCGWNSILESVMHGVPLITWPLFGEQRMNAVVLSEGLKVGLRPRVNDNGIVEREEISKLIKGLMEGEECENLRNNMKELKEASTNALKEDGSSRKTISQLALKWRNLVHEN

SEQ ID NO: 5949 - protein, 468 aa, Medicago truncatula
MNKKPCIAMVPSPGLSHLIPQVEFAKQLLQHHNEFIVTFIIPTLSPLTPSMQQVLNNLPPNIDFILLPQVKNIQQSHDPAAQMKLIVKHSIPFLQQEVKSLISKTNLVSLIFSIFSTDAYEVAKQFNLSSYLFYASGAVPTSFYLTLLNLDDSISSEIEFLESAYETVNVPGSIVPYHIKDIPDPLLCERSSLEYKSFLDVCQKFSLVDGVIINTFNDLEPEVIRLLQEKEKPCFYPVGPLHRNESNCEDNINSMCLRWLENQPPSSVLYVCFGSGGTVSHEQLNELAFGLELSGKKFLWVVRVPSKVVSSAYFVGEKDDPLDYLPSGFLERTKENGLVVPSWAPQVEILGHGSIGGFLSHCGWGSTLESVVNGVPMIAWPLFAEQRMNAKLLTDELKVAVRPKIDDESGIVKREEVANCVKRIMEGDESLEIQKRIKELSVGAAVATSENGSSKKALSSLASRLQNF

SEQ ID NO: 5950 - protein, 224 aa, Cajanus cajan
MYLDKRLQDDKDYGVNMYNPNSEACIKWLDDKPKGSVVYVSFGSMAELSEEQTEELAWGLRDGGNYFIWVIRDSEQGKLPKDFVGTSEKGLIVAWCPQLQVLIHEALGCFLTHCGWNSTLEALSLGVPLIAMPLWTDQITNAKLVRDVWKIGVKAVADEKEIVRRETITHCIKEILETEKGNEIKKNSIKWKNLAKNYVDEGGNSDKSTTEFVTELAHRCAASK

SEQ ID NO: 5951 - protein, 488 aa, Polygala tenuifolia
MGSISFDELSAPKPHVVLFPFMSKGHTIPILHLARLLIARDLAVTVFTTSANRPFISHFLTGTTVSIIDLPFPHDVEGTGIPQGIESTDKLPSISMIFEFALATERMKDDFERVLETLPRPIIFMVCDDFLWWTQDSADKFDIIRLSFMGMSAYATAVCRDAAYSGVFDDQKHHSDDELIALSRLPWISITKNDFSPEFFNRDTQSLSSQFHAKVFATIARRYGQILNSFYELEPVFVDYLKNEVAIKAWCIGPLCLTQPPFRSTSTTSAGMEEDDSKPTWVRWLDQKLEKGSSVLYVAFGSQAEVSPEQLREIAMGLEESYVNFLWVIRKNESELPDNFGERVGERGIVVSDWVDQMEILKHESVKGFLSHCGWNSVLESVCVGVPILAWPFMAEQHLNARMVHEEIKIGLRVETINGSVRGFVSGEELRKKVKELMEGENGRQVRKNVNELSVMAKKAVEKGGSSWQSLDSLIQETCDKAMPDVPN

SEQ ID NO: 5952 - protein, 455 aa, Polygala tenuifolia
MSEYFPHIALLPSAGMGHLTPFLRLAAMLVNNHCKVTLITPTPTVSLAESKFISRFLSAVPQVNHTEFHLMPFDASAANSTDPFFLQFEAIRRSAHLLPSLLDFISPPLSALVYDVSLISPVLAAIESMFLPRYILFTPSAKMFSIFSYFPTAVASKQITGDGEIEIPGIIPRIPGSSIPPLLFDLNSLFAKIFMEDSPKLKRLDGVLLNTFEDLEGKTLEAINEGNVVKGLPHAFAIGPLIPLQFEKGDQSQSALNWLDDQREGSVVYVCFGSRNAMKRDQIREIGKGLMRSGCKFLWVVKDKLVDRDENDSLDEVLGYKLAESMKEKGLVVKTWVCQVEILGHKGVGGFLSHCGWNSVTEAAWQGVPILAWPLAGDQKVNAELVEKSGWGMWMRNWGWLGEKLVDEEEIGKAIKDMMGSRMLKVNAVKIREAARNSNAINLEKLIQDWKKHNG

SEQ ID NO: 5953 - protein, 473 aa, Unknown
  Description of Unknown: Oryza sativa Japonica Group sequence
MDGDGVGGSMHVVMLPWLAFGHILPFAEFAKRVARQGHRVTLFSTPRNTRRLIDVPPSLAGRIRVVDIPLPRVEHLPEHAEATIDLPSNDLRPYLRRAYDEAFSRELSRLLQETGPSRPDWVLADYAAYWAPAAASRHGVPCAFLSLFGAAALCFFGPAETLQGRGPYAKTEPAHLTAVPEYVPFPTTVAFRGNEARELFKPSLIPDESGVSESYRFSQSIEGCQLVAVRSNQEFEPEWLELLGELYQKPVIPIGMFPPPPPQDVAGHEETLRWLDRQEPNSVVYAAFGSEVKLTAEQLQRIALGLEASELPFIWAFRAPPDAGDGDGLPGGFKERVNGRGVVCRGWVPQVKFLAHASVGGFLTHAGWNSIAEGLANGVRLVLLPLMFEQGLNARQLAEKKVAVEVARDEDDGSFAANDIVDALRRVMVGEEGDEFGVKVKELAKVFGDDEVNDRYVRDFLKCLSEYKMQRQG

SEQ ID NO: 5954 - protein, 470 aa, Helianthus annuus
MASEPVNQLHILLIPYLAPGHTIPMIDMAKLLAQRPNVMVTIVTTPLNAIRYGSTLQQHIESGLPVRFLELPFPATENGLPEGCESLDALPGLHLVTNFTAAYLLWTGDTAAKCKFPLVIFDGMSCFKQLCTHHLYASKVFNDLPESEPFVLPGLPDRIEITRAQLPTEFNPSRFTMPERLERVRESESRAYGMVINSFEELEQDYVNEFKKLKRGKVWCIGPLSLSNSNDSGKSLRGNSTSSDDQLYLKWLDSKEPGSVVYGCFGTISQITPPQLIELGLALEASKSPFIWVIRAGDKALEVEKWLSENGFENRIKDRGLIIRDWAPQLQILSHPSVGGFLTHCGWNSVLEGVSAGVPIITWPQFTDQFLNEKLVVHVLGIGVGVGAPGVVWGEEDRLGVTVKSEQVKTAIEKVMDPGSEGNERRKKAKALGMVAKKVIKEGGSSHHNLTLLIQDLQELANVRSQKPLI

SEQ ID NO: 5955 - protein, 485 aa, Paeonia lactiflora
MGSIAAEKPHLVCMPFPAQGHVKPMMQLAKLLHSRGFFITFVNNEFNHRRLIRNKGPDAVKGSADFQFETIPDGMPPSDENATQSITGLLYYTKKHSPIPLRHLIEKLNSTEGVPPVSCILSDGIMCFAIKVAQELGIPDVQFWTASTCGLMAYLQFGELVKRDIFPLKDVSYLSNGYMNTHLDWIPGMKDMRIKDLPSFVRCTDPDDIAFNRWLEEGEDNLKADAIIFNTFSEFEQEVLDALAPISPRTYCVGPLSLLWKSIPQSETKAIESSLWNENTECLNWLDKQKPNSVVYVNYGSIAVMTDANLKEFAWGLANSGHPFLWIVRADLVMGGSAIFPEEFFEVIKDRGMIVSWCPQDQVLKHPSVGVFLTHSGWNSTIEGICGGVSMLCWPFFAEQQVNCRYACTTWGIGMEIDSKVTREEVKQLVKEMLEGEKGNKMREKALDWKKKAEASVVEGGSSFSDFNRLAEDLMQLCLNGKYLG

SEQ ID NO: 5956 - protein, 502 aa, Helianthus annuus
MVDKYNHKKTFMNQKNMANTLAELIFIPAPGVGHLKLTMEIAKLLVNRDQRLFITVLVIKPLSVSSGTAVTAYIESLAENNMNHISFILLPQDETQPFHDPKDPSNSPIEFINSHSKYARNAVTDLKSQPGSRWIVGFVVDMFCTSMIDVANEFDVPTFVFFTSNAAFLGFTLYIKTLCDDLNRDVVDLSNSGTEILVPSFVNPVPTKVFWSGVKTRSGLDFVQWFARKLGEAKGIIVNTFLDLETHAIESLSADTSIPPLYPVGPILNLEGGSGGGKPFDDDVVRWLDSQPSSSVVFLCFGTNGSFDEVQVKEIARGLEQSGYRFVWSLRRPPSDQTSRDPSDYEDPSVVLPEGFLERTRGIGKVIGWSPQAPVLGHEAIGGFVSHCGWNSLLESLWFGVPTATWPMYAEQHMNAFEMVVELGLAVEIELDYMKDLYNTKANTIIVTAEQIESGIRRLMEDNEIRRKVKEMSAKSRSAVVEGGSSYASIGCLIQDFVRDNF

SEQ ID NO: 5957 - protein, 485 aa, Eucalyptus grandis
MGRESRQLHIFFFPFVAPGHMIPMIDMAKLFAMRGCKSTLIATPHDEPTFLKSIAKPRDSGFDIDVVTVSLPLKDVGLPEDCDNLNKAATMDMHRQFMRAVMMLDRQLELLIEKLAPDCLISDMFLPWTTEIAAKCGIPRLVFHGTSAFSVGGTECVRLYEPHKKVLCDSEPFVIPNFPGEITLSRMQLQDFVREETEFTKFYAQVKESEKRSFGVVMNSFYELEPAYAKHYSTFLGRRSWFIGPLSLCNEEIEDKAHRGSQASIDQHECLKWLDSKQPNSVIYICFGSMANFNAAQLHEIAVGLEASGQQFIWVVKKDPIVEEGKEEWLPDGYESRIRNKGLIIRGWAPQVLILDNEAIGGFVTHCGWNSILEAITAGVPMVTWPVAAEQFYNEKLVTRVLQIGVNVGVKRWVRYFGDSVKSDRVVEAVKRVLVGEEAGEMRRRTKALSEMARGAVEEGGSSWSDLGALLQELRLQRLARQKKI

SEQ ID NO: 5958 - protein, 1000 aa, Vigna unguiculata
MSNVPVVLVLPYPAQGHVNPLMILSQKLVENGCKVVFVNTEFDHKRVVSSFGAQQHSTKHEEESMMKLVSVPDGLGADEDRNDLGKLCDALQKTMPKELEKVIENMHLKSDNNKMSFIVADLGMAWALDVGRKFGMKGAIVWPASATTFALIRSLPSLIHDGSLDSDDRRIRISPCMPEMDTEDFFWLNMGEPKTGKKVLKYLLYCAEHIHLTEWWLCNTTPELEPGTLLYMPKILPIGPLLRNNDNDNNKSATTKSMGQFWEEDHSCMSWLDEQAHGSVVYVAFGSFTLFDQNQFNELALGLDLTNRTFLWVIREDNKMEYPTEFKGHKGKIVSWAPQQKVLSHPAIACFVTHCGWNSTMEGLINENKYPRIITIIEGLRNRKSPKEKMSNIPVVLVLPYPAQGHVNPLMILSQKLVKNGCKVVFVNTEFDHKRVVSSFGDQEHSRKHEEESVMKLVSVPDGLGADDDRNDFGKLCDALQNSMPKELEKLIHNMHLKGENKISFIVADLFMAWALDVGKKFGMKGAIVGPASATTFALTYSIPSLIHDGTLDSDAQGHVNPMMTFSQKLVENGCKVIFVNTEFNHRRVVSSMVEQQDEESVLKLVSIPDGLGPHDDRNDQAKLCEAIPKAMPEALEKLIEDIHLKGESKINLIVADLCMAWALDVGRKMGIKGAVLCPASASIFTLLHSVPMLIHDGIVDSDLGSILTSKKTIQLSPSMPEMEPRTFFWLHMAGIIDSSHYLNYLVHHCTPALNLTEWWFCDTAHELEPEVLTLLPKLIPIGPLLRIDHRSKTNNAPPRSLGQFWEEDLSCMSWLDEQAHGSVVYVAFGSFTLFDSNQFNELALGLDLSNRPFLWVIREDNKMEYPTEFKGHKGKIVSWAPQQKVLSHPAIACFVTHCGWNSTMEGLSNGVPLLCWPYYGDQLYNERHICDELKVGLGFDKDHNGLVSRKELKTKVEQIFNDEKIKSRSVALKGKVMKNVAKGGTSYENLEKFVKEIKQ

SEQ ID NO: 5959 - protein, 456 aa, Unknown
  Description of Unknown: Oryza sativa Japonica Group sequence
MHSSYPSIAIIRNNSLRICRRFCITFNFFCHTQSISNYVRFFNISLRRFSTSFGLFFCNRTFWRLLNSRRICIFNNRCILVNSSEPFSIDFGGESSSKLHLVIFPWLAFGHVLPYLELAERVASRGHRVSFVSTPRNIARLLPVSPAVAPRVDLVVLPLPHVDGLSVGAECTNDVPSDKFELLWKAFDALAPPFAEFLGAACVGTRALPAGGDVHEKAACPPRPSAAVARRRTPPHRRDGRRRHHAVAGRAAARFSGVRRAGERGAVRVELVHELALRLELAGTRFLLALRKPCGVDDSDVLPLGFLEQTHGHGHVAMGWVPQTTILAHAAVGAFLTHCGRNSLVEGLLFGKPLIMLPIVGDQGPNAWSMEGNMVGLQVRRDENDGSFDRHGVTAAVRAVMVEEETRSVFVTNALKMQEIVADRELHERYIDGFIQQLIFHVADGNSDTAAPDPSS

SEQ ID NO: 5960 - protein, 475 aa, Vitis vinifera
MGDKPHVVCIPFPAQGHIKPMLKLAKLLHYRGFHITFVNTEFNHKRLLRSRGPHALDGMPGFCFESIPDGLPPVDADATQHIPSLCESTPKSCLIPFQQLIAKLNDAPSSNVPPVTCIVSDGSMCFTLKASEELGIPNVLFWTTSACGFMAYKQFRPLIDGVLVPLKDLSYLTNGYLETIIDWVPGMKNMRLRDFPSFIRTRDPSDHFMLDFIIDTTDSASKASGLILNTFHALEHDVLNPLSSMFPTICTVGPLPLLLNQIPDDNSIESNLWREETECLQWLNSKQPNSVVYVNFGSITVMTPEQLVEFAWGLANSHKPFLWIIRPDLVVGDSVILPPEFVNETIQRGLMAGWCPQEKVLNHPSVGGFLTHSGWNSTIESICAGVPMICWPFFAEQQTNCRYACTEWGVGMEIDNNVERDEVEKLVKELMEGEKGKSMKKAAMEWRTKAEEATAPCGSSYLNLDKLVDILLTKP

SEQ ID NO: 5961 - protein, 473 aa, Helianthus annuus
MANEVVVVMVPFLAQGHLNQLLHLSRLISTYNIPIHFISTATHNRQVRIRLHGWNPNNNLIQFHDLDDPIVTPHPIIPNTTSHPNFPTHLQPYFNSSLLLRTPVADVIRSVSQTARKVAVIHDSLMSYVVQDVCLIPNAETYIFRGLSVFYYFCSTNMNLGRELPFEPDKICQLPAPGESISPEFSEFIKLQYDHQKNHVGNVYDSSRIIEGKFVESLKRDQVNGKYHWAVGPFNPVEMDSDCLDRHICLQWLDKQPARSVLYVSFGTTTTFTSDQIAELALGLERSTQRFLWVLRDADKGDGSVGVKAAGPSHEKPLFDNYQTLHSTCRSVGLPEGVAGRGLVVREWAPQIDILGHLSTGGFVSHCGWNSCMEAMTAGVAVATWPIHTDQPYNAILLSNVLGVAVVMRDWEHRDELLTSVMVEKVVRKLMDTEVGEAVRKRAAELGGEWRKSMADGGVTHEDLNSLISYIHK

SEQ ID NO: 5962 - protein, 383 aa, Ipomoea batatas
GTVAGEALVTHEEFIMAMPGNYQTAIAEAEAEMGTKFGCFLTDSFLWFGGDLAAERGGVPWISFWTAGACSISAHLYTDFVRSLVAATPNANGNGLDQKLKVIPGMSEVSIGEMPGEILAKDLQAPFPGMIYNMALKLPGANALVLNSFQKLEPTVTDDLRSKVQVFNIGPMILQPATPKPPISDDHNCIPWLDSLPPASSAVYLSFGSGITPPPDEIVGLAKALEAKRAPFLWSLKPHGVKHLPEGFVERTKEFGKIVPWAPQVQVLSHPGVGVFVTHCGWNSTLEAISCGVCMICRPFYGDQKINTRFVESVWEIGVKIEGGIFTKDGTMKALNVVLDSDRGKLLKENVVKLKGEALEAVKPNGSSTKDFQELVHLLNDSF

SEQ ID NO: 5963 - protein, 504 aa, Gentiana triflora
MVGRGKGKGREHVLLVVFPAQGHISPALQLAFKIVAHSSIDLTFLTSSSAVASILIGLPPTAPALNFAAFSQGNLHNDDDDDDDAKDYMHTLCKHGSQSVRDIIHSTKKGQGQGQGQGQGQGQGQGHPITRILYTTLLPWAADVAREFRLPSVLLWTQPVTTFLTFHYYFTGYEDAINKVRNQQGTEDDSTIQLPRLPLLSSRDLHSFMLPSNPFKGAINTFKEHLEALDAEETPPTILVNSYDALEEEALQAMIPKYKTMGIGPLIPSSVFDTRETTCEVVSLVPDLAQKSKDDCQWHGWLNSKAEGSVIYVSFGSHVKQSKAQTEEIAKGLLASGHPFLWVITSNEEEEGDEIMEQNLVEEIQEKGMMIVPWCAQFQVLKHPSVGCFMTHCGWNSTLESIACGVPMIGFPKMFDQPTISKLIAHVWKVGVRVNAAVDGIVGQEVIKNCIESVMDPDGIGRELNENVRKFMSLGKKAAEEGGSSHNNFKAFLQDMTGGTTTIN

SEQ ID NO: 5964 - protein, 486 aa, Vigna angularis
MESSPRTTTHIALVSVPAFSHQVSILEFAKRLLHLHADTFHVTCIIPTLSSSPSKHSIFFDSLPHNIHCIFLPSVNFHDLNNNGVSVEVQTQLSASRAMSSVRETLVSLSKTTDISALVADAMAPEALEFGKELHILSYIYFPCSTMVLSVCFHSQNLDEEVSCEYKDHPGLIHLPGCIPISGRDLPDSMQDRGSLAYKLFLQRCQRYLNGHDGILVNSFMEFEEEATKAISQHGNGGDYPPVYSVGPITQSGPSGSKSRCECLLWLDKQEPNSVLYVSFGSGGTLSQEQIDELALGLELSKQKFLWVNLRAPNDRASATYFSEGGLVDDDPLHFLPKGFLERTKEQGLVMCGWAPQVEVLGHRSIGAFLSHCGWNSVLESVVHGVPMIAWPLFAEQRSNAALVSDGLKVALRPKMKNPSGINGVVVKEEIVKLIKGVMEGLEGEEIRRKVKELKKLANCAMMGDGSSTRTIANLANKWKRLGKSL

SEQ ID NO: 5965 - protein, 488 aa, Cicer arietinum
MASQNNPLHIFFFPFMGHGHMIPSIDMAKLFASKGVKATIVTTPLNKPLVTKAIEQFKTHSNNIDIQIIKFPCVEGGLPEGCENVDSIPSPHLIPAFFKATWLLQEPLEQLLQQQKPNCIVADMFFPWSTASAAKFGIPRIVFHGTSFFSLCASQCLNLYEPFKNVSSDTELFEITNLPGNIKMTKLQLPSIFTQNDTMTQNTAKLFAAIRESEKKSYGVIVNSFYELEHVYADYYRDVLGIKAWHIGPLSIHNKKDKEITSYRGKEDSIDKHECLKWLDTKEKHSVVYLCFGSTTHFLNSQLKEIAVGLEASGKNFIWVVNKKKEDGEEWLPEGFEKRMEGKGLVIRGWAPQVLILNHEAIGAFVTHCGWNSTFEGVSAGVPMITWPVAAEQFYNEKLVTEVLKIGVPVGVKKWVGLFGDSIQCDLVEKAVKRVMEGEEAEEMRNKAKLFAEMAKKAGEEGGSSYLKLNALIEELGSLSQHQPILQD

SEQ ID NO: 5966 - protein, 457 aa, Arabidopsis thaliana
MELHGALVASPGMGHAVPILELGKHLLNHHGFDRVTVFLVTDDVSRSKSLIGKTLMEEDPKFVIRFIPLDVSGQDLSGSLLTKLAEMMRKALPEIKSSVMELEPRPRVFVVDLLGTEALEVAKELGIMRKHVLVTTSAWFLAFTVYMASLDKQELYKQLSSIGALLIPGCSPVKFERAQDPRKYIRELAESQRIGDEVITADGVFVNTWHSLEQVTIGSFLDPENLGRVMRGVPVYPVGPLVRPAEPGLKHGVLDWLDLQPKESVVYVSFGSGGALTFEQTNELAYGLELTGHRFVWVVRPPAEDDPSASMFDKTKNETEPLDFLPNGFLDRTKDIGLVVRTWAPQEEILAHKSTGGFVTHCGWNSVLESIVNGVPMVAWPLYSEQKMNARMVSGELKIALQINVADGIVKKEVIAEMVKRVMDEEEGKEMRKNVKELKKTAEEALNMTHIPSAYFT

SEQ ID NO: 5967 - protein, 370 aa, Ricinus communis
MQDTIVLYPSSGIGHVISMVELGKLILRHYNHHFSITILLFTADLCHTSAITSYINAISQAYPSISFRRFPRVFVDTTPTRSNPAMAFEAILLNKPYVLDSLQEISKVNTFEDLETKAIKTIADGVCVPDAPTPPTYYIGPLIAGDSRHEAQHDCLSWLDRQPRNSVVFLCFGSRGSFSRQQLKEIANGLERSGQRFLWVVKNLPEDERSKTTEDMGDFDLESILPEGFLNRVKEKAMVVKSWAPQVAVLNHKSVGGFVTHCGWNSVLEAVVAGVPMVAWPLYAEQHLNRNILVEDMKMAIQVEQRDDDDGFVTGDELEVRVRELMESEKGKEMRQKSWMMRQRSLDSWLESGSSIRALGKLVEPWKKIC

SEQ ID NO: 5968 - protein, 219 aa, Medicago truncatula
MYDGDEVSAIVIDLGSHTCKAGYAGEDAPKAVFPSRYYYFVLFVVADDSDEAGTEIEANCKKPFLWITRPNLVIGGSVVLSSEFRKEISDRGLISNWCPQEKVLNHPSISGFLTHCGWNSTTESICAGVPMLCWSFFADQPTNCRFICNEWKIGMEIDMNVKIEDLEKLINELMVGENGKKMRQKAMELKKKAEENTRPGGCSYMNLDKVIKEVLFKQN

SEQ ID NO: 5969 - protein, 496 aa, Culex quinquefasciatus
MGSTTRLLTLLFLVTTTSVILLNGADSARILCVFPTASKSHVLGMQALMKNLAKRGHEITMVSAFPLSKPVQNYRDVYVPIEGAFGPLMANFMQGKDRNMLKVMPVIVAASLEYTNATLNSPQFRRLVDEERFDLAVVGWFMNDYVAGIGQLFKCPTVLYFSAGFSSMVNFFGNPTEVAAVPHMLLGNKNPMGFLDRLQNTMIYGVDAAIGQYLRYKTKPYYDYNFPEERGFLPYDEAKRHVSLVIFNSYFTQAVPRPYLPNVIEVGGLQIKPKPDPLPADIQAWLDGAEHGAIFLSFGSNLKSSNLRQDKFDAILAALSKLKQRIIWKWDTDVMPGKPANVMIGQWLPQDDILAHKNLVLFVTHCGLGSVTESMYHGVPIVGIPMFGDQEHNAAQVLKEGWGEVVTFEDLTEETLSSAIRGVLGNEQYRQTVQKMADLYRDRPQTGLDLATFWLEYVVRHKGAPHLHYQGADLNFLQRNLVDVFAAIGAVLSFKR

SEQ ID NO: 5970 - protein, 472 aa, Setaria italica
MAGDDGVQGVRDGGGDPRPRRVLVFPLPFQGHIDPMMHLAGALHARAGLAVTVLHTRFNALDPARHPEFRFVEVPDGVPAGVAATGRIIDVILAMNAAMEASPEAVRGALASAMIAEDEDEEAPHAACLVIDSNLLAVQRAAEKLGLPTMVLRTGSAACLRCFLAYPMLHDKGYLPFQESQLYMPVPELPPLRVRDLFQTKISSHEMVREVIARITETVRNCSGLIINTFEALEPDELQKLRGELDLPLLLAAGPLHKLSSKTTGSSLLDQDYSCIEWLDTQPPGSVLYVSFGSLAAMDSGEFVEVAWGLANSGHPFLWVVRPNLVQDTDIAQLPDGFEDAVKGRGMVIQWAPQQEVLAHRAVGGFWTHCGWNSTLESVGEGVPMICRPNAVDQMMNARYVEEVWGVGFELEGELERGEVEGAVRKLMGGGREGAEMTERAEVLRRKVAECLDGSGSSRTAIDMLVDYMLSL

SEQ ID NO: 5971 - protein, 614 aa, Spatholobus suberectus
MAEAAGAHVLIFPCPLQGHVGSMLKLAELLALEDLHVTFLNTECIHNRLTRFGDIQALSACYPTLHFETISDCYNEGHHPGSGDSTMGDIMISTSLHAKPFFREILVSQHPGIPKVSCIIQDGIFGSLSNDLAAELRIPLIHFRTSSACCFWPYFWIPKLFECKELPIRGTKERGFIVGWAPQEEVLAHRAVGGFLTHSGWNSTLESLVAGVPMICWPYFADQQVNSRFVSEVWKLGLDMKDMCDRHVMENMVNDLMVHRREEFLRLSSNNGYVGPQELKMKAEETTDAHTHVAIFPCPVQGHVNSMLKLAQLLALRRFHVTFLNTDHIHHQLHRFGDIEALLQTYPTLQFKTIPDGLPHHHPRSGDTVLDLFQSINLHAKPHMRDILLSQSLGKPRVTCFIGDGVFGGLITDVANEVGIPIIHFRTISASCFWTYFCAPNLFESNQLPIRGFKLKLYHKNSEIAMENDDRAPAELEEGTKERGFIVGWAPQEEVLAHRAVGGFLTHSGWNSTLESLAAGVPMICWPSFGDQYVNSRIVSEVWKVGLDMKDLACDRNLVEKTVNDLMGHRREEFLNSAQAVAVLADHSVSPAGSSYSNLEGLIQYIKSVSEEVI

SEQ ID NO: 5972 - protein, 484 aa, Cephalotus follicularis
MGSTILSKRPHAVCIPFPAQGHINPMLKLAKLLHHKGFHITFVNSEFNHRRLLKSRGANSLNGLSSFRFETIPDGLPPTDVDATQDIPSLCESTRKTCLAPFRKLLSRLNDTSSSNVPPVTCIISDGIMTFTLDAAEELGIPEVLFWTTSACGFLAYVHVRQLIEKGYVPLKDASYLTNGYLDSVIDFLPGMKGIRLKDMPPFIRTTDKDDLMIDFILDVTERAKRASAIILNTFNSMEYQFLSALSSMLLPIYSIGPLQLLLNQVPNTDLKQFGSNLWKEEPECLEWLGSMKPNSVVYVNFGSITVMTPYQLVEFAWGLANSKQTFLWIIRPDLVSGDSAILPPEFLTDTKDRALLASWCPQEQVLNHPAIGGFLTHSGWNSTIESICGGVPMICWPFFAEQQTNCRYCCTEWGIGMEINNDVKRDEVESLVRELMEGDKGEEMKQKAMEWKKMAEESTASPNGSSYKNLETMINQVLLSIRN

SEQ ID NO: 5973 - protein, 451 aa, Pueraria montana
MKGTIVLYPAMGRGHIVPMVELGKFLSTHHHATLSVKILLPSPPNSTTLRYITAVSAATPSITFLHLSPSQHLLRVLQTLISQSSKPKAFILDFFNHSAADVTQTLNIPTYYYFPNAASCVALMLYTPTIHHNTKNGNSSYNDTLRRIPGLPPLSPEDMPAPLLDRRSFESFANMSIQMRKSDGIIVNTFEKLENKAFLALKNGTCVSETSRSHSSTPETRKPRIFCVGPLVSNGGGEHDNDDSGCMSWLDLQPSRTVVFLSFGSYGRFSKSQIREIALGLERSGQRFLWVVRDPYERSELSLEELLPKGFLERTKERGMVVKNWAPQVKVLSHDSVGGFVTHCGWNSVLEAVSWGVPMVAWPLYAEQRLNRVVMVEEMKVALPLKEVDEDGFVRASELEERVRELMDSERGRGKEVRKRVLGATNDAVAALSDGGSSRIELNDLVGLWMQ

SEQ ID NO: 5974 - protein, 452 aa, Arabidopsis thaliana
MKKIELVFIPSPGIGHLRPTVKLAKQLIGSEEHFFNHQSQDRLRYEPISVEKQPPTANLEPSQVYIEKQKPQVRDTVSRIINPTRKLAGFVVDMFCSSMIDIANEFGVPCYMIYTSNATFLGITLHVQEMYDDKKYDVSDLDESVNELEFPCLTRPYPVKCLPHILSSKDWLPFFAAQGRSFRKMKGILVNTVAELEPHALKMFNNVDLPQAYPVGPVLHLDNGDDDDEKRLEVLRWLDDQPPKSVLFLCFGSMGGFTEEQTREVAVALNRSGHRFLWSLRRASPNIMMERPGDYKNLEEVLPDGFLERTLDRGKVIGWAPQVAVLEKPAIGGFVTHCGWNSMLESLWFGVPMVTWPLYAEQKVNAFEMVEELGLAVEIRKCISGDLLLIGEMEIVTAEDIERAIRCVMEQDSDVRSRVKEMAEKCHVALMDGGSSKTALQKFIQDVIENVA

SEQ ID NO: 5975 - protein, 480 aa, Citrus unshiu
MSSCSNSRATHVLVFPYPAQGHMLPLLDLTHHLSLKNLDITILITPKNLPIVSSLLDARPAIQTLVLPFPSHPSVPAGVENVKELGNRGNLPIMSALGKLYDPIIQWFHSHTNPPVAILSDFFLGWTLNLARQLNIVRITFFSSGSFLASVSDYCWNHTGVVKPLDVVEFRDLPRSPVFKEEHLPTVFRIYMVSDSDPEFEFVKDGMVANTLSWGWGCVFNSFDDLESEYLDYLKRKMGHDRVFGVGPLSLLGPESTRGGDSGLDPNDNVSKWLDGCPDGSVVYACFGSQKVLSKEQMEALALGLEKSGIRFLWVVKTSVIHAEGNGYGLIPYGFEERVAGRGLVLKGWVPQVSILSHKAVGGFVSHCGWNSMLEGIVSGVTILAWPMEADQFVNARLLVDDLRVAVLVCEGGDSVPDSDELGKVIGESLSQCGETKIKARELRDKALAAVKSGGSSTRDLETLVQELRKLRFHTSCIKS

SEQ ID NO: 5976 - protein, 266 aa, Triticum aestivum
MSIGQFDGLEEADDVLVNSFSDIEPTEAEYMELTWGAKTVGPTLPSFYLEDDRLPSNKSYGFNLFGDDAPCLDWLQEQSISSVVLVSYGTFSNYDATQLEELGNGVCSSGKPFLWVVRSNEAHKLSEEVKAKCEKNGLIVSWCPQLEVLAHKAIGCFVTHCGWNSTLEAVVCGVPLVGIPHWADQHTIAKYVESAWDIGVRARKSENGLLRSGEVGRCIREVMDGERKDEYKRNATKLMQKAKEAMRDGGSSDKHIAEFAAKYSSI

SEQ ID NO: 5977 - protein, 456 aa, Cephalotus follicularis
MGHLTPFLRLAASLVHQKCRVTVLTIHPSVSHAESQLISRFFSAFPQVTQKHFPLLPVDPSTAKSDDPFWLQREAIRRSAYLLSPLLSSFSPPLSALIYDKFLVSPLIPISTSLSLPGYIFFTSSARMCSLFASLSTTVADKISSGSYHLSDHLEIPVIPPIPVSSIPPLFLNPNSIFATIFKEDSREVLKSNGILINTFEMLEQDSLDALNDGRVRKGLPPVYAIGPLEPCEFENGERGSPLKWLNDQPAGSVVYVSFGSRTARSMEQIREIGHGLVRSGCRFLWVVKTKEVDRDEEEDLHEVLGHELMQKIQGKGLVVKHWVDQSEILGHKAVGGFLSHSGWNSSMEAAYHGVRMLAWPQHGDQKINAEVVEMSGLGLWVRSWGWGQEVVVKGEEIGEKIKEMMESESSSLLRVQAARVGEEARKAVGVCGNSETTLKELIQEWNDIDRAKDFQ

SEQ ID NO: 5978 - protein, 479 aa, Genlisea aurea
AVAGGERKPHALCIPFPAQGHITPMLNLSKLLHEKGFHVTFVNTHYNHRRLIKSLGADAVSGLPGFLFASIPDGLPPSDADVTQDVPSLLRSTHATCLEPLCELIRDLNKESPPVSCIVSDGILSFTLAAAERFRLPEVLFWTASACGLLGYMQYPRLVEQGIVPFNNKKQVTDGAHLEKVIDWVPGVNGGLRLRDFPSFVRTTDPRDVFLNFAIQEATALGESRAVGGLILNTFDALEEGVLTAMAEILPPPIYTVGPLNLLLDRLPESPLAANLWKEETDCIEWLDGRKPRSVLYVNFGAVAAVTPSQLTEFAWGLANSGHPFLWTIRPDILSGENPSAVLPPEFLTETGDRSKLSSWVPQEKVLSHAAIGGFLTHCGWNSMVESISHGVPMICWPYFAEQPTNCRFGCVEWGIGMEIGKNANREEVENVIREIMEGEKGKKMKENAAEWQKKAAAATSPGGSSEVNLNRFIEEVLM

SEQ ID NO: 5979 - protein, 469 aa, Vitis vinifera
MGSPHFLLVTFPAQGHINPALQFAKRMIRTGAEVSFATSVSAHRRMAKRPNLEGLQFVPFSDGYDDGFKSSDDIQQYMSEIKRRGSETLREIVVRNSDEGRPFTCIVHTLLVPWAAEVARGLVVPYALLWNEPATVLDIYYYYFNGYGDAFRNISNEPTCSIELPALPLLSSRDLPSFLVNSNAYTFFLPMLQEQLEALNQETNPKVLVNSFDALETEALKAVDKLHLIGIGPLVPSAYLNSKDPSDTSFGGDLFQGSDDYMEWLNSKPKSTVVNVSFGSISVLSKTQKEEIARGLLDCGQPFLWVIRAPENGEEVKEEDKLSCREELEKKGMIVPWCSQIEVLTHPSLGCFVSHCGWNSTLESLVSGVPVVAFPQWADQGTNAKLIEDIWKIGIRVIVNEEGIVESDEIKRCLEIAMRGGVKGEEMKRNAEKWKNLAREAVKDGGSSDMNLKGFVDEVGQGCNESIGS

SEQ ID NO: 5980 - protein, 475 aa, Sinningia cardinalis
MEDTIVFYTSPGIGHLLSMVELGKLILHRYHFSTIHVLITTGFDDSPTTAAYIHQISETNPFITFHRFPSLHMETSPNASFGTRLFEFIRLNATNVHQTLQEIMKTSNVRALVIDFFCSSAFPVSESLGIPVFYFFTSGLAALAAYLYFPTLHNQVDQSFRDLVNTKFHIPGLPPLPAKHMPRPVWYRNEPSYHDILYFSQHLAKSSGILVNTFDGLEPNALKAITDGLCIPDVPTPPIYNIGPLIADAVRTAGDQNLMHHSLTWLDAQPNQSVVFLCFGSRGSFSADQLREIATGLERSAQKFLWVVKKPPVDETNKEVKELGELNTTGIMPEGFLDRTKDRGTLVDSWVPQVKVLEHPAVGGFVTHCGWNSTLEAVMAGVPMVAWPLCAEQHLNKAALVEDMKMAIPMELREVDEFVLAEEVEKRIREVMEVDKSKELREQCHKMKSMSFDARGKLGSSTAALDKVVQVWYGN

SEQ ID NO: 5981 - protein, 508 aa, Cephalotus follicularis
MKRAELIFIPSPGVGHLVSTLEFSKRLIERDDRISITVLVMKFPIATFVDEYTKSLTASQSRIQLIGLPPVDPPPPTLMKESGERYLCSFIESYIPHVKNVVKDIVTSSDSSSGSVQVAGLVLDFFCVSMIDVANEFGLPSYMFLTTNAGFLDFMLHLPTRHKQISFEFEKTDPEILLPGFLDLMLYLPTRHIQIGFEFEKTDPEILLPGFANPVPPCVLLDGLFNKQGGYSSCIKLAQRFKDVKGIIVNTFVELETYTVNSFSNAQIPPVYPVGPVLEDKRQPHPDLNQAEYDKIMKWLDDQPQSSVVFLCFGSRGSFEVPQVREIALGLEQSGCRFLWSIRVPPTKAEASVTSPYTNYKDMLPEGFLERIKGRGKTCGWAPQVEVLAHKSIGGFISHCGWNSILESLWHGVPIVTWPMYAEQQLNAFEMVKELGLALELRLDYRSTDSQLVTGDEIERAIRCLMNGDEELRKKVKGMSEMARKALMDGGSSFNSIGQLIEDMIGRS

SEQ ID NO: 5982 - protein, 483 aa, Cinchona calisaya
MGSSQDSNLPPHVLIFPLPIQGHVNSMLRLAELLCLSDLDITFIVSEFSHNRLLKHTSVALRFARYPGFRFQTISDGLPDDHPRAGEQVMDIMPAIKNVTGPLFKRMMIEKNCFASANRRPITCIIADGVLSFAGDFAEQKRIPLVYFRTVSACSFWACFCMPQLIEAGDIPVKGEGMDLPVKSVPGMEGFLRRRDLPGFCRVNDINEPKLQIIKNETRQTPRAQAAILNTFEDLEGPILAEIRKYMPRLYTIGPSHSQLTARLEAQNTKTSISSGSFWEEDRSCIEWLNSQPPKSVIYVSFGSITVVTREQLLEFWCGLVNSGQRFLWVMRPDSLMGKDGESQIPAELEKGTKERGYMVGWAPQEEVLNHSAIGGFFTHSGWNSTLESIVTGVPMICWPYFADQMINSRFVSEVWKIGLDMKDTCDRIIIEKMVRDLMDVRKDEFSQRADDMAKLARKAVNEGGSSYQNLDALVEYIKSMVV

SEQ ID NO: 5983 - protein, 486 aa, Vigna angularis
MDSEGGSKKPHALLIPFPSQGHINPFLKLAKLLHSRGFYITFVNSEFNHRRLLKSRGPDALNGLSDFHFEAIPDGLPPTDMDATQSIPALCDSTRKNSLLPLCNLISKLNHSHHTPPVTFILSDGIMSFTLKASQQFGLPNIFFWTHSASGVMSYKQCKNLMERGLTPLKDASYLTNGHLDTVIDWIPGMKDITLRYLPDIYRTTDPNDILLDFVVEQTEATSRASAVILPTFDALEHDVLEALSTMFPKLYTIGPLDLLLDQTSESKFDSIKCNLWKEDSECLKWLDSQQPNSVLYVNFGSVTVMTHQQLVELAWGLSNSKKKFLWVIRSDLVKGEAPILPPEIVQETKDRGLLVGWCPQEQVLKHPAVAGFLTHCGWSSTLESLTSGVPLICCPFFNDQILICRYICREWAFGMEIDSDNVNRDEVEKAVNELLEGEKGKEFKKNAIEWKKKAQEATSTGGSSFLNLEKLVDELLLFKSLAARN

SEQ ID NO: 5984 - protein, 389 aa, Oryza sativa
SFLIDRSHEDKDVCVVPVSWRRPPQPHGGDGQAPAPPRPRRRRRGDRPARQRRHLGRRDGAPRRGQPVHHVPPPAGAAQPGRRRAPGQARPRRAPPGQPRAPGVPPLAARRRRRPPARRVLRRRARRRGRARHPGLLLLPDKPTPRVYCIGPLVDAAAGKNGERHPCLAWLDAQPRQSVVFLCFGSKGAFPAAQLKDIARGLESSGHRFLWAVRSPPEEQSTSPEPDLERLLPAGFLERTKHRGMVVKNWAPQAEVVRHEAAGAFVTHCGWNSTLEAIMSALPMICWPLYAEQAMNRVLMVEEMKVAVALDGGEVGGALVAVAAEEVEAKVRLVMETEEGRKLRERVVETRDMALDAINRGGSSEIAFDEFMRDLEKMNSLENGGGRSC

SEQ ID NO: 5985 - protein, 477 aa, Vigna angularis
MESEAPIHVLMVSYPGQGHVNPLLRLAKFLAAKGFFVTFSTADTVGKLMRTANDISHKQVTPVGDGFLKFEFFDDGGVTNSDGSKRSLTDFNAQVEHFGRQYVSQVIKDHADTHRPISCIINNPFVPWVSDVAADHGIPSAVLWVQSAAVLTAYYSYFHKLLPFPSHADPYLDVQLPSVVLKYNEVPDFLHPFSPYQALGTVILEQFKNLSKPFCVLVDSFEELESDYIKYLSEFVNIRPIGPLFKIPTATDTSDIRGDFWKSDDCMEWLNSRAEASVVYISFGSIVCLPQEQVTEIAHGLLDSQVSFLWVLKPPGMAFGLPPYVLPDGFLEETKEKGKVVQWSPQEEVLGHGSVACFVTHCGWNSSMEGVTLGVPMLTFSAWGDQVTNAKFLVDVYGVAIKLGYGQAEKKLVSRDEVKKRLLEATVGPKAEELKQNAFKWKMAAEAAVAPNGSSARNLDAFLKDIKEGGAVRVNEI

SEQ ID NO: 5986 - protein, 479 aa, Vigna angularis
METPRPLEICFLPFFAQGHQIPMVQLARLIASRGQHVTIVATSANAHLFQKTIDDDIASGHHIRVHLIKFPNTQVGLPEGIENLVSATDNITAGKIHMAAHFIQPQVEAVLKESPPDVFIPDILFTWSKDLSKRLQIPRLVFNPISIFDVCLIQAIKAHPEAFLSDSGPYQIPGLPHPLTLPVKPSPGFAVLTESLLEGEEDSHGVIVNSFAELDAEYTQNYENLTGRKVWHVGPSSLMVEQIVKKPAVVSEIRQECLTWLDSKEKDSVLYICFGSLVLLSDKQLYELANGLDASGHSFIWVVHRKKKEGQEEEEEEKWLPEGFEEKMEKEKRGMLIKGWAPQPLILNHPAVGGFLTHCGWNAVVEAISAGVPMVTMPGFSDQYYNEKLITEVHGFGVEVGAAEWSMSPYEGKKTVLSGERIEKAVKRLMDKGNEGEKIRMKAKEMQDKAWRAVQEGGSSHNNLTALIDHLKSLFPVST

SEQ ID NO: 5987 - protein, 526 aa, Unknown
  Description of Unknown: Oryza sativa Japonica Group sequence
MQSPENAAPRVYFIPFPTPGHALPMCDLARLFASRGADATLVLTRANAARLGGAVARAAAAGSRIRVHALALPAEAAGLTGGHESADDLPSRELAGPFAVAVDLLAPLFADLLRRRPADAVVFDGVLPWAATAAAELRVPRYAFTGTGCFALSVQRALLLHAPQDGVASDDEPFLVPGLPDAVRLTKSRLAEATLPGAHSREFLNRMFDGERATTGWVVNSFADLEQRYIEHYEKETGKPVFAVGPVCLVNGDGDDVMERGRGGEPCAATDAARALAWLDAKPARSVVYVCFGSLTRFPDEQVAELGAGLAGSGVNFVWVVGGKNASAAPLLPDVVHAAVSSGRGHVIAGWAPQVAVLRHAAVGAFVTHCGWGAVTEAAAAGVPVLAWPVFAEQFYNEALVVGLAGTGAGVGAERGYVWGGEESGGVVVCREKVAERVRAAMADEAMRRRAEEVGERARRAVEVGGSSYDAVGALLEDVRRREMAADPRNVKELEQCPPTPFGGRKPQRGRGTEGCGLEPPTWSRL

SEQ ID NO: 5988 - protein, 481 aa, Crocus sativus
MEPENPDAPHILLVSFPARGHLNPLLHLAKRLASCQGNHVTVCTCESHGKKMRTNASTNSGLADPVGEGFLRDYFNDGFDEGDECPRKDINTYMGQLRVIGRQNLTRLIKKTREDSRHPVCCVINAPFLGWVNDVADVKIPNALNWLQNCASLAAYYHYFRAIGEFPILCDNEPEIDVRLTGMPLLRHDEIPSFVHPSEGPYGFIRDALIEQVRALCRGEKFCILIDTFANLEKDLIAHLKRVSLEVDIKPVGPNNRANKSAALTLTTSEDAAKNNTDSFLEWLDNQPPASVVYISFGTISYLRQEQLNELNFGIVNSGLPFLWVLHGPEFGVREARATAPDRNLGRGRLIDWCSQDRVLAHPALNCFVTHCGWNSTMEAISSGVPNLTFPQWNDQVTAAMYIGDLYRTGIRASKGEADQKLDSRDEVLRCAAVTGDKAEALKANVGVWKEKAAAAIGVGGSSDKNLRAFIDQIRSDRIND

SEQ ID NO: 5989 - protein, 469 aa, Helianthus annuus
MEKPAHIAIVPSPGMGHLIPLVEFAKKLTSQHNLSATFIIPNEGPLSKSQSEFLDSLPNAINYTLLPPVNFDDLPQDAKIETRISLMVTRSVTALHATISSMMADKNIVALFVDLFGTDAFDVAIEFGVPRYLFFPASAMILSLCLHLPKLDQMVSCEYRDVPDPIQIPGCIPIHGKDLLDPLQDRSNDAYKRVLHNAKRYLMADGIVVNSFKGLESGAIEALQLEEPGKPPIYPVGPLIQSGSVESNKGVNESSCLKWLDGQPCGSVLYICFGSGGTLSSEQVTELAMGLELSEQRFIWVVRTPNDIADATFFNSHGHEGSFDFLPKTFLEKTKNHGLVVPNWAPQAQILSHRSTGGFVTHCGWNSVLETIVQGVPMIVWPLYAEQKMNALMLAEGLKVAMRAKLNENGIVDRLEIVRVFKGLLEGDEGEAIRIRTQELKEAALSALSNDGYSTKTLDQLAFKLKNKI

SEQ ID NO: 5990 - protein, 498 aa, Citrus unshiu
MTMRKLNLVFTSTPGIGNLVPVVEFARLLTNRDRRFSATVLIITIPERPIVNSYILTRGTALSVHDNDDVNFLHLPTVDPLSPDEYQSSLGYLCTLIEKHKPHVKHAIANLMATESGSDNAVSVRVAGLFVDMFCTSMIDVANELGIPSYLYFASPASFLGFLLYFPTLDTQLATEFVDSDTEFIVPKDSSITELKIPSFANPLPPLVLPTTALKRKQDGYMWYLYHGRRYLETKGMIVNTFQELEPYAIDSLRVTEMPPVYPIGPVLDLHGLAQWHPDRASQEKIMRWLDDQPPSSVVFLCFGSMGSLSEAQLREIAVGLERTGFRFLWSIREPSKGTIYLPGEYTNLEEILPEGFFHRTAKIGLVCGWVPQVAILAHQAVGGFVSHCGWNSVLESLWFSVPMATWPVYAEQQMNAFQLVKEFGLAVEIRLDFREGSDVVLAEELEKGLQQLMDGDDEVRRKVKQMKEKSRTAMMEDGSSYNSLGSLIEDLMANIGC

SEQ ID NO: 5991 - protein, 489 aa, Helianthus annuus
MAKTVTELVFIPAPGVGHIMSTMEMAKVLVNRDQRLSITVLLINPPYSILALNTYIESLAKNTIERIRFIELPQDQTPPKLDSKAPFMSFYEFIKSHCKYVRNILEDMIDQSGSCRVVGLVVDILCTSMIDVANEFNVPSYVYFTSNAAFLGFKVHFETLYVDQKQDLMELANSEGEIVIPSFVNPVPMRVFPELYQKQDGLDFLICAIGRMRKAKGIMVNTFLENKTELETHAINWFSGTNFPPLYPVGPLLNLDGVAGKADDTDVFRWLDNQPRASVVLLCFGSMGCFDEAQLKEIARGLERSGHRFVWSVRRPPPLEQSFEVLPDDYDDPRVVLPDGFLERTSRVGKVIGWAPQVSLLAHEAVGGFVSHCGWNSMLESLWFGVPTATLPIYCEQQMNAFEMVVDLGLAVDLKLDYKINVINPEGDMVIVMADEIERGIRSVMEDNEVRAKVKEMSKMSRASVVEGSSSYTSVGYLIKDMMRNIIYV

SEQ ID NO: 5992 - protein, 489 aa, Helianthus annuus
MDQSNQQNKTLEPHVLVFPIPFQGPVNCALKLAELLCLSGICVTFLNTEHIHRPLLRHTQVLSRFSRYPNFKFETVPDGLEHEKPVSGDGFMEVMAAVDAVSKPLFREMMVSGSLSRKSDRPVTVMIPDACFSFAVDIAIEASVPVICFETVSPCCLWTSYLNLPTLIEAGDVPFKGNDLDQFIKSVPGTEHIIRRRDLASFCRTNDLSDPVIKLIVKEAHSVPRTQGLILNTFEELDSLILKHMRKLCPNIYTIGPLHTLHKTQVTANTTKQSEETTFSNSVWKEDRTCLNWLDKHDPKTVIYVSIGSLATMTVEQLLEIWYGVVNSVKPFLWVRRPGSITGGYDESKVPPELLERTKEIGCIVEWAPQEDVLAHPAIGGFLTHSGWNSTIESIAEGVPMVCWPYFVDQQVNSRFVEEVWKMGVDMKDTCDRLRVEKAVRDIMDSKHNVFTQHARTWESLAKESISKTGSSSNHVGRLIDDILAMSST

SEQ ID NO: 5993 - protein, 470 aa, Setaria italica
MAAASASAASSGGGRPRRVLMFPLPFQGHLNPMLQLAGALHARGGGLVGITVFHAAFNAPNPARHPPGYRFVPVGEGVPSADLIPSGSDADFAGALGRINDRLREPFRDLLRQALADAEDDEAAACLVVDSNLRGIQLVAEELGVPTLVLRTGGAACLVAYMAFPALCDKGLLPPASQDKVQLDMPLDELTPLRLRDMVFSRTTTHANMRRCLQDLLDAGSSSSGIILNTFQDLENSDVQKISNGLGVPLYTIGPLHKISSGTEGSLLAQDQTCLKWLDKQEADSVLYVSFGSLASMDEKEMLETAWGLANSQMPFLWVIRHNMVKSSHQMSIPEGFEEATRGRGMVVTWAPQQEVLGHHAIGGFWTHNGWNSTLESICEGVPMICRPQFADQMINMRYVQEVWKIGFEIEGELERGEIEMAIKKLLCTEEGRQMRLRAKDLQDKAVKCIEEEGSSKSAMESLLKRIMSF

SEQ ID NO: 5994 - protein, 498 aa, Sorghum bicolor
MVSLTTAADHGQRPHAVCMPYPAQGHVTPMLKLAKLLHARGFEVTFVNTEFNHRRLHRSRGALDRVPGFRFDAIPDGLPPSDADATQDIPALSYSTMTTCLPHLLALLARVDADAASPRVTCLVTDAVMSFGFDAAREFGVPVAALWTASTCGFMGYRNYRSLVDSGLVPFKTAADLEDGVEGGHLATVVTGARGMCDGVQLRDFPSFIRTTDRADIMLNFLMREAERLSLPDGVIVNTFEDLEGASLDAMRAILPTVYPVGPLLLRERLEIPAGSPLAGLGSNLWKEQEGLPEWLAGRAPRSVVYVNYGSITVMTNSQLLEFAWGLANSGYPFVWNIRPDLVKGDSAVLPPEFTSAVEGRALLTTWCPQEAVLPHEAVGVFLTHSGWNSTLESLCAGVPMLSWPFFAEQQTNCRYKRTEWGVGMEIGGEVRRDEVSAILKEAMDGEKGREMRRRAEEWKEKAVKVTLPGGPAQTNLERVIDEVLLSKMKGQKQTANV

SEQ ID NO: 5995 - protein, 473 aa, Citrus unshiu
MLPAGSHILVYPFPTSGHIIPLLDLTNRLLTLGLNVTVLITQNNLPLLDSLNANHPSTSLQSLVLPQPKWPAGSPATRLLKFMRVLRELHYPALLDWFKSHPSPPVAILSDFFLGWTQGLAAELGLPRVVFSPSGAFALSVSFAMWTDLPTNDDPDNVDALVSFPRVPNCPVYPWYQISHLYRTLKEGDPDWDLHRSNMMANKTSWGIVFNSFAELERVYIDHMKKEMGHDRVWAVGPVLPPDDDLVESMCRGGSSSVPAHDVLTWLDSRRDESVVYVCFGSRYVLTAKQIHELAAALEKTDVNFVYCVREPDERHASQDCGVLPDGFEDRVAGRGYVIRGWSQQVAILRHKAVGAFLTHCGWNSVLEGVSAGVVMLTWPMDADQYTNAQLLVDQLGVGISVGEGTRNIPESGELARLLAQSVDGTRRERLKARELSGAALSAVVKGGSSDRDLNDFIRRINELKSGKNLTAV

SEQ ID NO: 5996 - protein, 1332 aa, Helianthus annuus
MTITVTKAKKSIDYLLDNRLHKDLTMSSSSSYPLSLNTISMNTSTHTNQPIHPSSLQLPPQSTTLPHTQLTKDHPHPLHKPRTIRYRLSQLCREGHPHLAHQLFDEIPKPTTVVWNSIIIGFICNNMAHEAILLYTQMKSRSFLPDSYTYSSVLKACAETRDIRVGKAAHCHVLRSGLYPSKIVCNSLLNMYASCLDYGVERVFGWMPKRNVVSWNIMISWFVKVGLFEEGVTHFVKMMKDGVKPTAVSFVNVFPAVVGLGDSRLADVVYGLLVKFGDEFSTDLFATSAAISMFSELGFVESARNVFDNCLDRNVEVWNTMIGGYVQNNMPVEAFDLFVQALRSSDDVVIDKVTLISVLTAASQLQQLDLAKQIHAYIIKSVAVLPVIVMNALIVMYSRCDSIQESSNIFNCMNEKDTVTWNTMISSFVQNGMNDEGVVLVRDMLKQGFTIDDVTITALLSAASNLRNREVGKQTHGYLLRRNIHFKGIESYLIDMYAKSGLIRVAQNLFERSCANDRDQATWNAMIAGNCHNGLIDQTFSVFRQMIDHGVSPNAVTIASILPACSIIGSSRLAKQIHAFTVRTFLDDNVFVHSALVDTYSKLGILTLAENVFEFSHPKNAVTYTNMILAYGQHGMGEKALDLFNSMRENGTRPDSVTLVAILCACSYSGLVDDGLKLFESIEAEYKIVPSLEHYCCVVDMLGRVGRVSEAYDFVEKLGENGNYLKVWGSLLGSCRTHGEFRLAKVVASKLVEMGLGNKNAGYHALLSNIYADEGNWEFVDRLRKEMYEKGLVKETGCSWIDNDGRSDYFTSRDKNYAHDDDMKKQWNWLIGIIYTERWINIRNMANEVAEVIFIPSPGVGHIKSTIELAKLLVNRDQRLGITVLVIKPPGATSGSAITTYIESLAENTIDRISFIQLPQDETPPIVDPKDQRNFKIEFINSHCKYVRDAVADLKSQPGSGRVVGFVVDMFCASMIDVANEFNVPTFVFFTSNAAFLGFTLYIKSLCDDLSKDVDVVELSNSDTEILVPSFVKPMPTKVFWSRVKTRAGLDFDRWFAQKLGEAKAIMVNTFLELETHAIESLSADSSIPPVYPVGPIVNLEGGSGGGKAFDNDVIRWLDSQPPSSVVFLCFGSMGSFDEVQVKEIARGLELSGYRFVWSLRRPPSDQTSRSPSDYEDPSVVLPEGFLERTHGIGKVIGWAPQAEVLRHDAVGGFVSHCGWNSLLESLWFGVPTAAWPMYAEQQMNAFEMVVELGLAVEMKLDYMKDLFNPKANAIIVTAVEIESGIRRLMEDDEIRRKVKEMSAKSRSAVVEDGSSYASLGCLIQDLTRDIS

SEQ ID NO: 5997 - protein, 484 aa, Unknown
  Description of Unknown: Oryza sativa Japonica Group sequence
MAEAATGATDTSLPPPPPHVVLMASPGAGHLIPLAELARRLVSDHGFAVTVVTIASLSDPATDAAVLSSLPASVATAVLPPVALDDLPADIGFGSVMFELVRRSVPHLRPLVVGSPAAAIVCDFFGTPALALAAELGVPGYVFFPTSISFISVVRSVVELHDGAAAGEYRDLPDPLVLPGCAPLRHGDIPDGFRDSADPVYAYVLEEGRRYGGADGFLVNSFPEMEPGAAEAFRRDGENGAFPPVYLVGPFVRPRSDEDADESACLEWLDRQPAGSVVYVSFGSGGALSVEQTRELAAGLEMSGHRFLWVVRMPRKGGLLSSMGASYGNPMDFLPEGFVERTNGRGLAVASWAPQVRVLAHPATAAFVSHCGWNSALESVSSGVPMIAWPLHAEQKMNAAILTEVAGVALPLSPVAPGGVVSREEVAAAVKELMDPGEKGSAARRRARELQAAAAARAWSPDGASRRALEEVAGKWKNAVHEDR

SEQ ID NO: 5998 - protein, 463 aa, Cephalotus follicularis
IVLYPSPSIGHLISLVELGKLILKHQPSFSITILTFIAPYNTGSTASYIAAVSATVPSITFHHLPAVALPLTSNSFEDLAFQLPHLLNPSVHQALNTISQSCKLKAFIIDFFNDAAHDVATSLNIPTYYFFTSSGSSLAAFLYLPIIHQITSKNIKDEDVLLHVPGLPPFLASLLPTPFHHRNSMAYNSFINSSLHMSKSCGLIVNTFESLEARPIKAARVGLCVPNGRTPPIFCIGPLIATIDDNPGGEHECISWLNSQPRKSVLFLCFGSMGLFSANQLMEIAIGLERSAHRFLWVVRSPPMDDINKGQSILAQPEPNLHQLLPKGFLERTKDRGLVVKYWAPQVAVLSHDSIGGFVTHCGWNSVLESVCAGVPMIAWPLYAEQNLNQVFVVEEMKIALAIKKSEVGLVSAAELEERVSEMMDSERGKDMRERILGMRDGALLAAKQDGGSSYVDLCKLAD

SEQ ID NO: 5999 - protein, 476 aa, Citrus unshiu
MMETAAKSSRPHVAVLASSGLGHVIPPLEFAKRLVINHGVHVSFLVITTNEASAAQEKHLRSLPDGLDVVDLPPVDVSAVTRDDMPVITRLHAIVDESLKSSLKSVLIELCNPRALVIDLFCTQAFEICSQLSIPTYSFVTTSIHFFAFALYLPTLDREVQGEFVDLPEPIEIPGCPPVRPEDLLDQVRNRKIDEYNLFLLHISRLPLAAGIFLNSWENLELVPLRAIREHSFYLQIPTPPIYPIGPLIKQDETLSASDEECLAWLGKKPSDSVIFVAPGSGGTLTAEQVTEMAWGLEQSKQRFIWVVRMPSDASASATFFNVGSDVNDPQAYLPEGFLQRTQGVGMVVPSWAPQVEILRHSSTGGFLSHCGWNSSLESICHGVPMIAWPLYAEQKMNAAMLTEEIGVAVKPVIESGKKVIGREEIERVVRLVMESEQGQVMRRRVKELKESASRALEDGVSSSDSLARFVKKWKD

SEQ ID NO: 6000 - protein, 492 aa, Ricinus communis
MACQPHFVLVPLMAQGHMIPVIDMARLIAEKGVIVSLITTPYNASRFDRIIYRAEESGLPIRLVQIPFPCQEVGLPIGYENLDTLPSRDLLKKFFTALAKLQQPLESILEHATPPPSCIISDKCLSWTSRTAQRFNIPRIVFHGMSCFSLLSSHNVRFSNAHLSVSSDSEPFLVPNMPQSFQVTRCQLPGSFVSLPDIDDVRNKMQEAESTAFGVVVNSFNELENGCAEAYEKAIKKKVWCIGPVSLCNRRNLDKFERGNKASIDEKQCLEWLDSKKPRSVIYACLGSLCRLEPSQLIELGLGLEASKKPFIWVAKTGEKTSELEEWFLKEKFEERIKGRGLLIKGWAPQVLILSHPAIGGFLTHCGWNSTIEGVCSGIPMITWPLFAEQFFNEKLVVEILKIGVRVGVEVPVRWGEEEKVGVLVKKDEVEKAVNTLMNGGEEGEKRRNKASELGDKARKAMELGGLSHFNLSLLIQEVLHEATQLKKRERR

SEQ ID NO: 6001 - protein, 472 aa, Eucalyptus grandis
MSKEFVQASSMAPPHFLLVTFPSQGHINPSLQFAKRLVRVGAHVTFATAIHAHHRMAESKSPPVGLSFASFSDGYDDGIDKDDLDGYMDELKRQGSETLSNLIASNLENGRRFLGVFYTTLLPWVADVARSHGIPSTLVWIQPATVLDFYYYYFHGYGDLIQSTSDNPSVPIQLPGLPPLMACDIPSFCNSKNVYNFSLPFLQRHFEILLEEAKPRILTNTFDALEPDAIRAIDKFEVIGIGPLIPSAFLDGQDPSDTSFGGDLFKSSSGYMEWLDTKPKASVIYLSFGSISVLSKPQKEEMARALVEVGRPFLWVIRESGKEERDEDRLSFQEELDKLGMIVLWCSQVEVLSHPSVGCFVTHCGWNSTSESLVCGVPMVAFPQWSDQLTNAKLVADVWRTGVKMTPNELGLVESGEMKRCLELVVGDGEEGEEMRRNARKFRDLAREAVKEGGSSDKNLRAFVDEAREAAE

SEQ ID NO: 6002 - protein, 461 aa, Vigna angularis
MSKPHILVFPYPAQGHILALLDLTHHLALAGITITIVITPKNLPILNPLLSSHPNNIQTLVLPFPPHPEIPAGAEHIREVGNTGNYPFINALSKLQPQIIHWFTTHPKPPAALIHDFFLGWTHQLAAQLNIPRIAFYGVAAFFTTVFRRCWHNPNILTNNSDILFHGIPGQPSFKRGHLPSVFLRYRESEPDSEFVKESFLSNDGAWACVFNTFRRLESPYLDHIRAELGHSRVYAVGPLGSNRSENSSTGSEVLNWLDAFEEEGSVLYVCFGSQKLLKKKQMEALAMGLERSQTRFVWVAPTPNKEQLEQGYGLVPDGFVDRVSGRGMVVTGWAPQVAILRHRVVGGFVSHCGWNSVMEAIVSGVVIMGWPMEADQFLNARLLVEEIGVAVRVCEGADSVPDPNELSRVVKRVMSGESPEKRRAKLMREESVRAVSEGGDSSMEVDQLVQALLQLGENKL

SEQ ID NO: 6003 - protein, 476 aa, Trifolium pratense
MKKAEVVFIPFPAPSHLVSTLEFAKLLINHDNRLRITILIMKFPHFTETDVYIKSLPISDSLNFINLPECSLPPNTNPRSAFGALFEAQKPHVRQAVSDLTTGEQHGPIAALVVDMFCTSMIDIAKEFSLPTLVFFTSGVASLGLNLYFHTLRERDNVGPTQLQQQAELAIPTFANLVPSTSLPGSVLSKESESFFMNNVGGLKNADGIIVNSFEELESHAVHSFSSHPELSSLPIIYPIGPILAPEPKTKSIVEPDDIIKWLDDQPPSSVVFFCFGTRGSFDEDQVKEIAHAIENSGARFVWSLRKPQPKGAMAPPTDYSLSDLSLVLPEGFLDRTRGVGRVIGWAPQTQILAHPATGGFVSHCGWNSTLESIYFGVPIATWPLFAEQQTNAFQLVVELKAAVEIALDYRVEFNEGPNYLLTADKIESGIRSVLDNDEVRKNVKEISEKSKTTLLEGGSSYTYLGRLIDYIMNQV

SEQ ID NO: 6004 - protein, 462 aa, Rosa chinensis
MSDSGDQSFVHVALLPSAGMGHLTPFLRLAALLTAHNVRVTFITPIPTVSLAESQSLSQLSTTFPQITQKHLHLLPLDELSANSEDPFYYHFELIRRSSHLLPPLLSSLSPPLSAMITDMSFSSTVIPITDSLGLPNYIFFTSSAKMLTLYVSFHTMLGPHREIKDGLEVSGLEPIPKAWIPPPLLKDGNNLLKSFFTENGKKMTESTGILINTFESIEHETVAALNEGRVLKGLPSAIAFGPLPPCNSETDHQLAWLDDQPTGSVFYVSFGSRTAMSREQVRELGEGLVRSGCRFLWVVKDKKVDMEDDEKLTEVLGQGLLERVKEKGLAVKKWLNQEQVLRHPAIAGFLSHCGWNSLSEALWNGVPVLAWPQHGDQKINADLVERIGLGVWVKSWGWSEEEMVVKAEDIAARVKEIMGNDSLRLQALHIKEEARLAVGDTGSSTKRLTALIETWKEFRVS

SEQ ID NO: 6005 - protein, 478 aa, Trifolium pratense
MGNENHELHIIFFPFLANGHIIPCVDLARVFSSRGLKVTIVTTHLNVPLISRTIGKAKINIKTIKFPSPEETGLPEGCENSESALAPDKFIKFMKSTLLLREPLEHVLEQEQPDCLVADMFFPWATDSAAKFNIPRIVFHGLGFFPLCVSACTRQYKPQDKVSSYTEPFVVPNLPGEITLTKMQLPQVPQHDKVFTKLLEESNESELKSYGVIANSFYELEPVYADHYRNELGRKAWHLGPVSLCNRDKEEKACRGREASIDEHECLKWLQSKEPNSVIYVCFGSMTVFSDAQLKEIAMGLEASEIPFIWVVKKKAKSDDEKLEWLPEGFEERIEGSGKGLIIRGWAPQVMILDHESVGGFVTHCGWNSTLEGVSAGLPMVTWPMYGEQFYNAKFLSDIIKIGVGVGVQTWIGMGGGEPVKKDVIEKAVRRIMVGDEAEEMRNRAKEFGKMARRALEVGGSSYNDFNNLIEDLKSHKH

SEQ ID NO: 6006 - protein, 1050 aa, Caenorhabditis nigoni
MHCLLTFVFLLSGTTHAKNILIINPIFGYSHVKFISKIADVIADHGHNVTLFQPFHTNMKNLDGLVKNKNIEIINYYPDHYEDLLKSEDQTFTALWDSRLANNPVLFSFMVPKMITGEFEKTDTQLYLDTNLHAELKSRKFDVAIAEAFGASSFFFAHLLDLPCIPVFSAVRFEIVNELFGQPSALGYTTRDGSKGAPDAGFLDRLNDVYRKYFEDLGHSGIFQYQNELFQKTMARPVPSWKNLVTQSPIFITNSNPYLDFAVPTTATIVHAGGITMDLNKVKHVGPLTEEYENILQERESTVLISFGSVYRSFQMPDNFKAGLIKMFESLPDVTFIWKYEEDDAEFKKRLPKNVHLKKWVPQTDLLADKRVKVFMTHGGLGSTMEVAYSAKPALMVPISGDQPQNALMLARHGGAVPYDKFELQDGEKLTRVMKEMVTNPKYQKRAQELFEVLSNQPIDIKMSLMKHLDFAMQFPNLRSQVPEINQVGLIAHYYLDVVMFLALSFAFAFYLLVKLLIKVYFKFIEATTMRLSNIVFMVTLWSSITAMNVVLYINAIGKSHLDFSDSLVDSLVEKGHTVDVIIARMNDQVTGHGKSKADRFYVFGFKNGSNWNKMHHLTNIFGEVKFPINGFRPYYDIGNSLCEIALSDLKLQEFLTYRKYDIGIVGTFDFCGVSILKSIGIPSVTTINAVPIMPIETVTIGLPNAPSQVVPLFQKFDLSTLYGRFWNAISWGFVNYIQIPTLKREQELLLQKRFGQDFSIEETIRKVDLTFINSNEVMEKPRPLHHRIQYIGGINLKSPKPVDQKLDELLSRSRNGTIIFSFGTQVPGKAYPRYAVKNFVKVFKKYSDYTFLWKYQIQPGEEKMFKEAKNVILLDWLPQTDLLYDQRVIGFISHVGMNSFNEASYAGKPIIAIPLFADQPHNAENGVARGTTYLLNKSELTEESIEMGLRAILFDKSYQENAIKLQKMLVEKPDQPKERFVQWMEYAAANPGLHKIFELPGSRMGIIEYYCVDAIVLLISVAVLGLYLMVKVTKMLSSRIRLMKKVKHE

SEQ ID NO: 6007 - protein, 493 aa, Erigeron breviscapus
MTKLMDQNQPHFLLVTFPTQGHINPSLQFAKRLVRLGVKVTFATSVSAYRKMSKNGKIPDGFNFAVFSDGFDDGFNPKLHDTTVYMNQLRSKGTQSLKETILSSAENGTPVSCLVYTLLLPWAGEVAHGLNVTSTLLWIQPASVLRIYYYYFKGYNELIREKCMEPTWSIELPGLPSLKSRDLPSFCLPSNPYDYVLSLFKEQLDLLDLEDKPKVLINSFDALEEDALKEIDGKLKLIGVGPLIPSAFLDGKDPSDKSFGGDMFQKSKDYVEWMNTKPEGSIIYVSFGSLIMLSKKQKEAMAYGLLESRRPFLWVIRDKDSNIKGEKVEDDEGEEEEEELSCMEELEQLGMIVPWCSQLEVLSHPSLGCFVTHCGWNSTLESIVCGVPVVAFPHWTDQATNAKLLEDVWGTGVRVTPNEDGVVEGKEIKECIERVMGGHANGAAMRKNAKRYKDLAREAVKENGSSYTNLKDFVEEVSGSLNEVFKSEFEASV

SEQ ID NO: 6008 - protein, 208 aa, Medicago truncatula
MTPLQLPDWLGTNHSTTAYYKPIFESEKKSYGTLYNSFHELESDYKKLSNTILGIKSWSVGPVSSLANKDDEKKGNRGHMEELAEEEEWLNWLNSKQIESVLYLSFGSVTRLDNAQIVEIAHGLENSDHNFIWVGYIIWNWAPQLLILDHPATGGIVTHCCWNSILESVNSGLPMITWPMSEEQFYNEKLLVDVLKIGVQVGAKENKF

SEQ ID NO: 6009 - protein, 358 aa, Rhodamnia argentea
MRQGDLLYGPIPGLEGLPTTAPRFHAWDVMDVNMPDGKVVDPTWTLPVAASELNISAVVFLTMRAASCSFLTHPIHHTFDEYPFSALTLPESDNLRIAQLMNSSANGYKNKERFWECMERSSNIVLIKTFRVMEAKSLISEKEGGDCWASSSRTCQQGRRWTQDHGDRRQLSSAVLVSSGSEYFLSEEEREEIAYGLELSNVGFIWVLKFHGGGEVTVHEALSQGFLQRIGHRGLVVEGWAPQAKILGHPGIGEFVSHCGWSSTLEAILLGVPIIAMPMHLDQPLNAKLAVEIGAVMEVDRGSGGFRREEVARVIQQVMVEEKGQEAKRNAQELGERMREEQEEMDGAVEKLKQLIEV

SEQ ID NO: 6010 - protein, 468 aa, Cicer arietinum
MEKKRCIAMIPSPGLSHLIPLVEFAKLLLQKHNEFIITFLIPTFGPLSSSMQSILNTLPPNMNFTVLPQLNNIQQDLPIEPATQMKLIVKNSVPFLIEEVKSLISKTHLIALVFSMFSTDAHDVAKQFNLLSYLFFSSGAVLFSFFLTLPNLDQSANTSKFLESCYETVNIPGVEIPFHVKELPDPILCERSSDTYKSLLDLCQKLTLFDGVIINTFTDLEQDVIRVLQEREKLCVYPIGPIIRKESNNETNMEVCLRWLENQPPSSVLFVSFGSGGTLSYQQLHELAFGLEISGCKFLWVVRVPSKNSSSAYFSKQNDDPLEYLPNGFLERTKDKGLVVASWAPQVEILVHESIGGFLSHCGWSSTLESVVNGVPMIAWPLFAEQKMNAKELVDVLKVGVRAKVDDENGIVKRDEVVKAIKGIMEGDESLEIRKRIKELSVGAANALSEHGSSMKALSDLVVKLHDY

SEQ ID NO: 6011 - protein, 256 aa, Dorcoceras hygrometricum
MIKSVEECDAIGIKSCGEMEGLYCDFLEKRFKKPVFLAGPVLPKPPSSTLDEKWAKLLDQFKPKTVVFCALGSEARLKKDQFQELILGIELSGYPFFAALKPPIGTDAIQEALPEGFQERTEKRGVVHGGWVQQQMILAHPSVGCFVTHCGAGSLSEAMVSECQLVLIPQMGDQIMNARFMAADLRVAVEVEKGDDNGMFTKEGVVKAIRSAMDDDCEIGDEIRSNHAKWRDFLMREGLENSYIDQFVVKLRGLLE

SEQ ID NO: 6012 - protein, 491 aa, Drosophila grimshawi
MMTNSIIRQLVKNGHEVTFITPFSLESENLGSNYKEILLESYDFWTEMKEMSNREIILDMADVTTLTFIRMLHVIGIHSTDFAFGQPAVKALINAKDKLGKYDLLLAEQFYNDGALILGHLYQVPVITVSTFGNTNYFTELAGIIAPWSYNPHSFLTYTNRMTFAERLFNFFICGTESLMRNFLFYPGHDAVLRKHFSNVLDVVPTVKQLHRNISAILMNNYMPLESPRPISVNMISVGGLHILPPKPLPQQLQTFLDGATHGAIYFSLGSQVRSADLPPEKLKVFLDAFGGLKQRVLWKFENDSFPNLPANVMIQKWMPQGDILAHPNVQVFIAHGGLFGMQEALQYGVPVLGMPVYCDQHYNINMGKAAGYALGLDYRTISAEELRSSLLALLENPKYRDTMKSASRIFRERPLSPMDTAMFWIDYIIEHRGAPHMVDAGVSLAWYQFYSLDVIAFILGSMLIPILLLCFCVKKSAKKSGTKSKKHKKQ

SEQ ID NO: 6013 - protein, 448 aa, Punica granatum
MRETISILMLPWLAHGHISPFLELAKRLADRNLRIHICSSPMNLESIRSRIPEKYSSSIRLLEIHLPSLPELPPQRHTTNGLPLHLMPVLKRAFDMSAPNFAEILVNLKPDLLIYDFLMPWAPELARSHNVRAVTFLSVGAGMASFVFHLLKNPGVDFPFEGLFSVDDHVSQMFCQILESPSSGITDKDRVLQCIERSSDILLMKTFRELEGKYIDCLSDLTGKRAVPVGPLVHDPLLQADQAGTHIIEWLDKKPISSTVFVSFGTEYFLTDQEREEIAHGLERSNVNFIWVMRFPGGERQDLEDALPKGFLERVAGRGLVVEKWAPQVRILEHESIGGFVSHCGWSSVMESMKFGVPIIAVPMQLDQPFNAKVVERVGVGIEVKRNPSSGRFEGEDIGRVIRGLVKERGGEGVRKRVKEVSESMIRNKGKDEEIDGVVDALVNLCGK

SEQ ID NO: 6014 - protein, 465 aa, Medicago truncatula
MSMSDINKNSELIFIPAPGIGHLASALEFAKLLTNHDKNLYITVFCIKFPGMPFADSYIKSVLASQPQIQLIDLPEVEPPPQELLKSPEFYILTFLESLIPHVKATIKTILSNKVVGLVLDFFCVSMIDVGNEFGIPSYLFLTSNVGFLSLMLSLKNRQIEEVFDDSDRDHQLLNIPGISNQVPSNVLPDACFNKDGGYIAYYKLAERFRDTKGIIVNTFSDLEQSSIDALYDHDEKIPPIYAVGPLLDLKGQPNPKLDQAQHDLILKWLDEQPDKSVVFLCFGSMGVSFGPSQIREIALGLKHSGVRFLWSNSAEKKVFPEGFLEWMELEGKGMICGWAPQVEVLAHKAIGGFVSHCGWNSILESMWFGVPILTWPIYAEQQLNAFRLVKEWGVGLGLRVDYRKGSDVVAAEEIEKGLKDLMDKDSIVHKKVQEMKEMSRNAVVDGGSSLISVGKLIDDITGSN

SEQ ID NO: 6015 - protein, 480 aa, Rosa chinensis
MKRAELVFIPSPGAGHLVAALQFGKRLLQRDDRISITVLAIKSAAPSSLGSYTESLVASESRIQLIDVPQAELPPLEFAKSPAKFFILNIENHVPNVREALTNYVSSLHSKPDSVPIVGVVLDFFCVSMIDVVNELNLPSYLFMTSNAGYLSVMFHFPEQDSRTGAPPKDSDPDWLVPGIVPPVPTTVLPVSMTDGSYSSYLGIAARFREAKGIIANTCVELEAHAFNSFSEDQTTPPVYPVGPVLDLNDGQARSNLNQAQRDRIMSWLDDQPEESVVFLCFGSLGSFSEAQVKEIALGLEQSGQRFMWSLRLTPPKGSKTLTPIDCSNLEEVLPDGFLERTRGKGLICGWAPQVEVLSHKATGGFVSHCGWNSILESLWYGVPIVTWPMYAEQQLNAFRMVKEWGLGLEMRLDYKKGGEVVKADEIGKAVVSVMEDSEVRKKVKEMGVVSRKAVEDVGSSSVSLGRFIEDVMRNHFGSD

SEQ ID NO: 6016 - protein, 816 aa, Theobroma cacao
METTQESPLHVVIVPTPGMGHLIPLIEFAKRLVDLHKFAVTFFVPNDGSPMKLQRQLLLTQPEPISSIFLPPVSFDDLPEDAKIETRIILSLNRSLHFLRDSFQVLAQSTRVVAFVVDVFGIDAFDVAKEFGLEPYIFVTTAVMLLSLIFELPKLDQMFSCEYRDLPEPIKLPGCVPFHGSDVPDPLQHRTNFAYQETLQQCKRYPLAAGIVINSFMDLEKGTLDALMESGRGLPAVYPVGPLIRTSSTSEVEGSNNCLRWLDEQPSGSVLYVCFGSGGTLSHEQLNELALGLEMSGQRFLWVVKEPNEIVANATYFGIENVKNPFAFLPDGFLERTKEVGLVVPSWAPQIQVLSHGSTGGFLTHCGWNSVLESIVHGVPLIAWPLYAEQKMNAVLLKDGLKVAFRVRVNEDGLVGREDIAKYVKELIEGDEGQLLRTRVRKLKDAAKVDCTDMEKPLAILERGTTCSAWNYCGERLAAGSVDGSLSILDSRDSSSSSFICSSKFKANEAGIVKVAWIPPEYGDAVACICEDGTLSIWEELVEGTQPLQWKLCKSFKTSSKVLDVQFGVNQTSLKMVAAYSDGFVKIFELLDPLELKNWQLQVLNSVHLRFPLFLLHFLDIQPFPIAEYQNVIDSVSTFGKASCLTACISWNPQRGEGQESSFILGFNSNTPQLNSPKVWEFDPAHQRWLPVAELALPGDKGDQVYSVAWAPNIGRPYEVIAVASQKGIAIWHVGSTPDLDGRLSVEKAALLSEHNSEKEAIALLACAPILLKVWQMEWDMSGMTLATTESNGPVRLWQSNLNGAWHEQAAFEPTS

SEQ ID NO: 6017 - protein, 489 aa, Arabidopsis thaliana
MEQHGGSSSQKPHAMCIPYPAQGHINPMLKLAKLLHARGFHVTFVNTDYNHRRILQSRGPHALNGLPSFRFETIPDGLPWTDVDAKQDMLKLIDSTINNCLAPFKDLILRLNSGSDIPPVSCIISDASMSFTIDAAEELKIPVVLLWTNSATALILYLHYQKLIEKEIIPLKDSSDLKKHLETEIDWIPSMKKIKLKDFPDFVTTTNPQDPMISFILHVTGRIKRASAIFINTFEKLEHNVLLSLRSLLPQIYSVGPFQILENREIDKNSEIRKLGLNLWEEETESLDWLDTKAEKAVIYVNFGSLTVLTSEQILEFAWGLARSGKEFLWVVRSGMVDGDDSILPAEFLSETKNRGMLIKGWCSQEKVLSHPAIGGFLTHCGWNSTLESLYAGVPMICWPFFADQLTNRKFCCEDWGIGMEIGEEVKRERVETVVKELMDGEKGKRLREKVVEWRRLAEEASAPPLGSSYVNFETVVNKVLTCHTIRST

SEQ ID NO: 6018 - protein, 480 aa, Arabidopsis thaliana
MNKFALVFVPFPILGHLKSTAEMAKLLVEQETRLSISIIILPLLSGDDVSASAYISALSAASNDRLHYEVISDGDQPTVGLHVDNHIPMVKRTVAKLVDDYSRRPDSPRLAGLVVDMFCISVIDVANEVSVPCYLFYTSNVGILALGLHIQMLFDKKEYSVSETDFEDSEVVLDVPSLTCPYPVKCLPYGLATKEWLPMYLNQGRRFREMKGILVNTFAELEPYALESLHSSGDTPRAYPVGPLLHLENHVDGSKDEKGSDILRWLDEQPPKSVVFLCFGSIGGFNEEQAREMAIALERSGHRFLWSLRRASRDIDKELPGEFKNLEEILPEGFFDRTKDKGKVIGWAPQVAVLAKPAIGGFVTHCGWNSILESLWFGVPIAPWPLYAEQKFNAFVMVEELGLAVKIRKYWRGDQLVGTATVIVTAEEIERGIRCLMEQDSDVRNRVKEMSKKCHMALKDGGSSQSALKLFIQDVTKYIA

SEQ ID NO: 6019 - protein, 485 aa, Zea mays
MEKLPSQQQVVLLASPGAGHLIPMVELAQRLAADHGFAVTLVTIPGMSNPATEAVVLSSLPSYVLTAVLPAVPLDDLPSDIGFGALVFEFVRRSLPNLRALMEDASRGSVTALVCDFFGTSALPLAAELGVQGYVFLPNSFAMISIMRHLAGLHGDAAAPGEYRYLPDLLPLPAGGLVLHHADLPEGFQDRKDPVYAYHVEEARRYGRANGFLVNSFEELEVVMVETFKRDAEDGAFPPVYPVGPFVRSSSSEEADESGCLEWLDRQPENSVVYLSFGTGGSLSVEQTAELAAGLEMSGHRFLWVVRMPSLDGNPCAYGSMPGDKDDPLAWLPEGFLERTSGRGLAVVAWAPQVRVLSHSATACFVSHCGWNSTLESVAAGVPMVAWPLYAEQKMNAAILTEVTGVALRPAARGNGHGLVTREEIAASVKELMEGEKGSAVRGRTRELREASKRAWSSEGSSRRALGEVAGKLKAALVNGNGSAP

SEQ ID NO: 6020 - protein, 472 aa, Polygala tenuifolia
MKKLELVFIPFPAIGHLVSTIELAKLLLGRDDRFSITFFLMKPAFGPSHSTQSFSSSYPQIRFIDIPRIDPPPADLFRKSFEKVTSMYIESYKASVKEAVVNHVLPNCDKFAGLVVDIFCTSMIDVANELGVPSYLYFTSGAGFLGFLLHLSTRHDQGVAEFEKSDPDSFIPCYINPVPTDVLPSFAFNKEGGYAAFLNHARRFKETKGILVNTFPELEPHAVSSLSVYNDLPKVYTVGPLISHKSQSPWQSHQEKYDKIMKWLDDQPPSSVVFLCFGSWGCFSESQLKEIAIALEKSGHRFLWSIRAAGKDELGTPVENINYGEILPEGFLERTQDKAFLCGWTPQVEVLAHKAVGCFVSHCGWNSILESVWYGVPIVTWPIYAEQQLNAFQMVKDLRLAVEMKLDYRRGTDTIVKADEIAKAVSCAMEEDGEVKKKVKDVSEKSRETVVEGGSSCASVRMLVEAMVEGST

SEQ ID NO: 6021 - protein, 300 aa, Panicum miliaceum
MATGDRRRRVLFFPLPFQGHINPMFQLAGLLHARGFAVPVFHTRFNAPDASRHPAYDFVPVPVPVPDDDGMPVDTPDTVQVTLERVLAVNRACTAPFWERLAALQAPASVLYVSFGSVASMSASDLAETAWGMAISGRPFLWALQPGLVRGAPPSPEQPPLPAGFRAATRGRGTVVAWAPQEEVLAHPAVGGFWTHCGWNSTLEAVCAGVPMLCRPCFGDQMGNARYVERAWRVGVALDGELERGEVEAAIAAVMGGGEAGAGMRRRPAVLKSRAAECCVAEAGSSCLNVDKLVKHIMAL

SEQ ID NO: 6022 - protein, 478 aa, Nicotiana tabacum
MAETAIVTKSENPHIVILPSPGMGHLIPLVEFSKRLISQHQFSVTLILPTDGPISNSQKSFLNSLPSCMDYHLLPPVNFDDLPLDVKIETRISLTVTRSLSSLREVFKTLVDSKKVVAFVVDLFGTDAFDVAIDFNVSPYIFFPSTAMALSLFLYLPKLDATVSCEYRDLPDPIQIPGCIPIHGKDLLDPVQDRKNEAYRWLLHHSKRYRMAEGVVSNSFKELEGGPIKALQEEEPGKPPVYPVGPLIQMDSGSKVDGSGCLTWLDEQPRGSVLYVSYGSGGTLSHEQLIEVASGLEMSEQRFLWVIRCPNDTVANATYFNVQDSTNPLDFLPKGFLERTKGLGLVVPNWAPQAQILSHGSTGGFLTHCGWNSTLESVVHGVPLIAWPLYAEQKMNAVMLTEDIKVALRPKANENGLVGRLEIAKVVKGLMEGEEGKGVRTRMRDLKDAAAKVLSQDGSSTKALAELATKLKNKVLIN

SEQ ID NO: 6023 - protein, 467 aa, Arabidopsis thaliana
MRNAELIFIPTPTVGHLVPFLEFARRLIEQDDRIRITFLLMKQQGQSHLDSYVKTISSSLPFVRFIDVPELEEKPTLGTQSVEAYVYDFIETNVPLVQNIIMGILSSPAFDGVTVKGFVADFFCLPMIDVAKDASLPFYVFLTSNSGFLAMMQYLAYGHKKDTSVFARNSEEMLSIPGFVNPVPAKVLPSALFIEDGYDADVKLAILFTKANGILVNTSFDIEPTSLNHFLGEENYPSVYAVGPIFNPKAHPHPDQDLACCDESMKWLDAQPEASVVFLCFGSMGSLRGPLVKEIAHGLELCQYRFLWSLRTEEVTNDDLLPEGFMDRVSGRGMICGWSPQVEILAHKAVGGFVSHCGWNSIVESLWFGVPIVTWPMYAEQQLNAFLMVKELKLAVELKLDYSVHSGEIVSANEIETAISCVMNKDNNVVRKRVMDISQMIQRATKNGGSSFAAIEKFIHDVIGTRT

SEQ ID NO: 6024 - protein, 479 aa, Helianthus annuus
MAIKLDLVHVLLVTFPAQGHVNPLLRLGKLLASKGNVLVTFSSTKSIGNKMKKAGCAVSSDPTPVGNRGGMIRFEFFDDGCSEDKDDERNDLDTYLPKLEAYGKKAITRIINQHAENGWPVSCLINNPFIPWVSDLAQELNIPCAMLWVQSCACFSSYYHYQKSLVPFPSEEKPDIDVQLPNMPVLKSDEIPSFLHPSTPYPFLRRAILGQFKNLSNNFCVLMETFEELEGDLIKYMSQICPIRAAGPLFNNPLLETSSNISGDLIKADDCLEWLDSKQPSSVVYISFGSVVSLSQEQVTEMAYGVLNSGVSFLWVIRNNVTSTGASGKLPEGFLEEAGERGMVVQWSPQAQVLSHPAVSCFLTHCGWNSTMEALSSGVPVVAFPHWGDQVTDAKYLADEWKVGIRMCRGEAEHRVIGRKEVEECLREATGGVRAAEMKTNVMKWKKAAAEAVAEGGTSDRNIQEFVDEIRKLSLKKSS

SEQ ID NO: 6025 - protein, 486 aa, Helianthus annuus
MANMVATLVFIPAPGLGHIMSTIEIAKLFVNRDQRFSITVLVIKPPSSDSGSTITTYIESLAKNNTDRISFVELPQQEIAPPSDSKGPLASFNEFIKSHCKYVKNIVADMISQTGSGQVAGFVIDMFCTCMIDVANEFDVPTYVFFTSNAAFLGFKFFIQTLNDEQNQDVVELSHSDTEITVPTLVKPMPTKVFPTVFQTRETVEFVLSAARRMREVKAIIVNSFLEVETHAIESLSADNTIPPVYPVGPILNLEGGTGGRKPLEDDVIKWLDNQPPSSVVFLCFGSMGSFDEVQVKEIARALEQSGVRFVWSLRKPPPDKTSRVTIEYEDFRVVLPEGFLERTVGIGKVIGWATQVAVLGHRAVGGFVSHCGWNSLLESLWFSVPVATWPMYAEQQINAFEMVVELGLSVEIKLDYKRDSFIPMAESVVVPAEEIETGIGRLMEDDLVRAKVKKMSEKSRSTVLEGGSSYAYFGSLIQDLITNIS

SEQ ID NO: 6026 - protein, 318 aa, Helianthus annuus
MKLLVDDNYLTDGTLEKSIDWIPAMSNLRYKDIPSFIRITDPNDIMFNIAMDEAENNLSSPAIIMNTFDALEHKVIEAIASKFDYPNIYTIGPLPLLARYVPDDSPVQSLNSSLWMSDSSCLKWLDQKEEGSVIYVNYGSITTMTDQHFVEFAWGLARSMQPFLWVVRPDVTMGNSAVLPGELLEEIKDRGMLVSWCAQEKVLAHRSVGAFLSHCGWNSTTESILEGVPLICWPFFSDQLTNCRFACTEWGIGMEINHDVKRNEVEVVVREMMQGEKGKEMRRNARDWKRKAKEATEIGGLSYNNFQRFIKEALHYHT

SEQ ID NO: 6027 - protein, 641 aa, Helianthus annuus
MDQQNNTLEPHVLMFPIPFQGPVNCFLKLAELLCLSGIHVTFLNTEHIHRPLLRHTQVLSRFSRYPNFKFETIPDGVEHETPVPRDRFMEVMAGVDAVTKPLFREMMVSGRFSWKSERPVTVMIPDAYFSFAVDVAIEASIPVICFETISPCCLWTSYLNLPTLIEAGDVPFEGPVNCALKLAELLCLSGIRVTFLNTEHIHRPLLRHTQVLSRFSRYPNFRFETIPDGLEHENPVSGDRFMEVMDAVDVVTKPLFREMMFSGRLSRKADRPVTVMIPDACFSFAVDIAIEASIPVICFETIGPGALWTSYLNLPTLIEAGDVPFKGNDLDQLITSVPGTEHIIRKRDLDSFCRFKDLSNPGIEFILKKAHIVPRAQGLILNTFEELDSVVLPHMRKLCPNIYTIGPMHSLHKTKLMANTKLSPQETTVSNSVWKEDKTCLSWLDKHDPKTVIYVSIGSLAIMTVEQLIEIWYGVVNSGKPFLWVRRPGSITSAYDESQVPTELLERTKEIGCIVEWAPQEDVLAHPAIGGFLTHSGWNSTMESIVEGVPMVCWPYFGDQQTNSRFVGEVWKTGIDLKDTCDRLGIEKAVRDIMDSKHKLYTQAANTWENAAKESISMTGSSSIQLARLIDDILAMSLTNL

SEQ ID NO: 6028 - protein, 522 aa, Unknown
  Description of Unknown: Oryza sativa Japonica Group sequence
TCGVSNTTNATTLVGFRGKHTTRAGGNKALRSMEPHVLLVSFPMQGHVNPLLRLGRRLAATGLLVTFTTVRLAAGGGRLRDVPEDGACADVGLGRLRFEYLRDDDDDGDERCQQLAPNDVLSHVTAVGPSALAEFIDGQADAGRPVTFVVNNIFVPWALDVAAGMGIPCAMLWIQPCSVLSIYYHFYESPEAFPTAADPDVPVELPGLPVMAMVELPFMVRPEYAQCLWGDTLRAQVGAIKRTVSWVLVNSFYELERSAVDALRAHTTVKLAPIGPLLEHGHDNGGGDDGAPAPALGAEDNDRCVAWLDAQPPRSVVYVAFGSLVNIGRDETAAVAEGLVATGRPFLWVVRDDSRDLVPEAVLAACRGDKAGKITAWCPQGRVLAHGAVGCFVTHCGWNSIMEALAAGVPVVGYPWWSDQFANAKFLVEDYKVGVRLPAPVTGGELRACVDRVMSGPEAAVIRKRAMHWKREAAAAVADGGSSDRSLQDFVDHVRRSKGPEELARLAQDIQIMNGPVNPVLV

SEQ ID NO: 6029 - protein, 495 aa, Unknown
  Description of Unknown: Oryza sativa Japonica Group sequence
MDPSPRPSPHVVLVASPCAGHVMPMAELARRLVAFHGCAATLVTFSGLAASLDAHSAAVLASLPASSVAAVTLPEVTLDDVPADANFGTLIFELVRRSLPNLRQFLRSIGGGVAALVSDFFCGVVLDLAVELGVPGYVFVPSNTASLAFMRRFVEVHDGAAPGEYRDLPDPLRLAGDVTIRVADMPDGYLDRSNPVFWQLLEEVRRYRRADGFLVNSFAEMESTIVEEFKTAAEQGAFPPVYPVGPFVRPCSDEAGELACLEWLDRQPAGSVVFVSFGSAGMLSVEQTRELAAGLEMSGHGFLWVVRMPSHDGESYDFATDHRNDDEEDRDGGGHDDDPLAWLPDGFLERTSGRGLAVASWAPQVRVLSHPATAAFVSHCGWNSALESVSAGVPMVPWPLYAEQKVNAVILTEVAGVALRPAAARGGVDGVVTREEVAAAVEELMDPGEKGSAARRRAREMQAAAARARSPGGASHRELDEVAGKWKQTNRAPYE

SEQ ID NO: 6030 - protein, 507 aa, Unknown
  Description of Unknown: Oryza sativa Japonica Group sequence
MAIESAPARNERRGQHVVLLASPGAGHLLPVAELARRIVEYDGFTATIVTHTNFSSAEHSSTFSSLPPSISIAALPEVSVDDLPADARVETRILTVVRRALPHLRDLLRSLLDSPAGVAVFLSDLLSPRALAVAAELGIPRYVFCTSNLMCLTSFLHNPVLDRTTTCEFRDLPGPVLLPGCVPLHGSDLVDPVQDRANPVYRLVIEMGLDYLRADGFLVNTFDAMEHDTAVAFKELSDKGVYPPAYAVGPFVRSPSGKAANDACIRWLDDQPDGSVLYVCLGSGGTLSTEQTAEVAAGLEASGQRFLWVVRYPSDKDKTASYFSVSGDGDGEDSPTNYLPEGFLERTKGTGLAVPMWAPQVEILNHRAVGGFVSHCGWNSTLETVAAGVPMVAWPLYAEQRMNAVMLSSSRAGLALRPSNAREDGVVTRDEVAAVARELITGEKGAAARRKARELREAAAKATRAPGGPSRQAFEAVVGGAWKKAAAAARGGRAGEPDDNGTAVTAQ

SEQ ID NO: 6031 - protein, 460 aa, Unknown
  Description of Unknown: Oryza sativa Japonica Group sequence
MAKGHVLVLPMPCQGHVIPFMELSHRLADEGFEVTFVNTEVDHALVVAALPPGGAAELRQRGIHLTAIPDGLAEDEDRKDLNKLIDAYSRHMPGHFERLIGEIEAGGGRPKVRWLVGDVNMGWSFAVARRLGIRVVYFSPASTACIAFMRKIPKLIEDGVLNEKGWPERQETLQLAPGMPPLHTSLLSWNNAGAAEGQHIIFDLVCRNNKFNDDLAEMTICNSFHEAEPAVFKLFPDLLPIGPLVADRELRRPVGHFLPEDAGCLDWLDAQPDGSVVYVAFGSMAIFDARQFQELAVGLELTGRPFLWVVRPDFTPGLSTAWLDAFRCRVAGRGVIVEWCSQQRVLAHAAVACFVSHCGWNSTLEGVRNGVPFLCWPYFCDQFLDRSYITAVWRTGLAVAAGEEDGVVTRDEVRSKVEQVVGDGEIRERARLLRDTARACVSEGGSSHKNFRKFIDLLSE

SEQ ID NO: 6032 - protein, 481 aa, Vigna angularis
MASVETPKPHIVCVPYPAQGHINPMMQLAKILRCKGFYITFVNSEYNHRRFIKSHGPEFVKGLPDFAYETIPDGLPPSDKDATQDIPLLCDSTRKTCYGPFKELVLKLKATEGVPPISCVIADGIMGFAGKVAKDMGIPEVQLWTASVCGYVGYLQFDELVALGMVPFKDQKEIDDALDISLDWIKGMSNMRLRDLPTFCRVTSLDDILYDFLNSESRNTLKSSAVIINTFEDLDEEGLEILRSYNPNIYTIGPLDLLGRHFPEKEKGFMSVGSSLWKNDSNCLTWLNKWEPNSVVYVNFGSIAVMTAHHLKEFAWGLANSKLPFLWIKRADIVADESDSLPQEFFDEIKDRGYITSWCMQEQVLSHPSVGVFLTHCGWNSTLEGIYAGVPMVCWPFFSDQHTNCRYVCANWGVGMEINQDVKRDEISDLVTEMIKGDKGKEIRQKSLEWKKKAIKATDVGGTSYNNIHKLIKEALSGNAA

SEQ ID NO: 6033 - protein, 464 aa, Vigna angularis
MALNEENIPHESKVVVLVIPSPAQSHLNQLLRLSRQIVAHNIPVHYVSTITHIRQVTLRHQNSISDIHFHAFEVPPFVSPPPIPNNPESDFPSHLIPSFVAATQLREPVGKLLQSLSSQAKKVIIIHDALMASVAQDAINLPNVEKYIFHIFPAFVASVYFWEGQGRPPVEDIHFPEVPSDEGCLPAHFTDLLSTHDYNEFLNSNGDIYNTSRAIEGPYVDFMQRLNAGKKVWALGPLNLLAIEKNDSTEFRHPCMEWLDKQEPNSVIYVCFGTTTTFTEEQNHHIATGLEQSKQKFIWVLRDADKGNIFDGSEAKEHELPNGFEERVKGMGLVVRDWAPQSEILSHPSMGGFLSHCGWNSCLESLSMGVPIAAWPIHSDQPKNAALVTEVLKAGLVVRDWSQRRNELVTASHVENCVRRLMQTKEGEEMRERAVRLKNDIHRSTNEGGISRMEMESFISHITQ

SEQ ID NO: 6034 - protein, 468 aa, Populus euphratica
MGVQPHILLVTFPAQGHINPALQFAKRLVAIGAHVTFATSMGAKRRMSKSGTYPKGLYFAAFDDGSEHGFRPSDDIEHYFSELRRVGSKSLADLICQGPKNGGPFTCVVYSNLIPWVAKVARQHNLPSTLLWNQSPALLDIFYYYFNGYGDTIKKSINDPSFSLKLPGLPPLGSRDLPSFLNPRNTHAFALPVNKEHIEVLDEETNPKVLVNTFDALECEALNSIGKFKLVGVGPLIPSAYLDEKDPSDTSFGGDLFQDSKDYVEWLNSKPESSVIYISFGSISVISKPQKEEIARALLDTGRPFLWVIRTDGGEEKEEDKLSCTEELEKQGKIVPWCSQVVVLSHPSIGCFVTHCGWNSTFESLASGVPVVAFPQWTDQLTNAKMVEAVWETGVRVSANKEGIIEGEEIEKCLELVMGGGERGKEMRKNAKKWKDLARESSREGGTSYQNLQDFFNEIGGGAMSLDI

SEQ ID NO: 6035 - protein, 454 aa, Arabidopsis thaliana
MDPNESPPNQFRHVVAMPYPGRGHINPMMNLCKRLVRRYPNLHVTFVVTEEWLGFIGPDPKPDRIHFSTLPNLIPSELVRAKDFIGFIDAVYTRLEEPFEKLLDSLNSPPPSVIFADTYVIWAVRVGRKRNIPVVSLWTMSATILSFFLHSDLLISHGHALFEPSEEVVDYVPGLSPTKLRDLPPIFDGYSDRVFKTAKLCFDELPGARSLLFTTAYELEHKAIDAFTSKLDIPVYAIGPLIPFEELSVQNDNKEPNYIQWLEEQPEGSVLYISQGSFLSVSEAQMEEIVKGLRESGVRFLWVARGGELKLKEALEGSLGVVVSWCDQLRVLCHKAVGGFWTHCGFNSTLEGIYSGVPMLAFPLFWDQILNAKMIVEDWRVGMRIERTKKNELLIGREEIKEVVKRFMDRESEEGKEMRRRACDLSEISRGAVAKSGSSNVNIDEFVRHITNTN

SEQ ID NO: 6036 - protein, 488 aa, Arabidopsis lyrata
MGTSGKVSKLHFLLFPFMAHGHMIPTLDMAKLFATKGAKSTILTTPLNAKLFFEKPIKSFNQDNPGLEDITIQILHFPCTELGLPDGCENTDFIFSTPDLNIGDLNQKFLLAMKYFKEPLEQLLETMRPDCLVGNMFFPWATKVAEKFGVPRLVFHGTGFFSLCASHCIRLPKNVASSSEPFVIPDLPGDIVITGEQVIEKEEESVVGRFMKEIRDSERDSFGVLVNSFYELEPAYSDYFKSFVAKRAWHIGPLSLGNRRFEEKAERGKKASIDEHECLKWLDSKKCDSVIYMAFGTMSSFNNEQLIEIAAALDMSGHAFVWVVNKKGSQVEKEDWLPDGFEEKTKGKGLIIRGWAPQVLILDHQATGGFLTHCGWNSLLEGVASGLPMVTWPVGAEQFYNEKLVTQVLKTGVSVGVKKMMQVVGDFISREKVERAVREVMVGEERRKRAKELAEMAKNAVKEGGSSDLELDRLMEELMLVKLQKEKV

SEQ ID NO: 6037 - protein, 448 aa, Rhodamnia argentea
  MOD_RES (114)..(114): Any amino acid
  MOD_RES (357)..(357): Any amino acid
MSMDNMQRPIKVLMLPWLAHGHISPFLELAKRLSTRNFHIYLCSTPVNLSSIKPKMSEKHSSSIELVELHLPSLPDLPPHYHTTKGLPPHLMKALQAAFDMARPGFSDIVKSIXPDLLLYDFIQPWAPEVAKSHGVPAVVFFSVGAGPLSFMLHVLKNTCNEFPFEAIFLHDYELVKIIKAAEDAGDGRKDRTPKSVERSSNFILLKSFRELEGKYVDYLSSFSGKTGVPVGPLVEEPSNVEDGDNIIEWLDKREKSSAVLVSFGTEYFLTEKEREEIASGLELSNVKFLWVIRFPVGESMELEEALPEGFLERVRGRGLVIVGWAPQGKILEHPSIGGFVSHCGWGSVMESMKSGXPIIAMPMHLDQRMNARIVGEVGVGLEVKRNESGELKRLEIAKVIRDVVVEKDGEGVRKKAREMSDSIRKKGEGELDEVADALVQLCVGYKD

SEQ ID NO: 6038 - protein, 212 aa, Cajanus cajan
MWSVEDSCMEWLDNKPPSSVIYVSFGSMLVTSQTQMDNIATAMRNSNKSFLWVLKPGSNKDNVAEFSNGFSEETKERVLVVKWCPQEKVLMHSSVAGFISHCGWNSTLEAVVAGVPLIAWPSWTDQPTTAMLIENVFRNGVRLRCGEDGNASAEDIERCIRCVTEGPSAEEIKKRAREMKEAAWKTLQDGGTSSKNISQFISDLIAGKPDRA

SEQ ID NO: 6039 - protein, 432 aa, Vigna angularis
MMILSEKLVENGCKVVFVNTEFNHKRMVSCMVEQQDQNSLIKLVSMPDGLEPEHDRKDLSKIFDVGLNTMPHALEKLITEQNIISKSDNRIRYIVADVSMAWSLNVGCKLGIKGAIFCPSSAAIFALLYNIPKLIHDGIINSDGSLLTTKKTIELSPGKVEMDTGSLFWLNLGVTMNVKHMLNYLDTCAKSSNLTELWFCDTTYELEPKVLSFFPKILPIGPLLRNYSNMNASPTRSMGQLWEEDLSCTSWLDQQPHCSVIYAAFGSITCFDQNQFNELALGLDLTNRPFLWVVREDNKMAYPNEFQGNKGKIVQWAPQQKVLNHSAIASFVSHCGWNSTMEGLCNGVPFLCWPYFADQIYNKAYICDELKVGMGLDLDENGVVSRWEIKKKLDQLLSDVNMRTRSLKLKEKVLDKGRSSENLNKLVKWIKG

SEQ ID NO: 6040 - protein, 478 aa, Medicago truncatula
MAQNHHFLIITYPLQGHINPALQFTKRLISLGAKVTFATTIHLYSRLINKPTIPGLSFATFSDGYDDGQKSFGDEDIVSYMSEFTRRGSEFLTNIILSSKQENHPFTCLIYTLILSWAPKVAHELHLPSTLLWIQAATVFDIFYYYFHEHGDYITNKSKDETCLISLPGLSFSLKSRDLPSFLLASNTYTFALPSLKEQIQLLNEEINPRVLVNTVEEFELDALNKVDVGKIKMIPIGPLIPSAFLDGKDPTDNSFGGDVVRVDSKDDYIQWLDSKDEKSVVYVSFGTLAVLSKRQMEEIARALLDSGFSFLWVIRDKKLQQQKEEEVDDDELSCREELENNMNGKIVKWCSQVEVLSHRSLGCFMTHCGWNSTLESLGSGVPMVAFPQWTDQTTNAKLIEDVWKTGLRMEHDEEGMVKVEEIRKCLEVVMGKGEKGEELRRNAKKWKDLARAAVKEGGSSNRNLRSYLNDIACITQI

SEQ ID NO: 6041 - protein, 487 aa, Zostera marina
MERLTKSSNNPIHFVLVPFMSPGHMNPMVDLGKLLAERGMNATIITTPQNALRFKSTADHALQTGLPLKFHELDVFPLIEDGGQQKKCDNLDSLVSAEAMMKFFKIADLLEEPLMEYLKNEKCRLPLCIISDWIFLWASKLATELNIPRFVFYCMPCFTLACTEILTTTWEGDQIVVPEIPHRIELVREQANVFFYGDAELQKLWKKGDSVSDGIIVNTCMGIEPTYVDIYRRRKGKNIWTVGPVGMCNRDMADKATRGLKSSSISATEISTFLDSMDPKSVIYVCFGTLSCTSSEQVIEICLGLMDSAHPFILVIQPKTNSVEIESWMESNRFEERNKDTGLVIRGWAPQVMILSHPSVGGFVTHCGWNSTLEGISAGLPMVTWPSFSDQFLNERFIVDVLEIGVMVGVKDPVWWWEEVVSVKREKFLKAVKELMGDGEEAVMRRRKALKLKKMADESMDIDGSSTNQLNALIQHVVELYEEKKTV

SEQ ID NO: 6042 - protein, 284 aa, Unknown
  Description of Unknown: Oryza sativa Japonica Group sequence
CWLCLVEPIFCVTQLRFRNQKLIGFQLVFPSCWFSWAGSALTQEAFQLSPDMPVMHPAHLAWNCIGNDEGQELLFSCVLAGIRAIDECDYILCNSFRGAEAATFARFPKIIPVGPLLTGERPGKPVGHFWLPEDGACMSWLDAQPVRSVVYVAFGSFTVFDRRQFQELALGLELTGRPFLWVVRPDIVHGDVHEYPDGFLDRVVASGINGGGRGKLVAWAPQQRVLAHPAVACFVSHCGWNSTMEGVRNGVPFVAWPYFADQFVNRAYICDIWRIGLPAVADEK

SEQ ID NO: 6043 - protein, 454 aa, Ricinus communis
MAYILNATRFSPQKKRKEQQDLIMGEPKKLHVALFPWLAFGHIIPYLDLAQLIAQKGHKISFISTSRNIQRLPQVSSKLSSSIKLISLTLPQVENLPHDAESTMDLPYDHVPYLKKAYDLLQDQLLHFLQTSAPDWIIYDFSPHWLPPIAANLGISGAFFSIFGAWSLTFLGSSSSAMINGDDPRTKAEHLTVPPDWVPFSSKVAFRLHEAKRALDHLGMNNSGQLHGKPVLPVGILPPSALDSSDDKDDTWIEISSWLDKHNKGSVVYIAFGSESAPSQEELEELALGLELSGLPFFWTLRKRNNDDSIKLPDGFEERVKGRGLVWMSWAPQVKILAHESVGGFLTHCGYSSIIEALHFGRALIMFPLSLDQGLIARVFEEKKVGVEIKRDEENGWFTKDSVAESLKLVMVKTEGNVYRDKAKEMKKVFGNKELHDRYMGHFVEFLQNHCRNP

SEQ ID NO: 6044 - protein, 469 aa, Pueraria montana
MTRYEVVFIAIPTLGNLVPQVEFANLLTKHDPRFSATILTVSMPQRPLMNTYVQARASSAANIKLLQLPIVDPPAPEQYQTLVGFLSLHMQNHKHHVKHALLNLMKTTESNSSNSVRLAAIFVDMFSTTLIDVAAELAVPCYLFFASPASCLGFTLDLPRFDLAESKSEFTVPCFKNLLPRSVFPNLVLDAKDGTFWLSYHARRYKETKGIVINTLQELETHALQSLHNDSQLQRVYPIGPILDLVGSAQWDPNPAQYKRIMEWLDQQPLSSVVLLCFGSMGSLEANQVEEIAIGLERAGVRFLWALRESPKAQLEYPRDYENHKDVLPDGFLERTNNIGLVCGWVPQAVVLAHKAVGGFVSHCGWNSILESLWHGVPVATWPLYSEQQMNAFQMVRDLGLAVEISVDYRVGADLVRAEEVENGLRSLMKGGDEIRRKVKEMSDTCRGALLENGSSYSNLVSLIQELTS

SEQ ID NO: 6045 - protein, 449 aa, Manihot esculenta
MGHLVSAVETAKLLLSRCHSLSITVLIFNNSVVTSKVHNYVDSQIASSSNRLRFIYLPRDETGISSFSSLIEKQKPHVKESVMKITEFGSSVESPRLVGFIVDMFCTAMIDVANEFGVPSYIFYTSGAAFLNFMLHVQKIHDEENFNPTEFNASDGELQVPGLVNSFPSKAMPTAILSKQWFPPLLENTRRYGEAKGVIINTFFELESHAIESFKDPPIYPVGPILDVRSNGRNTNQEIMQWLDDQPPSSVVFLCFGSNGSFSKDQVKEIACALEDSGHRFLWSLADHRAPGFLESPSDYEDLQEVLPEGFLERTSGIEKVIGWAPQVAVLAHPATGGLVSHSGWNSILESIWFGVPVATWPMYAEQQFNAFQMVIELGLAVEIKMDYRNDSGEIVKCDQIERGIRCLMKHDSDRRKKVKEMSEKSRGALMEGGSSYCWLDNLIKDMIK

SEQ ID NO: 6046 - protein, 470 aa, Nemophila menziesii
MANLKNHKNIKPESFRKEETAIIIVPFPAQGHLNQLLQLSCLISSYGLPVHYVGSETHNRQAKTRSNGLDPVELAKVHFHDLPTPDFHSPSPDPNSLDKFPAQLQPSWNATIFLREPVRDILLDLSSKSKRIVIIHDILTAAVVQDAASIPNAEAYILNCVSVFTLFFIRWESMGKPLLVDAEPPKGLPSVLECMTEDHMKFVASIVGYLNHQVGELHNTSRVLEGIYLDLLAKEEYGGKGKQFAIGPLLPVKKLSLNSQDKCLQWLDKQEPNSVIYVSFGSTTSMSDEEVKELAMGLEESKVKFIWVLRDADKGDIFDKEVRKIPLPEKFEERISEFGIIIRDWAPQPEILAHSSTGGFMSHCGWNSCIESISSGVPIAAWPMHSDQPCNALLITEILKTGLTVREWARREELLNASSIANTLKRLMASQEGEEIRKRAKELGDAVRKSTDEGGVSRLEMDSFIAHITR

SEQ ID NO: 6047 - protein, 496 aa, Ginkgo biloba
MENGNRKELLHHVLMFPWLAHGHISPFLELSMRLAGRGITVSFCSTPSNINSIKRTLQSHDDGETALNSINLVELPLPLVDGLGPSHETTASLPPHLMPLLKKAFDSLETSFGMLLQRLSPDCVIHDFLQPWTSPVASKFGIPSLTFVPCSAVVVAYFLCAVKGKDSEQVTVEDLINPLDFPSSSTVRLHQFEALQTLNMYKRNRETGISDCERLQGCANKCSAIAVKTFPEIEGKFLRLLESLTGKHVVALGPLLTKQPSSNASEQDSKCLAWLDRQKRSSVVFVSFGTEYFLSKDQIEEIALGLEASEQSFMWVLRFPQGPEGNVNDQQRRVSASLSAGFEERMKVKGIVVSGWAPQMKILRHPSTGGFMTHCGWSSVMEGMSAGLPLIALPMQLDQPLNARLVAGDLKVAIEVRKGSDGRLDRNEIERALRIAMVEEEGLQLRMNAKHMGEIMMAKSEEERGLDLLVEEIETLVGKRNNVFRRDSNIISMEAA

SEQ ID NO: 6048 - protein, 289 aa, Cephalotus follicularis
MPKPLLERNDVVYEYILEVSTELTKASAIMVNTFEPLEQRTVKAITDGLCVPGGPTPPVYCIGPLIAEERGDTNGSDAVLDCLTWLKIQPSKSVVFLCFGSLGLFSKEQLHEIAIGLERSGQSFVWVVRNPPLQNQSLATTAPPDPDLASLLPDGFLESTKDRGFVVKSWAPQVTVLSHDSIGGFVTHCGWNSVLEALSEGVPMVAWPIYAEQRYNRWLLVEEMKIALPMNESENGFVSSTEVKKRVRELMDSVDGNLVRERTKNAAKTALSASGSSHIALAKIIESWK

SEQ ID NO: 6049 - protein, 476 aa, Unknown
  Description of Unknown: Oryza sativa Japonica Group sequence
MIPYPAQGHVTPMMKLAKLLHARGFHVTFVNTEFNHRRMLASRGAAALDGGVPGFRFAAIPDGLPPSDADATQDIPALCHSTMTTCLPYVVALLAELNDPTSGVPPVTCVVADAIMSFAYDAARRIGVPCAALCTPSACGFVGYSHYRQLVERGLVPLKDAAQLADGYLDTVVDGARGMCDGVQLRDFPSFIRTTDRGDIMLNFIMREAERLTLPDAVILNTFDDLERPALDAMRAILPPVYTVGPLHLHVRHVVPKGSPLDTAIGSNLWKEQDGRPPRSVVYVNYGSITVMTNEQLLEFAWGLAHSGYPFLWNVRPDLVKGDAAVLSQEFLTAVEGRSMLTTWCPQEQVIEHPAVGVFLTHSGWNSTLESLCAGVPMLSWPFFAEQQTNCRYKRTEWGVGMEIGGEVERSDVAATIREAMEGEKGREMRRRAAEWKEMATRVTLPGGTADINLTRLIDEVLLSGGKKRQALDARD

SEQ ID NO: 6050 - protein, 480 aa, Ricinus communis
MVTESDQLHIFLFPLMASGHTLPFLDLARLFAQRGAKITIITTPANAPRITTIQTTKDSAAQISLKIINFPSKEAGLPEGIESLDMLSDYQLRGKFFAALTLLQEPLEQAIQELNPHAIVADVFFPWATDLAAKYGIPRLIFQISSFFSLCCFANLEEHQPHKNVSSDTELFSLSGFPDQIKFTRSQLPDSFTEENPNAFLRLIISTHEVEKRSYGVIVNSVYELELAYADYYRNTLGRRAWHIGPVSLCNKNFQEKSHRGKKSSIGEDDCMKWLDSKKPNSVLYVSFGTVTKFSDSQLHEIAIGLEASGQDFIWVVRTEGTEKDNEEKWLPDGYEKGMEGKGLIIRGWAPQVLILDHGAIGGFVTHCGWNSTLESICAGLPMVTWPIFADQFFNEKLITDILKIGVGVGVQKSKALVGDYVESEKIEKAVKEIMMGEKTEEFRTRANNFGEIARRAILDGASSYNDLGALIEELRSYQA

SEQ ID NO: 6051 - protein, 498 aa, Oryza sativa
MDDDTAGHASGGYTTTAAAHFVLVPMMAQGHAIPMTDMARLLAEHGAARVSLVVTPVNAARMAGFAAGVEEAGLPVQLVELPFPAAEFGLPDGCENVDMLPSKDLFSNFLLACGALREPFAARLRQQRPPASCIISDMIHSWAGDIARELGVPWLTFNGSCTFSSFARDIIYRKNLLENLTDDEIVKVSGFPTPLELPKARCPGTLCVPGLKQISDKIYEAETRSDGRIMNSFQEMESLYIESFERTIGKKIWTIGPMCLCHRDSNAMAARGNKASMDDAKCLQWLDSKKPGSVIFVSFGSLSSTDPQQLVELGLGLEASKKPFIWVIKAGKKFPEVEEWLADGFEERVKDRGMIIRGWAPQMMILWHQAIGGFMTHCGWNSTLEGISAGVPMITWPHCSEQFVNEKLVVDHLKIGVEVGVKGVTQWGTEQKEVKVTRTAVETAVSMLMDEGEVAQEIRMRAKDFGMKARRALEEGGSSYNNIKLLIQEMGNKQNASG

SEQ ID NO: 6052 - protein, 384 aa, Helianthus annuus
MPEKPDPSFYITYLNEHCADSFRDCLAGLLAEPHEPPVACLITDAEYYVTQEIADSLKVPRVVFWACTIVSVLVYHDLSFFYDKGYFNFTTKDPEYEVPVPKYPLLKVKDVIKTATNPYGMGKYLAKVMKQVKASSGIIWNSFKEPEEAILKILSHDFPIPTFTLGPLLKYLPLSTSGIIFEQDQTFFSWLDTQAPKSVIYVSFGSLAGITKSEFQETAYGLVNMNIPFLWVVRPGMVKGSEWIEWLPEKFLEEVGDRGRIVKWCPQKEVLAHEAIGCFWTHSGWNSTLESICEGVPMICSPCDVGQPIIARYVSDVWKIGILLEDGLEREGIKRELKRLMLDKEGEEIRCRIIALKDEVNISFHEGGSSHRSLQSLVAYIQSF

SEQ ID NO: 6053 - protein, 440 aa, Arabidopsis thaliana
MPWPGRGHINPMLNLCKSLVRRDPNLTVTFVVTEEWLGFIGSDPKPNRIHFATLPNIIPSELVRANDFIAFIDAVLTRLEEPFEQLLDRLNSPPTAIIADTYIIWAVRVGTKRNIPVASFWTTSATILSLFINSDLLASHGHFPIEPSESKLDEIVDYIPGLSPTRLSDLQILHGYSHQVFNIFKKSFGELYKAKYLLFPSAYELEPKAIDFFTSKFDFPVYSTGPLIPLEELSVGNENRELDYFKWLDEQPESSVLYISQGSFLSVSEAQMEEIVVGVREAGVKFFWVARGGELKLKEALEGSLGVVVSWCDQLRVLCHAAIGGFWTHCGYNSTLEGICSGVPLLTFPVFWDQFLNAKMIVEEWRVGMGIERKKQMELLIVSDEIKELVKRFMDGESEEGKEMRRRTCDLSEICRGAVAKGGSSDANIDAFIKDITKIV

SEQ ID NO: 6054 - protein, 491 aa, Arabidopsis thaliana
MASEFRPPLHFVLFPFMAQGHMIPMVDIARLLAQRGVTITIVTTPQNAGRFKNVLSRAIQSGLPINLVQVKFPSQESGSPEGQENLDLLDSLGASLTFFKAFSLLEEPVEKLLKEIQPRPNCIIADMCLPYTNRIAKNLGIPKIIFHGMCCFNLLCTHIMHQNHEFLETIESDKEYFPIPNFPDRVEFTKSQLPMVLVAGDWKDFLDGMTEGDNTSYGVIVNTFEELEPAYVRDYKKVKAGKIWSIGPVSLCNKLGEDQAERGNKADIDQDECIKWLDSKEEGSVLYVCLGSICNLPLSQLKELGLGLEESQRPFIWVIRGWEKYNELLEWISESGYKERIKERGLLITGWSPQMLILTHPAVGGFLTHCGWNSTLEGITSGVPLLTWPLFGDQFCNEKLAVQILKAGVRAGVEESMRWGEEEKIGVLVDKEGVKKAVEELMGDSNDAKERRKRVKELGELAHKAVEEGGSSHSNITFLLQDIMQLEQPKK

SEQ ID NO: 6055 - protein, 491 aa, Citrus unshiu
MKDTIVLYTSPGRGHLNSMVELGKLILTYHPCFSIDIIIPTAPFVTSAGTDDYIASLPPLPSTSSLLRFPAYSDTLRSPADFPALVYELGELNNPNLHETLITIFKRSKPQSLCYRFLLQPRVSRFPQVLLSIPYLLLLHLGGSGLAANLYLPTLHKNTTKSFRELGSTLLNFPGFPPFPARDMALPMHDREGKVYKGLVDTGIQMAKSAGVIVNTFELLEERAIKAMLEGQCTPGETLPPLYCIGPVVGGGNGENRGRDRHECLSWLDSKPSRSVLFLCFGSLGSFSSKQLKEMAIGLERSGVKFLWVVRAPAPDSVENRSSLESLLPEGFLDRTKDRGLVVESWAPQVEVLNHESVGGFVTHCGWNSVLEGVCAGVPMLAWPLYAEQKMIKAVVVEEMKVGLAVTRSEEGDGLVSSAELEQRVSELMDSEKGRAVKERAVAMKEAAAAAMRDGGSSRVALDNLVESFLFRNNNTNPSSNYSSTITSYTY

SEQ ID NO: 6056 - protein, 464 aa, Helianthus annuus
MVRPHVLLLPAPAQGHVIPATELGQRLVKQGAKVTVINTEATHMVITKNWLENEGCEDLMQMVSIPDGLEPWEDRNELGKLMESMEKSMPTKLEQLIETINKQDDNKVTCLIVDFWLAWALQVVKKMEIGRVIFCPASTATLATMLSIPKLIDDGVINNKGIPQNSEMIRLTEAMPPLKPEQLLWLGFIDSTSNEVHFQDHVRLIESTKITEWFICNSSVELEPAAFSLFPELLPVGPLLASNRLADQAGHFWAEDSTCLAWLDQQPACSVLYIAFGSFTTFNQTQFEELALGLELTNRPFLWVVRSGQTKETAITFPGGYTDRVGSRGKIVSWAPQQKVLAHPSVACFMTHCGWNSTLEGVTNGLPFLCWPYFGDQPYNETYICDVWKTGLRLKEDKAGMITQEGIKSKVEQLLSDKTFKSKAVDLKEKVASSVAEGGSSHTNLARLNDWIHGKDAHTDLNVN

SEQ ID NO: 6057 - protein, 466 aa, Vigna angularis
MEELHVLLVAFSAQGHINPLLRLGKTLLTRGLHVTLATTELVYHRVFKSSTADAATVPTSITINGIQVIFFADGFGTGQVKATLDSYMELIGKFGPINLSNLIETHFLNASKKLACIINNPFVPWVADVAANYNIPCACLWIQPCALYAIYYRFYNNLNDFPTLENPSMSVKLPGLPLLQPQDLPSFVLPSNPFGSIPKVLSEMLQHTKKLKWVLANSFHELEKDVIDSMAELCPITAVGPLVPPSLLDQDENEDVGIEMWKPQDSCMEWLNHQPPSSVIYVSFGSLIVFTAQQLESIAKALKNSKKAFLWVIKNKEGEEAVPLPEGFVEESKEQGMVVPWCPQTKVLSHPAIACFLTHCGWNSMLEAITTGTTMIAWPQWTDQPTNAKLISDVFRLGVRLTPGNDGFVATEEVERAIEQVFEAEEFKRNASELKRAAREAVAHGGSSDRNIQSFVDEIIGRKLDT

SEQ ID NO: 6058 - protein, 477 aa, Trifolium pratense
MKKAQLVFIPFPGLSHLVSTLELAKLLINRDNRLRITVLLIEFSRSKETDAYIQSLPISDSLNFIDLPECFVPPNTNPRAVFDALLEAQKPNVRQAVSDLINGEQHGPLAAFVVDMFCTTMIDVAKEFSVPTLIFFTSSIACLGLNLHIHTLREHDNVDPTQLLQQTKLAIPTFANLVPSYSLPSSVISKEWESLFMKYTGGLKKADGIIVNSFEELESYAVHSFSSHPGLAGLPIIYPVGPILTPEPKSKNVVESDDIIKWLDDQPPSSVVFFCFGTSGSFDEDQVKEIAYAIENSGARFVWSLRKPQPKGVMAAPSEYSRSDLSLVLPEGFLDRTTGIGRVIGWAPQTQILAHPATGGFVSHCGWNSTLESIYFGVPIATWPIYAEQQTNAFELVVELKLAVEIALDYKVEFNGGPNYLLTADKIERGIRSVLDKDGEVRKKVKQMSEKSRKTLEESGSSYAYLGLLVDYIMNQI

SEQ ID NO: 6059 - protein, 376 aa, Helianthus annuus
MTDHRKNKIMIVAYPNQGHINPSLRFAKSLVKMGVDVTFSTSVSVIRRIDMQTTHHSLTFAPFSDGHDDGQKSTTTFQQHYSDFATNGVYAVKEIISSAAATGQPFDDLVYTSAVPWAAKVAHAHNLKSTLLWCQPASVLDIYYYYFNGYEELISCNNNNPTFPINLPGLPSLTIADLPSFMWSSCPKEHKFIMDFMKDHVDVLKIFPRILVNTIDELEIDPIRAIEKVVMLPVGPLVPSELFEGSGPSNSPFSCDLFEKPIEDYIKWLNTKPKSSVVYVSFGSMATLSIEQVEEMASGLVESGRPFLWVIRDSGQVGKLSKIEELKKQGMIVSWCSQVEVLNHQAIGCFLMHGGWNSTMEALATGVPTVVYSQWC

SEQ ID NO: 6060 - protein, 352 aa, Cephalotus follicularis
PLCAIIDFLIGWTKGVFWKFNIPVIGLFTIGVCTAAMEWGAWKVNAGDLKPGETLPVPELPEEMSLTHSDMLRKSFGQPRGSSGPKQGGGGPPKLGDHPPWVPKIQGSIGLMFNACDYIDRTFIEYMANQMGMPAWGMGPLLPQQYWNSSGSLIHNRERQSNFTEDEITQWLDSKRKPRKSVSYVAFGSEVGPTMEEHPQLAGALEELDRPFVWVIQPESGGLDKKVDRGLIICGWVPQLLILSHKSMGGFLSHCGWNSTMEAIGRGIPFLAWPVRGDQYFNAKLVVSYHKVGYRVAHDLSLLITKDDILKGVERLMGDIQMKRRVVALSAQFEHGFPATSVTALDAFEDFI

SEQ ID NO: 6061 - protein, 482 aa, Oryza brachyantha
MPIKTEEAAASPARHAGGGDDDGRGRRRVLVFPLPFQGHVTPMLQLADALRSRGGFAVTVFLAPVPSSSSLLHRPAGYRFVTVGAGVAGAAAALIPSGTGGDFAGALMRLDALLRAPFEDCLRQELAADEDAAAGPVGGSNLRGMQEVAERLGVATLALRTRGACCLVAYMAFPELCGKGILPPPTSARRDQHQMDMQLDELPPLRLRDMMFSATTTHATMATCLERLLDSSRCSSGVILNTFNDLENSDLQKIANGLNVPVYAVGPLHKISIGEHNSLLTQDLSCLEWLDKQEAESVIYVSFGSLASMDPEEILETAWGLVDSQMPFLWVIRPNMVQGSLQVGLPDGFEEATRGSGMVVSWAPQQDVLKHQAVGGFWTHNGWNSTLESICDGVPMICRPQFADQMINARYVEEVWKIGFELEGKLERGMIERALRKLMCSEGGNEMRQRAKDLKKKATTCVEKGGSSKTAIDMLVNRIMSF

SEQ ID NO: 6062 - protein, 396 aa, Medicago truncatula
MGNFANRKSHAVFIPYPAQGHINPLFKLAKLIHLRGSHVTYVNTEYNHKRLLKSRGPTALDGFTDFSFETIPDGLTPLEGDGDVSQLPSLCQSIRKNFLKPFCELINRLNHSANVPPVTCLISDCCMSFTMQAAEEFSLPILLYFSSSACSLLNVMHFRSFVERGITPFKDERHLTNGYLETKVEWIPGSNLWKEDTECLEWLESNEPGSVVYVNFGSIIVMTPDQLLEFAWGLADCKKPFLWITRPDLVIGGSVVLSSEFMKEISDRGLISNWCPQEKVLNHPSIGGFLTHCGWNSTTESICAGVPMLCWPFFADQPTNCRFICNEWKIGMEIDTNVKREGLEKLINELMVGENGKKMRQKAMELKKKAEENTRPGGCSYMNLDKVIKEVLLKQN

SEQ ID NO: 6063 - protein, 475 aa, Medicago truncatula
METQPKEKSSPHVLIFPCPAQGHVNSMLKLAELLAIQNIYITFLNTKYIHNRLIQFNDDIQALLECYPKLQFKTISDFHSEEKHPGFGERIGDVITSLSLYGKPLLKDIIVSEKISCIILDGIFGDLATDLAAEFGIQLIHFRTISSCCFWAYFCVPKLLECNELPIRGDEDMDRIITNIPGMENILRCRDLPSFCRENKKDHIRLDDVALRTKQSLKANAFILNTFEDLEASVLSQIRIHFPKLYTIGPLHHLLNTTKKSSFPSSFFSKSNFFKVDRTCMAWLDSQPLKSVIYVSFGSTTPMKREEIIEIWHGLLNSKKQFLWVIRPNMVQEKGLLSELEEGTRKEKGLIVGWVPQEEVLSHKAIGAFLTHNGWNSTLESVVCGVPMICWPYFADQQINSRFVSDVWKLGLDMKDVCDRKVVENMVNDVMVNRKEEFVRSAMDIAKLASKSVSPGGSSYNNFQDLIQYIRSTSP

SEQ ID NO: 6064 - protein, 520 aa, Onthophagus taurus
MKTLTTITIVSIYFSVLLSASESAKILSLFPAPSYSHVIIGETLSEELARRGHQVTLITAYEPKKTIKNLNDIKLNGFKEQFDEEMKDFNFFDYLNINEFISTLTTYSFGYTMTKNFYEHERIQKIMKFNEKFDLIIVEHFFNEAVYGLCYHLKVPCVAVSAVATMIWSNRLTGNVGLASYVPQMTTTYSPKMTFFQRMHNLALYVYEEIVYHTFYIPKHNAIVQEHIPNAPHIYNLITNVSLLLVNSHPALGSPQIITPNVKEVGGIHVEGLKNVTLPDDIQKFLDNNKEVIYFALGSNAQSKDIPKETLNEIINGLKKWGKPVLWKFEDELPEKLDNVKIAKWFPQTAVLAHKNVVGFITHCGRLSSLESLYYGVPMIAIPLFAEQAHNAAEMVHYGFAVPVEFKTLKAEKLYKALVEITSNTKYTKEAQMRSKAIRKRNGMDEAVYWIEHVLEFKGASYLKNAGVDLPWYQFWMVDVVAVLIVSFLGINAFGAYLILKSLSHWGQYNSSQSRVIDIC

SEQ ID NO: 6065 - protein, 474 aa, Arabidopsis lyrata
MAPPHFLLVTFPAQGHVNPSLRFARRLIKTTGTRVTFVACVSVFHNSMIPNHNNVDNLSFLTFSDGFDDGGISTYEDRQKRTANLKVNGDKALSEFIEASRNGDSPVTCVIYTILLNWAPKVARRFQLPSALLWIQPALVFDIYYNHFMGNNSVFKLTNLSSLEIRDLPSFLTPSNTNKAAYDSFQEMMEFLIEETNPKILINTFDSLEPEALTAFPNIDMVAVGPLLPTEIFSGSAKSVEDQSSSYTLWLDSKTESSVIYVSFGTMVELSKKQIEELARALIEGKRPFLWVITDKSNRETKTEGEEETEIEKIAGFRHELEEVGMMVSWCSQIDVLSHRAVGCFVTHCGWSSTLESLVLGVPVVAFPMWSDQPTNAKLLEESWKTGVRVRENEEGLVERGEIRRCLEAVMEDKSVELRESAKKWKRLAIEAGGEGGSLDKNMEAFVEEICGDSHVQRLCEAEDVKVNDKRVGV

SEQ ID NO: 6066 - protein, 480 aa, Unknown
  Description of Unknown: Oryza sativa Japonica Group sequence
MAPAHAVTPHVVLLPSPGAGHVAPAAQLAARLATHHGCTATIVTYTNLSTARNSSALASLPTGVTATALPEVSLDDLPADARIETRIFAVVRRTLPHLRELLLSFLGSSSPAGVTTLLTDMLCPAALAVAAELGIPRYVFFTSNLLCLTTLLYTPELATTTACECRDLPEPVVLPGCVPLHGADLIDPVQNRANPVYQLMVELGLDYLLADGFLINTFDAMEHDTLVAFKELSDKGVYPPAYAVGPLVRSPTSEAANDVCIRWLDEQPDGSVLYVCLGSGGTLSVAQTAELAAGLEASGQRFLWVVRFPSDKDVSASYFGTNDRGDNDDPMSYLPEGFVERTKGAGLAVPLWAPQVEVLNHRAVGGFLSHCGWNSTLEAASAGVPTLAWPLFAEQKMNAVMLSSERVGLAALRVRPDDDRGVVTREEVASAVRELMAGKKGAAAWKKARELRAAAAVASAPGGPQHQALAGMVGEWKGRG

SEQ ID NO: 6067 - protein, 466 aa, Medicago truncatula
METPHVLIFPCPAQGHVNTMLKLAELLLIQNLHITFLNTEYIHNRLISLNIDDVKSISQCYPKLQFKTISDFQNKEKHPGFGENIVDVISSINMYGKPSLRDIIVSEKISCIILDGGFGDLATDLAAEFGIQLIHFRTVAASTVWIYFCMPKLLDCNEIPIRGDEDMDRIIRNVPGMENIIRCRDLPRFGTSNKMDHIILDKVLQLTQASLKGNAVILNTFEDLESPILSQIRLHFPKLYTIGPLHHHLNTMKKTTSSSFNSNFFKVDRTCMTWLESQPLKSVVYVSFGSTTTMTREEILEFWHGLLNSKKAFLWVIRPNMVQEKRLIKELEEGTSKEKGLIVEWAPQEEVLSHKAIGAFLTHSGWNSTLESVVCGVPMICWPYFSDQPLNSRFVSEVWKLGLDMKDVCDRNVVENMVNDIMVNKKEEFSKSATKMADLASKSVNPDGSSYNNLQDLIQYIRSTSP

SEQ ID NO: 6068 - protein, 469 aa, Zea mays
MAEGDGPTPARGARVVLFPLPSQGHLSPMLHLASALHARGLAVTVLHTAYNAPDPAHHPGLAFVAVPDVIPEAVAATTNGIAKILALNAAMEASGHVRGALASLLAEEAGGQRLACLIFDSTLFAAQKAAAGLGLPTLVLHTGSAAGFRLFRSDTYDMLHDRGYLPATESNLHMPVKELPPLQVRDLFDPSKLPNKEIVQKILDRATESTTNSSGAILNTFEDLESRELEMIRDELADRGIPPFAVGPLHKLTAAPSNDGADETSLLSQDRVCMEWLDARGPGSVLYVSFGSVVHVTPDEFVEIAWGLANSGAPFLLVVRRGLVLGVDKQELPDGFMAAVEGRGKVIEWAPQQEVLAHPAVGGFWTHNGWNSTLESIYEGVPMLSRPIFGDQLPTARYVCDVWRIGVLLEGVLERREVEKAIKKLMEEDEGVGIRGRAKDLKEKVRMCLESSGSSQLAVDQLVDHILSF

SEQ ID NO: 6069 - protein, 480 aa, Medicago truncatula
MGSLDITKNLSHVVCIPFPAQGHINPMLKLAKLLHFKGGFHVTFVNTEYNHKRLLKARGPNSLNGLPSFRFETIPDGLPESDVDVTQDIPSLCESTRATCSPHFKKLLSKLNNAIDTPPVTCIVSDGCMSFTLDAAQELNIPEVLFWTTSACGFMCYMQYRKLIEEGLTPLKDSSYITNGYLETTIDWVPGIKEIRLKDIPSFIRTTNPNDIMLDFLRGECQRAQKASAIIFNTFDNLEHDVLEAFSSILPPVYSIGPLHLLIKDVTNKELDSIGSNLWKEEPECLEWLNSKEPNSVVYVNFGSITVMTSEQMIEFAWGLSNSKMPFLWVIRPDLVAGENAVLPLEFLEETKNRGLLSSWCPQEEVLGHSSIGGFLTHNGWNSTLESVCGGVPMICWPFFAEQQTNCRFCCNEWGIGLEIEDAKRDKIEILVKELMEGEKGKEMKEKALQWKKLAHNAASGPHGSSFMNLENLIHDVLLK

SEQ ID NO: 6070 - protein, 236 aa, Rhodamnia argentea
MLKLKTTFDLAGPNLSDIIVDCQPNSLIFDYLLSWAPEVARSHDMPAINFTGVAAASSSYLLHSIKRSGHEYPFKRRKEEIVYELEPSNVDFIWVVKFPVEDHIKLEEALPKEFLERVRDRGLLIDGWAPQARIPTHPSVGGFGSHCGWSLIMEGMKFEVPIIAMSMDLDHPLNVRLVEGVRVGSEVLRNESGELEREDVAKVIKGAVVEEGGKCVRNKVKEVSAATRYKGDGRGK

SEQ ID NO: 6071 - protein, 462 aa, Ricinus communis
MSSCSHQKLAHIVLLPSAGMGHLTPFLRLAALLAIHNVKVTLITPNPTVSLSESQALIHFFTSFPHINQKQLHLLSIERFPTSSEDPFYDHMERICQSSHLLLPLLSSLSPPLSAVITDMTLAFAVIPITQALNLPNYVLFTSSAKMLALYLSFHAMIGSEPTIDLGDTDGIKIPSLEPIPRSWIPPPLLQDTNNLLKTYFIKNGKKMAESSGILVNTFDSIEHEVLEQLNAGKVIENLPPVIAIGSLASCESETKQALAWLDSQQNGSVLFVSFGSRTAISRAQLTELGEGLVRSGIRFLWIVKDKKVDKEDEEDLSQVIGNRLIERLKERGLVVKSWLNQEDVLRHSAIGGFLSHCGWNSVTEAVQHGIPILAWPQHGDQKINADIVERIVLGTWEKSWGWGGEVVVKGNDIAEMIKEMMGNDLLRAHAVQIREEARRAIADTGNSTKGLMGLIETWKKI

SEQ ID NO: 6072 - protein, 471 aa, Ricinus communis
MREETEYKGHVVVLPYPGQGHINPLLQFAKRLASKGVKITFATTHYTVNSICAPNVTVHAISDGFDEGGFAQAQEVDLYLKSFKANGSRTLSHLIQKFQDSNFPVNCIVYDSFLPWALDVARQHGIFGAPFFTNSAAVSSIFCRLHHGFLSLPLDVEGDKPLLLPGLPPLYYSDLPTFLKIPESYPAYLAMKLNQFSNLDMADWIFANTFEELESKVVGGVSKLWPAKLIGPMVPSSYLDGRIDGDKGYGASLWKPLGEECLKWLETKQPQSVVYISFGSMVSLTVKQMEEIAWGLKESNLNFLWVVRESEMDKLPKGFIDSTSDKGLIVRWCNQLEMLAHQAIGCFVSHCGWNSTLEALSLGVSMVAIPQWADQLPNAKFIEEIWKVGVRGKVDERGVVRKQEVIRCLKEVMEGKKSEEIKKHARKWRQVAERTFDEGGSSDKNINDFVEHLAFANKKEEAKAKALSGFH

SEQ ID NO: 6073 - protein, 326 aa, Unknown
  Description of Unknown: Oryza sativa Japonica Group sequence
MSAFATYVAGAVTAHKPHARVGSPSEPFEVDGLPGLRLTRADLNPPIDEPEPTGPLWDLACETKASMDSSEGIIVNSFVELEPLCFDGWSRMSPVKLWPVGPLCLASELGRNMDRDVSDWLDSRLAMDRPVLYVAFGSQADLSRTQLEEIALGLDQSGLDFLWVVRSKWFDSEDHFENRFGDKGKVYQGFIDQVGVLSHKSIKGFFSHCGWNSVLESISMGVPILAFPMAAEQKLNAKFVVDMLRVGLRVWPQKREDDMENGLVAREEVQVMARELIFGEEGKWASTRVSELAVLSKKAMEIGGSSYKKLEEMVHEISELTRDKSM

SEQ ID NO: 6074 - protein, 219 aa, Medicago truncatula
MECLTWLDKQQPCSVLYVSFGSGGALSQEQTDELAIGLELSNHKFLWVVRAPSSSACGAYLSAQNDVDLSQVLPSGFLERTKEQGMVIPSWAPQIEILSHISVGGFLSHCGWSSILESAMHGVPLITWPLFAEQRMNAFVLSEGLKVGVRPRVNENGIVERIEVSKVIKCLMEGEECEKLRNNMKELKEAATNALQEDGSSRKTVSQLAHKWKNLVHEN

SEQ ID NO: 6075 - protein, 480 aa, Barbarea vulgaris
MIELVFIPSPGIGHLKPTVKLAKQLIDNDDRLSITVIIIPPRNGAGDVAAYIASLSTTSHDNRLRYEPITVPAQPSSASIEPSQLYIEKQKPQVREAVTRRIVDSTTRRTRLAGFVVDMFCSSMIDVANEFNVPTYMVYTSNATFLGITLHVQLMYDEKKYDVSELDLDDDSVNELEFPCVTRPYPVKCLPHVLTSKEWSPFFLAQARYFRKMKGILVNTVAELEPQALKMFENSDDDHHLPQAFPIGPVLDIENGDEKESEILRWLDEQPPKSVLFLCFGSMGGFTEEQTREIAVALDRSGHRFLWSLRRASPNILMEPPRDYTNLDEVLPEGFLDRTSDRGKVIGWAPQVAVLAKPAIGGFVTHGGWNSILESLWFGVPMVPWPLYAEQKVNAFEIVEELGLAVELRRYFKGDLLAGEMDTVTAEDIEKAIKDVMEEDSDVRNRVNEMKEKCHVALMDGGSSKTALLKFIQDVIERMS

SEQ ID NO: 6076 - protein, 477 aa, Crocus sativus
MEKPHAICMPFPAQGHINAMLKVAKLLHFRGFHVTFVHTEYNSARIGSSNEMSPLLAADGFRFESIPDSLLPSINPTTKQDLPSLVLAVCNEFLSPFRDLMKRLNDPSGVPPVTCVSDCITGFTLEIAKEFGIPDLFLSSFSASGFMALFHLKELMEKGLVPIKSEDDLTNGYLDTPIDWMPGMKNMRIKDLPSFVRSTDPNDIFFNFSKDEIQSAFRADAIIINTFDDLEEPILDAMSSSLLPPIYCLGPLTQAMLAVDDNQLESINGNMWEEHTNCLAWLDQKSPGSVIYVNFGSITVMTSQHLVEFAWGLVKSGYEFLWIIRPDVVIGESSVLPKELLDETMKRGLVTSWCPQVDVLEHASIGGFLTHCGWNSTMEALSAGVPMICWPFFADQQTNCRYVCANWGVGTEIDVRVKREEVGERIREMMGGGKKGEEMRKMASKWKESASRTISPGGKSLENFEKVVKLLMKEKDG

SEQ ID NO: 6077 - protein, 450 aa, Medicago truncatula
MNFSGDDMCHVVAMPFPGRGHINPMLSLCKFLISRKPNNILITFVVTEEWLTFINADPKPEAIRFTTIPNVVPPEREKTLDSFHRFYEAAMTKMEAPFERLLDQLELPVNVIIGDIELRWPVDVGSRRNIPVAPLWTMSASFYSMLHHLEVFSRHQHLTHDKLENVPGISSLHIEDLRSVVRGNHPRAMQLSLECISKVTKANYLLLTTVQELEAETIDTLKSIFPFPIYPIGPAVPYLDLEGKKTKNTDHTHDYIKWLDSQPTESVLYFSFGSFHSASNAQTDEIIEALNNSDIRYLFVARGETSRLKDKCGDKGMVIPWCDQLKVLSHSSIGGFWSHCGWNSTLDTVFSGVPILTFPLAYDQFPNSTQIVDEWKNGWKVEKSSKLESDVVFAKEDMEELVKRFMDLESQEGKKIRDRARELKIMCRKAIGKGGSSDRNLDAFISDIFS

SEQ ID NO: 6078 - protein, 472 aa, Medicago truncatula
MERKTHIAVVSVPIVSHQIAISEFIKKLLNLHPNKFHITLIIPVLDSLSNASKSIIASLSSLNVDTIVLPPINLPPQTVPTLKLPLSMSLTMPYIIDALKTKTSKLVAIIADYFAYEVFSFAKKLNILSYTYFPSSATVLSLCFHSKVLDETISGEFKDLQEPIKIPGCVPIQGTDLPSSFQDRNSESYNHFLLRSKGINLCDGILVNSFVELESQAVKALIEESINVSHPPVYMVGPIIQQNCDNTQNESQCLSWLDEQKPNSVVFVSFGSGGTISQNQMNELALGLELSSQKFLWVVREPNDIASAIYFDVSNSKKDPLSFLPKGFLERTNKQGFLVSNWAPQVEILSHKAIGGFVTHCGWFSTLECVVNGVPIVAWPLFAEQRMNATILADGIKIAIRPTIDNVSGVVEKVEIVNVLKRLIVDEGIEIRRRMKVLKDAAANAMKVDGSSIITMSQLVTKWTKMEGFDEN

SEQ ID NO: 6079 - protein, 478 aa, Cephalotus follicularis
MTKTELIFIPAPGAGHLVSTLEFSKRLIERDDRISITVLVVKFPIATFLDVYTKSLCASQPRIQLIDVPPVDPPPPTLMQKSIELYVCSFIESCIPNVKNVVKNIVASSDSSSGSVQVAGLVLDFFCVSMIDVANEFGLPSYMFLTSNAGFLDLMLYLPTRHNQICSEFEETDPEILMPGFANPVPPRVLPDALFNKEGGYSSYVKLAQRFKDVKGIIVNTFVELESYTVDSFSHAQIPPVYPIGPVLELKGQPHLDKNQAEYDRIMKWLDDQPQSSVVFLCFGSLGSFEVPQVREIALGLEQSGYRFLWSMRVPPTKPEASLTSHSTNYEDMLPEGFLKRMKGRGMTCGWAPQVEVLAHKSIGGFISHCGWNSILESLWHGVPIVTWPLYAEQQLNAFKMVKELGLAVELRLDYRSKDGQLVMGDDIERAVRCLMDGDEELRKKVTDMSKMGRKALLDGGSSFISIGQLIEDMIGRS

SEQ ID NO: 6080 - protein, 477 aa, Vigna radiata
MAEEEGEAGGHHVLLLPGPMQGNVNSMMKLAQLLALHHFHITFLTTDFIHRRLYRFADIHSLSQTYPNLEFKTISDGLPDDHPRSGNNALADLYSSMNSFAKPLLRDIILSQTAAKSKITCLIGDGFLGGLTADVADEVGIPLIHFRAISASCFWALFCAPNLFESNELPIRGEEDMDRIISNLPGMENILRCRDLPSFYRGTETNLVDPLKSTVFDCHQTLRARGVILNTFEDLDGPLLSQMRLKFLRVFAVGPLHAHAKTTPSTSSFWEEDRSCLTWLDSQPLKSVLYVSFGSIATVTRERLMEFWYGLVNSKKRFLWVIRPDMVAGEDNDERVAAELEEGTKERGFIVGWAPQEEVLAHKAIGGFLTHSGWNSTLESLVAGVPMICWPCFADQQINSRFVSEVWKVGLDMKDLCDRDVVEKMVNDLMVHRREEFLKSAQAMATLAHKSVSPGGSSYSSLHDLVEFIKSASRKIN

SEQ ID NO: 6081 - protein, 477 aa, Gardenia jasminoides
MEKFKLMMMVSPLMGHLTQALELAKLMLARNDQLSITALIMELPIDPDGTAKIQSLIAATNVEGLHFHHLSTPEDTSDWNITHRGLFVLKLLEYQKPRVREIASKTQKLSGFFIDLVTTTMIDVADELGVPTYLFCTSGAAFLGLMLHFQTLEDEQNQDITELVKKESHLTLPSFVKPVPVSVLPTIATKKEFWSNVFLKCTRDYRRAKGIMVNTFTELESTAISSFSLDSYYGKSRLPPIYPVGPILNRSQIQNQSSEDYSALMKWLDCQPENSVVFLCFGSLGSFHLDQVQEIAYGIERIGHRFLWVLRQPPAEKGGFPREYENLELVLPEGFLDRTASIGKVVGWVPQLAVLSHSAVGGFVSHCGWNSTLESIFCGVPIATWPIQAEQHLNAFQLVKELGIAVDIGLDYNKERENQALVRAEQVEKGIREIMDGENEVRMRIKEFTEKSRVAAEEGGSSYLALENIIQDICSRS

SEQ ID NO: 6082 - protein, 485 aa, Helianthus annuus
MATTTVELIFIPLPVIGHMKSTIEIAKLLKNRDQRLSITVLIMQPPSGLRTGSAIATYIESLADKSTQRMRYITLPQPETLPTRDPKAPMTFVNDYINTHCKHVTNVVTEIISQSGSDKLSGFVVDMLCPGMIDVANGFNVPTYVFVTSSAAYLGFELYIQTLCDDQNQDVVELTNSDGVVKVPGFVNPVPTKVFPSGYDTKEGVDYVLLISRKLREAKAIMVNTFLEFETHAIESLTSDKSVPGVYPVGPVLNPVGGDNENSDSDVIKWLDSQPRSSVVFFCFGSLGCFNEVQVKEIAYALERSGHRFLWSLRQPPSPEQASRHSGDYEDPGVVLPEGFLDRIGESGKGKVIGWAPQMAVLAHSAVGGFVSHCGWNSVLESMWFGVPMAAWPIYAEQQMNAFEMVVELGLGVEIKLDYKKDMYNPKNDIVTTEEIESGIRRLMDDDEMREKMKDMGNMSRLTVRKGGSSYASVGLLIQDFIGNA

SEQ ID NO: 6083 - protein, 509 aa, Unknown
  Description of Unknown: Oryza sativa Japonica Group sequence
VDSRRCFFAGGEMGSLPAAAEARPHAVMVPYPAQGHVTPMLTLAKLLYSRGFHVTFVNNEFNHRRLLRARGARALDGAPGFRFAAMDDGLPPSDADATQDVPALCHSVRTTWLPRFMSLLAKLDDEAAAAAAADGAARRVTCVVADSNMAFGIHAARELGLRCATLWTASACGFMGYYHYKHLLDRGLFPLKSEADLSNGHLDTTVDWIPGMTGDLRLRDLPSFVRSTDRDDIMFNFFVHVTASMSLAEAVIINTFDELDAPSSPLMGAMAALLPPIYTVGPLHLAARSNVPADSPVAGVGSNLWKEQGEALRWLDGRPPRSVVYVNFGSITVMSAEHLAEFAWGLAGSGYAFLWNLRPDLVKGDGGAAPALPPEFAAATRERSMLTTWCPQAEVLEHEAVGVFLTHSGWNSTLESIAGGVPMVCWPFFAEQQTNCRYKRTEWGIGAEIPDDVRRGEVEALIREAMDGEKGREMRRRVAELRESAVAAAKPGGRSVHNIDRLIDEVLMA

SEQ ID NO: 6084 - protein, 478 aa, Unknown
  Description of Unknown: Oryza sativa Japonica Group sequence
MQPRAASEMSQESAAAAATGMAPAPAKAQPHVLLVSSPFQSHVNPLLRLGRRLAGKGLSVTFTTALRDGIRVFDDGDGGGGGVRVERLRGGGMWEPDDPRLRIPGDMARHVEAAGPAALEELIRREAEAGRPVACVVANAFVSWAVRVAGDVGLPCAILWIQSCAVLSVYYHYVYSLAAFPSGDEADSSGAVTIPGLPELDMDELRPLRIYTSDQEMWRQMLVGDLGSMTEKAPWVFVNTFDELEHEAVAGLRKHIPLIPVGPLVEPDDGGVDDDDVHGCTAWLDAQPRRSVVFVAFGSLVDIGHDEVVEIAEGLASTGRPFLWVLRDGNRALLPKDALIDACGGDRGKVVPWCEQRRVLAHAAVGCFVTHCGWNSTAEALAAGVPMVASPRWSDQRINTRFVVDVYRVGVRAPATPLTREALRLSVEEVTAGPEAEAMAARAAILGENARAAVGGGGSSDRGVQAFVDRITSGGAEP

SEQ ID NO: 6085 - protein, 256 aa, Cephalotus follicularis
MDLEPGAIKALQEEPGCPPIYPVGPLVRTDSSDTVGDGSHCIRWLVDQPRGSVLFVSFGSGGTLSRDQQIELALGLEMSGQRFLWVVRSPNDESAKAAYFSVSSQNDPLNYLPDGFLERTKGRGLVVPSWAPQAQILSHDSTSGFLTHCGWNSTLESIVNGVPLIAWPLFAEQKMNAVMLTEDIKVALSPKFDENGLVVREEIAKVVNILMEGEEGKQIGIRMQHLKEATVKALKQEGSSAKALSELALNWKNLTV

SEQ ID NO: 6086 - protein, 522 aa, Spodoptera exigua
MEKFKCLLFFVVVSLCSCDAYKILAVFPMPSPTHGILGDNMVKHLLNAGHEVTYITPFASKQKSNPKLHIVDVTDHHNFFNTDLLDITQILAGSMNFKDPNFVFSMMMNIAAMTLEHRDVQKLMKDPQQKFDVIIGEYMFADLYSTFPAVFQCPYIWFSTIEPHWMIVNLVHGPMNPAYNGDYMHANIPPFSFMQRVQELWILLTGLYRHNNEYYKREEEVYQKHIVPILKEQGKPVPDYKVLKYNASLLLGNSQVAIGNAVPLPPSYKHIGGYHIEDEVKPLPEDLKKIMDNAKNGVIYFSLGSNLKSKNLPDELKKGLLEVFGGLKQTVLWKFEENLPNQPKNVHIVQWAPQQSLLAHPNLALFVTHGGLLSLTEAVHFGVPVIAIPVFADQFLNANQAQHKGIGEKVDLTYNLHKDLKIALDKVLADLPRYTARMKELSTAYHDSPMKPKEALNFWVEHVVRTRGAPHLRSVALQVPLYQQAYLDLLVVLLAAAVAILLLVKKILCYFKSQKSIKQKEN

SEQ ID NO: 6087 - protein, 458 aa, Panicum hallii
MAGREQHGDGVRRRRVVLFSLPFQGHLNPMLKLAALLRARGLGVTVLHTGFNAPDPARHPEVDFVPIHETLPDEATSPDSDILRKLLALNAACEAPFRAALASLLRGGGGGHRQDVACAVVDGQCYAAMGAAAQLGVPALALRTDSAAAFRNMLACPRLRDACYIPIKEEQLDEPVPDLEPLRVRDLIRVDGCDTDELCGFVASVADGVRASVSGIVINTFEAIEASELAKIQRELSLPAFAVGPLHLLFQTPPAEQSLHEPDHGCLAWLDAHPPRSVLYVSLGSLACVDHGVFEEMAWGLAGSGVPFLWVVRPGSVSGAGDEAPPLPDGFEEEIRGRGKIVKWARQREVLAHEAICAFWTHCGWNSTLESICEGVPMLVQPCFADQMVTARYVTHEWGVGLEVGEVLERGTVAKAVTEVMAGEDGAQMRERAHRLQMQASAATSSAMDSLIRFILSL

SEQ ID NO: 6088 - protein, 491 aa, Unknown
  Description of Unknown: Oryza sativa Japonica Group sequence
MGSIAADGDKPHAVCMPFPAQGHVTPMLKLAKILHHRGFHITFVNTEFNHRRLLRSRGAAALDGLPGFRFAAIPDGLPPSDADATQDVPPLCRSTRETCLPHFSRLLADLNANASPESPPVTCVVADDVMSFAVDAAREFRVPCALFWTASVCGYMGYRYYRSFLDKGIFPLKEEQLTNGFLDAPVDWTPGMSKHLRLKDFPSFFRATDPDEYMFHFALHVTERLAEADAAVLNTFDELEPEALDAMRAMLPPSVSIHTIGPLGFLAEQVVPKGSPLDALGSNLWKEDDSCFGWLDGKPPRSVVFVNYGSVTVMTNEELVEFAWGLANSGHDFLWIVRPDLIHGDAAVLPPEFMESVGGRGLLASWCPQEAVLRHEAVGVFLTHSGWNSTVESLCGGVPMLCWPFFAEQQTNRRYSCTEWGVAMEIDDDVRRDAVEAKIREAMGGDKGREMRRRAGEWKETGLRATRPGGRAHASLDALVADVLLSGGKAR

SEQ ID NO: 6089 - protein, 635 aa, Trifolium pratense
IHFVLLISRQGKVRLTKWYSPYTQKERSKVIRELSGVILSRAPKLCNFVEWRGHKVVYKRYASLYFCMCIDDTDNELEVLEMIHHFVEILDRYFGSVCELDLIFNFHKAYYILDELLIAGELQESSKKTVARLIAAQDSLVETAKEEASSLSNIIAQATKMTKVEVVFIPSPGLGHLTSTLEFAKLLINRDNRLSITVLVIKFPNTGGETIKTISSSFDSENLHVINLPDCAHVSSTSDVGNSVNTLIETQKSNVKEVVSNITAKGKLAVFVVDMFCTTMIDVANEFGVPSLVYFTSSVAFLGLILHLHTLLEDNSEALRLSLKQDELDIPCFANPVPTNTLPTLVLRKEWESSFFNYGGGLKKANGIIVNSFHELEPHAINSFLEDPGLRGLPVYPVGPVLNLETKPKETVDSDNIIKWLDDQPPSSVVFICFGSVGAFDKDQVREIACAIEKCGTRFLWSLRKPPPNGTMGPASDYPLSDLAAVLPEGFLDRTAEIGKVIGWAPQVQVLAHPATGGFVSHCGWNSTLESIHYGVPIATWPLFADQQTNALELVSELKMGVEIALDYRMEYDVGRDYLLTADKIEKGIRNVLDKNGEVRKKVKDISEQSRKTSLEGGSSYTCLGRLIDYIVNQV

SEQ ID NO: 6090 - protein, 478 aa, Sinningia cardinalis
MGQLHIVFLPFMAHGHMIPMLDMAKLFNSCGVKTTIISTPAFAEPVRRAQESGIDIGLSTIKFPPEGSDLPDNFVSLDQTMATEDLISNFVKALDLLQEPVEKLLEEFNPNCLVSDMFLPWTTDSAAKLGIPRLVFHGVSTFALCAMEQMKRHKPYKNVSSDSEPFILPNLPHQLKFTRTQVSQHELEETENDFSKLLKQMREAEERSYGVVINSFYDLESDYADHYRKALGRRAWLIGPLLFRNSGNVDKTQRGKKSAIDEHECLAWLDSKKPNSVVYMCFGSMARFTAAQLHETAVGLEASGQDFIWVVRKGKNEDENEDWLPEGFEERTKGRGLIIRGWAPQLLILDHPSIGAFVTHCGWNSTLEGVCAGVPMVTWPIFAEQFFNEKLVTEVLKIGVSVGNRQWCRRASEGVPSKAVATAVQAVMVGEKALEMRNRAKSYQELARKAVEQGGSSDNDLNALIQELSAYPLSRKQD

SEQ ID NO: 6091 - protein, 464 aa, Vigna angularis
MEKPHIVVVPSPGFTHLVPILEFSKRLLHLLPHFHITCFIPSLGSPPSSSKAYLQTLPSTITSIFLPPINLEQKTDPSVLALQIELSVNLSLPYIRQELKSLCSRAKVVALVVDVFANGALDLAKELNLLSYIYLPQSAMLLSMYFYSSKLDEILSSESRDPQEPIKIPGCVPVLRKDFPLPFQNLSGIGYKGFLERSKRFHIPDGIFMNTFLGLESEAITTLHEHVKGKPGIYPVGPIIQMGSIDHENGVECLRWLDKQEPKSVLFVSFGSGGTLSQDQLNELAFGLELSGQKFLWVVRVPSFEVSSAYFGAEDKDPLQFLPQGFLERTKQQGLVVPYWAPQIQVLGHSATGGFLSHCGWNSVLESVVKGVPVIAWPLFAEQSLNAAILTDDLKVALRPKVNHSGLREREEISKVVIGLFQEKEGKEIRQRMELLKFSAANAIKEDGSSTRTLSELVASFRDF

SEQ ID NO: 6092 - protein, 494 aa, Unknown
  Description of Unknown: Oryza sativa Japonica Group sequence
MPTASPAHAVFFPYPVQGHVASALHLAKLLHARGGVRVTFVHSERNRRRVIRSHGEGALAAGAPGFCFAAVPDGLPSDDDDDGPSDPRDLLFSIGACVPHLKKILDEAAASGAPATCVVSDVDHVLLAAREMGLPAVAFWTTSACGLMAFLQCKELIDRGIIPLKDAEKLSNGYLDSTVVDWVPGMPADMRLRDFFSFVRTTDTDDPVLAFVVSTMECLRTATSAVILNTFDALEGEVVAAMSRILPPIYTVGPLPQLTAASHVVASGADPPDTPALSAASLCPEDGGCLEWLGRKRPCSVLYVNFGSIVYLTSTQLVELAWGLADSGHDFLWVIRDDQAKVTGGDGPTGVLPAEFVEKTKGKGYLTSWCPQEAVLRHDAIGAFLTHCGWNSVLEGISNGVPMLCYPMAADQQTNCRYACTEWRVGVEVGDDIEREEVARMVREVMEEEIKGKEVRQRATEWKERAAMAVVPSGTSWVNLDRMVNEVFSPGNNM

SEQ ID NO: 6093 - protein, 484 aa, Prunus persica
METKSHEQLHIFFFPYMAQGHSIPLIDIAKIFASHGVKSTLITTPLNAPLFSKAIQSSKELGFKIELIVIRFPTEEVGLPPGCESTNLATTKEMKEKFFRATTLLRPQLEQILDQQRPHCLLADTLFPWATDVAAKFGIPRLIFHGTGFFPLCASLSVILYEPHLKVSSDSEVFTLPNFPVEIKLTGSQIPAFLKKKVETEFTKLFEASKACEERSYGVIVNSFYELEPVYADHYRKVFGRKAWHIGPVSLCNKAALDKAEMRGMEASLDEHECLNWLNSKKPNSVVYICFGSMTNFSDPQLFEIALGLEASGREFIWVVKKEKKEKEEWLPEGFEKRMEGKGLIIRGWAPQVLILEHEAIGGFVTHCGWNSILEGVSSGVPMITWPVSAEQFYNEKLLTEILRIGVAVGVQQWATFVDVKQEASVKSEAIKKAVTEIMVGDEAEEIRSRAKALREMARKAVEEGGSSFSDLTALIEELKSLRA

SEQ ID NO: 6094 - protein, 245 aa, Triticum aestivum
MELTWRAITVGPTLPSFYLDDDRLPSNKSYGFNLFGSDAPCMDWLEKQSISSVVLVSYGTFSNYDATQLDELGNGLCNCGKSFLWVVRSNEAHKLSEELRKSCEKNGLIVSWCPQLEVLAHKAIGCFVTHCGWNSTLEAVVCGIPLVGIPHWADQPTIAKYVESAWGMGVRVQKSESGSLRSAEVERCIRDVMDGERKDDYKRNAMKWMQKAKEAMQEGGSSDKHIAEFAAKYFQQCNLYFKISK

SEQ ID NO: 6095 - protein, 482 aa, Oryza sativa
MAKPTVVVLPVWGAGHFMPMIEAGKRLLRGSGGALSVTVLLMPAPTPDAAVDIAAQVKREEASGADDISFRHLPAVDMPTGHTGVEEWISRILRSHAPNVRAAIAGLDCPVAALVTDIFCTPALEVSRELGVPGYVYFPCSASMLALLLRSPGLDEEVAVEFEEMDGAIRIPGLPPVPPSALPSTMLDRKKSTYDWFVATGRGYMNATGFIVNTAAELEQSVIDAIADGRCTRGVPAPTVYPIGPVLYFPPPPEEQPHECVRWLDAQPPASVLFLCFGSKGLLPPPKVREIAAALGRSGGHRFLWVLRGPPKDSRHGQRVPTDAMLDELLPEGFLERTKGRGLVWPTRAPQKEILAHAAVGGFVTHCGWNSILESLWFGVPVLPWPLDAEQHFNAFTLVAHLGVAVPLGMDRRRDNFVEAAELERAVRSLMDDASEEGRKARAKAAETRVVCRKAVEEGGSSSTAFRRLTDDIVRRGAVQIR

SEQ ID NO: 6096 - protein, 488 aa, Citrus unshiu
MASEASQVHFLLLPYLAPGHLIPMFDIARLLAQHGAIVTIVTTPVNAARFKTVIARAIKSGLQIRLIEIQFPWQEAGIPEGCENCDLLPTTDFARFMKSLHMLQQPFENLFKEKTLKPCCIISDMCFPWTVDTAAKFNVPRIIFHGFSCFCLFCHHLLGVSKVHENVTSDSEYFNIPGLPDHIEFTKVQLLISKRDDDRKELREQILAADKKTYGAIINTFEELESPFIENYKKAKQGKVWCIGPASLCNKEPIDKAERGKTASIDVPECLTWLDSQQPSSVVYVCLGSICNLPSSQLIELGLGLEASNKPFVWVIRGGSKLEALEKWLVQENFEERIKGRGLLIRGWAPQVLILSHPAVGGFLTHCGWNSSLEGISAGVQMLTWPLFADQFCNEKLIVNVLRIGVSVGVEVPMNFGEEEKIGVLVNKENVKTAINILMDDGEERNARRSAREFGELAKRAIDEGGSSYNNVELFMQDIMQQPSSEGI

SEQ ID NO: 6097 - protein, 484 aa, Cephalotus follicularis
MSSLILSEKPHAVCIPFPAQGHINPMLKLAKLLHHKGFHITFVYTEFNHKRLLKSRGANSLNGLSSFRFETIPDGLPPSDVNATQDIPSLCESTSKTCLAPFRKLLSKLNDTSSSNVPPVIFIISDGVMTFTLDAAEELGIPEVLLWTASACGYLAYVHFRQLIDRGYVPLKDTSSLTNGYLDTEIAYIPGMEGIRLKDFPSFIRTIDSNDIMLNFIPVETERAKRASAIIINTFVAMEDQFLSVLSSMLPPIYSIGPLQLLLNDLPDTDLKHFGSNLWKEEPECLEWLDSREPNSVVYVNFGSITVMTPDQLVEFAWGLANSKQVFLWIIRPDLVSGDSAILPPEFLAETKDRGLLAGWCPQEQLLNHPAIGGFLTHCGWNSTIESVCGGVAMICWPFFAEQQTNCRYCCTEWGIGMEINSDVKRDEVEILVRELMEGEKGKEMKKKAMEWKKLAEESTTSPNGSSYKNFEELIHQVLLSTTD

SEQ ID NO: 6098 - protein, 465 aa, Zostera marina
MGSHQPQPPPPLHVAILPNPGMGHLIPLAEFAKLLTTNYGITVTFLTLDDSPRINSFIDALPDTITYIPLLKPSLHDLPPGSKAETYISLIMSRCLPSLREVMVKLKATTNLVALIVDLFGTDAFDVATDLEVSPYIMFPSTATLLNFMFHLEDLDRTIQGEYRDHPQLIRIPGCVPFHGKDLLVPVQDRNDQAYSLFLDISTRYKEAAGIFFNSASSIEPGPIKELMSMDRPPVYPIGPLVHDTNSEDDNSGCVKWLDERRPGSVLFVSFGSTGRLTAEQFTELAVGLEMSGYGFLWIARSPKETGEKGFFNVKSKSDPLLFLPDGFLERTKEIGLVVDSWAPQLAILKHAAIGGFLTHCGWNSSLESIVHSVPMIAWPLYAEQKMNATMLVEELKIAIRPVVDEKRGLIGREEISRVVREVIEGEEGKKLRLNVKRIAENAINENSYKSLDAVVNIWKNSTSI

SEQ ID NO: 6099 - protein, 468 aa, Vitis vinifera
MEETPHIAILTNPGMGHLIPFVELAKRLVLSHNFSVTCIVPTIGSPSKAQETVLKCLPHGISYVFLPAVSFDDLKEDVRAEIKVSLTMSRSLSPLREVLKSIMIRTRLVALIVDPYGTDAFDLAEEFGVPSYIFFMSNAMALSFCLHLPKLDEMISCEYRDLPEPVKIPGCIPVQGRDLMDPVRDRKNEAYKGFLHHVKRFTLAEGIIVNSCMDLEAGAVRALQDGGLVKPPVYPVGPLVRTWSRIGDDDDSECLRWLDGQPDGSVLYVSFGSGGTLSYDQVNELALGLEMSEQRFLWVLRTPNDRSSNAAYLTNQSQNDAFDYLPKGFRDRTRGQGLILPSWAPQIKVLSHSSVSGFLTHCGWNSTLESIMCGVPLIAWPLYSEQKMNAVMLTEGLQVALRPEVNKSGLVQREEIVRVVKDLMTGGHGVRIRAKELKEAATKALCDDGSSSKALLEFVLACKNKIGR

SEQ ID NO: 6100 - protein, 468 aa, Unknown
  Description of Unknown: Petunia x hybrida sequence
MVQPHVILTTFPAQGHINPALQFAKNLVKMGIEVTFSTSIYAQSRMDEKSILNAPKGLNFIPFSDGFDEGFDHSKDPVFYMSQLRKCGSETVKKIILTCSENGQPITCLLYSIFLPWAAEVAREVHIPSALLWSQPATILDIYYFNFHGYEKAMANESNDPNWSIQLPGLPLLETRDLPSFLLPYGAKGSLRVALPPFKELIDTLDAETTPKILVNTFDELEPEALNAIEGYKFYGIGPLIPSAFLGGNDPLDASFGGDLFQNSNDYMEWLNSKPNSSVVYISFGSLMNPSISQMEEISKGLIDIGRPFLWVIKENEKGKEEENKKLGCIEELEKIGKIVPWCSQLEVLKHPSLGCFVSHCGWNSALESLACGVPVVAFPQWTDQMTNAKQVEDVWKSGVRVRINEDGVVESEEIKRCIELVMDGGEKGEELRKNAKKWKELAREAVKEGGSSHKNLKAFIDDVAKGF

SEQ ID NO: 6101 - protein, 469 aa, Citrus unshiu
MSSSNTRTTHILIFPYPAQGHMLPLLDLTHQLSLKDLDITILVTPKNLPILSPLLDAHPAIKTLVLPFPSHPSIPPGIENVRELGNRGNYPIMTALGKLYDPIIDWFRSHDNPPVAILSDFFLGWTLKLAHQLNIVRIAFFSSAWLLASVADYCWHHIGDVKSLDVVEFPDLPRYPVFKRRHLPSMVRSYKESDPESEFVKDGNLANTSSWGCVSNSFDALEGEYSDYLKRKMGHDRVFGVGPLSLVGLESSCGGDPGLGPNDHVTKWLDGCPHGSVVYVCFGSQKALKRDQMEALASGLEKSGIRFLWVVKTGMIGKGDDGYGSMPDGFEERVAGRGLVLKGWAPQVSILSHKAVGGFLSHCGWNSLLEGIVGGVMILAWPMEADQFVNAKLLVEDLGVAVQVCEGADSVPDSDELGKVIAESLSQRDEVKVRAKELRDDALAAVKSDGSSARDLDRLVEELRNLHAK

SEQ ID NO: 6102 - protein, 795 aa, Medicago truncatula
MEKTVHIAVVPGVGYSHLFPILQFSKLLVQLHPYFHVTCFIPSLGSLPTDSKTILETLPSNISCTFLPPVNSNDLPQGVALALQLQLTLTHSLPSIHQALKSLTLRAPFVALVVDALAIDALDFAKEFNLLSYVYYPASVTSLSSYFHLLKLDKETSCEYRDLPEPIQIPGCVPIHGRDFLDLAQDRSSQSYKFFLQCVEKFRLFDGVLINSFLEIEKGPIEAMTDEGSENLLVYAVGPIIQTLTTSGDDANKFECLTWLDKQCPCSVLYVSFGSGGTLSQEQIDELALGLELSNHKFLWVVRAPSSTANAAYLSASDVDPLQFLPSGFLERTKEQGMVVPSWAPQIQILSHSSIGGFLSHCGWNSTLESVVYGVPLITWPLYAEQRTNAVLLCEGLKVGLRPRVNENGIVERVEIAELIKCLMEGEEGGKLRNNMKEFKEAASSVHKEDGSTTKTLSQLALKWSNFGIEKQLFQVLGIYPFSLYSSILNAGFFKQIKNSKEGFSVNAEYFGKAIISKTSNGSISGSSQDYKHFLQHVKSLSFADGVLVNSFLEMEMGPIKAPTEEGSGNPSVYPVGPIIDTVTCSDRDANGLECLSWLDKQQSCSVLYVSFGSGGTLSHEQIVQLALGSSSSAAYLSAQNDGDPLKFLPSGFLERTKEKGFVITSWAPQIQILSHSSIGGFLSHCGWNSTLESVVHGVPLITWPMFAEQGMNAVLVTGGLKVGLRPRVNENGIVERVEVAKVIKCLMEGEECEKLHNNMKELKGVASNALKEDGSSTKTISQLTLKWRNLVQEN

SEQ ID NO: 6103 - protein, 246 aa, Syzygium oleosum
MDRVLESIRRSEGAILIKTCREIEGKCVDYLAELVGKEVIAVGPLIQEPAGGDARDDEGEILGWLEERESGSVVFVSFGSECFLSKEEMEEKVSIVEALPEGFLERTKDRGMVVQGWAPQAKILMHPSTGGFVSHSSWRSTLEAIVFGVPIIAIPMHLDQLLNAKLVADLGVGVDVRREDGRFPVEDVAKVIKQVVVREEGEEVRRRAKELSARIRERQEEETSTVMKKLERLFGGTTFNLGQTVT

SEQ ID NO: 6104 - protein, 482 aa, Solanum tuberosum
MDNGSKQLHVLFLPYFATGHIIPLVNAARLFASRGGVKVTILTTHHNASLFRSSIDNSLISIATLKFPSTEVGLPEGIENFSSASSTEIASKLFGGIYLLQKPMEDKIREIHPDCIFSDMYFPWTVDIALELKIPRLLFNQSSYMYNSILYNLRLYKPHEYSKSSNFSVPGLPDKIEFNLSQLTDDLIKPADERNGFDELLDRTRESEDQSYGIVHDTFYELEPAYADYYQKMKKTKCWQIGPISYFSSKLFRRKDLINSFDESNSSAAVVEWLNKQKHKSVLYVSFGSTVKFPEEQLAEIAKALEASTVPFIWVVKEDQSAKTTWLPESLFDEKKGLIIKGWAPQLTILDHSAVGGFMTHCGWNSVLEAIIAGVPLVTWPVFAEQFYNEKLVEVMELGVKVGAEVHNSDGCVEISSPVLRSEKIKEAIERLMESQKIREKAVSMSKMAKNAVEEGGSSWNNLTALIDDIKNFTSSSLKIMD

SEQ ID NO: 6105 - protein, 482 aa, Theobroma cacao
MEPGKSQAPSPHILIFPLPIQGPVNAMLKLAELCATAGLKVTFLNSEYNHSRLVRFANIPSRFDKYPGFEFRTISDGLPGDHSRSGNRFMEIFEAMNIRTKPLLKDMLVEMIPPVDCIIGDGILEFVLDVANELGIPIINCRTIGACFLWSNYSIPDMIEAGELPIKGSEDMDRPITAVPGMEKFLRCRDLPSFCRASNMSDSTLLRYGTVTRKSFTASGVILNTFEELEGPILSQIRSKCPNVYTIGPLNEHFKTRMSLENGVSSQSSNYFWEVDRSCMSWLDRQPNQSVVYVSFGSIAVMSDEQIMEFWHGLVNSKRRFLWVVRPDSVAGKGFQGEDTPKELVEGTKDRGYIVGWAAQEEVLSHRAVGGFLTHSGWNSTMESIVAGVPMLCWPYFADQQLNSRFVGEVWKLGIDMKDVCDRKVVEKMVNDLMVERKDEFVKSAAAMASLAKDCVSVGGPSYCNFDRLIEDIKTISLKNHD

SEQ ID NO: 6106 - protein, 476 aa, Arabidopsis thaliana
MKAEAEIIFVTYPSPGHLLVSIEFAKSLIKRDDRIHTITILYWALPLAPQAHLFAKSLVASQPRIRLLALPDVQNPPPLELFFKAPEAYILESTKKTVPLVRDALSTLVSSRKESGSVRVVGLVIDFFCVPMIEVANELNLPSYIFLTCNAGFLSMMKYLPERHRITTSELDLSSGNVEHPIPGYVCSVPTKVLPPGLFVRESYEAWVEIAEKFPGAKGILVNSVTCLEQNAFDYFARLDENYPPVYPVGPVLSLKDRPSPNLDASDRDRIMRWLEDQPESSIVYICFGSLGIIGKLQIEEIAEALELTGHRFLWSIRTNPTEKASPYDLLPEGFLDRTASKGLVCDWAPQVEVLAHKALGGFVSHCGWNSVLESLWFGVPIATWPMYAEQQLNAFSMVKELGLAVELRLDYVSAYGEIVKAEEIAGAIRSLMDGEDTPRKRVKEMAEAARNALMDGGSSFVAVKRFLDELIGGDV

SEQ ID NO: 6107 - protein, 475 aa, Ricinus communis
MASASNNHQLHILLFPLMAQGHMLPLLDIARLFSSRGVKITFITTPGNAPRLKRSSQTTQISFKIIKFPSKEAGLPEGLENLDLISDLQTHIKFFNALSLFQEPLEQVLQELHPHGIVSDVFFPWTADAALKYGIPRLIFNGASFFYMCCLANLEEHQPHKKVSSDTEMFSLPGFPDPIKFSRLQLSATLREEQPNLFTEFLASAKEAEKRSFGMIFNSFYDLESGYVDYYRNVLGRRAWHVGPVSLCNRNIEEKSQRGKEASISEDECMKWLDSKKPNSVLYVCFGTVAKFSDCQLLEIALGLEASGQNFIWVVRSEKNEEEKWLPNGYEKKMEGKGLIMRGWAPQVLILEHEAVGGFVTHCGWNSTLEGVSAGMPMVTWPVFADQFFNEKLITDVLKIGVGVGAQKWVAVVGDYVESGKIEKAVKEVMVGEKAVEIRSRAKKIGEMARMATEFGGSSYNDFGALIEELKSYRT

SEQ ID NO: 6108 - protein, 537 aa, Cephalotus follicularis
PSSSPSLPPPHLFPHFSLIFNYFFLPFAASFCCCLADAPLLIESPRMESNDHQIHVMFLPFLAPGHMMPMVDMARLFAANNAKVTIVTTTMNALRFKNTIDRDIESGRQITVESVRFPAAEVGLPEGGENLNSIPTPEMTFKLFHAIDLLQPYIEQLFRERKPDCIASDYLFPWTAEVASELNIPRIAFSGSGFFNLCVSDSIERYQPHRNILTDTETFIVPNLPDQVALTRSQLPDIVKTKTDFSAFFEKVKEAERKSFGVLMNSFYELEPAYIDHFREVIGMKAWHLGPVSLFNRDADDKADRGDTASVSGHNCLNWLDNKKPNSVLYICFGSLTRFSRIQVTEIANALEDSGHSFIWVVGKVLPNKDDDNDLQKEEWLPEGFECKARESSKGLIIRGWAPQILILEHPAIGGFLTHCGWNSILEGVSAGVPMVTWPIFAEQFYNEKLVTQVLKFGVPVGNEVWKLWAMQETPLINRDKIMKAVNAVMSDRGEALVMRKNATRLGELARNAVERGGSSFNDMKTLIEEITAFKYK

SEQ ID NO: 6109 - protein, 467 aa, Genlisea aurea
MKKAELLFIPSPGLSHLVSAVESAKLLLRRDQRLSVVILTMKLAGDSAVDAYKNKIIPPPRRLRFIDLPTQEEIAPPNSSVFQYIESQMNPIKEIISDNASSLSGVVLDMFCTKFMPIADEFNLRSYVFFSSGACCLGMYLHLVALKFDFNQELSEYKRTPEIELSIPCFSNPVPAKVLPAVLIQGGYFSSLFMDYFRRLRDAAGILVNTFQELENAAIESMNSDGKLPKLYPIGPILNLENDEGNNRFGDVKKWLDDQPEKSVVFLCFGTMGSFQTPQVREIAAAQEKTGSRFLWSLRKPPEKGATPFPTEYQDYDEVLPEGFPERTEGIGKIIGWAPQTAILAHRSIGGFVSHCGWNSVLESVWFGVPVATFPLSAEQQANAFELVKELKMAEPIRIDYRHGENPPEIVTAAEIEIAVLRLMGTDGGGGGGGVRENVKEMQRKSRLAMAEGGSSYHAQTLFIQNL

SEQ ID NO: 6110 - protein, 477 aa, Cephalotus follicularis
MESAIVLYPSPGRGHLVSMVELGKLLLSQNPSFNINIVVSIPPFEAGSTGQYVAAVSAANPSITFLHLPTVSLARSYSFPEDFPVLSYDLAELNNSNLSHVLSSLSKSFIIKAFIIDFFNTASFQVSSCFNIPTYYFFTSNASGLAAFLFLPTIHKNTKKSLKDLDILVEVPGVPPIPAKDMPVAILDRTTKAYEYFMGTAIHMAKSAGLIVNSFELLEQRALKAILNGECVLGESVPPIYCIGPVIETSNGSEASEDEHECLSWLNSQPSRSVLFLCFGSLGVFSAKQLQQMAIGLEKSGVRFLWVVRNPPPDQETLNVLTAAEPNLETLLPEGFLQRTKDKGLVVKLWAPQVKVLSHDSVGGFVTHCGWNSVLEALRAGVPMLAWPLYAEQKMNRLFLVEEMKVALWVSESEDGLVSAAELENRVNELMDSKKGKVVRERVMAMRDEAAAAREDGGSSRVALVKLINSLKRGWTC

SEQ ID NO: 6111 - protein, 468 aa, Genlisea aurea
KLHFVFLPMVAYGHMIPAVDMAKLFVSRGLKVTVVTTPAFSELVLKARESGHDIGLRIIGFPPEGSPLKGDVVSMDQVTEDTHGEFLAAVELMRAPFEEFLEELGPDAVVSDMFLPWSAESAGKFGLPRLVFHGTSYMALCCSDQMRVYKPYEAVDSDSEPFILPNLPHRLEFFRSQLPPEEHSDNSFAGLRNQMAEAEKITHGALMNTFDELESDYARHYRNAMKKRAWSIGPLILCGGAGGKEELGSRGKKSAVDEHECMRWLDSKADHSVVYVCFGSMAVFSDAQLRELAAGLRDSSRNFVWVVRKTEGGGGNGWLPEGFEETTSETGMIIRGWAPQVLILNHPSVGAFVTHCGWNSTLEGIAAGVPMVTWPVFAEQFYNEKLIVDVLKIGVSVGSKKWQRVGSEGVAAEAVTAAVERVLFRDSAEEMRRRAKDYQAKAKIAVKGGGSSYNELNDFVEDIRNYKP

SEQ ID NO: 6112 - protein, 486 aa, Arabidopsis thaliana
MAVSSSHHAVLFPYMSKGHTIPLLQFARLLLRHRRIVSVDDEEPTISVTVFTTPKNQPFVSNFLSDVASSIKVISLPFPENIAGIPPGVESTDMLPSISLYVPFTRATKSLQPFFEAELKNLEKVSFMVSDGFLWWTSESAAKFEIPRLAFYGMNSYASAMCSAISVHELFTKPESVKSDTEPVTVPDFPWICVKKCEFDPVLTEPDQSDPAFELLIDHLMSTKKSRGVIVNSFYELESTFVDYRLRDNDEPKPWCVGPLCLVNPPKPESDKPDWIHWLDRKLEERCPVMYVAFGTQAEISNEQLKEIALGLEDSKVNFLWVTRKDLEEVTGGLGFEKRVKEHGMIVRDWVDQWEILSHKSVKGFLSHCGWNSAQESICAGVPLLAWPMMAEQPLNAKLVVEELKIGVRIETEDVSVKGFVTREELSRKGEMGKTTMKNVKEYAKMAKKAMAQGTGSSWKSLDSLLEELCKSREPDGVNKLSSSDA

SEQ ID NO: 6113 - protein, 485 aa, Unknown
  Description of Unknown: Oryza sativa Japonica Group sequence
MCSAATPNSGDVRATPGSSRPHVVLLPSAGMGHLVPFTRLAAALCSGHGCDVSLVAAVPTVSSAEARHLAAHFTAFPAVRRLELDLASLDVSEFAGADPFYVRYEAIRRSASLLAPLLAGGASAAASALVADIALASVVIPVAKDLRLPCYVFFTASATMFSFLAYLPTYLDANAGGGHAIGDVDVPGVCRVPTSSVPQALHDPDDIFTRQFIANARSLANADGLVVNAFDALEPEAVAALRQGTVAAGLPPVFAVGPLSPAPIPAKDSGSYLPWLDAQPARSVVYVSFGSRKALPRDQLSELAAGLEASGHRFLWVVKGAVVDRDDAGELTDLLGEAFLQRIHGRGLVTMAWVRQEEVLNHPSVGLFISHCGWNSVTEAAASGVPVVAWPRFADQRVNAGVVARAGIGVWVDTWSWEGEDDGVVSAEDIAGKVRSAMADEGVRKAAASVREAAARAVAAGGSSYRSLAELVRRCRDGLVITNGM

SEQ ID NO: 6114 - protein, 555 aa, Unknown
  Description of Unknown: Fragaria x ananassa sequence
MGSESLVHVFLVSFIGQGHVNPLLRLGKRLAAKGLLVTFCTAECVGKEMRKSNGITDEPKPVGDGFIRFEFFKDRWAEDEPMRQDLDLYLPQLELVGKEVIPEMIKKNAEQGRPVSCLINNPFIPWVCDVAESLGLPSAMLWVQSAACLAAYYHYYHGLVPFPSESDMFCDVQIPSMPLLKYDEVPSFLYPTSPYPFLRRAILGQYGNLEKPFCILMDTFQELESEIIEYMARLCPIKAVGPLFKNPKAQNAVRGDFMEADDSIIGWLDTKPKSSVVYISFGSVVYLKQEQVDEIAHGLLSSGVSFIWVMKPPHPDSGFELLVLPEGFLEKAGDRGKVVQWSPQEKILEHPSTACFVTHCGWNSTMESLTSGMPVVAFPQWGDQVTDAKYLVDEFKVGVRMCRGEAEDRVIPRDEVEKCLLEATSGSKAAEMKQNALKWKAAAEAAFSEGGSSDRNLQAFVDEVRRISASLNSKSSAVGYVKSKINGVVEYVDSKLNGKAAPVEEANTRTNGIAKVEQPKAANGKVEIAELTPINGKVEIAELKPINGKVELVES

SEQ ID NO: 6115 - protein, 498 aa, Unknown
  Description of Unknown: Oryza sativa Japonica Group sequence
METFTADDQRDADAPRPPRVVLLASPGAGHLIPLAELARWLADHHGVAPTLVTFADLEHPDARSAVLSSLPATVATATLPAVPLDDLPADAGLERTLFEVVHRSLPNLRALLRSAASLAALVPDIFCAAALPVAAELGVPGYVFVPTSLAALSLMRRTVELHDGAAAGEQRALPDPLELPGGVSLRNAEVPRGFRDSTTPVYGQLLATGRLYRRAAGFLANSFYELEPAAVEEFKKAAERGTFPPAYPVGPFVRSSSDEAGESACLEWLDLQPAGSVVFVSFGSAGTLSVEQTRELAAGLEMSGHRFLWVVRMPSFNGESFAFGKGAGDEDDHRVHDDPLAWLPDGFLERTSGRGLAVAAWAPQVRVLSHPATAAFVSHCGWNSTLESVAAGVPMIAWPLHAEQTVNAVVLEESVGVAVRPRSWEEDDVIGGAVVTREEIAAAVKEVMEGEKGRGMRRRARELQQAGGRVWSPEGSSRRALEEVAGKWKAAATATAHK

SEQ ID NO: 6116 - protein, 477 aa, Helianthus annuus
MAQTQPHFLLITYPAQGHLNPALQFAKQLIRLGVKLTFPTTVNAYHRMGKAGKIPESLNYVLFSDGYDDGFNPDTDDATDLLAQFREKGTECLKETILSSAKNGTPVTCLVYTLLIPWAAEVARDCNVPPALLWIQPASVFRVYYYYFKGYDKLIGENCNEPSWSIELPGLPLLKSRDLPSFCLPSNASDPVLNTVLLLIKELLHKLDSIERPKILVNTFNELEEEALKEMDGKVNMVGVGPLIPSAFLDGKDMSDRSFGGDLIEASHEYLEWMNTKPKGSIVYISFGTLIVWSKKQKEAMAHGLLESKRPFLWVIKDKDREEADDEISYMHELKKLGLGLMIPWCNQLEVLSHPSLGCFVTHCGWNSTLESMACGVPLVAVPKWSDQTTNAKLIEDLWGAGVRVTTNEEGVVEGEEMKRCIEMVMGGHERGEVVRGNVKKWKDLARKPIKEGGSSYMNLKAFVEEVGSCTYDKVVS

SEQ ID NO: 6117 - protein, 431 aa, Unknown
  Description of Unknown: Oryza sativa Japonica Group sequence
NGETENGGGGGKLGMGPLIRLVAVPDGMGPDDDRNNLLRLTVFMQEHMAPRDQVRGGGLRCRDVGAGRGEAHRREVRCRLAGVGRRHGVSTQRSGTHSGQNNRRSWQKKTANELSASNWYFHLVCFSWAGSALTQEAFQLSPDMPMMQPAHLAWNCIGNDQGQELLFSCVLAGVRAVDECDYILCNSFRDAEAATFARFPKILPIGPLLTGERPGKPVGHFWRPEDGACMSWLDVQPARSVVYVAFGSFTVFDRRQFQELALGLELTGRPFLWVVRPDIVHGDAHEYPDGFLDRVVASGNDGGRGKVVAWAPQQRVLAHPAVACFVSHCGWNSIMEGVRNGVPFVAWPYFADQFVNRAYICDIWRVGLPAVADKKSGMVTKEHLAGRVEEVMGDASMRERIEAMMVVAHESVQEGGCSHGNFDMFVESIMS

SEQ ID NO: 6118 - protein, 495 aa, Citrus unshiu
MDKATQLHFVLFPFMSQGHMIPMIDIARLLAQRGVIITIFTTPLNAARFHGTLARAIESGLQIHIIETPLPNLEDGLPQGCENMDMLPSLDLALDFFTAADKLLEPVENLFGQLKPQPNCIISDVCLPYTAQIAGKFNVPRIAFHGTCCFSVVCFNNIFASKFLESISSESEYFSVPGLPDKIELTKKQVDSTQGQKFKAFEYKIGAATLAIDGVIINSFEELEPAYVKEYKKISRDKAWCIGPVSLGNKEYSDKAQRGNTSSLDEHKCLKWLDSKDPKSVVYACLGSMCNLIPSQMMELGLGLEASNRPFIWVIREGETSKELKKWVVEDGFEERIKGRGLVIWDWAPQVLILSHPSVGGFLTHCGWNSTLEGVCAGLPLLTWPLFADQFTNEKLAVHLLKIGVKIGVENPMTWGEEQNIGVLVKRDDVKNAVERLMDEGNDGEERRNRALNLAKMAKMAIQEGGSSHLNITLLLQDIMKHVHSKSLANKCQSE

SEQ ID NO: 6119 - protein, 422 aa, Cajanus cajan
MVSYPAQGHINPLLRLAKCLAAKGLFVTFTTSEIAGKHMRSANNITEKSVIPIVIKKHAEENHPISCIINNPFVPWVCDVAAQHAVPSAMLWIQSSAVFTTYYSYFHKLVSFPSDADPYIDVHLPSVVLKYNEVPDFLHPFSPYPIFGTLILEQFKNLSTPFCVLVDSFEELEHDYIEYLSKFLVIRPVGPLFKIPKDPSTRDIRGDFMKSDDCIEWLNSRAPESVVYISFGSIVYLPQEQVSEIAYGLLNSHVSFLWVLKPPPKEFGVSPHVLPSGFLEETREKGKVVQWSPQEEVLGHPSVTCFMTHCGWNSSMEALSYGVPMLTFPAWGDQVTNAKFLVDVYGVGIRVGYGQAEKKVISRDEVKKCILEATIGPKAQELKQNAFNWKKAAEEAVAVGGSSTRNLDAFVKDIKERGAKEI

SEQ ID NO: 6120 - protein, 481 aa, Medicago truncatula
MEETTIVMYPAPSIGHIISMVELAKLLIHHHQHFSITILLTTGFMDHPSIDSYINRVSSSHPSITFHRLPTVAVNHTTTQSIAATAFQFIKSNAVNIETKLRQIIQTSVIKAFIIDLFCTSAMETASAMQIPVYYFFTSGAAVLSLYSYFPKIHSLTKSSFKDMVGVEISAPGNMALNAALMPEPVLDRDDPAYWEMLYFCEHLSKAKGIVVNTFRELEVVAVKVVEDGACFPDVEGSSPPVYCIGPLIADAQQPDEARGIKDCLSWLDKQPSKSVVYLCFGSRGSFSMTQLKEIAEGLERSGHRFLWVVKRPVQEHLGTKKVYDTTGEFDLSSILPSGFIERTKERGLVVRSWAPQVEVLSRESIGGFVSHCGWNSVLEGVVAGVPMIAWPLYAEQHVNRNVMVEDMKVAVAVEQRAGDMFVSGEEVEKRVRELMDSEKGREIRERSLKFKDMARDALGEFGSSTKALANLVQTWNVISH

SEQ ID NO: 6121 - protein, 363 aa, Ricinus communis
MSKVCPVLTIGPTIPSIYLDKRIENDDDYGLDLYALDASISINWMSTKPAGSVVYVAFGSMANLSDKQMEELAWGLNNSNFNFLWVVRACEQSKLPKGFVQELGSKGLIVNWSPQVKVLASEAIGCFFTHSGWNSTIEALSLSVPMVAMPQWTDQPPNAKLVEDVWKVGIRVKVNEDGIVTREEVESCIREVMTGEKGKEMRNNGAKWRELAIEAVSEGGTSDKNIDEFVSKLFITEEVIILGEVHMVVIIEVVGFNTIVVVLVLIPDLLVMVFVVAMVIILYLSPLLDLIISRLLVNRRLIPILCPIFLVLLLYIAKYVMVQTTLLSSALNVMHIARIYLLLLPAYIFMIPLGKLILMLLTT

SEQ ID NO: 6122 - protein, 448 aa, Cephalotus follicularis
MSGAHILVYPYLSAGHIIPLLDLTHRLHTRGLTVTVVVTPNNLSLLNPLLSTHASSSTLQPLVLPSPQPSNFSSNRLIDSMHGLRLLHYPLLLQWFSSHPSPPVAIISDFFLGWTHQLATELGLPRVVFSPSAAFAFAVQHQTWIDSPKNDGPSTVSFPNIPGSPRYPWHQISHIYRSLKEGDPDREFYKSTLLANLVSWGVVFNSFSELEGVYIDHVKKEAGHDRIWAVGPLLPPDDDLMRPANRGGSSSVPCHEVMTWLDARREHSVVYVCFGSRAELTREQTDGLAAGLEKSGVHFIWCVRGVMPAGYEERVAGRGFVINGWAPQVEILRHRAVGVFLTHCGWNSTLEGIAAGVVMLTWPTSADQFSNAQLLVEELGVGVRVGDGTEVIPESGELARILAESLDENRAERVRANKLRDAALTAVKGGSSDKDLDDFVLRLNALSK

SEQ ID NO: 6123 - protein, 453 aa, Genlisea aurea
MAEAHCLIFPFPIQGHINPMLQFAKRLVHKGLRVTLILTRYLAKTSPFHSPTIAVETISNGLDDGEPHGFPVSSYLSLLKEHGMASLREALHRLIRCGRPATCIVYDPFITWVPELAGEYGIKTAAFFTQSCAVDYIYHRLYSGDLKIGEEEEKAIELPGLPPLLPADLPSFVTLPESYPSLRDMVTDQFKHIENVDWVFCNTLYELEKEVIDFMAEHAPVKAIGPTIPSMYLDRKLADDTDYGLSVFRPEARLCMDWLNRQEPGSVIYVSFGSLAKLSEAQTAELAHGLKRSKRPFLWVVRAAEQGKLPEGFAAEEVPGLVISWCPQLDVLAHDAVACFVTHCGWNSTLEALCLGVPMVGMPQWTDQTTNSKFVADVWGTGVRAVGDGGIVGRESIEKCIREVMEGEKGEEIRKNVSKWKELAVAAVSEGGSSDRNIDDFVSTLRRLAVAAV

SEQ ID NO: 6124 - protein, 458 aa, Arabidopsis thaliana
MANNNSNSPTGPHFLFVTFPAQGHINPSLELAKRLAGTISGARVTFAASISAYNRRMFSTENVPETLIFATYSDGHDDGFKSSAYSDKSRQDATGNFMSEMRRRGKETLTELIEDNRKQNRPFTCVVYTILLTWVAELALFSIFYHYFNGYEDAISEMANTPSSSIKLPSLPLLTVRDIPSFIVSSNVYAFLLPAFREQIDSLKEEINPKILINTFQELEPEAMSSVPDNFKIVPVGPLLTLRTDFSSRGEYIEWLDTKADSSVLYVSFGTLAVLSKKQLVELCKALIQSRRPFLWVITDKSYRNKEDEQEKEEDCISSFREELDEIGMVVSWCDQFRVLNHRSIGCFVTHCGWNSTLESLVSGVPVVAFPQWNDQMMNAKLLEDCWKTGVRVMEKKEEEGVVVVDSEEIRRCIEEVMEDKAEEFRGNATRWKDLAAEAVREGGSSFNHLKAFVDEHM

SEQ ID NO: 6125 - protein, 478 aa, Vigna angularis
MEETIVMFPAAGIGHIVGMVELAKLIQTPRFSIIVLLNTGFLDHPSIDDYIRRISAVHSSISFLRLPSTTPATFTTAVSFGVKYFSFLKRNAPHVATTLTQISKTAVVKAFVIDLFCASTMESASSMGIPVYFFFTSGAAILALYSYFPKLHQEWSVSFKDMVGVELRVPGNAPLKAVELPQPILDRDDPSYWDMLDFCTLLPKARGIIVNSFEELEPAAVNAVAQGSCFPDATHAPRLYYIGPLIAEPQQSDAEGSDSKECLRWLEEQPSRSVVFLCFGSRGSFSVSQLKEIAKGLEKSGKRFLWVVKRPLELEEEGAKHDEDAAKRGDQFDLNPVLPDGFLERTKDRGMVVKAWAPQVEVLSRESVGGFVSHCGWNSVLEGVVAGVPMVAWPLYAEQHVNREVMVGEMKVAVGVNQRVEDGFVSAEEVEKRVREVMETKEIRERSFKLKQMAMAAVAQFGSSTTALANLLHSWISF

SEQ ID NO: 6126 - protein, 473 aa, Helianthus annuus
MEKLDLFFIPSPLMGHVGQLVELARLFVKTFDHITATVLVIKLPGDPIGTDYTDSFTDHTRIKFIHFPPMDPDLFQDCPTVGFTADAVINSHKPIIRGLVASQFTGSGPFGPRPVRPLGALVVDMFCTSMIDVAKEFNLPTYVFFPSNAAFLWIMFYFQTLQDELSQDISELSHSATKLLVPSYANPVPPSVVPDVLLDRDQWSKRFLHYARKYREAKGIIVNTFQELEHHALCSYDGNTPPVYTVGPLLKPKKPTPDHEVLQWLKGQPESSVLLLCFGSRGWFGVDQVREIAVAIEQSGCRFIWSLRRPPPEGHNGFPKEYADYNEVLPDGFLERTAGRGKVVGWVPQAEVLADVATGGFVSHCGWNSLLESIWYGVPVATWPIYAEQQLDAFQMVKDLGLAVEISLDYNQMNKDQQLVLAETIEKGIREVMDHNSAVRAKVKEMSAKSRMAMEEGGSSFESLRRLVDDIIM

SEQ ID NO: 6127 - protein, 467 aa, Phoenix dactylifera
MEEPTQQHFLLATYAGQGHINPALRLATQLARTIPGARVTFSTSVSGHRRMFPSAASDGEISDGRLSYLPFSDGCDDGFKGGIPGFSDFMAQSKLHGSRNLSNLLGDLTARGRPVTCLIYTILLPWAADVAREHGIRSFLHWIQPAFVFAIYYHYFHGYEDLVASNRGDPLFQVEFPGLPPLRIRDLPSFLTISADDPFYHVFLILREVFETVDREKTESHKPRILVNTFDALESDALSAVDAMHLLPIGPLLPSPEETPSHGDIFQLDGRRYMAWLDSKPEKSVVYVSFGSLSVMRKQQLEEMLNGLEECGRPYLWVVRKDNREEGVELEKGEKGMVVEWCSQVKVLSHPSVGCFVTHCGWSSMLESLACGVPIVGAPQMSDQGMNAKLAEEAWGTGVRAEANDEGVFEGAELRRCLEVVMGQGEKGAEMRRKATKWRDRVQEAVASGGPSDRNLRAFVEEIGKGA

SEQ ID NO: 6128 - protein, 253 aa, Eurytemora affinis
  MOD_RES (248)..(248): Any amino acid
MQVGFIHCREGEELTPNIQQFLAGNNKNAVLMSLGSIIQTEDFPDDFIGIFEKVFIKLGLKVIWKTNRKVESKNILTGNWFSQQDILAHENIGLFISQCGMMSMQEAIYHHVPILCLPITFEQITNSKMIIQKKLGISLQLQSLTASSLETAILDVLNTPLYFSLTALSLETAILDVLNTPLYFSLTASSLETAILDVLNTPLYFSLTASSLETAILDVLNTPLYFSLTASSLETAILDVLNTPLYFXFFFFQ

SEQ ID NO: 6129 - protein, 466 aa, Medicago truncatula
MTKYEVVFISTPTIGNMVPTVEFANHLTKHHPQLSATILVITIPKLPLVNTYLQSRSSSSTNLHFIHLPTVDPPAPDQYQSFIAYISLLIQKHKTNIKNTLLDLIKTDSVKLAALFVDMFSTTIIDVANEVSVPCYLFFASPASFLGFTLHLPKLESVESETEFEIPSFRNPIPKQVLPNMVLKWKSEEDAYSWILYHAGRYRETKGIVVNTLQELEPYALQSLYDDSQLPPVYTIGPVIDLVGPAEWDPNPVQYNYIMEWLDLQPLASVVFLCFGSLGSLEVKQVEKIAIGLERAGVRFLWALRGPPKAQSADPRDYTSYDNVLPDGFLTRAAGMGIVCGWVPQAKVLAHKAVGGFVSHCGWNSILESLWYGVPIATWPVYAEQQMNAFQMVRELGLAVEIRLDYRVGGDLVQAEEVENGVRTLMNLSDEIRRKVKDMREKCRVALMENGSSYTNLMSLIQELTK

SEQ ID NO: 6130 - protein, 471 aa, Hordeum vulgare
MVANAAAEKAPATASGGTRRVLLFPLPFQGHLNPMLQLADVLHARGFHITVFHAAFNAPDPVAGYRFVPVGAGVPAADLVPTGSDGDFAGALLRINERLQGAFQDCLREEVLLEEEEEEGARPACLVLDSNLRGMQVVAGRLGVPTLVLRTGGAACLAAYMAFPALCDKGLLPPKDHSQLNMPLDDLPPLRLQDMIFSTTTPHETMTTCLERIVESAKCSSGVILNTFTDLEDVDIQKIIDGVGVPVYAIGPLYKISSGAQSSLLSPDQTCLDWLDKQEAESVLFVSLGSLASMGQEELVETAWGLANSRLPFLWVIRPDAVQSSGKVGLPDGFEEETRGRGMVVNWAPQQDVLGHQAVGGFWTHNGWNSTLESICEGVPMICRPHFADQMINARYVEQVWKVGFELEGKLERGNIERGIIKLFRGEEGGEMRRRANDLKDKATLCIKKGGSSQTMVDLLINRIMSSPSSI

SEQ ID NO: 6131 - protein, 480 aa, Sorghum bicolor
MATTAVSSSSTPPASSGGGGGVRRRRVLMFPLPFQGHLSPMLQLAGALHARGGLDITVFHAAFNAPDPARHPPGYRFVPVGEAVAWADLVVSGGDDDIPGALLRINDRLRDPFRDRLRQALALADDGAGAPPPPACLVLDSNLRGMQLVAEELGVPTLVLRTGAAACLVAYMAFPALCDKGLLPPTSKDNSWLDMPLDDLTPLRLRDMVFSSTTAHANMRKCLKCLVDATRSSSGVILNTFQDLENSDLQKIANGIGVPIYPIGPLHKISSGTEDSLLAQDWACLEWLDKQEVDSVLYVSFGSLANIDEKELLEIAWGLANSQMPFLWVIRHNLVKSSNDVSLPDGFKEATHGRGMVVPWVPQQEVLRHHAIGGFWTHNGWNSTLESICEGVPMICRPQFADQMINMRYVQEVWKIGFELDGDLERGKIERAVKKLLCMEEGRHMRQRAKDLRNNAIKCIKEEGSSKSAIELLLNQIMSF

SEQ ID NO: 6132 - protein, 290 aa, Helianthus annuus
MRLRDIPPCIRMINPGDDYMVKFICLQVERAKTSSAIIFNTFDELDRDILDTISATYPPCYGVGPFNLLEKTIVDESLASIQSNLWKEDQGCLKWLDLKTSSSVIYVNFGSIAVMTSQQLIEFAWGLAKSGHSFLWIIRPDLVIGESAVLPCDFATETRERGYFASWCPQEQVLNHPSVGGFLTHSGWNSTIESISSGVPMICWPVFAEQQTNCWSSCNKWGVGMAIDNNVKSDEVAKLVIELLNGEKGKEMRKKAIEWKKKAEESCVVPSGSSIANLNKVIHLLQTSSK

SEQ ID NO: 6133 - protein, 480 aa, Helianthus annuus
MASNQEHKPHALFIPAPAQGHLNPMIKLAKILHSKGFLITFVNTEFTHRRLVKSQGLDALNSVSTFRFEAIPDGLTPPENTEVTQNVYDICRSTQENCLQPFKSLIAKLSVAFSPVTCIVSDLLMGFTLDAAKELGIPEFIFSTGGAGALLCSEQFPILLDKGLMPLKDPSYLVNGYLDTIVDSIHGMEGIPLKYIPPFIRYINPGDEFMVEFTNAQIKKAKTASGIIFNTFDDLEHDVLDSLASIFPPCYGVGPLHLLENKIADKSLASIGSNLWMEEPECIKWLDTKPASSVVYVNFGSITVMTHQQLVEFCWGLANSKHSFLWIMRAGLVDGESDALPLEFFQETSGRGMLAGWCPQEQVINHPSIGGFLTHSGWNSTVESISSGVPMICWPFFSDQFPNCWLSCTKWGVAMEIDSDVKRDEVERLVVELMAGEKGMVMRKNAMNWKNKAIAASSVPDGSAVIDLEKLINELKKVPK

SEQ ID NO: 6134 - protein, 237 aa, Triticum urartu
MGCTRPLGLPCATLWNQSCAVLSLYHHFYDDDTPFPSTADDAPVALPGLPAMSLHELPLMVRPEFAHNLWGQMLRRQLVEPVLAACRGDTGRIVAWCPQGRVLRHGAVGCFVTHCGWNSVTEALAAGVPVVAYPWWSDQFTNAKFLVEEFGVGVRLPAPVTQDGFRACIEEVMSGPEAVAIRRRATAWKEEAAAALADGGSSDRGLEAFVDFVRAPVGSGGVDTISSPAKQGSVSSL

SEQ ID NO: 6135 - protein, 466 aa, Medicago truncatula
MEEKPHIVVVPSAGFTHLVPILEFSKRLVNLHPQFHITCIIPSIGSPPSSSKSYLQTLPPTISSIFLPPINVDQVPDAKILAVQISLSVKHSLPYIEQELKSLCSRSKVVAVVADVFAHDVLDIAKDFNLLCYIYLPQAAMVLSTYFYSSKLDEILSDESRDPNEPIKVPGCVAFDLKDLPLPFRFRSNIGYTKFLERAEKYHLFDGVFVNSFLEFEEDAIKGLKEEKKKPMVYPVGPIIQKVSIGDENEVKCLTWLEKQEPKSVLFVSFGSGGTLSQEQVNELAYGLELSGKKFLWILRSPSGVANATYFVGENEIEDPLRFLPSGFLERTKEQGLVVPCWGPQIQVLEHNSTGGFLSHCGWNSVLESVVYGVPIIAWPLFAEQGMNATMLCDGVKVALRPKANDGGLVERDEIGKVVRELMDGEERVEIRKRIEHLKNAANDAIDEMGSSTKALSQVVAIWNGI

SEQ ID NO: 6136 - protein, 318 aa, Medicago truncatula
MTFLDENFIADGTLDTSLDWISGIKDIRLKDLPSFMRVTDLNDIMFDFFCVEPPNCVRSSAIIINTFEELEGEALDTLRAKNPNIYSIGPLHMLGRHFPEKENGFAASGSSFWKNDSECIKWLSKWEPGSVLYINYGSITVMTDHHLKEFAWGIANSKLPFLWIMRPDVVMGEETSSLPQEFLDEVKDRGYITSWCYQDQVLSHPSVGGFLTHCGWNSTLETISYGVPTICWPFFVEQQTNCRYLCNTWKIGMEINYDVKSEEIIELVMEMMEGEKGKEMRQKSLVWKKKATDATNLGGSSYNNFHKLIKEVLHHKAI

SEQ ID NO: 6137 - protein, 464 aa, Sorghum bicolor
MAGQEEHRDGSSHRRQVVLFSLPFQGHLNPMLKLAAVLHAHGLGVTVLHTDFNAPDPARHPELTFVPIHETLRDEATSPDSDILAKLLSLNAACEAPFRQALASLLLLRRRRGHDVACAVVDGQCYAALRAAGQLGVPVLALRTDSAAALRNMLAYPRLRDAGYLPVKEEQLDEAVPDLEPLRVRDLIRVDGCGVDEMCSFVAGVADATGASVSGIVINTFEAIEASELAKIRRELPLPAFAIGPLHLLSSSQDSAEQSLYTPDLSCLAWLDAQPAARSVLYVSLGSLACVDRGVFEEMAWGLAGSGVPFLWVVRPGSVTGTGGGGGEEVPPLPDGFNEEVRNRGKIVTWAPQREVLAHAAIGAFWTHCGWNSILESVCGGVPMLVQPCFADQMVNARYVTREWGVGMEVGEEIERETVAKVVTKVMVGEDGPLMREKARRLQMQASAATSSAMDGLVQYVLSL

SEQ ID NO: 6138 - protein, 491 aa, Polygala tenuifolia
MANSDRAERGHHSSQKPHAIFIAYPLQGHVIPSVHLAIKLASLGFTITFINTDSIHYQTLKAHGKDATSEDIFTSARNSGLDIRYMTVSDGLPVEFDRSLNHDQFMLSLLHVFSAHVEQVVGKIVKQSNETVTCLIADTFFVWPSKIAKKFGLFHVSFWTEPALIFTLYFHMDLLRKNGHFDCNNVRDDPIDYIPGVHQIHPKDVMSYLQDADTSTVVHQIIFNAFQDVRAADFVLCNTLQDLEPDTIAALRAHLPFYAVGPLFPAGFTKSSVATSLWSESDCTHWLSTKPKSSVLYVSFGSYAHVSKKDLIEIANGLLLSNVNFIWVLRPDIVSSDNVDPLPVGFREAVRECGMIIPWCCQIEVLSDPAVGGFLSHCGWNSILESLWCEVPLLCFPLLTDQFTNRKLVVDDWKVGINLSDHKNITKDDVSRNVNRLMGRKSCLKFVNAIAEVKKLMGGAWTTDGLSQRNMDSFIEGLEHKSRQVKGRITQ

SEQ ID NO: 6139 - protein, 502 aa, Medicago truncatula
MAIQSHEAEAKNLKVIFIPFSATSHIIPLVEMARLFAMHGVDSTIVTTAGNAGIFQKSIDHDFNRGRPIKTHVLEFPAKQVNLSVVTETFNTDTPLTEAAKFQEGFVMLQSLIENYLLGELEVDCIVSDLCHPWTVEVASKLGIPRIVFSPASIFSRCAELLFEKHRAHNEVESDYDKFTIVGFPHKFEMSRSQLPDWMKKPSMYGMIIKALNDSARRSYGAIFNSFSDFEGAYEEHYKNAFGTKCWGIGPVSLWANQDVSDKEERGEAKVEEGNSDLLKWLHSKKENSVIYVSFGSLNKFPPSQLIEIAHALEASSHNFIWVVRKNINEKEGDEGFMEEFEKRMKENNKGYLIWGWAPQMLILENKAIGGIVTHCGWSTIMESIKVGLPMVSWPLFADQFFNEKIIIDVLRIGVSVGAKEWRNWNEFGSEVVKREEIEKAIALVMENGKESEEMRSRSKALSEDAKKAILVGGSSHANLMQLIHELKSLKHQRLNGVLLGQ

SEQ ID NO: 6140 - protein, 471 aa, Medicago truncatula
MAETKPTSHIVVTSIPLFSHESSVIEFCKRLIQVHNHFQITCIFPTIDAPIPATLKLLESLPSTIHCTFLPPIKKQDLPQEVTMQLELGVTKSMPSFRESLSLLCSTSTTPVVAIVVDPFANQALEIAKEFNILSFMYFPVSAMTTSLHLHLPILDEQVSGEYMDHVEPIEIPGCTPIRGQDLPRTFFEDRSSIAYETILRQTKRFSLADGVLINSFSEMEESTVRALMEKEQSNNKQLVYLVGPIIQTGSNELNKSVCVKWLENQRPKSVLYVSFGSRGSLSQEQINELALGLELSGQKFLWVLREPNNSEILGDHSAKNDPLKYLPSGFLGRTKEQGLVVSFWAPQTQILSHTSTGGFLTHCGWNSTLESIASGVPMITWPLFGEQRLNAILLIEGLKVGLKVKLMRVALQKEEEIAKVIRDLMLGEERSEIEQRIEELKYASTCALAEDGSSTRVLSQLAIRMESNAK

SEQ ID NO: 6141 - protein, 360 aa, Cephalotus follicularis
MGFIVDAAEEFGVPNVSFCIFSACSSICFLHYRQLVESNYTAIKGESNIINGSLDTVIDFIPGIEGITMRYIPTFLRMTDPDDIVLKFIAIEVERMKRASGIIIHTYDAFEHDVLFALSSMLPPVYSIGPLSLLANQIQDDDMNLLGSNLNLWLEDSQCLEWLDSKEPNSFVYVSFGSITVMTSDQLVEFSWGLANSKKNFLWVIRPYLLSGDSGSLPAELLADTKERSLLVSWCPQEQVLNHPSIGGFLMQCGWSSMMETLCAGVPMICWPFFAEQATNCWFNCVKWGVGIEIDNNVKRDEVERLVRELMDGAKGKEMKKKAMEWKKLAEEATSSPNGSSCKNLDAIVKLLLSPRDKID

SEQ ID NO: 6142 - protein, 487 aa, Manihot esculenta
MGSTDLNSKPHIVLLSSPGLGHLIPVLELGKRIVTLCNFDVTIFMVGSDTSAAEPQVLRSAMTPKLCEIIQLPPPNISCLIDPEATVCTRLFVLMREIRPAFRAAVSALKFRPAAIIVDLFGTESLEVAKELGIAKYVYIASNAWFLALTIYVPILDKEVEGEFVLQKEPMKIPGCRPVRTEEVVDPMLDRTNQQYSEYFRLGIEIPTADGILMNTWEALEPTTFGALRDVKFLGRVAKVPVFPIGPLRRQAGPCGSNCELLDWLDQQPKESVVYVSFGSGGTLSLEQMIELAWGLERSQQRFIWVVRQPTVKTGDAAFFTQGDGADDMSGYFPEGFLTRIQNVGLVVPQWSPQIHIMSHPSVGVFLSHCGWNSVLESITAGVPIIAWPIYAEQRMNATLLTEELGVAVRPKNLPAKEVVKREEIERMIRRIMVDEEGSEIRKRVRELKDSGEKALNEGGSSFNYMSALGNEWEKSWKTQRSERSLW

SEQ ID NO: 6143 - protein, 478 aa, Medicago truncatula
MESEAPIHIHILLISFPGQGHINPLLRLAKCLAAKGASVIFITTKKAGKDIQTVNNIVEKSVTSIGNGSLTFEFFDDGLQDDDPIRANLCGYIEQLKLFGKPFLSQMIKNHVESNKPISCIINNPFVPWVCDVAHEHGIPSVLLWVQSTAVFAAYYNYFNKLVHFPLEKEPYIDVQLPFQVLKYNEIPDFLHPFSPYPFLGTLILEQFKNLSKVFCVLVETYEELEHDFIDYITKKSIHIRPIGPLFKNPNIKGASNIRGDFVKSDDCNIIEWLNTKPKDSVVYISFGTIVYLPQEQVNEIAYGLLDSQVSFLWVLKPPPKEVGLKEHVLPNGFLEETNERGKVVKWSPQEEVLAHPSLVCFITHCGWNSSIEALSLGVPMLTFPAWGDQVTNAKFLVDVFGVGIRLGYGMIENKFVTRDEVKKCLLEATIGEKAEDLKKNAIKWKKKAEEAVAIGGSSDRNLDEFLEDIKKIKMIAQ

SEQ ID NO: 6144 - protein, 462 aa, Oryza sativa
MDSGYSSSYAAAAGMHVVICPWLAFGHLLPCLDLAQRLASRGHRVSFVSTPRNISRLPPVRPALAPLVAFVALPLPRVEGLPDGAESTNDVPHDRPDMVELHRRAFDGLAAPFSEFLATACADWVIVDVFHHWAAAAALEHKVPCAMMLLGSAHMIASIADRRLERAETESPAAAGQGRPAAAPTFEVARMKLIRTKGSSGMSLAERFSLTLSRSSLVVGRSCVEFEPETVPLLSTLRGKPITFLGLMPPLHEGRREDGEDATVRWLDAQPAKSVVYVALGSEVPLGVEKVHELALGLELAGTRFLWALRKPTGVSDADLLPAGFEERTRGRGVVATRWVPQMSILAHAAVGAFLTHCGWNSTIEGLMFGHPLIMLPIFGDQGPNARLIEAKNAGLQVARNDGDGSFDREGVAAAIRAVAVEEESSKVFQAKAKKLQEIVADMACHERYIDGFIQQLRSYKD

SEQ ID NO: 6145 - protein, 477 aa, Gentiana triflora
MGSLTNNDNLHIFLVCFIGQGVVNPMLRLGKAFASKGLLVTLSAPEIVGTEIRKANNLNDDQPIKVGSGMIRFEFFDDGWESVNGSKPFDVWVYINHLDQTGRQKLPIMLKKHEETGTPVSCLILNPLVPWVADVADSLQIPCATLWVQSCASFSAYYHYHHGLVPFPTESEPEIDVQLPGMPLLKYDEVPDYLHPRTPYPFFGTNILGQFKNLSKNFCILMDTFYELEHEIIDNMCKLCPIKPIGPLFKIPKDPSSNGITGNFMKVDDCKEWLDSRPTSTVVYVSVGSVVYLKQEQVTEMAYGILNSEVSFLWVLRPPSKRIGTEPHVLPEEFWEKAGDRGKVVQWSPQEQVLAHPATVGFLTHCGWNSTQEAISSGVPVITFPQFGDQVTNAKFLVEEFKVGVRLGRGELENRIITRDEVERALREITSGPKAEEVKENALKWKKKAEETVAKGGYSERNLVGFIEEVARKTGTK

SEQ ID NO: 6146 - protein, 515 aa, Jatropha curcas
MSLREEQIHVMFLPYMAPGHMMPMVDMARLFAANGVRVTIVTTKMNAIRFKNSIDKDFRSGRNISLEILSFPSLQAGLPQGCENLSSTTTPEMTIKLFHGIGLLEPQIKIVFQQHRPDCIISDYLFPWTVDVAAELGIPRIAFSGSSFFNLCVANSIECNRPHDLIKSETESFIVPGLPDQVKLTKSQLPDIVKSKTEFSDLFDKLKEAERKSFGVLMNSFYELEPAYADHFTKVTGIKAWHLGPVSLFNRDDDDKVQRGDNTNVCERSCLNWLDSKKPNSVLYACFGSLTRFTKDQTVEIANALENSGFPFAWVVGKIVKCKNNEEDEEECWLPGGFEDRLKESGKGIVIKGWAPQVLILEHASIGGFLTHCGWNSILEGLCAGVPLVTWPIFAEQFYNEKLVTQVLKFGVPIGNEIWKVWANEESPLIRRNNIERVVRLVMGDGDKAMQMRKRARQLQERAKIAVEEGGSSYNNLKSVIEDIRVYKRATEKVKEIEGNHLIELEKPQQEVTAP

SEQ ID NO: 6147 - protein, 472 aa, Medicago truncatula
MASNEAPIQILLVSYPSYGHINSLLKLGKCLAAKGSSVIFTTTQKAGKDMETANNITNKTTTPIGKGFLTFDLFDDGLKDDDPMRTSLGDYTSQLEHVGKLYVSQLIKNHAESKTPISCIINNIFISWVCDVATEHKIPFAILFNESSAVFTCYYNYFHKLVPFPSKTEPCIDVQLPSVVLKHSEIPVLLHPSNTYPFLGPLILGQIKNLSKALCVFVDTYEELEPDFIDYISEKSIIIRPIGPVFNNPNIIGASNIRRDFVKTDDSTIIEWLNSKPKGSVVYVSFGTIVQLPPEQVNEIAYGLLNSQVTFLWAKKKHDDLPHGFLEETSGRGKVVKWSPQEQVLAHPSVACFITHCGWNSTIESLASGVPVLTFPVFGDQPTNAKFLVDVFGVGIRLGYSGAENRLITRDEVKKCLLEATTGEKAEELKKNAIKWKKAAEDAVAVGGSSDRYLDAFIEEVAKQGAVNFQKI

SEQ ID NO: 6148 - protein, 456 aa, Sesamum indicum
MGSPVESNGSLGNNIHIFLISFPAQGHVNPLLRLGKRLASFGLFVTLSAPEFAGLSIRKANTITDDEPTRLGTGMIRFEFFDDGWDFNDPNRDDLDSYLAQLERVGRQKLPQMIRKQAEKGRPVSCLVNNPFIPWVSDVAEILGIPSAMLWVQSCASFSTYYHYYNELAPFPSEHEPEIDVQLPYMPLLTYDEVPSFLHPSTPYPFLRRAILGQFKNLSKPFCILMDTFQELEHEVVEHMSKVCRPIKTIGPLFKELKSPSTGNFTSESNAIRADFYAADSCLEWLDSKTPQSVVYISFGSVVHLKQEQVDEIAHGLLGSEVSFLWVVRPPPKELKVEPHVLPQGFLEKAGDKGKIVKWSPQEQVLAHPSTACFVTHCGWNSTMEALASGVPVVAFPQWGDQVTDAKFLVDVFKVGIRLCRGDSEGRIVPRDEVERCFRAATGGPEAAEMKQNALL

SEQ ID NO: 6149 - protein, 281 aa, Cajanus cajan
DMPSFFFTYEQDPTLFDFAVAQFSNIDKADWILCNTFYDLDKEIIDWFMEIWPKFRSIGPNIPSMFLDKRYEDDQDYGVTQFKNDECMEWLDDKPKGSVVYISFGSMATIGEKQMEEVACCLKECSSHFLWVVRASEENKLPKDFEKISKKGLVVTWCSQLKALAHEAIGCFVTHAGWNSTLETLCLGVPTIAIPYWSDQSTNARLIKDVWKIGIKAPVDDNKIVQREDLKHCIEELMESEKGKEMKNNVLQWKSLAIKAISEGESSYNNILEFTNKLFRS

SEQ ID NO: 6150 - protein, 481 aa, Crocus sativus
MGSEDRSLSILFFPFMAQGHMLPMLDMAKLFALYGVKSIVVTTPANVPIVNSVIDQPDVSTLHPIQLRLIPFPSDTGLPEGCENVSSIPPRDMPTVHVTFFSATAKLREPFGKVLEDLRPDCIVTDMFFPWTYDVAAELGIPRIVFHGTNFFSLCVTDSLERYKPVENLRSDAESVIIPGLPHRIEVLRSQIPEYEKSKADFVREVTESESKSYGAVVNSFFELEPDYARHYREVVGRRAWHIGPLALANDSTTDKSSRGYKTAIDRNDCLKWLDSKSLRSVVYVCFGSMSDFSDAQLREMASGLEASNHPFIWVVRKSGKEWLPEGFEERVQERGLIIRGWAPQILILNHRAVGGFMTHCGWNSSLEAVSAGLPLVTWPLFAEQFYNERFIVDVLRIGVSVGAKRHGMSAEEREVVEAEMVKKAVDGVMGDGEEAEGRRRRARELGEKARKAVEKGGSSYEDMRNLVEELKSDSKLTVGC

SEQ ID NO: 6151 - protein, 321 aa, Helianthus annuus
MAEPLQDKKNPTYIRMVEAAKKFSMPKGILVNSFLELEPRPFKAMEEGEWCKPKVYPVGPLIRSGSKNQTGEGFECLKWLDKHPVGLVLFVSFGSGGTLSQQQLNELAFGLEKSGQRFIWVVKSPHGKSDASYFNAQSHLDTFEFLPEGFLGRVEDRGLVVSVWAPQVKILSHGSTGGFLTHCEWNLILECLVCGVPMIAWPLFVEQKMNAVLGTDGLGVTRRVKVDENGVVGRDEVENCVRSLIEGEEGRKMRLKVSELKGLAANALSRDGLSTRSLFDATQMWWKKHRNENEEFETRDVFIPGAIKFVILPVYWSGQRV

SEQ ID NO: 6152 - protein, 482 aa, Citrus unshiu
MEQTLQAQAAPHIVLLPSPGMGHLIPLIEFAKRLVHRHHFLVTFFIPSDGPPSEAQKSTLESLPSSINSVFLPVSLNDVAEDARAETVISLTVLRSLPCLRQELTSLVAKATVAALVVDLFGTDAFDVAQEFNISPYIFYPSTAMCLSLFLHLEKLDQMVPRDCEYRDMSEPVQIPGCIPVHGRYLLDPVQDRKNEAYRWVLHHAKRYKLAEGIIVNSFTDLEGGALKALQHQDEPGKPPVYPVGPLVKTGSTAESKNEGCLKWLDDQPLGSVLFVSFGSGGTLSCEQLNELALGLEMSEQRFLWVVRSPNNAANSTFFSVNSHKDPYDFLPKGFLDRTKGRGMLVPSWAPQAQVLSHGSTGGFLCHCGWNSVLESVVNGVPLIAWPLYAEQKMNAVILTEDVKLALRPKANENGIVGRDEIAKVVKALMEGEQGKEVRNKMKDLKDAAAAVLSENGSSTKALSQLASKWNNNEGKPCSLQI

SEQ ID NO: 6153 - protein, 505 aa, Eucalyptus grandis
MEATYEVMGSDNVRQLRIFFFPFMAYGHILPTIDMAKLFASRGLKATIITTPLNAPIFAQTIQRTQKLGAKIDVQTVNFPSVEAGLSPGCENLDLVASQEMFLKFIKATEMLKQPLEELLSEDPPDCLVADMFFPWATDVAQRLGVPRMVFHGTSFFALCATECVRLHEPHKNVPSDSDPFAIPNFPHEIKLTRKQLPEHLRSGVENDFTRFNREAKESEVRSFGVIVNSFYELEPDYADYYRNVLGRRAWHIGPVSLCNRDIEDKATRGKKATIDEHECLKWLDSKDPNSVIYICFGSVAKFSPNQLREIALALEASGQQFIWVVRKADKGGGDKDEAGGDEEWLPRGFEERMKSENKGLIIRDWAPQVLILDHKAIGAFVTHCGWNSTLEGICAGVPMMTWPVFAEQFYNEKLVTQVLRVGVGVGAQQWVGIVADKEIVSKDRIEKALRQVMVGDEAEAMRDRAKLLADKARRAIEDGGSSYSDMNALIRELALHRIARDAKS

SEQ ID NO: 6154 - protein, 493 aa, Populus alba
MAPPMSSQLHFVLIPLMAQGHTIPMIDMARLISERGVTVSLVTTPHNASRFASIIERARESSLPVRLVQIPFPCEEVGLPIGYENLDTLPSRDLLKKFYIAVARLQQPLERILEHAKPRPSCIISDKCLSWTAKTAQRFNIPRIVFHGMCCFSLLSSNNIRLHKAHLTVSSDSEPFVVPGMPKSFEITKTQLPGAFVSLPDLDDVRNKMQEAESTAYGVVVNSFDELEHGCAQEYGKALKKKVWCIGPVSLINKQNLDMFERGNKASIGKTQCLEWLDSMEPGSVIYACLGSLCRLVPSQLIELGLGLEASNKPFIWVVKTGERGSELEEWFVKERFEERIKGRGLLIKGWAPQVLILSHRSVGGFLTHCGWNSTVEGICSGVPMISWPQFSEQFFNEKLIVEILRIGVRIGVEVPVRWGEEEKVGVLVKKDEVRKAVITLMDAGGEEGKNRRKRAIELGKTARKAMELGGSSNLNLSFLIQDIMNLQISKQG

SEQ ID NO: 6155 - protein, 444 aa, Helianthus annuus
MERAPHIAIVPSPGMGHLIPLVEFAKRLKNNHNISATFIIPNDGPLSISQKAFLDSLPMGLNHIILPPLREVFKSLVADNNMVALFIDLFGTDAFDVAIEFGVSPYAFFPSTAMGLSFFLYLPKLDQMTSCEYRDLPEPVQIPGCLPVRGQDLLDPVQDRKNDAYKWVLHNAKRYMMAEGIAVNSFKELEGGAFKALLEAEPGKPKIYPVGPLIQTGSSSDVDGSGCLKWLDGQPCGSVLYISFGSGGTLSSNQLNELAMGLELSEQRFIWVVRSPSDQANATYFNSHGHKDPLGFLPNGFLERTKGNGFVVSSWAPQAQILSHSSTGGFLTHCCWNSILETVVHGVPVIAWPLYAEQKMNAVSLTEGIKVALRPNVGENGIISRVEIARVVNSLLEGEEGKAIRSRIRDLKDAAANVISKDGCSTKTLDKLASMLKNKNKLSL

SEQ ID NO: 6156 - protein, 490 aa, Arachis hypogaea
MGSLNITKNNKPHAVFMPYPAQGHINPMLKLAKLLHHKGFHITFVYTDYNRNRLLKSRGSDSLRNLPSFRFETIPDGLPVDPNPVDATQDVPLLCDSTSKRCLPHFKKLISELNGGDSGVPPVTCIVSDGTMSFGIEAAEELEIPVVVFWTASGCGTMCYMHYRQLVDKDFTPLKDMNDITNGYLETTINWVPGMKEIRLRDMPSFIRTTDPNDIMLNFFIRESKRAQRAHAIIVNTFDALDHDILEAFSTINNLPPVYSVGPLNLLLNHITDKDLKSIASNLWKEDPKCIEWLDKQEPNSVVYINFGSITTMTNENLIEFAWGIANSNKKFLWVIRPDLVAGENAVLPPEFVEVTKIRGMLANWCPQEQVLAHPSIGVFLTHSGWNSTLESVCGGVPMICWPFFAEQQTNCRFCCTEWGIGLEIEDVRRDKIESLVRESMDGEKGVDMKQKALKLKKLAKEAASAPNGSSFQNLDKLIHQVLLSKFAKN

SEQ ID NO: 6157 - protein, 465 aa, Vigna angularis
MAKTVHIAVVSSPGFSHLVPIVEFAKRLVKLHPNFHVTCFVPSLGSPPESSIAYLKTLPSNIDSVFLPPISKEQFPQGQYVGLQIQLTVTLSLPSIHEVLKSLSSKVRLTALVADVFAFQVLEFAKEFHALSYFYFPGSAMALSLLLHMPKLDEEVSGELKDLVEPIRLPGCVPLLGVDLPAPTQNRSSEAYKSFLERAKAMVIAGGIIFNTFLEMEPGAVRALEESVNGKIKLYPVGPITQKESNSEADECLRWLDKQPPCSVLYISFGSGGTMSQHQIDELALGLEMSGQRFLWVLRAPSNLPSAAYLESAEEEPLQFLPKGFLERTKEKGFVVALWAPQVQILGHSSVGGFLSHCGWNSVLESVQEGVPLITWPLFAEQRMNAVMLAEGLKVALRPRFKEDGIVEKEEIAKVIKCLMEEEIGKAMRQRMMIFKGFAAHALKDGSSRQTLIELTSEWENLSEN

SEQ ID NO: 6158 - protein, 387 aa, Citrus unshiu
MAQRKENIVMFPLMAQGHTIPFLALALHLENTNRYTITFVNTPSNLKKLKSSLPQNSSIHLREIPFDGIAHDLPPCTENSDSLPFHLFPNFFESTLSFKPHFRKLINGLIDEQNGHKPVCIIADMFFAWSAEIAQECGIFNALFVGGGSFGFACFYSLWLNLPHRDSDEFLLPDFPEASRIHVTQMTKFLRLADGSDSLSVFFQKVLPQWMNADGILFNTVEELDKIGLMYFSRKLGRPVWPVGSLLLSTGSRAGAGKEYGISTELCKNWLDTKPCNSVIYVSFGSQNTIAASQMMQLAMALEACGKNFIWVVKPPLGFDMNSEFRANEWLPEGFEERIKDSGQGLVVQKWAPQVEILSHKSISAFLSHCGWNSVLEALSHRVPIIG

SEQ ID NO: 6159 - protein, 516 aa, Selaginella moellendorffii
METILREEEDYGGGARGAAKDPSRKPHVVALAYPMQGHINPMIHLCKRLASLGLSVSLVNTQTNHDRLARSRGAALEQGLDIAMLALADDEEDTSAHQGGAGAGGDDALQRSLVAADAMERPFVALLQGLLDRGRGVDCILSDAFLGWSQDVADRFGIPRAALWASSTEYCLLNFHLLELRTRGYAPIRDASVLDDDSHTIAFIDGVAPLHPKDLPSILQRYSSHDPGFEKRYARTRRLCDAYWILGNTFQDLEPDALDAIQQAINGDPTSAAKKKRRNFSPVGPLLPSAFLGLGGDDLGSGNGLWIEDERCVNWLDKQSPSSVLYVSFGSLAVMSSAEMLELAAGIESSRQPFLWVIRPGSHLGSFDLEGFVERTRQLGLVVQWAPQLQVLFHPSVGGFLSHCGWNSTIESIAMGVPIIGLPCIAEQNLNCKRAVKDWGVGCKLQQRGDGDGDAIVGREEIERVVTRFMTGEDGMELRIRARELREAARRCVMDGGSSHKNLEAFVEAVRINGLR

SEQ ID NO: 6160 - protein, 492 aa, Cephalotus follicularis
MSNMEPQLLSLPPPPRVLIFPFPCQGHVNSMLNLAQLLCLSGLHVTFLNSDHNHDRLVLHTDIQARFACYPGFQFNTITDGLPVEHPREGESIMELCFSLNSITRPLFREMLVSGQFGLVNCIIADGIMGYTIDIANELGIPIFHFRTISACSFWAFFSIPQLIESGEIPIKGNEDMDALVKSVPGMETFLRSRDLPSFCRCSDVSNPVLQLMKNETQQSPRARALILNTFEDLEGPILSQIRTRCPTTYTIGPLHAHRKTRLAKHATNTLQSSSNSSSLWEVDRSCMTWLDQQPLQSVVYISFGSLAVLTRDQLIEFWFGVVNSKKNFLWVRRLDSTPGNKEGESEDIPVELVEGTKERGYMVGWAPQEEVLAHKAVGGFFTHSGWNSTLESIVAGVPMVCWPYFADQQVNSRFVSEVWKLGVDMNDLCDRTIVEQMLNDLMVERREDFVKSTAEMVGLSRRSVSEGGSSYCNFDRLIEDIKLMSMESPQC

SEQ ID NO: 6161 - protein, 490 aa, Unknown
  Description of Unknown: Oryza sativa Japonica Group sequence
MGGGRGGAPATASARARRPHQPRVLLLCSPCLGHLIPFAELARRLVADHGLAATLLFASARSPPSEQYLAVAASVLAEGVDLVALPAPAPADALPGDASVRERAAHAVARSVPRVRDVARSLAATAPLAALVVDMIGAPARAVAEELGVPFYMFFTSPWMLLSLFLHLPSLDADAARAGGEHRDATEPIRLPGCVPIHAHDLPSSMLADRSSATYAGLLAMARDAARADGVLVNTFRELEPAIGDGADGVKLPPVHAVGPLIWTRPVAMERDHECLSWLNQQPRGSVVYVSFGSGGTLTWQQTAELALGLELSQHRFIWAIKRPDQDTSSGAFFGTANSRGEEEGMDFLPEGFIERTRGVGLLVPSWAPQTSILGHASIGCFLTHCGWNSTLESVSNGVPMIAWPLYAEQKMNAAMMEVQAKVAIRINVGNERFIMNEEIANTIKRVMKGEEAEMLKMRIGELNDKAVYALSRGCSILAQVTHVWKSTVG

SEQ ID NO: 6162 - protein, 329 aa, Glycine max
MNSNVHSIYYVPKLADSSYMTNGYLETAIDWLPGIKEILLRDFPSFFRTIDPHDIMLQVLQEECGRAKHASAIILNTFEALEHDVLEALSSMLPPVYPIGPLTLLLNHVTDEDLKTIGSNLWKEDRECLKWLDTNEPKSVIYVNFGSITVMTNHQLIEFAWGLANSGKTFLWVIRPDLVDENTILPYEFVLETKDRGQLSGWCPQEEVLAHPAIGGFLTHSGWNSTIESLCNGVPMICWPFFAEQPTNCRFCCKEWGVGMQIEGDVTRDRVERLVRELMEGQKGKELTMKALEWKKLAEDATILKEGSSFLNYDNMVRQVLLSDNLKST

SEQ ID NO: 6163 - protein, 457 aa, Unknown
  Description of Unknown: Vitis labrusca x Vitis vinifera sequence
MEKQGGHVMVLTYPAQGHINPLLQFSKRLASKGLKATLATTHYTVNFIQSDAVGVEAISDGFDEGGFKQAPSLEAYLESFQAVGSRTLGELILKFNESASPVDCLVYDSIFPWGLSVARQFGIYGAAFWTTSASVCSMYWQLRQGLLSLPVKQETVPVSMPGLPPLRLSDLPDFLAQPGHLSAYMSAVMEQISSLEQNDWVFMNSFDALESELVKAMSGLWSVAMIGPMVPSAYLDQQIEGDTVYGASLWKPTNDECLGWLETKPPKSVVYISFGSMAEIPVKQVEEIAWGLKESDYHFIWVVKESESGKLPINFLKSMNETGLVVTWCNQLEVLAHKAVGCFVTHCGWNSILEGLSLGVPMVGMPQRVDQPTNAKFVEDVWRAGVRAQKDEEGIVTRKELEKCIKEIMVGERSEEIKRNACMWRESAKSAVSKGGSSDKNTDEFVGVLLKRGKKKT

SEQ ID NO: 6164 - protein, 440 aa, Cephalotus follicularis
VPCPFQGHINPMFQLGTILHSKGFSITIAHTLFNFPNPSDHPDFDFLPISDGVSKEEFTENFAAFVSSLNVHCEIPFQQALLRMIQNQDSHDDLPCIIYDGLMYFAEAVAHHLKLPSINLRAFSATYFLLYHIYPRLKEEGYIPVKDYMREDKTPVLQSLKLKNVFESMPQSARDAMLEHRAALTDSLKRSSAIIVNTMDFLEQEILTNIQKLFSAPIFTIGPFHKLAPTISSTSIFQEDATCISWLNKQVPKSVIYVSFGSMASMNENELHETAWGLANSEQPFLWVIRPGLVQGVDWLKLLPEGFKERIGERGCIVKWAPQKEVLAHVAVGGFWSHCGWNSTLESICEGIPMLCRPFFGDQLLNVRYVCDVWKVGLELDSELDRGKIEIAVRKLMVDTEGEDIRQRAMEFKKKVDHCLGESGSSLECLNELTEKILSV

SEQ ID NO: 6165 - protein, 457 aa, Helianthus annuus
MGHLIPLTELAHRLLLHRRLFITFIIPTATGSPVKPQNDILNAMPENISSIFLPPVDLNDIPEDAALETRIILTLTRSLPALRQTLTELTGESIRKRPSALVVDLFGPPSFEIAKELNIPAYLFCTVSAMSLVSIFHIPIFDQMYDCEYKDLPEPVRLPGCVPVHGANMPEPLQDKKNDAYVGVVESSKMFSLAKGVLVNSFLELEPGPFKAMEEGDWCKPKIYPVGPLIRSGSENQTGEGFECLKWLDEHPVGSVLFVSFGSGGTLSQQQLDELAFGLEQSGQRFIWVVKSPHGHGKSHTSYFSVESHLDPFGFLPEGFLGRVEGRGLVVSSWAPQVEILSHGSTGGFLTHCGWNSILESVVCGVPMIAWPLYAEQKMNAVLLTNGLGVAHRVEVDENGVVGRDEIDKCVRSLIEGEDGRKSRLKISELKALAAEALSPDGSSTSSLLDVAQIWCN

SEQ ID NO: 6166 - protein, 493 aa, Helianthus annuus
MDQSHEQINSKHTIEPHVLMFPIPFQGPVNCFLKLAELLCLSGIHVTFLNTQHIHRPLLRHTEVLSRFSRYPNFRFETIPDGVEHETPVSVDRFLEVMAGVDVVTKPLFREMMVSGRFSWESERPVTVMIPDAYFSFAVDVAKEASVPVICFETVSPCCLWTSYLNLPTLIEAGDVPFKGNDLDELITSIPGTEQIIRRRDLASQCRSTDMSSQSIELIVKEAHAVPEAQGLILNTFEELDSLILKHMRKLCPNIYTIGPLHTLHKAQLTANTNPLQENNFSNSVWKEDRTCMSWLDEHDPKTVLYISIGSLATMTIDQLVEIWYGVINSGTPFLWVRRPGSIIGGYDESQVPDELLARTKEIGCIVEWAPQEDVLAHPAIGGFLTHSGWNSTMESITQGIPMVCWPNFVDQQVNSRFVEEVWKVGVDIKDTCDRLQVEKAVRDIMDSKRNVYTQSANTWANLAKESITKTGSSSIHLARLIDDILAMSLTQP

SEQ ID NO: 6167 - protein, 385 aa, Helianthus annuus
MMRETIPSIRTTISAMDSHPHVLVGDIFAYESWAIAEELGIPKYLFVTGTAWFTALFTYSPLLDKQVVGQYVDKKEPLEIPGCTPVRPDEVVDPMLNRDDENYAVYLSQAIGVTLADGMLINTWEDLEPQTLNALRTNEILRSVVKYKPVYTVGPVNKRYEPDGLKGEVVEWLGKQPDRSVIYVSFGSEGTISAEQINELAWGLELSRQRFVWVVRPPNGHVSDGSFFKPGQSDTTRDYLPEGFLTRTQKVGLVVSSWAPQVEILNHTSVAVFLTHCGWNSTLESVTNGVPMIAWPLYAEQKMNAAMLTEELKVAVRPEVLPTKKVVGREEVARMVMNLVEGEEGKVMKIKVDMLKEGAENAIRENGSSYISICKFIEDCWSQIK

SEQ ID NO: 6168 - protein, 281 aa, Hibiscus syriacus
MEIKANGSVKLEPVFDDLGADSVMEKSIDDYLGRLEAVVTLRLPQIMARLGMSKSENAASCLVYDSVLPWALDIAKQQGVYGAEFFTFSCAVSSIYYNLHQGLLKVPIVEACLSMAGLPLLRPHDFPSLVSDIKAYPTLTDLFTNQFSSFKKADWVFFNTFTSLENELGGPRRGSNGGVSNGLKRSGRNLLWVVRVSEQRKIPANFMEETSEKGLVVSWSPQLEVLSHKSVGCFMSHCGWNSTMEALSLGVPMVALPQWSDQMTNAKFIVGCTASGDQSRG

SEQ ID NO: 6169 - protein, 453 aa, Medicago truncatula
MSGKKLHAVLIPLPIQGNINLLIKLAKILHLRGFYITFVNTEYNHKRLLKSRGPNSRNGFTDFSFETIPDGLTPIDGDGDVTQDINSLCKSIRNNFLQPFRELLARLYDYDWNMSFTIQVAEELSLPIVLFSPSNACTFLTCLHLPTLFEKCLIPLKDDSRLTNGYLETKVDCIPGLQNFRLKDLPDFIGITDPNYSIVEFINEAMNRNDVLNVLSSMFPCIYAIGPLSSFLNQSQQKHLASLGTNLWKEDTKCLDWLESNEPRSVVYVNFGSITVMTAEKLLDFAWGLANSKKPFLWIIRPDLVIGGSVVLSSEFVNEISDRGLVASWCLQEQVLNHPSIGGFLTHCGWNSTTESICAGVPMLCCPFFADQQANCRYICNEWEIGIKIETNVKREEVEKLVNELMSGDKGKKMRQKTIDLKMKAEEETRLGGCSYMNLEKVIKEVFLKQNQT

SEQ ID NO: 6170 - protein, 504 aa, Citrus unshiu
MTRGDSLVYATSAMISEASQFHFLLLPFLAQGHLIPMIDIARLLAQHGAIVTIVTTPVNAARFKTVLARATQSGLQIRLTEIQFPWKEAGLPEGCENIDMLPSIDLASKFFNSLSMLQLPFENLFKEQTPKPCCIISDMGHPWTVDTAAKFNVPRIIFHGFSCFCLLCMNLLRDSKVHENVASDSEYFKIPGLPDHIEFTRVQIPIPTHKRDDKKELREKIWAAEKKTYGAIINTFEEIESAFVEGCKKGKQGNVWCIGPVSLCNKESIDKVERGNKAAIDVPECLTWLDSQQPSSVVYVCLGSICNLKSSQLIELGLGLEASKKPFIWVTRVGSKLEELEKWLVEENFEERIKGTGLLIRGWAPQVMILSHPAVGGFLTHCGWNSSLEGISAGVQMLTWPLFADQFCNEKLIVKVLRIGVGVGVEVPMKFGEEEKIGVLVKKEDVETAINILMDDGEERDARRRRAKEFGELAQRALEEGGSSYNNIKLFIQDIMQQPSSEVI

SEQ ID NO: 6171 - protein, 362 aa, Cephalotus follicularis
MKKAELIFIPAPGIGHLVSTLEFSKRLIERDDRISITVLVMKFPTATFVDAYTKSLTASQPQIQLIGLPPVDPPPPTLMQKSVASYVCTFIESYIPHVKNVVKDIVTSSDSSSGSVRVAGLVLDFCCVSMIDVANEFGLPSYMFLTSNAGFLDLMLYLPTRHNQIGFEFEKTDPEILLPGFANPVPPCVLLDGLFNKQGGYSSCIKLAQRFKDVKGIIVNTFVELETYTVNSFSNAQIPPVYPVGPVLEDKRQPHPDLNQAEYDKIMKWLDDQPQSSVVFLCFGSRGSFEVPQVREIALGLEQSGCRFLWSIRVPPTKAEASVTSPYTNYKDMLPEGFLERIKGRGKTCGWAPQVEVLAHKS

SEQ ID NO: 6172 - protein, 394 aa, Unknown
  Description of Unknown: Oryza sativa Japonica Group sequence
MSTNDGVPSRRRPHALVVPLPSRGHLLPLLDFAHRLSTRHGVALTVAVTASDLPLLSAFLASTPLAAALPIHLPDASLHENSHHALLAVHLSAPRRRPPCPPLPGSPSFPYEHVPSVVRSYVAGDPDWELVREGFLLNSRAWGAVVNSFDEIEGEFLEYLNRFFGHGRVWSVGPVADSGCRGEERSSEAEQLFSWLDTCPSRSVVYVCFGSMYKPPPAQAAALGAALEASGARFVWEVGADAAVVPEGLEERTAARGRVVRGWAPQMEILRHAAVGAFLTHCGWNSTLEGVAAGVPLLAWPMKADQFIDARLVVDLHGAGVRAADGAGAVPYPGALARVFADAADAGKLADVRAKTSELAAAAAAAVEEGGSSWIAMEKMANELETAYLESVDR

SEQ ID NO: 6173 - protein, 490 aa, Hordeum vulgare
MAVHDEPLHILFFPFLASGHLIPIADMAALFAGRGVRCTILTTPVNAAIIRSAVHRANDSFAGTGSPAIDIAVVPFPDVGLPPGVENGTALASQDDRDKFFRAAQLLREPFDRFLADHRIDAVVSDSFFDWSADAAAERGVPRIAFLGSSMFARSCSDSMLRHNPLENAPDDPDALVLLPGLPHRVELRRSQMMDPAKMAWQWEYFKGVNAADQRSFGEVFNSFHDLEPDYVEHFQKTLGRRVWLVGPVALASKDMAVRGTDAPSPDADSCLRWLDAKPAGSVVYVSFGTLTKFAPAELHQLARALDLSGVNFVWVIGAAAGQDSAEWMPEGFAELIARGDRGFMVRGWAPQMLILSHAALGGFVTHCGWNSVLEAVSAGVPMVTWPRYADQFNNEKLVVELLKVGVSIGAKDYASGVEAHEVIAGEVIAESIQRLMESDGIQKKAKDLGVKARRAVEKVGSSYDDVGRLMDVLTARRSSVEVGEDIQAS

SEQ ID NO: 6174 - protein, 490 aa, Arachis duranensis
MGSLSTTEKPHAVCIPYPAQGHINPMLKLAKLLHFKGFHITFVNTEYNHKRLLKSRGPNSLNGLPSFRFETIPDGLPEPDVDATQDIPSLCESTRKTCLPHFKNLISKLNRNSEGADAQKAPPVTCIVSDGCMSFTVDAAEEFGIPEVLFWTTSACGFMCYMQYRHLVAKGITPLKDSSYITDGYLENTIDWIPGIKDIRLRDVPSFVRTTDPNDLMLDFLLGETKRASRGSAIVVNTFDALEHDVMEALSTILPPVYSIGPLNLLLNNVTDKDLKKIGSNLWKEEPECLEWLDNQEPNSVVYVNFGSITVMTSDQLIEFAWGLANSKKTFLWVIRPDLVAGDNAVLPSEFIEETKNRGLLSSWCPQEQVLAHPSIKGFLTHSGWNSTLESICGGVPMICWPFFAEQQTNCRFCCKEWGIGMEIEDVRRDRIENLVRELMDGKKGQEMKNKALEWKNLAVDAASSPNGSSLKNLDSMVNQILLSSKVAKK

SEQ ID NO: 6175 - protein, 494 aa, Beta vulgaris
MGAEPQRLHVVFFPLMAAGHLIPTLDIAKLFAAHHVKTTIITTPLNAPCFTKPLESYKNLGHRIDIEIIPFPSKEAGLPEGLENFDQFTSDQMAVKFLKATELLQESFEKFLEKHKPNCIVTDMLMPFTNNVAAKFNIPRIVFHGCSYFALCMMHTLLKYQPHKSLLSDDEEFLVPNLPHEINLTRSRLPDMMRGQGDKELNDAWMKIFIHAMEAEENSFGVIMNSFYELEPEYVEYYRNVMGRKAWHIGPVSLCNRENEAKFQRGKDSSINEHECLKWLDSKKPKSVVYICFGSLAEVPTLQLREIAMGLEASEQDFIWVVRRGKENVEEEKIEEWLPYDFEDRMEGKGLIIRGWAPQVLILDHEAIGAFVTHCGWNSTLEGISCGVPMVTWPVFAEQFYNEKLVTEVLKTGVAVGAKKWSRILEVNLKSEDIKNAIRRVMVGEEALVLRSKAKKLKELARKAVEIGGSSYSDMHSLIQDLSSYNANGYKQYL

SEQ ID NO: 6176 - protein, 477 aa, Oryza sativa
MEPNSKQSQTVVLHTILGAGHLAPMVELAKLFLGRGFAVIIAVPTPPASTADVAASSAPAVARIAAANPSISFHNLPPPDYPEPDPDGFQQLLDVIRLTVPILLTFLRSLPPVAAVVLDLFCVDALDAAAAVGVPAYFYFTSSAGVLAAFLHLPHYFATTEGDLKDMGKALLHFPGVPPIPASDMPHNVLDCADVIGASLVYHYRRMPEARGMLINTYEWLEAKAVTALGDGACVPDRPTPPVYCIGPLIVKGEDAAKGERHACLAWLDAQPERSVVFVSFGSMGAVSAEQLKEIARGLENSGHRFLWVVRSPPPEDPAKFSLPRSEPDLGALLPEKFLERTRERGMVVMSWAPQVEVLRHAATAAFVTHCGWNSILEAATAGVPMLCWPQYAEQRLNKVLVVDGMQLGVVMDGYDEELVKAEEVEKKVRLVMDSDEGKKLRGRLAMAKEMAAEALADGGPSCTAFSDFVDDLQRCK

SEQ ID NO: 6177 - protein, 484 aa, Zostera marina
MGEETNRTDKIVLYPSPGMGHLLPMVELAKVLIARNRLLEVTILVLRSPFSTGTTETLISSVMAANPLISFHFLPSLDLTDFLTSSFSHHESIQLELIRLSDPNVQLFMSSLHPMAFVVDFFCADSADIANGLGIPTYIFFTCCAATLAVLLYLPTMHSHTNQSFKDMGSTLVRFPEKTGIPAIPADHMPLPLLDREDHGYKTFIHLYERMAEVDGMIINTFDSLEGKTIQSLGTSGAFTRPIYPIGPLIISDRGQTQGESDFYCFKWLDKQPKGSVVFLCFGSLGTFSTEQLKEIADGIERSQERFLWVVKNPPNPSKKYVTNDPPNPDLDFLLPKGFLDRTQDRGLVVKSWAPQVKVLQHEAVGCFVTHLGWNSVLEAICAGVGMIGWPVYAEQRMNRVFVVDDMKLAMAVEGYDKDLVTAAAVEKSVREMMNKTGESGMGVGVKERCLAMKQAVEACLGDGGTSTLALDKLLRDWKVGKES

SEQ ID NO: 6178 - protein, 458 aa, Vitis vinifera
MTATASSMDRHVAVLGFPPHAATLLKLLRRLASAAPTTIFSFFNTAKANNSIFSPQSPHGLHNLRVYDVADGVPEGHVLSANPLERIDLFFKATPGNFYDAIQVAEAEIGRKISCLVSDAFLWFTADMAEEMRVPWLAIWTSALCSLSVHIYTDAIREAVKVVGRVQDQTLDFIPGFSAIKVEDLPEGIVFGDIESPFACMLHKMGLTLPRATAVATNSFEELEPIVTNDPKSKLQKVLAVGPFDLSSPPQLILDASGCLPWLDNKKEASVAYVSFGSIATPPPNEIVALAEALEATGIPFLWSLREHAMDNLPKGFLERTTAHGKVVSWAPQPQILAHASVGVFITHSGWNSVIESIVGGVPMICRPFFGDQCIDKRMVEDVWGIGVGVEGGVLTKSGVMSALGLILSHEGNKMREKIRVLKELARRAVEPNGSSTQNLSNLLEVITTSKLHLDTNK

SEQ ID NO: 6179 - protein, 389 aa, Coffea canephora
SEVPPVSCVISDAGMSFGIKAAEDLGIPEVQFWTASACSFIGYLHYRELIRRGIFPFKNDDYLTDGTLDKPVDWICGMSNIKFRDLPSFFRTTDPNDIMFDFLGEVAQSCLKAPAIIFNTFDELEREALEAVISKFDFPNIYTIGPLHILARHIVTESQVNSLNSSLWKPDSKVFEWLDQRAPNSVFYVNYGSITTMTDHHFKEFAWGLANSQQQFLWIVRPDVVQGGESAMLPEDFLEEIQDRGLLTSWCAQDKVLEHPAVGAFLTHCGWNSTLESISAGVPLICWPFFGDQQTNCHYSCKKWGIGMEINHDVKRNEVAELVRKMIIGEEGGEMRFKAKEWKKKAEEATEVGGSSYINFDKFIIEALHYNGCAAQNVSPVAKKKNGLY

SEQ ID NO: 6180 - protein, 469 aa, Scutellaria baicalensis
MGQLHIVLVPMIAHGHMIPMLDMAKLFSSRGVKTTIIATPAFAEPIRKARESGHDIGLTTTKFPPKGSSLPDNIWSLDQVTDDLLPHFFRALELLQEPVEEIMEDLKPNCLVSDMFLPWTTDSAAKFGIPRLLFHGTSLFARCFAEQMSLQKPYKNVSSDSEPFVLRGLPHEVSFVRTQIPGYELQEGGDDAFSKMAKQMRDADKKSYGDVINNFEELESEYVDHYKNVFGKKAWHIGPLSLCNNRAEQKSPIDDHECLAWLNSKKPNSVVYMCFGSMATFTPAQLHETAVGLESSGQDFIWVVRNGGENEDWLPQGFEERIKGKGLMIRGWAPQVMILDHPSTGAFVTHCGWNSTLEGICAGLPMVTWPVFAEQFYNEKLVTEVLKTGVSVGNKKWQRVGEGVGSEAVKEAVERVMVGDGAAEMRSRAIYYKEMARKAVEEGGSSYNNLNALIEELSAYVPPMKQGLN

SEQ ID NO: 6181 - protein, 477 aa, Cajanus cajan
MGNDVVHVLLVSFPGQGHVNPLLRLGKWLASKGLLVTFCTPQTWGKQMREGSDISEEAVGEGFLRFECFEDGWSDDDPRRQDLEQYLPQLEKAGKQALPSMIRRHAQKGPPVACLINNPFIPWVTDVAESLSLPSAMLWVQSCASFSAYYHYHHKLIPFPSQAQPHLDVQLPCMPLLTHHQVPTFLHPSTPEPFLGRAILQQLSNLEKTSCILMDTFQELEADVLDYMSKICHVPIKTVGPLFKASESVHGESECMIKWLDSKEASSVVYVSFGSVVHLKQEQVDEIAHGLLESGLCFLWVMKPPQKHSGKEAHVVPHGFLEKAGNKGKVVQWCRQEQVLGHPSISCFLTHCGWNSSVEALTFGVPLVAFPQWGDQVTNAKYLVDVFQVGVRMCWGEAANELIKRDEVMRCLFEATLGPMKQNALNFKAAAEAAVAQPAGSSHRNMDAFVDQLSKRSLQILKNYANAASLNSPSLPI

SEQ ID NO: 6182 - protein, 482 aa, Catharanthus roseus
MGSQETNLPPHVLIFPLPIQGHVNSMLRLAELLCLAELDITFIVSEFSHSRLIKHTNVASRFARYPGFQFQPISDGLPDDHPRAGERVMDILPSTKNVTGPLFKQMMVENKCFSSATRRPITCIIADGVLSFAGDFAQEKGIPLIYFRTVSACSFWACFCMPELIESGDIPIKGNGMDLIVKSVPGMETFLRRRDLPGFCRVNDINEPKLQILKTETRQTTRAQAAILNTFEDLEGPILSQIRKHMPRLFTIGPSHSHLTSRLETKNIKTLISSGSFWEEDRSCVDWLDAQPPRSVLYVSFGSITVVTRDQLLEFWYGLVNSGQRFLWVMRPDSIMGKDGQSQIPADLEEGTKARGYMVGWAPQEEVLNHPAIGGFLTHSGWNSTLESIVAGVPMICWPYFADQMINSRFVSEIWKIGLDMKDTCDRETIVKMVRELMEIRKDEFLQRADHMAKLAKEAVSEGGSSYSNLDGLVDYIKSLII

SEQ ID NO: 6183 - protein, 455 aa, Theobroma cacao
MEKKAYRAHVLALPYPSQGHVNPMLQFSKRLASKGIKATFATTLFISHTMKPESLGSVEFDTISHGCDQGGFSEAESIHDYLKRLEAAGSKTLADLIIKYKNSPHPFDCVIYDSFLPWALDVAKQFGLVGAAFFTQACAVNYIYYYAHHGLLSLPVSSEPVSIPGLPLLQLRDMPSFIYVAGSYPFYFELVLSQFSNSDKADFVLVNTFYKLEHEAVESMSKVSPLLTIGPTIPSMYLDQRVETDEDYDLNLFKLDSSSSTEWLSTKPPGSVVFVSFGSMANLSVKQMEELAWGIKQSNFYFLWVVRSSEEAKIPNKFVQEMGDKGVIANWIPQMQVLANESVGCFFTHCGWNSTIEALCLGVPMVAMPQWTDQTTDAKFVEDVWKVGVRVEVDENGIVNRDEIEYCIRQVMEGETGKVMKENAKKWKQLAIEAVSEGGSSDKNINEFVSKLTRT

SEQ ID NO: 6184 - protein, 477 aa, Populus tomentosa
MEEALVLYPSPPIGHLVSMVELGKLILTHRPSLSIHILIAASPYVAGKADKYMATVSADIPSIDFHHLPIVTPVSTNITHHEELTLEVLHLSKPHVHEELLNISKRYKIHGLVMDFFCTSGLSVATELDIPSYFFLTSGACFLAFFLHLPTLHQKTSKSFKDMKDHYLDIPGLPPRLATDLPNPFLDRDNQAYQHFLDFATQFPRASGIMINTFELLESRAVKAISDGLCVPNNRTPPISCIGPLIVADDKRGGSGKISPEDVHECLSWLDSQPSQSVVFLCFGSLGLFTKEQLWEIATGLENSGPRFLWVVRNPPSHNLKVAIKEQGDPDLDSLLPEGFLERTKERGYVVKSWAPQVEIVNHSSVGGFVTHRGWNSTLEAVYAGLPMVAWPLYAEQRLNRVALVEEMKLALSMNESADGFERADEVEKKVRGLMESKEGKMIRERALAMKNEAKAALSEGGSSHVALSKLLESWKH

SEQ ID NO: 6185 - protein, 449 aa, Barbarea vulgaris
MRSKFHAFMYPTFAFGHMIPYLHLANKLAEKGHTVTFLLPNKAQQQLQPLNLFPDRIVFHPLTLPPVDGLPVGAETLSDLQNTTGRVISDAMDLLRGQIEAKVRALKPDLIFFDFVYWVPEMAKEFGFKSVSYQIVSAACVAMFLAPGAELGLPTPDYPSSKVTLRGHDANVCSLFTNSSQRMFGRITTGLKNCDVISIRTCAELEGELCGFIERQCQRKVLLTGPMLPEPQEKSGKPLEGRWNHWLNGFEPDSVVFCAFGTQFFFEKDQFQELCLGMELTGLPFLVAVMPPRGSSTIQEALPEGFEERVKGRGIVWGGWVEQPLILSHPSVGCFVNHCGFGSMWESLLSDCQIVFIPQLADQVLITRLLTEELEVSVKVQREDSGWFSKENLRDTIKSVMDKESEIGNLVKRNHLKLKETLASPGLLTGYADSFVEALENEVNNTKPF

SEQ ID NO: 6186 - protein, 470 aa, Hevea brasiliensis
MNKAQAQLVFVPIPVMGHLVSTVEVAKLLLTRDHRLSITVLVLELPLTNSKVQNYVESVQDSSSTLSNRLRFIDLPKDGSELFDLSSFFERQKPNVKDAVLKITQSESSVDSPRLAGFVLDMFCTPMIDVANEFGVPSYFFCTSGAAFLGFVLYEQKIHDEAEFDAIQFKDSDTELLVPCLINPFPARSTPSAMLNKERLPYLRNAARRFREAKGIIVNTFLELESHAIESFETPPLYPVGPILNVELDGRNSHQEIMQWLDDQPVASVVFLCFGSMGSFGEDQLKEIACALEHSGHRFLWSIRRPPPPGKQAFPTDYEDPQEVLPEGFLERTAAVGKVIGWAPQVAILAHPAVGGFVSHCGWNSVLESIWFGVPIATWPMYAEQQFNAFEMVTELGLAVEIKMDYRNDSGVIVNCNEIERGIRSLMEHDSKKMKKVKEMSEKSRRALMDGGSSYCCLGRLIKNFMDDLT

SEQ ID NO: 6187 - protein, 471 aa, Oryza sativa
MPSSGDAAGRRPHVVLIPSAGMGHLVPFGRLAVALSSGHGCDVSLVTVLPTVSTAESKHLDALFDAFPAVRRLDFELAPFDASEFPSADPFFLRFEAMRRSAPLLGPLLTGAGASALATDIALTSVVIPVAKEQGLPCHILFTASAAMLSLCAYFPTYLDANAGDGGGVGDVDIPGVYRIPKASIPQALHDPNHLFTRQFVANGRSLTSAAGILVNTFDALEPEAVAALQQGKVASGFPPVFAVGPLLPASNQAKDPQANYMEWLDAQPARSVVYVSFGSRKAISGEQLRELAAGLETSGHRFLWVVKSTVVDRDDAAELGELLGEGFLKRVEKRGLVTKAWVDQEEVLKHESVALFVSHCGWNSVTEAAASGVPVLALPRFGDQRVNSGVVARAGLGVWADTWSWEGEAGVIGAEEISEKVKAAMADEALRRKAASLAKAAAKAVAGGGSSHRCLVEFARLCQGGTCRTN

SEQ ID NO: 6188 - protein, 524 aa, Spodoptera exigua
MEKLKCLLFCIVVSLCSCDGYKILVVFSTPNPSHGILGDNMVRHLLNAGHEVTYLTPYIETQNNKTNNLHLIDVSNTQNISEETKDILDFKQIIKGTVDLPDFKLMFELVSKIGDMILGNPNVQKLLKDPQQKFDVIISEYMFHGLFSTFSAVFQCPYIWFSTIEPHWIALNLVSGPMNPAYNGDYLQGRIPPFSFMGRVQELWTQMKGLYYYKYDFHYTEEAIYQKQIVPILKDQGKPVPDYNLLKYDASLMLGNSHVAIGNAVPLPPIYKHIGGYHINEEVKPLPESLKKIMDSAKNGVIYFSMGSNLKSKELPDDLKQGLLEVFRGLKQTVIWKFEENLPDQPKNVHIVQWAPQQSILAHPNLKLFVTHGGLLSLTEAVYFGVPIIVIPVFADQFLNANQARNKGFAERVDPSHHLHKDLKVALDKVLGDFNRYSGRAKEVSAAYHDNPIKPGVALNFWVEHVVRTRGAPHLRLVALQVPLYQQAYLDLLAVLLAAAIAILLVVRRILSLLTSKRTKLKKN

SEQ ID NO: 6189 - protein, 479 aa, Arabidopsis thaliana
MKIELVFIPSPAISHLMATVEMAEQLVDKNDNLSITVIIISFSSKNTSMITSLTSNNRLRYEIISGGDQQPTELKATDSHIQSLKPLVRDAVAKLVDSTLPDAPRLAGFVVDMYCTSMIDVANEFGVPSYLFYTSNAGFLGLLLHIQFMYDAEDIYDMSELEDSDVELVVPSLTSPYPLKCLPYIFKSKEWLTFFVTQARRFRETKGILVNTVPDLEPQALTFLSNGNIPRAYPVGPLLHLKNVNCDYVDKKQSEILRWLDEQPPRSVVFLCFGSMGGFSEEQVRETALALDRSGHRFLWSLRRASPNILREPPGEFTNLEEILPEGFFDRTANRGKVIGWAEQVAILAKPAIGGFVSHGGWNSTLESLWFGVPMAIWPLYAEQKFNAFEMVEELGLAVEIKKHWRGDLLLGRSEIVTAEEIEKGIICLMEQDSDVRKRVNEISEKCHVALMDGGSSETALKRFIQDVTENIAWSETES

SEQ ID NO: 6190 - protein, 561 aa, Citrus unshiu
MYILYAHQGHIIPMIDTTRLLAQHGAAITIVTTPANAARFKTVVARAMQFGLPLQLIEIQFPYQEAGVPEGCENFDMLHSTDLVSNFFKSLRLLQLPLENLLKELTPKPSCIVSATCYPWTVDTAARFNIPRISFHGFSCFCLLCLYNLPTSTVQENVTSNSDYLVVPGLPDQIEMTKVREKWKDFGEMVLAADMKSYGIIINTFEELESEYVKECTKTKGRKVWCLGPVSLCNKQDIDKAERGKKAAVDISECLNWLDSWPPNSVVYVCLGSICNLTSSQMIELGLGLEASKKPFIWVIRGGNNTSKEIQEWLLEEKFEERVKGRGILILGWAPQVLILSHPSIGGFLTHCGWNSSLEGISAGVPLITWPLYGDQFWNEKLIVQVLNIGVRIGVEVPLDFGEEEEIGVLVKKEDVVKAINILMDEGGETDDRRKRAREFQIMAKRTTEETGSSSLMIKLLIQDIMQQRHVLNIGERIGVEVPLDFGKEEEIGVLVKKEDVVKAINILMDEGGERNDRRKRGREFQIMAKRATEETGSSSLMIKLLIQDIMQPPHGDDQHI

SEQ ID NO: 6191 - protein, 213 aa, Cephalotus follicularis
CLTWLDSQPSQSVVYLSFGSMGRFSLKQLSETAIALDASGVRFLWVVRNPLPDNGSQPLLGAEEPSLEEFLPEGFLDRTKDRGFVVKSWAPQVKVLNHDSVGGFVTHCGWNSTLEAVSAGVPMLAWPLFAEQKITRTFLVEEIKVALSVAESRDGFVNADDLKIRLTELMDSEEVKAMRERILAMKDRAVRATSDGGSSRVALAKLAATLQTR

SEQ ID NO: 6192 - protein, 478 aa, Nicotiana tabacum
MKTTELVFIPAPGMGHLVPTVEVAKQLVDRDEQLSITVLIMTLPLETNIPSYTKSLSSDYSSRITLLQLSQPETSVSMSSFNAINFFEYISSYKDRVKDAVNETFSSSSSVKLKGFVIDMFCTAMIDVANEFGIPSYVFYTSNAAMLGLQLHFQSLSIEYSPKVHNYLDPESEVAISTYINPIPVKCLPGIILDNDKSGTMFVNHARRFRETKGIMVNTFAELESHALKALSDDEKIPPIYPVGPILNLGDGNEDHNQEYDMIMKWLDEQPHSSVVFLCFGSKGSFEEDQVKEIANALERSGNRFLWSLRRPPPKDTLQFPSEFENPEEVLPVGFFQRTKGRGKVIGWAPQLAILSHPAVGGFVSHCGWNSTLESVRSGVPIATWPLYAEQQSNAFQLVKDLGMAVEIKMDYREDFNKTNPPLVKAEEIEDGIRKLMDSENKIRAKVMEMKDKSRAALLEGGSSYVALGHFVETVMKN

SEQ ID NO: 6193 - protein, 484 aa, Polygala tenuifolia
MDFDRSNSKPHVAILASPGLGHLIPVIELGKRFVTQHNFNVTLFVAPSPTSKAEAQQLQSATTPKIFDIVELPPIDISNIIEPGAAVVRVLRVIMREIRQSLRSAISNMQSLPNALIVDLFGTESMSIAEEFNMLKYIFLPANASFLALTIYTPFLDKQVEGEYEEQKEVLRIPGCSPVRPEDVVDPMLDRSNLQYHEYVQMGVEMAQGHVDGFLLNTWEDLQPKEMKAFRDDNQLGRIVKAPVYPVGPLVRPSGSSGRSSARKLFDWLDIQPSKSVIYVSFGSGGTLSYQQVTEIAWGLELSQKRFVWVVRPPSSDSTDAAFFHGGGDNRDPCTYLPEGFTKRTQHVGIVIPMWAPQMDILSHPSIGGFLSHCGWNSTLESLLNGVRMIAWPLYAEQRLNARLLTDGLGVAVQPKELPVKREVGREEIEEMVRKVMEDGKDGIRSRVNELKNGAQKALCKGGSSYDALYLIVKQCEQKLQIVE

SEQ ID NO: 6194 - protein, 453 aa, Cephalotus follicularis
MRESPRHVAVLAFPFATHAAPLLALVRRISKAAPAVKFSFFSTAQSNAANFARSHDDENEAIKPYNVHDGLPEVYVFKGNPHEPVSYFLEATPGNFRSAMEAAVAETGLEITCLMTDAFYWFAAEMAEAMGVPWVPLWTAGPRALFVHVDAPVIRQHMGINVEHGLFAAPEDRTLDFLEDFATTRVADLPDGIISGCTETPMLQMLDRVGVMIPRATAVAMNSFEELDPTVINILKSRFKKLLNVGPFILTSPSSAAIPDEHGCLQWLDKQKPASVAYISFGSVITPPPNEVEALADAMEASGFPFLWSFRGNAEEKLPKGFIERNRAKAKVVPWAPQLQVLLHSSVGVFVTHCGWNSILESMNGGVPMICRSFFGEQPLNKRTVEVVWKTGLGVDQFTKDGTMKALKVILSSEEGKKMRERIGVQRELAVNAVQSDGSSTENFKTLVQTVTN

SEQ ID NO: 6195 - protein, 320 aa, Helianthus annuus
MDLRTGDTHDHLKRGFEGLQQEVTWFLEEESPDWIIYDFAPYWLPSVADGLGISHAHFSIVTPWFIAFWGALTDDLINGSDERMLAEDLMTPPKWVPFPSKLCYREHKANLIMCHYSSNASEVSDAYRLWMILKGSDCMFMRYCYELEPQWLTLLEKLHELPVVPVGLLPPTNIGDEKDETWVMVKKWLNGQQKGHVVYVAIRSEIMVSKSELVELDLGLKLSGLPFFWTLRKPAGSTESDSMELPDRFLERTRDRVVVWTSWVPQLQVLSHESVGGFLIHCGWSSNVEGLMSGHPLIMLPFLVDLGLIARIPVDKQVEV

SEQ ID NO: 6196 - protein, 456 aa, Withania somnifera
MTTHKAHCLILPYPGQGHVNPMLQFSKRLQSKSVKITIATTKSFLKKMQKLPTSISIEAISDGYDDDGLDQARSYAAYLTRFKEVGSDTLSQLIEKLANSGSPVNCIVYDPFLPWVVEVAKNFGLAIAAFFTQSCAVDNIYYHVHKGVLKLPPTQVDEEILIPGLSYAIESSDVPSFESTSEPDLLVELLANQFSNLEKTDWVLINSFYELEKHVIDWMSKIYPIKAIGPTIPSMYLDKRLPDDKEYGLSMFKPITDACINWLNHQPINSVLYVSFGSLAKLEAEQMEELAWGLKNSNKNFLWVVRSAEEPKLPKNFIEELPSEKGLVVSWCPQLQVLEHESIGCFMTHCGWNSTLEAISLGVPMVTLPQWSDQPTNTKLVKDVWEMGVRAKQDDKGLVRREVIEECIKLVMEEEKGKVIRENAKKWKELARNAVDEGGSSDKNIEEFVSKLVTIS

SEQ ID NO: 6197 - protein, 476 aa, Helianthus annuus
MATTETDSLHGRKQLHVAMFPWLAFGHILPFLELSKFIAQNGHKVSFLSTTRNIQRLPTLPSHLSPLINLVKLTLPHVQELPQNAEATMDLRTGETHDHLKRAFDGLQPEVTRFLEEESPDWIIYDFAPYWLPSVAAGLGISRAHFSIVTPWFIAFLGASADDLINGSDDRTTAEDLMAPPKWVPFPSKLCYRKHEANLVMCHYSSNASEVSDAYRLGMILNGSDCMFMRYCYELEPQWLTLLEKLHQLPVVPVGLLPPTNIGDEKDETWVTVKKWLDSQQKGHVVYVALGSEFMVSKSELDELALGLELSGLPFFWALRKPVGSTELNSVELPNGFLERTRDRGVVWTSWVPQLQVLSHESVGGFLTHCGWSSTVEGLMFGHPLIMLPFLVDQGLIARILVDKQVGVEVPRNEEDGSFAKESVARSVRSVVVDDEGKIYKANAMAWSNVFGDTKLQKKYIDDFIDYLEKKRRVVA

SEQ ID NO: 6198 - protein, 286 aa, Dichanthelium oligosanthes
MPVVELPPYRVRDLMHVGKDGHELMREMMARAVAAVKASSGLILNTFDALERRELEGLRRDLAMPVFDIGPLHKFSPAGDSSLVRPDRSCLEWLDAWPPASVLYVSFGSLACISPQDLVETAWGIADSGVPFLWVVRPGMVGGSAHQELPEGFEAATRGRGMVVAWAPQEEVLRHRAVGGFWTHNGWNSTMESICEGVPMLCRPSFGDQMGNARYVEHVWRVGFEVDGELERGSVEAAIRRLMTDKDGGEMRARAGELKKAAAECTGKGGSSCLAIDKLVTYLLSL

SEQ ID NO: 6199 - protein, 474 aa, Medicago truncatula
MAKTIHIAAISIPAFSHQASIIEFCKKLIHHHNHFHITIIFPTIDSPLQATLTLLKSLPSNITYTFLPPINKKSLPQNLSPAVQIQLAVSQSMPSFHTTISSLCSSSTTPPLVALITDPFANESLEVLKEFNLLSYIYFPPSAMTLSLFIHFPKLHEEISCEFRDHNEAIQIPGCVPIHGIDLPEHFQDRSSLAYDLILQRCKRFNLADGFLVNSFLKMEENTMKALEEHNDSVFLVGPIIQNGTSNETKVSDSDLECLKWLKNQSTNSVLFVSFGSGGTLSQEQVNELAFGLELSGQKFLWVLRVPSDSSNEAYLGAKNDDDPLNFLPKGFLERTKGQGLVVPNWAPQTQILSHGSIGAFLTHCGWNSVLESVVLGVPMIAWPLFAEQKINAVLLCDGVKVAMRLKFNEDGLVGRDEIAKVVKELMLDDEGNVIRERIEELRDAAIDALKEDGSSTLAICQFGNRLESNGTNL

SEQ ID NO: 6200 - protein, 476 aa, Glycine max
MDLQQRPLKLHFIPYLSPGHVIPLCGIATLFASRGQHVTVITTPYYAQILRKSSPSLQLHVVDFPAKDVGLPDGVEIKSAVTDLADTAKFYQAAMLLRGPIAHFMDQHPPDCIVADTMYSWADDVANKLRIPRLAFNSYPLFAVSAMKSVISHPELHSDTGPFVIPDFPHRVTMPSRPPKMATAFMDHLLKIELKSHGLIVNSFAELDGEECIQHYEKSTGHKAWHLGPACLVGKRDQERGEKSVVSQNECLTWLDPKPTNSVVYVSFGSVCHFPDKQLYEIACALEQSGKPFIWIVPEKKGKEYENESEEEKEKWLPKGFEERNREKGMIVKGWAPQLLILAHPAVGGFLSHCGWNSSLEAVTAGVPMITWPVMADQFYNEKLITEVRGIGVEVGATEWRLVGYGEREKLVTRDTIETAIKRLMGGGDEAQNIRRRSEELAEKAKQSLQEGGSSHNRLTTLIADLMRLRDSKSAT

SEQ ID NO: 6201 - protein, 486 aa, Medicago truncatula
MSSSDESFVAHVAFLPSSGLGHLNPCLRTAELFLRYGCKITLITPKPTISLAESDLITQFCSSFPSSQLTQIDLNLIPLDPSINVNTVDPFWLQFETIRQSLHRLLPSILTKLSSSPSSSSPLSALIYDVSLISPLVSIMESFTFPSYIYFIAPARMFSFFAYLSVLSEKSNDGKHFSCIGDAVEIPGIAPIPKSSLPPLILQPNSLFEKILMEDSPKLRKLHGIFMNSFEDLEAEALAALNDGKVVPGLPPVHAIGPLVPCEFEKVRCSTNNCTDSVLKWLDEHPKGSVVYVCLGNKTSTRRDQIKDMANGLMSCGYKFLWVVKLKVVDKEEEEELENVLGNEMMKKVNEKGMVINKWVNQMEILGHPAIGGFVNHGGWNSIVEAIWHGKPILSWAHDGDQKIASEVVQISGVGVWPEEWGWGKQNLVKGEEISKVIKEMMSSESLRIKAGKMMEVARKAASVGGSIEVVIKKQIEEWKMNFQSI

SEQ ID NO: 6202 - protein, 482 aa, Brassica napus
MEESKAPHVAIIPSPGMGHLIPLVQFAKRLVHRHGVTITFVVVGDGPPTKAQRTVLDSLPPSISSVFLAPADLTDLPPTTRIETRISLTVTRSNPELRRVFDSFAAEGRLPTALFVDLFGTDAFDVAAEFNVLPYIFFPTTANVLSFFLHFPKLNETMSCPFSELTELVNLPGCVPVSGKDVLDPAQDRNDDAYKWLLHNTKRYKEAEGILVNTFLELEPNAIKALQEPGLDKPPVYPIGPLVNVGKQESSNGIEEESECLKWLDNQPLGSVLYGSFGSGGALTCEQFDELAHGLADSEQRFLWVIRSPSQIADASFFNPHSQNDPLTFLPPGFLERTKGRGFVIPSWAPQAQILAHPSTGGFLTHCGWNSTLESIVSGVPLIAWPLYAEQRMNAVLLAEDIHVALRAHAGEDGMVRREEVARVVKGLMEGEEGKGVRNKMKEMKEGASRVLNDTGTSTKALNLVTFKWKAHQRELKQNGKH

SEQ ID NO: 6203 - protein, 490 aa, Unknown
  Description of Unknown: Oryza sativa Japonica Group sequence
MGATGDKPPHAVCVPYPSQGDITPTLHLAKLLHARGFHVTLVNTEFNHRRLLASRGAAALDGVPGFVFAAIPDGLPAMSGEHEDATQDIPALCQSTMTNCLGHLLALLSRLNEPASGSPPVTCLVADGLMSFAYDAASACGFVGCRLYRELIDRGLVPLRDAAQLTDGYLDTVVDGAAARGMCDGVQLRDYPSFIRTTDLGDVMLNFIMREAERLSLPDAVILNTFDDLERPALDAMRAVLPPPVYAVGPLHLHVRRAVPTGSPLHGVGSNLWKEQDGLLEWLDGHRPSSVVYVSYGSIAVMTSEQLLEFAWGLADSGYAFVWVVRPDLVKGGEGDAAALPPEFHAAVEGRGVLPAWCPQEKVLEHDAVGVFLTHSGWNSTLESLAAGVPMLSWPFFAEQQTNCRYKRTEWGIGMEIGGNARRGEVAAMIREAMEGKKGREIRRRAQEWKEKAVRVTLPGGPGDTNLDRVIHDVLLSCKDKISRVNGESV

SEQ ID NO: 6204 - protein, 464 aa, Helianthus annuus
MPKPHVLVIPYPAQGHVIPIMELAQRLAKHRVRVTCINTEVNHKLVTGNCLDKDGLGDVVQMVSIPDGLEPWEDRSDIRKLTLSILQTMPRKLEELIETINKEDSSKVTCIIADGFMGWAIRVAKKMGISSAAFWPASVATLASFLSFQKLIDDGIINKNGIPLSDEMIQLSETMPPIKPQNLTWACFEDSALVEVIFKMVLQAEEASRLTEWFICNSCPELEAAAFSLYPQLLLIGPLLASNRLAVQAGHFWQEDSTCLAWLDQQPVSSVIYVAFGSFTMFNQTQFEELAHGLELSNRPFLWVVRPGMTKETTTDYPEGYIERIGSRGKILSWAPQQKVLSHPSVACFMSHCGWNSTLEGVTNGVPFLCWPYFADQFHNETYICDIWKNGLGLEKDEVGIITRGEIMSKVEKLLSDKTLKVKASDIKEKVASKGGCSHKNLNNFIEWIQKNNDAHTKDEPESM

SEQ ID NO: 6205 - protein, 495 aa, Helianthus annuus
MALEQSQELIQLHFLVIPMGSPGHYIPTIDMAKLLAQHGVQVTIVATPVNALRFGSILDQAIQSGLPICFLEFQLPYKEFGLPEGCESLDDLPNMGMTGALMQAYRSLQTQVEQYIEKLDPRPNCILADTFLLWTGETAKKFQIPRIIFDGMNCLTQMCNHVLYFSKVYESVGESESFVLPGLPDHIELKRSQLPFAFSSSHEAVIDFHEKLRASESEAYGVVVNSFEELEQGYVDEYQKVKGDKVWCIGPLSLCHKDESEKVQRGNKSSVNKDECLKWLDSQENGSVIYACLGSISRVEPAQLIELALALESSKRPFIWVVRAGHKTEKIEKWIDEEGFGERTKDRALLIHGWAPQLLVLSHPAVGGFLTHCGWNSILEGVSAGVPLVTWPQFQEQFYNEKLVVQVLRTGVSVGAQKISELWVDEDKSGELVKSEAFLNAIEMVMEEGKEGEERRKRAKELGKIADKAIEDGGSSHRNMTRLIEDIKNQANIGK

SEQ ID NO: 6206 - protein, 223 aa, Citrus unshiu
MSMPNPDLDEAQYQKIFQWLDDLAESSVVFLCFGSSGSFDVAQVKEIAIGLERSGYNFLWSLRVSSPKDEVSAHRYVTNNGVFPEGFLERIKGRGMICGWVPQVEILAHKAIGGFVSHCGWNSILESLWYGVPIATWPIYAEQQLNAFRMVKELGLALDLRLDYRVGSDLVMAGDIESAVRCLMDGENKIRKKVKEMAEISRKSLMEGGSSFNSIGQFISLNF

SEQ ID NO: 6207 - protein, 490 aa, Centella asiatica
MVRAELIFIPAPGVGHLLSTVEVAKLLVSRDSRLSISILIMKLPMDTGINAFIQSLEKDTTDGIVFRELPALDEIVISALMPKPGISFLPSFVESQRTNVRDAVAAILNGSESSRLAGFVIDMFCTPMVDVADEFGVPSYVFFTSGAAFLGLMFYAQSLKDDDNHDICEYKDSEVELSIPSYFNPVPAKVLPTVMLSKEGSAVVTSIARMFRRTKAIISNTVLELEAHAIKSLADDGKIPRIYHVGPIISFKRGDDGSKSLNQNSEEAIISWLDKQPPSSVVFLCFGSMGSFEKDQVTEIACALELSGHRFLWSLRRPSKVKEKIEMPKEYENFDEVLPEGFLERTTEIGKVIGWAPQVAILSHPSVGGFVSHCGWNSTLESIWSGVPMATWPLSAEQQINAFELVKELGVAVEIKMDYRKEPFVDCEPTLVPAEVIESGIRCLMDGEGEKVREKMKEMKNNCRKATLEGGSSHISLGNFIDDIMDNIHE

SEQ ID NO: 6208 - protein, 1103 aa, Citrus unshiu
MHPMRICIPSPFQSHIKAMLQSAKLLHHKGFHITCVNTEFNHRCFLKSRGHHSLDGLPNFRFEAIPDDGLPASSYESSTTQDMYSLCENIINDVLLQPFLDLLAKLSDSSNNVNPAVSCIISDDFMAFTITAAQRLGLPSALFFTISACSFKGLKQFQTLKEKGLFPLKDESCLKKEGLEREEIKMESKPKACSKVHAVCIPSPFQSHIKAMLKLAKLLHHKGFHITFVNTEFNHRRLLKARGQHSLDGLPSFRFEAIPDGLPASSDESPTAQDAYSLDGFLPFTITAAQQLGLPIVLFFTISACSFMGFKQFQTFKEKGLFPVKDKSCLTKEYLNSLIDWIPGMKDIRIRDLPSFIQSTDPKDMMFNLCVEATENASKASAIIIHTFDALEQQVLNALSFMFPHHLFTIGPLQLLLNQTEEQDGMLNSIGYNLLKEETECLQWLDCKEPKSVIYVNFGSFIFMNKQQLIEVAMGLVNSNHLFLWIIRPDLVTGETADLPAEFEVKAKEKGFVASWCPQEEVLKHPSIGGFLTHCGWNSIVESLCNGVPMICWPFTGDQPTNGRYVCNEWRVGMEINGDDEDVIRNEVEKLVREMMEGEKGKQMRNKAMEWKGLAEEAAAPHGSSSLNLDKLEVKMEGCDYTYRGHAVCIPCPFQSHIKGMLKFARLLHLKGFHITFVNTEFNHRRYLKSRSSPRHNSNLENALLNFQYETIPDGLPDPSNENANQDANSLFESITNNVMLQPFLDLLQKLKSSSNSVNCIISDGFMPFTVTAAQQLGIPIALFFTIAARSFKGCMQLRTLEENTTLTSLIDLNSYATRVAIEAAKNAAKASAVVIHTFDALERQVLDALSAVFPNLFTIGPLQLLLNQINEQVGNSLSSTGYKYNLWKEETECLQWLDSKELPNSVVYVNFGSSVYLTKQQLTEVAMGLVNSNRPFLWIIRPDLVTGETADMPSEFEVKAKETGFIARWCPQEEVLNHPAVGGFFTHSGWNSTIESLCAGVPMICWPFLGDQTTNCRYTCNEWGVGMDITNSGDDNQVGRNEVEKLVGELMEGEKGMQMRNKASEWKRFAEEAAAPDGSSATNLEKLVNQVLLSKGLIPSKN

SEQ ID NO: 6209 - protein, 480 aa, Helianthus annuus
MAHKQLHVAMLASPGAGHLLPILLLGHRLATHHNLRVTVLAVTATASHSLSQLITSLTTHNHLSVIQIPAADVSGVAPPDAQVILQLCVMMRETIPAIRTTISALDSRPHVLVGDIFAIESCVIAEELGIPKYVFVTGNAWFTALFTYSPVLDKLVVGEYVDQKEPLEIPGCKPVRPEDVTDPLPNRYDETYNVYLDYAVRVTLADGLLINTWEDLEPQSLDALRTNEILRSVVKYKPVYTVGPVNKRYEPELVVLKDGVIEWLDKQPNRSVIYVSFGSGGTMSAEQIKELAWGLELSRQRFVWVVRPPTGHRPDGSFFSDGQSDATFDYLPEGFLTRNKHVGFVVPSWAPQMEILNHTSVAGFLTHCGWNSVLESLTSGVPMIAWPLYAEQKMNAAMLTEELKVAMRPEVSPTEKVVDREQIARMVMNLVEGEEGKAMKMKVDILKDGTDKAISENGSSYLSIYNGNRWIRGIITHGTT

SEQ ID NO: 6210 - protein, 460 aa, Panicum hallii
MANSHTSSIHVLLLSYPAQGHINPLLQLGKRLAAHRGVRCTLAVTRYVLGQSKPQTGAVHVAAYSDGCDTGGYDEAGDAEAYLSRLESAGSASLDELLRAESAGGRPVRAVVYDSFLMWVPRMARRHGAACAVFFTQACVVNVAYAHAWAGQMDLPVAPGKALPELPGLPAGLGPADFPTFLTEPDGGCLAYLDLVLQQCQGFEVADHVLVNSFYELEIKEAEYMASRWGAKTVGPTVPSAYLDNRLTDDVSYGFHLHTPMTEESKAWLDARLPRSVVYVSFGSLAAPSAGQMAEVAEGLDNSGKDFLWVVRASETSKIPGGFVDKVKGRGLLVTWSPQLEVLAHPAVGCFVTHCGWNSTMEALGIGVPMVAMPQWSDQPTNAKYIEHVWQVGVKLQPDAEGVVTKEEVERCVRQVMEGERSDEYKKNAAGWSEKAQKAMSEGGSSDSNIVEFLSKIRFK

SEQ ID NO: 6211 - protein, 464 aa, Medicago truncatula
MHNVDVTIITTPANAAIFQTSIDHDSSRGRSIRTHIVKFPQVPGLPQGMESFNADTPKDIISKIYQGLAILQEQFTQLFRDMKPDFIVTDMFYPWSVDVADELGIPRLICIGGSYFAHSAMNSIEQFEPHAKVKSNSVSFLLPGLPHNVEMTRLQLPDWLRAPNGYTYLMKMIKDSEKKSYGSLFDSYYEIEGTYEDYYKIAMGSKSWSVGPVSLWMNKDDSDKAGRGHGKEEDEEEGVLKWLDSKKYDSVLYVSFGSMNKFPTPQLVEIAHALEDSGHDFIWVVRKIEDAEDGDDGFLSEFEKRMKERNKGYLIWGWAPQLLILEHGAVGAVVTHCGWNTIMESVNAGLPLATWPLFAEQFFNERLLVDVLKIGVAVGAKEWRNWNEFGDDVVKREDIGKAIGLLMGGGEECLEMRKRVKALSGAAKKAIEVGGSSYTKLKELIEELKSFKLEKINKKLVSVT

SEQ ID NO: 6212 - protein, 387 aa, Ricinus communis
  MOD_RES (372)..(373): Any amino acid
MDSQPYQLHIAFFPYMAHGHMIPTMDMARLFARHGVKATIITTPFNASLISKTIERDRQKGFEIGIQLINFASAETGLPEGCENASSIRTQEMAAKFFKAISLLQQPLEHVLKECHPNCLVADMMFPWATEVASKFGIPRLVFHGISTFSLCVYNSLRHYEPHKGLASDFEPFMVPGLPDQIKITRLQVPDYIKEKNKQTELTHRMSQSELTSYGVLLNSFYELEPAYLEHYRKVMGRKAWSIGPLSLCNNDREDKMQRGDTASISGHECLRWLDSKKPNSVLYICFGSMFKFSTPQLIELAMALESSGQNFIWVVKKQENGSTQEEWLPEGLEKRMEGKGLIIRGWAPQVLILDHEAIGGFMTHCGWNSTXXERRHRKGSNPIDDW

SEQ ID NO: 6213 - protein, 484 aa, Nelumbo nucifera
MKMVHVLVVSFPGQGHVNPLLRLAKLLASEGLLVTFSTTESIGHMMKKATNIPGTCSATPIGQGQLRFEFFSDGWPADDNSKRQDIDGLLHRLETVGKESFTCLVKKQAEEGRPVSCLVNNAFVPWALDVATDFGIPCAVLWVQSCAVFSTYYYYFHRLARFPSVDEPHLSVHLPGLPILNSHEVPSFLHPSTIYHMLGNLILGQFQNLSKSFYVLVDSFEELEHEVIEAMSHLSLPPLRTIGPLFRSLKGSSSNSSNGVRGDFWTAAEGCIQWLDSQPLSSVVYISFGSIAFLPKDQMEEMAWGLLKTGLPFLWVVKPPAKEIATDTGLPAGFMDKAQGKGMVVEWCPQEQVLAHPSVACFVTHCGWNSSMECLTSGVPVVAFPQWGDQVTNAKFLVDKYGVGSLMGRSDRDSQLISRETVERCILEVARGPKTEEAKKNALKWKKAAEKAVANGGSSHRNIQAFVDEVRRLALTATSFEINT

SEQ ID NO: 6214 - protein, 495 aa, Brassica napus
MGTSDEAAASKLHIFFFPYMAHGHMIPTLDMAKLFATKGAKSTILTTPLNSKLFEKPINSFNDENPELEDIKLQILNFPCTELGLPEGCENTDFIFSNHDLTKGNLNMKFLLAMEYFKEQLEELLETVKPDCLVGNMFFPWATKVAEKFNVPRLVFHGTGYFSLCASHCLRLHKPYKNVASSSEPFVIPELPGDVVITDEQVIEKEEESVMGKFMKDIRDSERDSFGVLVNSFYDLEPAYADFFKTHVAKRSWDIGPLSLGNREFKEKAERGKKASIDEHECLKWLDTKRCESVIYLSFGTMSSFDDEQLMEIAAGLEMSGHDFVWVVNRSGSQGEKVEWLPEGYEERTKGQGLIIRGWAPQVLILDHQAIGGFLTHCGWNSLLEGAASGLPMVTWPIGAEQFYNEKLVTQVLKTGVSVGVKKMVKGSGDFISREKVDIAVREVMVGDEMRKRAKQLAVMAKDAVREGGSSDLEVNRLMDELKLVRMQKEQGTRT

SEQ ID NO: 6215 - protein, 509 aa, Onthophagus taurus
MKFLLLVLIVCGVFNVYKTAKILAVLPAPSYSHYVTGSVLATELARRGHEVTVVSTFKPKTVPFGNYKFVEVKGIKDFLKKEENILHYFEFDNYNKPFISYVVHKFAYNVIEFFFNDENVKEFIKSGGHYDVVFVDEFFNEALYGFCNLFKAACVNLCSVSPTIWCNRPTGNIGMASYSSGMGTNYSPKMSFFQRLHNLFLFIAEEFIYHGYHIPKMEKLLHKSFPNSPPLYDLIYNISMVFVNSHPAMNAPLPLTPNMIELAGMHLDGMKNEKIPDDIQSFLDKHNEGVVYFALGSNAKSKDFPKRVLKELMNGFKKWGKPILWKFEDELPEKLENVKIASWLPQTSVLAHKNVIAFITHGGRLSIIESLYYGVPMIGIPIFAEQPHNIAEMVYYKYGIGLDLNTFTAEDLYNSLHEITTNSKFSEEAEMRSKIMQKKNALDEAVYWIEHLVEFKGGSYLRTAGVDLPWYQFWMVDVIGFCVVCGFVLITIVIFSILKCLKCIDKKKK

SEQ ID NO: 6216 - protein, 457 aa, Setaria italica
MAGEEQLRDGGLHRRRVVVLFSLPFHGHLNPTLKLAALLRARGLAVTVLHTDFNAPDPARHPGLAFVPIHETPLQDTAVSPDSDILAKLLALNAAIAAPFRQALASLQDAVACAVVDGQCYAAMDAAGELGVPVLALRTDSAAALRNMLAIPRLRDAGYLPFKEEQLDEPAPGLEPLRVRDLIRVDGCDTDELCGFVTSVADAVRASVSGIVFNTFEAIEAPELAKIQRELSLPAFAVGPLHLLSQTPPPAEQSLHAPDRGCLAWLDARTPRSVLYVSLGSLACVNRAVFEEMAWGLAGSGVPFLWVVRPGMVTGGAAGEEAPPPLPDGLEEKMRGRGKIVTWAPQREVLAHDAIGAFWTHCGWNSILESICEGVPMLVQPCFADQMVNARYVTHEWGVGMEVGEVIERERVAKAVTKLMVGEDGAWMRERARRLQVQASAATSLALDSLVQYILSL

SEQ ID NO: 6217 - protein, 479 aa, Ricinus communis
MDSDAKRHPELYFFFFPFMAQGHSIPLIDMAKLFASRGQKVSIITTPVNAPDISKAIERSRVLGHEIDILIIKFPCVEAGLPEGCEHLELVTSPEMGLNFFMATDILAKPLEHLLKQYRPDCLVADTFFPWSNEAASKSGIPRIVFSGTCFFSSCASQCVNKYQPYKNISSDTDLFVIPEFPGEIKLTRNQLPEFVIQQTGFSEFYQKVKEAEAKCYGVIVNSFYELEPDYVDHFKKVLGIKAWNIGPISLCNSNIQDKAKRGREASIDENECLEWLNSKKPNSVIYICFGSVANFVSSQLLEIAMGLEDSGQQFIWVVKKSKNNQEEWLPEGFEKRMEGKGLIIHGWAPQVTILEHEAIGGFVTHCGWNSTLEAIAAGVPMVTWPVAAEQFYNEKLITEILRIGVAVGTKKWSRVVGDSVKKEAIKKAVTQVMVDKEAEEMRCRAKNIGEMARKAVSEGGSSYSDFNAFIEELRRKKV

SEQ ID NO: 6218 - protein, 482 aa, Brachypodium distachyon
MADTASEHSSGGGGIHILLLPYPSQGHINPILQFGKRLAATHPGVRCTLAVTRFLLAETRGAASPGAVHLAEISDGFDRGGFTEAAGDVAAYLARLESAGSRTVGELLRAEAEAGEEHGRQPVRAVVYDAFLQPWAPAVGRRHGAACAAFFTQAPAVDLAYAHAQAGRMHVPVLGIGEETLELPGLPAGLKRADLPTFLTDPSDCPAYLDLLLKQFVGLDSVDHVLVNSFHELQPQESEYMAATWGARTVGPTVPSAYLDHRIPEDVSYGFHLHTPTTAATKAWLDARPPRSVAYVAFGSIAAPSAAQVAEVAEGLLNSGAPFLWVVRASETSKIPEGFADRASEIGMVVTWTAQLEVLSHGAVGCFVTHCGWNSTTEALGAGVPMVGVPQWSDQTTNAKYIQDVWRVGVRALPDGEGVVRKEEVERCVREVMGGEEYRRNAAQWKEKARMSMSEGGSSDRNIVEFLRDLGLGKSQQSTEAL

SEQ ID NO: 6219 - protein, 488 aa, Vigna angularis
MSSQEQGPHFVLFPLMAQGHMIPMMDIAKLLVHRGVTVTVVTTPGNAARFTPIFDRYVGSGLPIRLAQLPFPCEEVGLPEGCENIDMIPSLGTARTFFEATNLLHQPAEKLFGEFWPPPSCIISDMCLPYTSHIAKKFNIPRISFVGVSCFCLLCHHTILVNNVRENIASDSEYFVLPGIPDKIEMTMKQSGVSMNETWVQFREEVMAAEMATYGVIMNSFEELEPAYAREYKKVKDDKVWCIGPVSLINKDHLDKAQRGRASVDESEHIKWLDCQKAGSVIYACLGSLCNLTAPQLIELGLALEASERPFIWVIREGKHSESLEKWIEENGFEERTSCRSLVIRGWAPQLLILSHPAIGGFITHCGWNSTLEAICAGVPMITWPLFADQFLNESLVVKVLKVGVKVGVESPMTWGKEEEVGVEVKKEDIERAIAEIMNETSESEERRERVRELGEMAKRAVEKGGSSHSNVSFLIQDIMQRNKGDTP

SEQ ID NO: 6220 - protein, 475 aa, Sinningia cardinalis
MEDTIVLYPAPGIGHLLSTVELGKLILRHHHFSTIHVLITTGFDDSPHTATYIDQISKTNPSITFHRFPFFQMNPSPNASFGSILFEFIRLNATNVHHALQEIMQTSKIRALIVDFFCSSAFPVSESLGIPVFYFFTSGLAALAAYLYFPTLHMQVDQSFKDLVNTNFHIPGLPPLPARQMPQPVWDRNDPAYHDVLYFSHHLAKSSGILMNTFDGLEPIALKALRHGLCVPDAPTPPIYNIGPLIAYAESESADQNLKHDCLPWLDTQPNQSVVFLCFGSRGIFSADQLREIAKGLERSGHRFLWVVKKPPFDENNKEDKELGELNVMGIMPEGFLDRTKDRGMVVESWVPQMKVLEHRAVGGFVTHCGWNSVLEAVIAGVPMVAWPLYAEQHLNKAALVENMKMAIPMQPREEDEFVFAEEVEKRISEVLDGEKSKELREQCRKMKNMSVDAWGKLGSSTAALEKVVQIWLGN

SEQ ID NO: 6221 - protein, 469 aa, Phytolacca americana
MEMEAPLIVIVPSPGMGHLIPLVEFAKVLVSRFHFSVSLLLPTTAQPTKAQTTLLNSLPSSVSHNFLPTVDPAHLPDGVAHEVTISLTHAHSLSSIRAALGSLAQQAQVVALITDLFGTGLYTVARDLGIPPYLYFTSTAMCLLFLFHLPKLDETVSCEYRDMPEPLVLPGCVPLHGKDFVDPAQDRQDQAYHVLLDHVKRYVLAEGIFVYTFVDLEPGAIKTLQTEDPNVPPVYPVGPIIQSGLDDDSHGSDCLKWLDRQPSGSVLFVSFGSGGTLSNEQLNELAIGLEISGHRFLWVVRSPNDHSSFGSFFSTQSQDDPFGFLPTGFVDRIKDRGLLVPSWAPQIKVLSHGSTGGFLTHCGWNSTLESIVNGVPLIVWPLYAEQRMNAVMLNQGLKVALRPNASQRGLVEADEIARVVKELMDGDEGKKARYKMRELSDSAKRVTSENGESTKLLSEVASKWSQCKS

SEQ ID NO: 6222 - protein, 536 aa, Citrus unshiu
MGHIVRPPDHNNAPNTDKVLSPIYLVTNLDFPEENISELHHYFKRNPTKMETQNSKQIPRAHVAMVPTPGIGHLIPQVELAKRLVHQHNFLVTIFIPTIDDGTGSSMEPQRQVLESLPTSISTIFLPPVSFDDLPDDVRMETRITLTLARSLSSLRDALKVLAESTRLVALVVDIFGSAAFDVANEFGVPVYIFFTTTAMVLSLIFHLPELDVKFSCEYRDVPEPVQLPGCVPINGRDFADPFQQRKNEAYRIFLSFSKQYLVAAGIMVNSFMDLETGAFKALMEGDSSFKPPPVYPVGPLVQTGSTNETNNDRRHECLKWLDEQPSESVLFVCFGSGGTLSPEQLNELALGLEMSGQRFLWVVRSPHERAANATYFGIQSMKDPFDFLPKGFLDRTKGVGLVVPSWSPQVQVLSHGSTGGFLSHCGWNSILESIVHGVPIIAWPLYAEQKMNAVLLIDDLKVSFRVKVNENGLVGREDIANYAKGLIQGEEGKLLRSKMRALKDAAANALSPDGSSTKSLAQVAQKWKNLESETK

SEQ ID NO: 6223 - protein, 449 aa, Unknown
  Description of Unknown: Oryza sativa Japonica Group sequence
MAAELHFLVVPLIAQGHIIPMVEVARLLAARGARATVVTTPVNAARNGAAVEAARRDGLAVDLAEVAFPGPEFGVPEGLENMDQLADADPGMYLSLQRAIWAMAARLERLVRALPRRPDCLVADYCNPWTAPVCDRLGIARVVMHCPSAYFLLATHNLSKHGVYGRLALAAGDGELEPFEVPDFPVRAVVYTATFRRFFQWPGLEEEERDAVEAERTADGFVINTFRDIEGAFVDGYAAALGRRAWAIGPTFGSISHLAAKQVIELARGVEASGRPFVWTIKEAKAAAAAVREWLDGEGYEERVKDRGVLVRGWAPQVSILSHPATGGFLTHCGWNAALEAIARGVPALTWPTILDQFSSERLLVDVLGVGVRSGVTAPPMYLPAEAEGVQVTGAGVEKAVAELMDGGADGVARRARARELAATARAAVEEGGSSHADLTDMIRHVGAQ

SEQ ID NO: 6224 - protein, 473 aa, Vigna angularis
MAKATHIAVIPSVGFSHFAPIINFSKLLVDLHPHIHLTCIIPILGSLPAAAKPILQTLPPRISTVFLPPVSHRDLPQGVPVVLQIQLAMNLSMPSIHHTLSSITSNNPHVAMVVDTFAYGALDFAQEFNMLSYVYFPSAATTLCTHFYLPTLHKETFCEYRDLPHPITVPGCVPFHGRDLYAQAQDRKSQFYKMSLKRYESYRFLDGIFINSFLELETGPIRAFKDEERGYPPLYPVGPIVQTGTATAGCTTTLECLTWLDKQQDGSVLYVCFGSGGTLSQEQTNELAHGLELSKHKFLWVVRAPSDEANAGYLGGEKDADPLEFLPSGFLERTKEQGMVVPSWAPQIEILGHGSVGGFLTHCGWNSTLESVVHGVPLITWPLFAEQRMNAVVMSEGAKVGVRPRVSENGLVERVEIVKVIRCLMEEEEGREMRRRMKELKEASANALKEDGASTTNLSQVAHRWKMLAHERS

SEQ ID NO: 6225 - protein, 488 aa, Arabidopsis thaliana
MAEAKPRNLRIVMFPFMGQGHIIPFVALALRLEKIMIMNRANKTTISMINTPSNIPKIRSNLPPESSISLIELPFNSSDHGLPHDGENFDSLPYSLVISLLEASRSLREPFRDFMTKILKEEGQSSVIVIGDFFLGWIGKVCKEVGVYSVIFSASGAFGLGCYRSIWLNLPHKETKQDQFLLDDFPEAGEIEKTQLNSFMLEADGTDDWSVFMKKIIPGWSDFDGFLFNTVAEIDQMGLSYFRRITGVPVWPVGPVLKSPDKKVGSRSTEEAVKSWLDSKPDHSVVYVCFGSMNSILQTHMLELAMALESSEKNFIWVVRPPIGVEVKSEFDVKGYLPEGFEERITRSERGLLVKKWAPQVDILSHKATCVFLSHCGWNSILESLSHGVPLLGWPMAAEQFFNSILMEKHIGVSVEVARGKRCEIKCDDIVSKIKLVMEETEVGKEIRKKAREVKELVRRAMVDGVKGSSVIGLEEFLDQAMVKKVEN

SEQ ID NO: 6226 - protein, 478 aa, Cephalotus follicularis
MGSEVGQLHLFFFPFMAHGHMIPTLDMANLFASRGVKATIITTPLNEPFIFLFFFLEKNSGIEIDIRILEFPAVEAGLPEGCENLDFITSDEKNLEMNIKFFTATTILKEPVEQLLQECRPDCLVADMFFPWATDAATKFGIPTLVFHGMIFFALCATECVRLYEPHKKVSSDSEPFIVPNLPGNIVLTRKQLPDFERENVGDDFSKLLKQCRESELRSYGVVFNSFYELEPTYADHYRKELGWKAWHIGPLSLCNRGIEDEALRGKNAECLKWLEAKKPNSVIYVCFGSLSNFSAAQLMEIAMGLEASGQQFIWVVRRDKTNDLEKEDWLPEGFEKIMEGKGLIIRGWAPQVLILDHVAIGGFVSHCGWNSTLEGVCGVPMVTWPVFAEQFYNEKLVTQVLRIGIGVGVQQWAIVEGDFVKKESIEKAVKEMMIGDRAEEMRGIAKALKEMARRAIENGGSSYSDFNTIIEKLRLKR

SEQ ID NO: 6227 - protein, 448 aa, Citrus unshiu
METQNSKQIPRAYVAMVPTPGIGHLIPLVELAKRLVHQYNFLVTIFIPTIDDGTGSSIQTIRQVLESLPTSISTIFLPPVSFDDLPDDFRIETRITLTLVRSLSSLRDALKVLAESTRLVALVVDPFGSAAFDVANEFSCEYRDMPEPVQLPGCVPVHGRDFADGFQQRKNEAYRFLLSFSKQYLLAAGIMVNSFMELETGPFKALMEGESSFKPPPVYPVGPLIQTGSNNETNNDRSLECLKWLDEQPSESVLFVCFGSGGTLSQEQLNELALGLEMSGQRFLWIAKSPHEEAANATYFSVQSMKDPLDFFYRKGFLDRTKGVGLVVPSWAPQAQVLSHGSTGGFLMHGVPIIAWPLYSEQKMNAVLLTEDFKVSFRVKVNENGLVGREDIANYAKGLIQGEEGKLLRKKMRALKDAAANALSPDGSSTKSLAQLARIWKNPEFETK

SEQ ID NO: 6228 - protein, 463 aa, Eustoma exaltatum
MSTPHILLVVFPAQGHISPALQLAMKLVAQGIQLTFLTSSFAEARMSKPTNISGLNFVYFPEVTKGKDYMFELRKHGSQTLKDIILSSINVGLPISRILYTTLLPWAADIARESHIPSILLWTQPVTTLVTFHYYFNGYEDVIKNICNHENSTLQLPRLPLLSRRDLHSFLLPSNPYKGVLRTFKDHLDALDMDENPTVLVNSFNALEEEALKAITKYKMVGVGPLVPSSIFNTKNNSEDSLSSNLWQKSIDCTGWLDSKPHGSIIYVSFGSHVKQSMTQMKEIAKGLLASGKAFLWVITSNNDETVKNQEDGIEILNNMMEELEEKGMIVPWCAQLEVLKHPSIGCFLTHCGWNSTLESMVCGVPMVCFPKMFDQGTISKLVVDVWKVGVRVDENEDGIVCQEEIKKCIDHVMDGGKFAQELGENARKWMSLGKEAVLEGGSSYYNLKAFVEEIKGGSSAFD

SEQ ID NO: 6229 - protein, 495 aa, Vigna angularis
MRVPLRGYKYCVEESKIVVFHFIQQEQKQKMVQQSLSNVHVLVLPYPAQGHINPLLQFAKRLASKGVKATVATTHYTANSIAAPNITVEPISDGFDRAGFAEANNDVQLFLSSFRSNGSRTLSQLIKKYHQTPSPVTCIVYDSFFPWALEVAKEHGVYGAAFFTNSAAVCSIFCRIQRGLIEVPVGAEDLPLRVPGLPALDSRALPSFVRFPQSYPAYMAMKLNQFSNLDKADWMFVNTFETLESEVVEGLKELFPAKMIGPMVPSAYLDGRIKGDKGYGASLWKPLNEECSNWLEEKGPRSVVYISFGSMVSLTAEQVEEVAWGLKESGVNFLWVLRESEQGKLPCGYRDLVKDKGLIVTWCNQLELLAHQATGCFVTHCGWNSTLESLSLGVPVLCLPQWADQLPDAKFLDEIWEVGLWPKEDDNGIVRKQEFVSSLKVVMEGERSEEIRRNASKWKKLAREAVGEGGSSDKHINQFVKYLMSADKNGSLNVH

SEQ ID NO: 6230 - protein, 488 aa, Brachypodium distachyon
MAIEAASATPAPERSTTHVVLLACPGAGHVLPVAELARRIVAHNDGFTATLVTHTNFSSGDHYASTFASLPPSVSTAQLPEMSIDDLPADARAETRIITIVKRALPHLRDLLLRLLDSPAGVAAFVPDLFCPWALEVSGELGIPGYIFCPSNLMGLSSLLYTPELDRTTTCEFRDLPDLVRLPGCVPLHGADLVDTIQDRGDPAYPLMVELGEHYLLAQGFLVNTFDAMEHETILAFQELSDKGVYAPAYAVGPFVRSCSNESNKHSSLQWLDAQPDGSVLYVCFGSGGTLSTAQTAELAAGLEASGQRFLWVTQFPSDKDRCASFFGGGRDGDSPVNYLPEGFVERTRGTGLAVPLWAPQVEVLNHPAVAGFVSHCGWNSTLEAVAAGVPTMAWPLYAEQRMNAVMLSERVGLALRPRAREEDGVVPRDEVARVARELMVGEKGAAARKKARELREAAQKGLAPGGKSREALEAIAGKWKKAVGNGN

SEQ ID NO: 6231 - protein, 476 aa, Solanum lycopersicum
MTIPEKIKKPHVAFLPSPGMGHITPLFEFAKRLVIHHGFHVSFFVITTAASAAQNELFRPENLPADFTAVEIPPVENISSFLTDDMKVVTQLCIMVRESLKHLPSLLMKNRPKALIIDLFCTDAFEICEKLSIPVYSFFTASTILMAFSLYLPTLDSEVEGEFVDLPETIQTPGCSPIHPHDILDQVKDRKNEEYNWYLLNVSRLPLAVGIFVNSWDDLEPVSLKALRENLFFQNIPLPPVYTIGPLIKQDEVVTEQDAEILAWLDDQPPDSVLFVVFGSGGTLTSEQLTELAWGLELSQQRFILVARKPSDASASAAFFNVGSDENDPLLYLPEGFVRRTEGRGLVVPSWAPQTLILNHRSTGAFLSHCGWNSTLESITNGVPITAWPLYAEQRMNATFLAEEAGVALKFSKNPGEELVDRNEIEKNVRIVMEGEKGKDMRRRAKELKESAKIALNSGGSSYESLCSVVEFWKSQ

SEQ ID NO: 6232 - protein, 487 aa, Unknown
  Description of Unknown: Oryza sativa Japonica Group sequence
MHTTNGAPACCDANADTPPLHLIFVPFLSRSHFGPVTAMAAEADACHRGGRTAATIVTTRHFAAMAPASVPVRVAQFGFPGGHNDFSLLPGEVSAAAFFAAAEEALAPALGAAVRGLLREGGSTATVTVVSDAVLHWAPRVARECGVLHVTFHTIGAFAAAAMVAIHGHLHLREAMPDPFGVDEGFPLPVKLRGVQVNEEALVHLPLFRAAEAESFAVVFNSFAALEADFAEYYRSLDGSPKKVFLVGPARAAVSKLSKGIAADGVDRDPILQWLDGQPAGSVLYACFGSTCGMGASQLTELAAGLRASGRPFLWVIPTTAAEVTEQEERASNHGMVVAGRWAPQADILAHRAVGGFLSHCGWNSILDAISAGVPLATWPLRAEQFLNEVFLVDVLRVGVRVREAAGNAAMEAVVPAEAVARAVGRLMGDDDAAARRARVDELGVAARTAVSDGGSSCGDWAELINQLKALQLTSSRDRRTDAVTRD

SEQ ID NO: 6233 - protein, 477 aa, Ziziphus jujuba
MVNPPRFLIVCYQEQGHLNPTLQLAKRLTSIGVHVTFLTSLSAYLRMAKASNSNLNTVDGLSFSHFSDGYDDGYKPGVDGDHYFSEIRRCGSQALSDLIISGANEGRPFSCVVCNIMLPWAAQVADEFNIPSVLLWIQAATVFDIYYYYFHGYGDMISEIISSSTTIDDPLNLLELPGLPLKLTGRDLPSFIGSTNAYSFVTTVLKELFEKLLVKEGKSIVLVNTFDAIEHEALKAIEKVDLVGIGPLVPSAFLDRKDPSDTSFGVDLYKGSRDYNEWLNSKPKESVIYISFGSLIVLSKLQMEEIESALLGCGRPFLWVITEKQNPEEKKEENGGLSCKEELEKLGKIVPWCSQVEVLSNPSLGCFVTHCGWNSTLESLVCGVPLVAFPQWTDQGTNAKLIEDSWKNGLRVRTNKEGIVESHEIKKCLELVMGDEEIRMNTKKWKDLSIQAAMEGGSSDKNLKAFLEDIIQDKTTS

SEQ ID NO: 6234 - protein, 482 aa, Sinningia cardinalis
MKIAELVIIPAPGLTHLMSTVEAAKLLLERDDRLSITLLVMKYPNDTAVDNYTQKISSNSDLTSSLRFLNLPDQDQIVASDTLLFDLIDIQIVNVRDILCNLVRQSSPRIAGIVTDMFCTKFIDVANEFHLPTYIFFTSGTCSLSLFCHLASLKFEYNQDLNQYKNSDAALSVPCLSIPVPVKVFPAILVNGWPIGEIALNCFKRFEETRGIMVNTFYELESYAIQSLSDGKTPKIYPIGPVLNFGHRVESSKGQSYDEEIKKWLDDQPDSSVVFLCFGSKGSFEVPQLKEIASALEKCGHRFLWSIRKPGPKGIMQFPTEYENFQDILPDGFLERTKGTGKLIGWAPQLAVLSHPAVGGFVSHCGWNSTLESIWCGVPVATFPLHAEQQLNAFELVKELGMAEAIRLDYNRHFLGESDEEEIVGSEEIEAAIRRLMAADGSSGIRQKVKEMQKKSRMALLEGGSSYNSQNIFIDDVIKNIS

SEQ ID NO: 6235 - protein, 455 aa, Medicago truncatula
MNISDSGNAVCHVVAMPFPGRGHINPMLSFCKILTSQKPNNLLITFVLTEEWLTFIGADPKPESIRFATIPNVIPPEREKAGDFPGFYEAVMTKMEAPFEKLLDQLELPVDVIVGDVELRWPVNVGNRRNVPVAAFWTMSASFYSMLHHLDVFSRKHHLTVDKLDEQAENIPGISSFHIEDVQTVLCKNDHQVLQLALGCISKVPKANYLLLTTVQELEAETIDSLKSIFPFPIYPIGPSIPYLDIEEKNPANTDHSQDYIKWLDSQPSESVLYISLGSFLSVSNAQMDEIVEALNNSGIRYLYVARGETSRLKDKCGDKGMVIPWCDQLKVLSHSSIGGFWSHCGWNSTLETVFAGVPILTFPLFLDQVPNSTQIVDEWKNGWKVEIQSKLESDVILAKEDIEELVKRFMDLENQEGKKIRDRARELKVMFRKAIGKGGSSDRNLDAFISDISS

SEQ ID NO: 6236 - protein, 490 aa, Arabis alpina
METSEKISKLHFLLFPFMAHGHMIPTLDMAKLFATKGAKSTILTTPLNSILFEKPIKSFNNENPKLENITIKILNFPCTELCLPQGCENTDFIFSSPDLSKGELNLKFLLAMSYFEEQLEHVLETMKPDCLVANMFFPWATKVAEKFNVPRLVFHGTGYFSLCASHCLRLHKPYKNVASSCEPFVIPDLPGDIVITEEQIIEKEEESVMGKFMKEMRETERNSFGVLVNSFYELEPAYSDFFKSSVAKRAWNIGPLSLGNREFKEKAERGKKASIDEHECLKWLDSKRCDSVIYLSFGTMTSFNNEQLIEIAAGLEMSGHDFVWVVNKNGIKGEKEEWLPEGFEERTKGKGLIIRGWAPQVLILDHQAIGGFLTHCGWNSTLEGVASGLPMVTWPVGAEQFYNEKLVTQVLKTGVSVGVKKMMKVVGDFISREKVDKAVREVMVGKERRRRAKELAEMAKDAVKEGGSSDIELNKLMEELKMVKLQNEKK

SEQ ID NO: 6237 - protein, 478 aa, Arabidopsis thaliana
MKIELVFIPLPGIGHLRPTVKLAKQLIGSENRLSITIIIIPSRFDAGDASACIASLTTLSQDDRLHYESISVAKQPPTSDPDPVPAQVYIEKQKTKVRDAVAARIVDPTRKLAGFVVDMFCSSMIDVANEFGVPCYMVYTSNATFLGTMLHVQQMYDQKKYDVSELENSVTELEFPSLTRPYPVKCLPHILTSKEWLPLSLAQARCFRKMKGILVNTVAELEPHALKMFNINGDDLPQVYPVGPVLHLENGNDDDEKQSEILRWLDEQPSKSVVFLCFGSLGGFTEEQTRETAVALDRSGQRFLWCLRHASPNIKTDRPRDYTNLEEVLPEGFLERTLDRGKVIGWAPQVAVLEKPAIGGFVTHCGWNSILESLWFGVPMVTWPLYAEQKVNAFEMVEELGLAVEIRKYLKGDLFAGEMETVTAEDIERAIRRVMEQDSDVRNNVKEMAEKCHFALMDGGSSKAALEKFIQDVIENMD

SEQ ID NO: 6238 - protein, 473 aa, Zostera marina
MMRHAVCIPFPAQGHLKPMLKLALILHSKGFHITYVHSDYNRRRILKSRGPTSLDGLPHFRYETFSDGLPLSDVFDCTQDTLSLCQSIKENGPQHFRNLIAKLNQTSLSDVPPVTCIISDGCMAFTLDVAEEMGIPELLFWTNSPCGVRCFLEYNHLVEKGILSLKDESYLVDGHLETTVDCINGMSDIRLKDMPSHINNPFMVKYVISETNRASKARSIILNTFYDLDHSILDSMKLFFPPIYEIGPLDLLYNQMIQKDKQNDVGCSMGSNLWKEDSKCSEWLDTKPVGSILYVNFGSVTVMTTQQMIEFAWGLCNSNKEFLWIIRPDVVRGETAVLPEDFLEMTKGTSMMTSWCSQEDVLSHPAIGGFLTHCGWNSTLESIYCGVPMLCWPFFAEQPTNCRYSCKEWGVGLEIDKDVKRAQVTSLIIELMDGEKGNRMRREAQRWKAKAIKATQKGGTSFIKMEKLLNVIC

SEQ ID NO: 6239 - protein, 443 aa, Citrus unshiu
MSNTQRNYSVLMFPWLAHGHAFPFLELAKKLAKRSNFHICFCSTPSILNSIKQSDKFSLSIQLIELHLPSSPELPPQYHTTKGLPPHLMPTLKKAFDMASSSFFNILKNLSPDILIYDLIQPWAPALASSLNIPAVYFLVSSAATSAFMVHAIKKNSSGDAYNDDEEFSFSSIFMHYYYMKSYFSNMVESPSTKRLLQCFERSCNIVLIKSFRELEGKYIDYLSDLIKKKVVPVGPLVQDPIEQSDHEKGVTEIIQWLDKKERSSTVFVSFGSEYFLSKEEMEDIALGLELSGVSLGVKVKVDEELPESFLERTKERAMVIEGWAPQMKILGHPSIGGFVSHSGWSSVMESMKLGVPIIAMPMHVDQPLNARLVEDVGIGLEVRRNKCGRIQREEMARVIKEVVMEREGEKWERKTREMGEKIKEKGEEEIEWVADELIHICG

SEQ ID NO: 6240 - protein, 471 aa, Rosa chinensis
MSDLTDSQALPLLPHIALFPCAGMGHLTPFLRLASMLSSSQNCLVTLITASPAVSAAESTHISLFLSQHPKVNHLEFQLIPSNPTTTTMDDPFFLQWQSTNRSLHLLYPSLASSSPPLSAIFSDFVVASSMGTIAAQLNIPNYIFSPTSCKFFSLAAYLPTLLSNTSDISSLTQVNIQGLTPLPMTSIPPPFRNQNHIFTSLILQNSRALSSAKGILMNTFHDFESDTLAAINDGRALTNINLPPILPIGPLQAFELKNDQDKYYLSWLDNQPKQSVVYVSFGSRTTMSNSQIRELSKGLETSGYRFLWVLKTSKVDKDDIQEVKDMVGESFLERTKNKGIVLKAWVSQQEILEHPAIGGFVNHCGWNSVMEAAQEGIPVLAWPQHSDQSVNAEIVEKAGLGIWERKWGWGLEGLVSGEEIGNKIVELMENQKVREFSRNVGEKARKASGIDGKSEKVVMEIMESLMQKRN

SEQ ID NO: 6241 - protein, 462 aa, Triticum aestivum
MESTGHGGGEGASVLLLPFPGAQGHTNPLLELGRRLARHGLHPTLVATRHVLSSTPPPGAPFRVAAISDGFDAGGAASDYTEYFSRLEAVGSETLRELLLSEARAGRPVRVLVYDSHLPWAGRVARAAGVPAAAFFSQPCSVNIVYGELWAGRLALPVMDGAGPELLARGALGVELGPEDVPPFAAAPESQPSFLKMAIGQFDGLEDTDDVLVNSFNDIEPTEGEFMELTWRKKTIGPTLPSFYLDDHRLPSNKSYGFNLFDSDAPCMDWLENQSISSVVLVSYGTFSNYDATQLEELGNGICNSGKSFLWVVRSNEAHKLSEELRKKCEKNGLIVSWCPQLEVLAHKAIGCFVTHCGWNSTLEAVVCGVPLVGIPHWADQPTIAKYVESGWGMGVRVQKSESESLRSAEVERCIREVMDGERKGEYKRNAIKWMQKAKEAMQEGGSSDKHIAEFAAKYSSI

SEQ ID NO: 6242 - protein, 470 aa, Arabidopsis thaliana
MTNFKDNDGDGTKLHVVMFPWLAFGHMVPYLELSKLIAQKGHKVSFISTPRNIDRLLPRLPENLSSVINFVKLSLPVGDNKLPEDGEATTDVPFELIPYLKIAYDGLKVPVTEFLESSKPDWVLQDFAGFWLPPISRRLGIKTGFFSAFNGATLGILKPPGFEEYRTSPADFMKPPKWVPFETSVAFKLFECRFIFKGFMAETTEGNVPDIHRVGGVIDGCDVIFVRSCYEYEAEWLGLTQELHRKPVIPVGVLPPKPDEKFEDTDTWLSVKKWLDSRKSKSIVYVAFGSEAKPSQTELNEIALGLELSGLPFFWVLKTRRGPWDTEPVELPEGFEERTADRGMVWRGWVEQLRTLSHDSIGLVLTHPGWGTIIEAIRFAKPMAMLVFVYDQGLNARVIEEKKIGYMIPRDETEGFFTKESVANSLRLVMVEEEGKVYRENVKEMKGVFGDMDRQDRYVDSFLEYLVTNR

SEQ ID NO: 6243 - protein, 528 aa, Helianthus annuus
MACERDYRLYHTLPCFDEYEDEQWYSWACDGDSGGTSSVLTIRHDHNKESTIMGACDDESSFKSHSVKGDGPTMVTGGPAATFGTQPVSMGGLQKNFMSKAMKSKALRNTIDFGASQIYFCTILKGNFPTNSFEEIILDDENHGIQNSHAVKIWYEVLFENLVDGQIVEVGEAMSSKDAPHIDQNEEKVVKLDGYVVKKYNEVHGLRLYGYLVVTILIERVKTIVNKKWSYAPFDPGGTGSESNEITREVELLGRALIIIEKNRIDVPFDPGGFSLGQNSRSSFSKGGENDAGISRILGVGKNYTGIRRINVFDLRFRITRYIITPDETSLSWLDKHPPNSVIYVSFGSLVKIEESRFLELAWGLANSKQPFLWVVRPGSIEGSEWLEPLPDEFLERIVEGRGYIVKWAPQQDVLAHRATGCFWTHNGWNSTLESICEGVPMICSPSFGDQLPNARYVSDVWKIWVELENGFEREEIESVIKRVLVGEEGLEFRNRINNIKGKVDICLKKGGSSYSSLEDLVNFILSF

SEQ ID NO: 6244 - protein, 462 aa, Helianthus annuus
MEMAHVIVIPYPAQGHVIPLMELSQRLVNQGVRVTFVNTEINHELVTSTWVEKDSFKELMHMVSIPDGLESWEDRSDLGKLTESILKTMPGKLEELIETINNQGTHKVTCVIADGCAAWAIRVAKKIGTKRAVFWPSSVASLAPALSIKKLTDDGIIDNKGIPIKDQTIQLSPNMPPIKPSNLPWSFVGDLATTKSVFKISVDVAEAATMTEWITCNSANELEPEEFSIYSKILPIGPLLASNRLADQAGHFWHEDFSCLKWLDQNPVCSVIYIAFGSFTIFDQRQFEELALGLELSNRPFLWVVRPGMTKETTVSYPDGYTERTHTRGRIVSWAPQQKVLAHPSVGCFLSHCGWNSTLEGVTNGVPFLCWPYISDQFSNQTYICDVWKNGLGFDRDEAGYITREEIKSKLKHLLSDKTFKEIAMNLKEKIMSNVEEGGNSHKNLSIFIDWIQDKDTYRCLE

SEQ ID NO: 6245 - protein, 233 aa, Arabidopsis thaliana
MKIQLVFIPSPGIGHLRSTVELAKRLVRSDDRLWITVIIIPYPSISDDDVETTYIASLTTASQDRLNYEAISVANQPTDYQEPTQVYIEKQKPQVRDVVARIFHSTGVDSPRVAGFVVDMFCSSMIDVVNEFGVPCYMVYTSNATCLGITLHIQRMFDEKKYDVSELEDSVNELEFPFLTRPYPVKCLPDFFTSKDWLAFFLAQARCFRKMKEDKRLCDGGGVGIGGSDTEVL

SEQ ID NO: 6246 - protein, 417 aa, Cephalotus follicularis
MGSAILSEKPHAVCIPFPAQGHINPMLKLAKLLHYKGFHITFVYTEFNHKRLLKSRGANSLNSLSSFRFETIPDGLPPSDANATQDVPSVCESTSKTCLAPFRKLLSKLNDTSSSNVPPVTCIISDGIMTFTLDAAEELGIPEVIIWTASACGFLAYLHFRQLIDRGYVPLKDYIPGMKGIRLKDFPSFIRTTDWDDIMLNFFIVETERAKSASAIIINTFVAMEDQFLSVLSSILPPIYTVGPLQLLLNDVPDTDSKQFGSNLWKEEPECLEWLDSREPNSVVYVNYGSITVMTPDQLVEFAWGLANSKHTFLWIIRPDLVSGDSAILPPFLVETKDRALLASWCPQEQVLNHPAIGSFLTHSGWNSTIESVCGGVPMISWPFFAEQQTNCRYCCTEWGIGMEINNDVRRDEVERL

SEQ ID NO: 6247 - protein, 493 aa, Vigna angularis
MNTSFLCEQEREKKHCVKLLRAMNNEQSPLNIYFIPFLASGHLIPLCNIATLFASRGHRVTVITTPSYVQILQKSNPSLLLHVVDFPAQEAGFPGGVQLMSAANDDESARKFYHANMLLRVPISRFLEQHPPDCVIADYIHSWVHEVASNLRIARLAFNGFSLFTVAAMESVRSNPALVPEAGPFLIPDFPHRITLCSTPPKGVTGFVQRLLETEMKSDGLIVNSFVELDGEEYIPYYEKGKAHKAWHLGPAFLAAKVGEERGEKSVVSEEECVSWLNSKQAKSVVYVSFGSVCRFPDKQLFEMACGLEEAAHNFIWVVPEKKGKEDESEEEKAKWLPKGFEERNAEKGLIIRGWAPQLVILAHNAVGAFLTHCGWNSTLEAVTAGVPMLTWPVLGDQFYNERLVTEVRGVAVEVGATEWRETGYGEREKLVTRDCIEKAVRRLMDGGDEAEEIRRRAKELSDKAKEALGDGGSSHNNLTALIAHLTHLRDTR

SEQ ID NO: 6248 - protein, 303 aa, Oryza sativa
MAQPAWIPFPSTVTYRRHEAEWIAAGFRPNASGVSDADRFWDSERPSCRLIIYRSCPEAEPRLFPLLTKLYTKPAIPSGLLVPPALDDNDIGVYNRSDRSFVAVMQWLDKQPNKSVIYVSLGTEAPITADHMHELAFGLELAGVRFLWALRRPSGINCHDDMLLPSGFETRVAARGLVCTEWVPQVRMLAHGAVGVFLTHCGWGSTVESFHYGQPLVMLPFIADQGLIAQAVAATGVGVEVARNYDDGSFYRDDVAAAIQRVMVEEEGKELAHKAIELCGILGDRVQQEMYLYELIGYLQCYK

SEQ ID NO: 6249 - protein, 469 aa, Vitis vinifera
MAEKPPHIAILPTPGMGHLIPLIELAKRLVTHHGFTVTFIIPNDNSSLKAQKAVLQSLPPSIDSIFLPPVSFDDLPAETKIETMISLTVVRSLSHLRSSLELLVSKTRVAALVVDLFGTDAFDVAVEFGVAPYIFFPSTAMALSLFLFLPKLDEMVACEFRDMNEPVAIPGCVPVHGSQLLDPVQDRRNDAYKWVLHHTKRYRLAEGIMVNSFMELEPGPLKALQTPEPGKPPVYPVGPLIKRESEMGSGENECLKWLDDQPLGSVLFVAFGSGGTLPSEQLDELALGLEMSEQRFLWVVRSPSRVADSSFFSVHSQNDPFSFLPQGFVDRTKGRGLLVSSWAPQAQIISHASTGGFLSHCGWNSTLESVACGVPMIAWPLYAEQKMNAITLTDDLKVALRPKVNENGLIDRNEIARIVKGLMEGEEGKDVRSRMKDLKDASAKVLSHDGSSTKALATVAQKWKAHKNY

SEQ ID NO: 6250 - protein, 506 aa, Anopheles darlingi
MCRILVLSLLVFIVPSDDAYRILGLFPHPGLSHFKVFYPVMRGLAEVGHNVTVVSYFPDKEPLPNYQDLPFEGQEILTNSFSLQHFNGRRFIDNFVEFFELAAWGVGSCQAALNSPALDKVLQSHQTDPYDLVIMEMFATDCMAGVSWIMRVPFVGLSSCALMPWHYDRVGLPDNPAYIPSEFSRFSESMTLWERMENWFVTRTVKLLYRMVEYSDNHKLRAKFPDSAIPSVREIVRNTSLILVNQHYTLSGARPLVPAVVEVGGIHIRSPSDIPASLKTTLDSATEGVIVVSFGSVLRAASLPESKRKAMVEAFKHFPHKVLWKWEETLQDQPENVIVQKWLPQREVLCHPNVRLFVSHGGLLGVSEAVHCGVPVVVMPIYGDQFLNAAALVNRGMGVQMDYEHLDDTNYIQRCLTEGLSSEKRFRAQAVSKAFRNRAQSPLSLALWSILNVIEHGDMRLEKSYGSEISWFVDSSLDVLAVITISLIAIIWPTCFFCRKIFSKKD

SEQ ID NO: 6251 - protein, 465 aa, Zea mays
MSSQPPHVLLVSFPLQGHVNPLLRLGARLAAKGLLVTFTTFRHAGIRALREDGACVAAAGRGRLRFDYLRDDGCGPRSPVPGDPSDMLRHVADAGPSALAGLLRRQADAGRPVACVVNNPFVPWALDVAGAAGIPCATLWIQSCAVLSLYYHFYRCPEGFPTEADTAAPVAVVPGLPTLAADELPLMVRPEHAGNLWGQTLRAQLAGFRKNNTVAWVLVNTFEGLERPVVEALRSHAPVTPVGPLLDHDHDHDGGGDDGCMAWLDAQPPGSVVYVAFGSLVTVGCGEMLALAEGLAATGRPFLWVVRDDSRRLLPDGALAACGGRGRVVAWCPQGRVLRHGAVGCFVTHCGWNSVAEALAAGVPMVGYPWWSDQFTNAKLLAEEYGVGVRLPAPATRDAVRACVHEVMGGPRAAVFRMAAKAWKDEAAAAVADGGSSDRNLHAFVQEIRRFHETRAGGSMINSNI

SEQ ID NO: 6252 - protein, 526 aa, Citrus unshiu
MASLIDTQHPRRPHAVCVPHPAQGHINPMFQLAKLLHHKGFHITFVNTEFNQRRLLKSQGPDSLNAVPTFRFETIPDGLPPSDADATQDIPSLCDSTRRTCSAPFQELLTRLNNSALSNVNPPVTCIVSDWSMGFTLKASKQLNIPNVLFFTASACGFMGYVHYRHLVEKCIFPLKDLSYLTNGYMDSVIDWIPGMEGIQLKYLPSFIRSTDRDDFMVNFVITEIENTHNASALIFNTFDDLEPEVLKELSSIYPNIFTIGPLNQLVLNNEVSAHDSALSLIGSNLWREQPGCLEWLDSKEQNSVVYVNFGSITALTENQLVEFAFDAFVPNSSITALTENQLVEFAWGLANSKRPFLWVIRPDIVNEATAVITQEFVEETKDRGMLASWCPQEQILRHPAVGGFLTHCGWNSTVESLCSGVAMLCWPFFAEQQTNCWFCQTKWGVGIEVNPRADRVEIEKRVRELMEGDSGKLMKEKALEWKLLAEKAAAGPNGSSYVNLDKLINDVLLTYLLSSYDNDREKMHN

SEQ ID NO: 6253 - protein, 490 aa, Arachis duranensis
MHRHHVLLITYPAQGHINPSLQLAKRLINLGARVTVSTTVHMHRRMSDKPSIRGLSFVPFSDGFDDGFTLSDDSNYDHYMTEYQRRSTEFVTDLINSAAEKGQHPFTCVVYTFLQNWVAEAARAFHLPSVVLWPQPAVLLDIHYFYFHGYRDYINEKITKEPSTCSLELPGLPPLKPSCDLPSFYLESNNSTSKYRNSFIASLIEKQFRHLDQEVKPRILANTFEALEPDALRAVDDKLDVIPIGPLIPSAFLDIEKDGDGDSSYGGNIFKHSNDYVEWLDLQAERSVVYVSFGSFWVLAKKQMEEMARALLDSRHPFLWVIRKKEKKEKEKEKEEEEDEELSCREELEARGKIVEWCSQVEVLSHGSLGCFVTHCGWNSTMESLASGVPMVAFPQWVDQKTNAKLIEDVWKTGVRVDREEEEEEGVVEAGEIKRCLDVVMGSGEKAKELRENADKWKRLAREAVKEGGSSEQNLRTFLHQVHDLLPQSR

SEQ ID NO: 6254 - protein, 472 aa, Medicago truncatula
MAKATHIAVISSPGFSHIAPIVEFSKRLVTNHQNFHVTCIIPTLGSLPDSSKSYLETIPPNINLVFLPPINKQDLPQGVYPGILIQLTVTLSLPSIHQALKSINSKAPLVAIIADKFALEALDFAKEFNSSSYVYFPCSAFVLSFYLHWPKLDEEVSCKYKDLQEPIKLQGCVPINGIDLHTVTKDRSGQAYKMYLQRAKGMYSVDGILFNSFFALESSAIKALEQKGDGKIGFFPVGPITQIGSSNNDVVGDEHECLKWLKNQPQNSVLYVSFGSGGTLSQRQMNELAFGLELSGQRFIWVVRAPSDSVSAAYLEDANEDPLKFLPKGFLERTKEKGFILPSWAPQVEILKQNSVGGFLSHCGWNSTLESIQEGVPIVAWPLFAEQAMNAVMLCDGLKVALRLKFEDDEIVEKEKIAKMIKCVMEGEEGIAMRDRMKSLRESAAMALKAKDGSSIQTMSHLATQLENIGRI

SEQ ID NO: 6255 - protein, 469 aa, Helianthus annuus
MVAHKNKVVVVMVPLPLQGHINQLLHLSRLISTHNVPVHFIGTAIHASRAKLRLQGWNPNTISTIFFHDLPIPPFSSPPPNPNSTNKFPSHLQPLCEAATHLRSPITSLLRKLSPTTHRLVIIHDSLMGSVVQDFVSLPNAESYTFHSVSAFSIALYTSEEVREQIRNLVEPNELTEDELGFEGCFTSEFKKFIAAQHGYAKLSSGRIYNTCRVVEQPILDMLETEARKRNKLLWALGPFNPVNFQSGSKFSGKDSGPVERCLNWLDKQPSNSVIFISFGTTTSFSEKQISEIATGLEKSEQKFVWVVRDADRGDSSKDNTIPVELPEGFENGVKDRGLVVREWAPQLDILAHPSIGGFVSHCGWNSCIESMSMGVPIAAWPMHSDQPNNAVLVTKILKVGIVVKDWCQREEVVAAEVVEKAVKRLIGSKEGEEIRKRAVEIGHRIRKSVRDGGVTQMELESFIAHISR

SEQ ID NO: 6256 - protein, 467 aa, Eucalyptus grandis
MAPLNYLVVAFPAQGLINPALQLAKRLLHTGAHVTFATAGSAYHRMAKSDPPEGLSFASFSDGSEEGLRPGIDLEQYMADIVRLGSETLRDLVVTSLNEGCKFACIFYTTIIPWVAQVAHSLQIPSTLVWVQPATLLDIYYYYFDSYGDIIRNLGKDDPSASLHLPGLPPLTSRDVPSFFTPENQYAFSLPLMRVQFKVFKEEKNPRVLVNTFDALEPRPLKVIGNVTMFGIGPLVPSAFLDGQDPLDKSFGADLFRGSKDYIQWLDTKPEGSVIYVSFGSISVLSNAQKEEMARGLLSTSHPFLWVIRKDKEEEVGGQEDQLSCMEELEQKGMIVPWCSQVEVLSHASVGCFVTHSGWNSTFESLTCGVPMVAFPQWGDQQTNAMLVENEWKVGVRVNTNERGIVEGDEIKRCLELVVGDGEEGEEIRRNAKKWKGLAREAAKEGGSSDRNLNAFLEEIQMEANGY

SEQ ID NO: 6257 - protein, 447 aa, Vitis vinifera
MDKHHFLLLSCPAQGHINPTLHLAMLLLRLGVRVTFATFVSGLRRIATLPTIPGLHFASFSDGYDDGNNSNYSMEEMKRVGSQSLSNLLLSLSNERGPVTYLIYGFLLPWAATVAREHGIPSAFLSTQSATVIAVYHRYLKAHDGLFNTELGSSLNISLELPGLPPLKYEDLPSILLPTSPHASVVPSFQEHVQNLEQDPNTCLLINTFNALEEDVIKALGDFMNVVAIGPLMQLDSSISCDLFERSKDYLPWLNSKPEGSVIYVSFGSLATLQKNQMEEIFHGLMESHRPFLWVIRSIESELEEKMNSSLSEEQGLIVQWCSQVEVLCHQAVGCFLTHCGWNSTMESLVAGVPVVACPQFSDQTTNAKLVEVWGTGVKARANEEGVVEREEIKKCLEMVMEGGEKGDEMRRNANKWKGLAVESMEYGSSGETNLKHFVESLEIRTH

SEQ ID NO: 6258 - protein, 467 aa, Zea mays
MAVDTMESVAVVAVPFPAQGHLNQLLHLSLLLASRGLSVHYAAPPPHVRQARARVHGWDPRALGSIRFHDLDVPPYDSPAPDLAAPSPFPNHLMPMFEAFAAAARAPLAALLQRLSTSYRRVAVVFDRLNPFAATEAARLANADAFGLQCVAISYNVGWLDPGHRLLSDYGLQFLPPDACMSREFVDLVFRMEEEEQGAPVAGLVMNTCRALEGEFLDVVAAQPPFQGQRFFAVGPLNPLLLDADAPTTPPGQARHECLEWLDRQPPESVLYVSFGTTSCLHADQVAELAAALKGSKQRFVWVLRDADRADIYAESGESRHAMFLSEFTRETEGTGLVITGWAPQLEILAHGATAAFMSHCGWNSTIESLSHGKPVLAWPMHSDQPWDSELLCKYFKAGLLVRPWEKHAEIVPAQAIQKVIEEAMLSDSGMAVRQRAKELGEAVRASVADGGNSRKDLDDFIGYITR

SEQ ID NO: 6259 - protein, 490 aa, Citrus clementina
MVSENQKLHVMFLPYIAPGHMVPMVDMARLFAANGIQVTIILTTMNARRFQNAIDRDSRLGREISLRILRFPSQEAGLPEGCENLMSTSTPETTKKLFPALELLRPEIEKLFREQNPNCIVSDNLFPWTVSIAEELGIPRLAFTGSGFFNNCVSHSLEHHQPFKNIVSETQKFTVPGLPDQVKLSRSQLPDIVKCKSTGFSAMFDELNNAERRSFGVLMNSFYELEPAYADHFRRVTGKKAWHLGPVSLYNRDVDDKAERGDKSCVSKHSCLSWLNSRKPNSVLYICFGSLTRFSKEQTLEIAAALKESGHSFIWVVGKILKTDDDQEEESWLPDGFEDEVRRNDRGFIIKGWAPQVLILEHQAIGGFLTHCGWNSILEGVSAGVPMVTWPVFAEQFNNEKLVTQVLKFGLPVGNEIWKIWATQDSPVINRGNIKNAICAVMDNDDQEAVKMRKKANHLKELAKKAVEEGGSSCNDLKALIEDIRLYKHK

SEQ ID NO: 6260 - protein, 474 aa, Unknown
  Description of Unknown: Oryza sativa Japonica Group sequence
MAQAERERLRVLMFPWLAHGHINPYLELATRLTTTSSSQIDVVVHLVSTPVNLAAVAHRRTDRISLVELHLPELPGLPPALHTTKHLPPRLMPALKRACDLAAPAFGALLDELSPDVVLYDFIQPWAPLEAAARGVPAVHFSTCSAAATAFFLHFLDGGGGGGGRGAFPFEAISLGGAEEDARYTMLTCRDDGTALLPKGERLPLSFARSSEFVAVKTCVEIESKYMDYLSKLVGKEIIPCGPLLVDSGDVSAGSEADGVMRWLDGQEPGSVVLVSFGSEYFMTEKQLAEMARGLELSGAAFVWVVRFPQQSPDGDEDDHGAAAARAMPPGFAPARGLVVEGWAPQRRVLSHRSCGAFLTHCGWSSVMESMSAGVPMVALPLHIDQPVGANLAAELGVAARVRQERFGEFEAEEVARAVRAVMRGGEALRRRATELREVVARRDAECDEQIGALLHRMARLCGKGTGRAAQLGH

SEQ ID NO: 6261 - protein, 511 aa, Medicago truncatula
MNSTPKCYNDLHFIFIPLMAPGHLLPMVDMAKLLARRKVKVTILTTPLNSIRFQSTIDREIQLGSQIQIVHIKFPSVESGIPEGCESVDTLPSMDLMSNFYIALCKMQNSLENVFEKLRPIPSCVISDKHISCVAEIAMKFKVPRIIFDGTNCFHLLCNHNLRNFNNIPNEGKFIVPGMPDQIELRKCQLPGLFNPGENKKLNGFREEVREIEEKYSYGVVVNSFEELEEKYVEEYKRVTGYKVWCVGPVSLSNNDELDKFERGKKLNSNDESQYDKILKWLDSWPSNSVIYVCLGSLNRATPQQLKEVGLGLEATKRPFIWVLRGAYGREEMEKWLYEEGFEGRVKNRGFLIKGWAPQVLILSHKAIGIFLTHCGWNSTLEGISCGVPLVTFPMFAEQFYNEKVVVQVVKNGVSVGAQSAVHLGEEEKCCVVVKRENVRDAIENVMGEGEEKEKIRGRARKYADMAREAIEEGGSSYRNMTLLIEDIMSSDRCTTIGGTTPYTTLMWHHK

SEQ ID NO: 6262 - protein, 465 aa, Setaria italica
MAGDGRSPTTGRRVVMFPFPFASHTTPMLQLAGLLRARGLGVTMLHADFNAPDPARHPELAFVSIRESIPDEVATSADLVQQMIGLNDACEAPFHAALAAELARGGGGQSGQREVACVVVDGQWYKMPGAAGRVGVPALALRTDGAAAFLTLLSTPRLRADGYFPINGDRLDEVVLGLEPLRVRDLIRVDGSDDETMLHFIACVTDAMRASSSGVVLNTFDAIEAPELAKIRQELSRPAFAVGPLHLLAPAAQQEEQHAPDRGCLAWLDERSPRSVLYVSLGSVATIDLTAFEEMAWGLAGSGVPFLWVIRPGSVRGAGDDDAPPPFPEELIETVRRRGKIVAWSPQREVLAHPAVGGFWTHCGWNSTLEAVCEGVPMLVHPCFGDQTVSARYVTHRWGTGLDVGRVFERTAMARTIRRLMARELGPQAPRERARLLMRQARHCVEEGGPASSALDDLVEYMWGL

SEQ ID NO: 6263 - protein, 468 aa, Ipomoea nil
MKEGVELFFFPALGMGHLLSAVEIAELLIHRDHHISITIFILKPPFDLKITSFIQSQTSQTRLKFVTLPIDEPIDSTNIPTPSMIPIDPFKPRVRECVQETIRTVRLGGFVIDMFSTAMIDVANEFGVPTYVFYTSGAAVLGFLLHMPSITVDEGMEDLRGYKRDLNIPAYVNPYPPNQFPSALLDQHGFAMFLAMSKLISSTKGVLVNSFLELESHAIKALSHYPNSPPVYPVGPILNLAGAGKDSQQILEWLDDQPEGSVVFLCFGSEGYFPEEQVKEIAIALERSGKRFLWTLRCMPEKGSLIPGEYSDPGEVLPNGFLERTQGVGKVIGWAPQVAILSHPGVGGFVSHCGWNSTLESIWFGKPMAAWPIAAEQQANAFQIVKEIGIGVDLKMDYKRDFKDATKFSEMVRAEEIERGIRSVMDPLNPIRLKAKEMSEKSRSAIVEGGSSYTNVGRFIQDVFSNIN

SEQ ID NO: 6264 - protein, 420 aa, Hordeum vulgare
MRKEEFGEQELVVAAVLADLLSPSGRDLAGLCGGLLRRRPYLHAPAAGSSALSVRQAGRGAEVTTRRGEGGEDSEQAQVPPPETVAATMEHILAVNTSCEAPFRERLAALLDAPGARDEVACLVADAHLLALVRVARRLGVPTLVLRTGSAACFRNFLANPVLCEKGYLPVGAESKLDAPVRELPLYRVRDLMGANSRSRHGHELMCELLSRAVEAVRSSAGFVLNRFDALEADDLARPRRRARAPASVLYISFGSLASMSGADLAEAAWGVANSGQPFLWALRPGIARGAALPDGFATATGGRGLVVGWAPQEEVLAHGAVGGFWTHGGWNSAMEGACGGVPMLCRPCFGDQMGNARHVEHVWRAGSALDGGVLERGAVEAAVRRLMRGEEGEGMRGRARELQSRAAVADGGSSGSAST

SEQ ID NO: 6265 - protein, 528 aa, Oryza sativa
MAAASAAKELHFLLVPLVAQGHIIPMVDLARLLAGRGARVTVVTTPVNAARNRAAVEGARRGGLAVELAEIAFTGPEFGLPEGVQNMDQLVDIAMYLAFFKAVWNMEAALEAYVRALPRRPDCVVADACNPWTAAVCEHLAIPRLVLHCPSVYFLLAIHCLAKHGVYDRVADQLEPFEVPGFPVRAVVNTATCRGFFQWPGAEKLARDVVDGEATADGLLLNTFRDVEGVFVDAYASALGLRAWAIGPTCAARLDDADSSASRGNRAVVDAARIVSWLDARPPASVLYVSFGSLTHLRATQAIELARGLEESGWPFVWAIKEATAAAVSEWLDGEGYEERVSDRGLLVRGWAPQVTILSHPAAGGFLTHCGWNATLEAISHGVPALTWPNFSDQFSSEQLLVDVLRVGVRSGVTVPPMFLPAEAEGVQLTSDGVVKAVTELMDGGDEGTARRARAKELAAKARAAMEEGGSSHADLTDVIGYVSELSAKKRQERDAGETAQQPPPSPAELGDISGDKVEADPALSVQS

SEQ ID NO: 6266 - protein, 485 aa, Cephalotus follicularis
MESKALTKKPHAVCVPYPETGHINPMLKLAKLLYHKGFHITFVNTEYNHKRLLKSRGIDSFDGLPNFRFETIPHDFPRLSLKTIEDVAIIHAYMKNCQDPFKDLLLKLNGSSSSSSVPPVTCIVSDTLMNFTVDAAVEFSIPVVSFWTSSACCLICHFYTRQLNESSYTALKDESNITNGYLDTIIDFIPGLEGIPIRYIPSLLRIIDPDKIFLKLTVNEIERIKKAAGFIIHTYDALEKDVLSALSSMLPPVYSIGPLPYFTNQIQDDDLNLLGSNLNLWHEDSQCLEWLDSKEPDSVLYVSFGSTTVMTSDQLVEFAWSLANSKKNFLWVIRPDLVSGDSASLPAELLEETKERSRLVGWCPQEQVLNHPSIGGFLTHCGWNSMMETLCAGVPTICWPFFADQATNCWFNCVKCGVGIEIDNNVKRDEVERLVRELMDGAKGKEMKKKAMEWKKLAEEATTSPNGSSWKNLDAIVKLLLSPNK

SEQ ID NO: 6267 - protein, 447 aa, Glycine max
MDHQNKHVAVFAFPFGSHLMPLLNLVLKLAHSLPNCSFSFIDTHKSNAILFPKPHIPNNIKAYSISDGIPEGHVLGKNPTEKLNLFLQTGPENLHKGIELAEAETKKRVTCIIADALVTSSLLVAQTLNVPWIALWLPNSCSLSLYFYTDLIRQHCASRAGNKTLDFIPGLSKLRVEDMPQDLLDVGEKETVFSRELNSLGKVLPQAKVVVMNFFEELEPPLFVQDMRNKLQSLLYVVPLPSTLLPPSDTDSSGCLSWLGMKNSKSVAYVCFGTVVAPPPHELVAVAEALEESGFPFLWSLKEGLMSLLPNGFVERTKERGKIVSWAPQTHVLAHDSVGVFVTHCGANSVIESVSSGVPMICRPFFGDQGVAARVIEDVWEIGMMIEGKMFTKNGLVKSLNLILVHEEGKKIRDNALRVKKTVEDAGRPEGQATQDFNTLVEVISRS

SEQ ID NO: 6268 - protein, 448 aa, Vitis amurensis
MDKHHFLLLSWPAQGHISPTFHLVKLLLRLGVRVTFTTFASGFRQIATLPTLPGLHFASVSDGYDDGNRSNFSMDEMKRVGSQSLSNLLLSLSNERGPVTFLIYGLVLPWAATVAREHGIPSAFLSTQSATVIAVYHRYFKAHDGLFNTELGNPLNISLELPGLPPLKYEDLPSILLPGNPYASVLPCFQEHIQNLEQDPNPCVLVNTFDALEEDVIKALGHYMNVVAIGPLMQLDSSISCDLFERSEDYLPWLNSKPDGSVIYVSFGSLAVLQKKQMEEIFHGLMESHRPFLWVTRSTESEVEEMTNNSLSEEQGLIVQWCSQVEVLCHQAVGCFLTHCGWNSIMESLVAGVPVVACPQFSDQTTNAMLVEVWGTGVKARTNEEGVVEREEIKKCLEMAMEGGGKGEEMRRNAEKWKGLAVECMRECGSSANINLKHFVESLEVRTH

SEQ ID NO: 6269 - protein, 386 aa, Helianthus annuus
MREARNGIWSAISGMTCRPHVLVADLFSSESLPIADEFHMRKYVYVPCLACFLALTTYLHVLDKEVRGQYVDQMEPLRIPGCVPVQGQDVPDRMLDRDNRQYNEYVRMGINFTTLSNGILVNTWRDLDSASLDALKYNEILKSVVKVPVYDIGPLTRVVDPTGSEGNNVIEWLDMQPVESVIFVSFGSGGTLSAEQIAELAWGLELSQQKFVWVLRPPAGNTKDGAFFTSGSSVPCGPLDFLPEGFMNRTGTRGLIIPLWAPQASILNHESVGGFLTHCGLNSIYESILAGVPMIAWPLYAEQRLNATLLTDELQVAVRPAVLPVVEEVGREEIQKMVRSLMEGEEGKMMREKVKLLKESANHALMVNGSSYKSMCEFITGCQNNG

SEQ ID NO: 6270 - protein, 455 aa, Arabidopsis thaliana
MAQPHFLLVTFPAQGHVNPSLRFARRLIKTTGARVTFATCLSVIHRSMIPNHNNVENLSFLTFSDGFDDGVISNTDDVQNRLVHFERNGDKALSDFIEANQNGDSPVSCLIYTILPNWVPKVARRFHLPSVHLWIQPAFAFDIYYNYSTGNNSVFEFPNLPSLEIRDLPSFLSPSNTNKAAQAVYQELMDFLKEESNPKILVNTFDSLEPEFLTAIPNIEMVAVGPLLPAEIFTGSESGKDLSRDHQSSSYTLWLDSKTESSVIYVSFGTMVELSKKQIEELARALIEGGRPFLWVITDKLNREAKIEGEEETEIEKIAGFRHELEEVGMIVSWCSQIEVLRHRAIGCFLTHCGWSSSLESLVLGVPVVAFPMWSDQPANAKLLEEIWKTGVRVRENSEGLVERGEIMRCLEAVMEAKSVELRENAEKWKRLATEAGREGGSSDKNVEAFVKSLF

SEQ ID NO: 6271 - protein, 477 aa, Morus notabilis
MEKSSTFRSQDQKPPHVAIFPSPGMGHLIPVVELAKRLVVHHNINVTFIVPNDGSTMEPQKKLLQALPKPMISSIFLPQMSFDDLPADSVNETRIALSVTRSVPALRQSLKALTESTRLVALVVDMFCLDAFDVAKEFNVLPYMFTFYNALVLSLAFHLPKLDETTTCEYKDLPKPVKLPGCVPVHGRDLGDPAQDRKHTIYKVLLNISKRSYEAAGIIVNSFLDLEPGALKALKEGFYNNPPVYPVGPVVQTGSSSSDPCLSWLDKQPKGSVLFVSFGSGGTLSQDQMTELALGLEMSGARFFWVAKSPHEKTAARFFSVESNEDPFDYLPKGFLERTKDVGLVVSTWAPQVQVLSHGSTGGFLSHCGWNSALESIVHGVPLIAWPSYAEQRTNAVLLADDVKVAIRVKVNDKGLVGREEISGRVRELMEGELEGKLIRARVKELKDKACLALSKEGSSTKSLAEIAQVWVNNCQP

SEQ ID NO: 6272 - protein, 482 aa, Vigna radiata
MAEAHVLIFPLPLSAHVLSMLKLAELLVLQNLRVTFLTTDTIHSRLARFGEIKVLSESYPTLHFKTFSDCNDEGDHPGFGDRIWDFISSVTLHAKPFLRDILLSHTPQIPKPSCVIQDGIFGSLSSGVATELNISIPIIHFRTVSSCCFWAYISATKLLQFQELPIRGDDDMDRIIKHLPGMENLLRCRDLPSFFRPNKEGNSTFESYADRSRQSLAADALILNSFEDLEGPVLSQIRHNFSKVYTVGPLHHHLNMRKAESNKGKEIPRFKNSVFQVDRSCMTWLDAQPEGSVMYVSFGSTTIVNKEDLMEIWHGLVNSKKGFLWVIRPDIVAGKHNEDRIPNEVKEGTKERGCIVEWAPQEEVLTHKAIGGFLTHSGWNSTLESLVAGVPMICWPYFADQQINSRFVSEVWKVGLDMKDICDRDVVEKMVNDVMVHRREEFLKSAQAMAMLAHKSVSPGGSSYTSLHDLIEYIISASREND

SEQ ID NO: 6273 - protein, 551 aa, Helianthus annuus
MHGYGCDAWTNTVHIHNKRCMLKHALHKISIYNTPLKPHKEPTKLPPSEYPMASLHTDLHFVLFPLMAQGHMIPMVDIARLLAECGSTVTIVTTPVNANRFKPVIARAVEDKLKIQFLELQFPSTEVGLPEGCENFDLIPSAQLFPKLFIAANMLEEPAENKLRGLTPAPSCIISDNLFPWTNEIARKLNIPRLVFHGPGCFTFLCIHIAMNTNVLDEIVSDSEYFVLPSLPDRVELTKVQASSWGRKDKETAAYFETIRKAEEAANGIVVNSFQELEPYYAEELAKVKDKKVWCIGPVSLCNKNLLDIAERGSKGAISEHDCLKWLDSREPESVIFVCLGSLARLSTEQNIELGLGLESSKKPFLWCIRHATEELERWLIEEEYEERVKDRGLIIRGWAPQVLILSHRAVGGFVTHCGWNSTLEGISAGVPMVTWPHFADQFINERFIVDVLKTGVKIGAEVPVMVGEQDKFGVVVNKEDIKRSVEDLLDKGEEGEARRKRSRELGEMAKKAMEDGGSSHLNMRSMIQDVVEMLGKNITPPNQDSIVQES

SEQ ID NO: 6274 - protein, 479 aa, Amborella trichopoda
MGSTMADKPHALCLPFPGQGHINPMMKLAMLIHSRGFHITFVNTHFTHERIAESCGPSALTGLHDFRLETISDGLPQDHGRILKLPELCEAALKNFPAPLKQLIVEINESGDVPPVSCIVSSGFLNFTQEIADEVGVPRVALWTTSACGYWGYFHVPDLIQKGYTPLKDEKCLSNGYLNTRLDWVPEMPDICLKDMPSFIRTTDPNEYMLHFTKDETQKAFKSSALILNTFDEFETEILDAMKAKLPCPIYTMSPLLTFASHACKDQVNQIPTNLWKEDSYCLEWLDNKEIGSVIYVNFGSIAVLTTHQLNEFAWGLAKSQKPFIWIIRKDLVMGESAILSQEFTNEIKERGLITGWCNQAQVLSHPSVGGFLTHAGWNSTLESICNGVPMICWPFFAEQPMNCRYACSKWGIGMEISSGLKREEVEGLVRELMEGEKGRELRSRVKIWKETSKAAIKFGGSSYCNLDRLIKEVLMKQQ

SEQ ID NO: 6275 - protein, 491 aa, Solanum aculeatissimum
MDNGSNQLHVLFLPYFATGHIIPLVNAARLFVFHAGVKVTILTTHHNASLFRSTIDNDVEDGHSVISIHTLRFPSTEVGLPEGIENFSSASSPELAGKVFYAIYLLQKPMEDKIREIHPDCIFSDMYLPWTVNIALELKIPRLLFNQSSYMYNSILYNLRLYKPHKSKTITSTDSISVPGLPDKIEFKLSQLTDDLIKPEDEKNAFDELLDRTRESEDRSYGIVHDTFYELEPAYADYYQKVKKTKCWQIGPISHFSSKLFRRKELINAVDESNSCAIVEWLNEQEHKSVLYVSFGSVVRFPEAQLTEIAKALEASSIPFIWVVKKDQSAETTCLLEEEKLKNKGLIIRGWAPQLTILDHSAVGGFMTHCGWNSILEAIIAGVPLVTWPVFAEQFYNEKLVEVMGLGVKVGAEVHESNGGVEISSLVIESEKIKEAIEKLMDDSKESQKIREKVIGMSEMAKNAVEEGGSSWNNLTALIDDIKNFTSTTNV

SEQ ID NO: 6276 - protein, 464 aa, Citrus unshiu
MESKPKACCKVHAVCIPIPFQSHIKAMLKLAKLLHHKGFHITFVNTEFNHRRFLKSRGEHSLDGLPNFRFESIPDGLPASSDESSTTQDMYSLYGFLPFTVTAAQQLGLPIVLLFTISACSFMGFKQFRTFKEKGLFPVNDKSCLTKEYLSRLIDWIPGMKDIRIRDLPSFVRSTDSKDIMFNLCVEATENASKASAIIIHTFDALEQQVLNALSFIFPLQLFTIGPLQLLLNQIEEKDGMLNSIGYNLLKEETECLKWLDSKEPNSVIYVNFGSLIIMNKQQLIEVAMGLANSNHPFLWIIRPDLVTGETADLPAEFEVKAKEKGFIASWCPQEEVLNHPAIGGFFTHSGWNSTIESLCAGVPMICWPFLGDQPTNCRYTCNEWGVGLEIINGGDDNRVSRNEVEKQVRELMGGEKGKQMRNKASKWKRFAEEATAPDGSSATNLEKLMNQVLLSEGLIPSKN

SEQ ID NO: 6277 - protein, 457 aa, Phalaenopsis equestris
MSPDQIQPVTIVAVPSPGQSHLNQLLHFSLILSSRNLPVHFAAPSSSIHQAQSRLHGWPSASLLNIHFHELPLPPPTPLSPSSPPHLAHALRLFETPLLLRPSLSSLLHSLSLSSRRLILLHDTFMSVAALEAASLSNAESYTFQCVSAFQALFELQPNLRPKTRTNPFVAAHFEDWVPAPILERVKLLEHHRPVEVGIIANSCRPLDGEFVDLLADEYWPKNIFAVSPLHLIGPKLAVGSEKRHQCLMWLDKQPPASVVYVSFGSTTTMCGAQVQQLAIGLRRSGQRFIWVIREADEGAIGSEGENGNGSLPAGFEEEMQGVGMLVRGWAPQVEILAHPSTAAFVSHCGWNSTMESLSSGVPIIAWPMQIDQPRNAMVLTEYWKVGVIVREWDHRKEVVSAERVEEVVRMVVVEEEGKGIRDRARKIGEEIRRAVTEDGTSIADLKAFVAHITRNG

SEQ ID NO: 6278 - protein, 299 aa, Unknown
  Description of Unknown: Citrus x paradisi sequence
MSNIRLRDLPSFIRTTDPNEIMFDFMGSEAQNCFRSSAIIFNTFDEFEHEALEVIASKFPNIYTVGPLPLLCKQVDETKFRSFGSSLWKEDTDCLKWLDKRDANSVVYVNYGSVTVMSEQHLTEFAWGLANSKRPFLWILRPDVVMGDSVVLPDEYFEEIKDRGLIVSWCNQEQVLSHPSVGAFLTHCGWNSTMESICGGVPVICWPFFAEQQTNCRYACTTWGIGMEVNHDVKRGDIEALVKEMMEGDEGKKMRQKAWEWKKKAEAATAVGGQSYNNFDRLVKMVLHQGNWTGNETLH

SEQ ID NO: 6279 - protein, 925 aa, Cinnamomum micranthum
MAERELQLQLPHVAILSSPGMGFLIPLAQLAKRLVLHHHFSVTFITHTIDSLQKTQDTILNALPKTIKTISLPPISPQEMPPDAKAETLISITQNLSLPSLRHVLNALASTHCLTALVVDLFGTDAFDVAGEVGVPPYLLHTSNLLDLSVDIRLPTLDGMFSSEPVKLPGCRPIPREDLVEATQDRSNEAYAWLLHHGSRFIQAKGILVNSFAELEPETLIALRNEPSHPPIYPVGPLVQSGSTGKTNGPKPDWLRWLDDQPHGSVLFVNFGSGGALSFEQMKELALGLEMSKQRFLWVVRSPNDKEACATYFGVKSDQDPLDFLPEGFLDRTKGVGHVVPLWVPQIEVLSHESTGGFLSHCGWNSTLESMVHGVPMIAWPLYAEQRTNALMLVEDLKVALRPSANDSGVVEREAIAKVVKDLMDGEDERKIIKKRMMKLKEASIKALTPEEGSSYRAMSELELKLLPHVAILSSPGMGLLIPLAQLAKLLVLHDHHFSVTFITHSHTIDSLQKTQNTILNTLPNSVQTIALPPLAPQKIPQGAKSATLISITHKCSIPFLRHVLKNLASTHRLVALVVDLFGTDAFDVAGEVGVPPYLLYTSNFLSLSVDIHLPTVDSTFSSEPLKLPGCRPIPREDLVDAAQDRSNQAYTWFLHHGSRFKQAKGILVNSIAELEPETLMGLREEPSHPPIYSVGPLVQSSSTGMADGPKPNWLRWLDDQPRGSVLFVSFGSRGSLSFEQTKELALGLEMSQQRFLWVVRSPNDKEASASNQEPLDFLPDGFLERTKGVGHVVPSWVIQIEVLSHESTGGFLSHCGWNSTLESMVHGVPMIAWPLYAEQRTNALLLVEDLKVAVRPSADESGVVKREEIARVVRDLMDGRDEGKRVNRRMIEVKEASIKAMATEEGSSYGALSEVLSKWNGYML

SEQ ID NO: 6280 - protein, 493 aa, Citrus unshiu
MAQSKENIVMFPFMAQGHIIPFLALALHIEQRHKNYSITFVSTPLNIKKLKSSLPPNSSIDLHEIPFNSSSHGLPPNSENCDVLPYNLVIHLLRASTSLKPAFKEVISSLINQGRPPLCIIADIFFGWTCGVAKELNVFHAIFSGSGSYGLACYYSFWTNLPHNKVTSDEFVLPDFEEASRIHKSQLALNMLEADGTDSWSLFQGENFPAWVNSNGILCNTIEEFDQIGFIYLKRKLGLSVWPVGPILLSLENRANAGKEGGTSIKFCKEWLDSKDENSVLYISFGSMNTISASQMMQLAMALEASGKNFIWVVRPPIGFDINSEFRASEWLPEGFEERIRDSKRGLLMKNWAPQLEVLSHRATCAFLSHCGWNSVLEALIHGVPIIGWPMAAEQFFNAKFLEQEMGVCVEVARGKTCEVKHEDVVAKIELVMNETDKGKEIRRKVSEVREMIKNAMKDEEGCRGSSVKAMDDFLSAAISMKNKINGRVNNGA

SEQ ID NO: 6281 - protein, 446 aa, Punica granatum
VAVLAFPFSSHAASLLTVIRHLASAAPASTAVFSFFSTHKSNRSLFSSSSSSAFNMIKAYDVTDGVPEGYVFHGKPQEDIGLFMRAAPEGFRKAMEAAAVDSGKRITCVVADAFFWFAEEIAAELRVPWVAFWTSGPSSLAAHLYTDLLRNKLHITDGIAGLGDERLNDFIPGMSNKMRLKDLPEGVLFGNLESPFSHMLLRMGRSFPRATAVALNSFEELDLSLTQHLKSHHIPTLLSIGPLNLLHLQLHGTHNLVAGAPRGSDEYGCLPWLDNQKPAPASVAYISFGSVTVPPRSELVAIAEALEASGVPFIWSLKEEVWDHGLPDGFLGRTREQGMLVPWAPQVDILSHGAVGAFVTHCGWSSLLEGIAGGVPMICRPFFGDQRLNGRMIGDVLGIGLTVEGGAITKEGLVRSLGMILNGDEGKRMREIVRHLRLQAGKALSP

SEQ ID NO: 6282 - protein, 481 aa, Arabidopsis thaliana
MHITKPHAAMFSSPGMGHVLPVIELAKRLSANHGFHVTVFVLETDAASVQSKLLNSTGVDIVNLPSPDISGLVDPNAHVVTKIGVIMREAVPTLRSKIVAMHQNPTALIIDLFGTDALCLAAELNMLTYVFIASNARYLGVSIYYPTLDEVIKEEHTVQRKPLTIPGCEPVRFEDIMDAYLVPDEPVYHDLVRHCLAYPKADGILVNTWEEMEPKSLKSLQDPKLLGRVARVPVYPVGPLCRPIQSSTTDHPVFDWLNKQPNESVLYISFGSGGSLTAQQLTELAWGLEESQQRFIWVVRPPVDGSSCSDYFSAKGGVTKDNTPEYLPEGFVTRTCDRGFMIPSWAPQAEILAHQAVGGFLTHCGWSSTLESVLCGVPMIAWPLFAEQNMNAALLSDELGISVRVDDPKEAISRSKIEAMVRKVMAEDEGEEMRRKVKKLRDTAEMSLSIHGGGSAHESLCRVTKECQRFLECVGDLGRGA

SEQ ID NO: 6283 - protein, 479 aa, Glycine max
MEQEDTVVLYPAPGIGHIVSMVELAKLLQLHAHSITILLTTGLLDHPSIDTYIHRISISHPSIFFHRLPHTSLSTTTTVSMAAKAFNFININTPNVATTLTQITKSTNIKAFIIDLFCTSAMEPASSLGIPVYYFFTSGAAVLSLFSYFPKLHQETHVSFKDMVGVELRVPGNAPLRAVNMPEPMLKRDDPAYWDMLEFCTRLPEARGIIVNSFEELEPVAVDAVADGACFPDAKRVPGVYYIGPLIAEPQQSDVTTESKQCLSWLDQQPSRSVVYLCFGSRGSFSVSQLREIANGLEKSGHSFLWVVKRPTQDEKTKQIHDTTTTTTTMDFDLSSVLPSGFIERTKDRGLVVSSWAPQVEVLSRGSVAAFVSHCGWNSVLEGVVAGVPMVAWPLYAEQHVNMHVMVGEMKVAVAVEQREEDGFVSGEEVEKRVREVMESEEIRERSLKLKEMALAAVGEFGSSKTALANLVQSWTTHV

SEQ ID NO: 6284 - protein, 220 aa, Genlisea aurea
NRCMKWLDQREANSVIYACLGSLGRISPLQFRELASGLELSGRPFVVVVKGVELMPEIEEWIESDGVEERTKDRGLFIRGWAPQVLILSHPSIAGFVTHCGWNSTLEGICAGVPMATWPLFGEQFLNEKLVVQILRIGVPVGAKEVVHLGEVEKSKTNVNREMIKDAIEKVMEEGGEGKERRRRVEELKRAAKIAVEAGGSSHRNVSLLIQEIEDLMKTK

SEQ ID NO: 6285 - protein, 447 aa, Helianthus annuus
MASPPTNLHFVLFPWPAQGHLIPMVDIARMLAERDVMVTVITTPVNTNRIKTVIDRAIEANLKIQVLDIQLPFAKAGLPEGCESFDMIPSVSYVANMFLAMKLLEEPAEEMLRVLYPPPSCIISDGGFHWTSDVAKRLIASSWGKGNTKETRETFERTQEAEKAAFGIVVNSFDALEPKYVEEFAKATGKKVWCIGPVSLCNKSLEDIAERGNKAANGEHDCLKWLDSREPRSVVYVCFGSFSSTLTHQAIELALGLESSNIPFVWFVSRTSDEFEKWTSEGQYEERIKGRGLMVRGWAPQILVLSHQAIGGFITHCGWNSTLEAICAGIPMVTWPHFADQFLNERFIVNVLKIGLKIGVEVPITYRGKEKFEVMVKREAIKLAVEGLMNDEDEDEAQTRRNRAKEVAQMAKKAMEDEGSSHLNLTMMIAAITEELALKNKSIKDIV

SEQ ID NO: 6286 - protein, 457 aa, Ipomoea nil
MGSSECHVAVLAFPFATHAAPLLSLVEQLSAAFPSARFSFFNNHDSNSGLFRGRNPAAGKVKAYDVWDGTVAGEALVTHEEFIMAMPGNYVKAIAEAEAETGTKFGCFLTDAFLWFGGDLAAERGGVPWIALWTAGACSISAHLYTDFVRSLAAATPTANGKHRLDQKLKVIPGMSELSIGEMPGEILAKDLQAPFPGMIYNMALKLPGANAVVLNSFQNLEPTVTDDLRSKLQKVFNIGPMILRQAAATPKPPIISDDHNCLPWLDSLPPASPPAVYLSFGSGLTPPPDEIVALAEALEAKRAPFLWSLKPHGVKHLPEGFLERTKEFGKIVPWAPQVQVLSHPGVGAFVTHCGWNSTLEAISFGVCLICRPFYGDQQINSRFVESVWEIGVKVEGGKFTKDETLKALNVVLDSDRGKLLKENVVKLKGEAMEAVKPNGSSTKDFQELVHLLNGYF

SEQ ID NO: 6287 - protein, 467 aa, Medicago truncatula
MSNSKTHIFIFPYPAQGHMLPLLDLTHQLALQSTFTITIIVTPKNLPILTPLLSTHPNTIKTLIFPFPSHPKIPSDVENLREIGNPGNYPFINALSNLQNPIIQWFNIHHNPPVALISDFFLGWTQQLATQLNIPRIAFYSSGAFLTAVINRCWRNPLFFQSQEVVEFNEIHGTPSFKRDHLPSLFRRYVESDPESEFVKESFISNDESWGFVINTFSALEGGYLDNIEGQFGNRRLFAVGPLGYDRVGSDLEDGSDVLRWLDRWDEDGSVLYVCFGSQKLMRRDQMEALAFGLERSGIRFVWVVKVPSTVEQIEEGYGLVPEGFEDWVSGRGIVVKGWVPQIAILGHRVVGGFLSHCGWNSVLEAVVAGVGILGWPMEADQFVNAKLLVEDMGVAVRVCEGMDTVPDPNKLGRVISSIMSGDSPQKKRAKLMKEEALRAVSKDGVSSKELNELVHALQQLGVKERS

SEQ ID NO: 6288 - protein, 466 aa, Aegilops tauschii
MAPGEANTATAGGPCRRRRRVLLFPLPYQGHINPMFQLAGLLHARGFAVTVFHASFNAPDPSHHPAYDFVPVPEGLPAAGPGTVVETLEHILALNGSLEAPFRERLAALLEAPGAGDEVACLVADAHLLTLVDVAREQGVPTLVLRTGSAACFRNFVANPMLCDRGYLPVSGESELDAPVRELPPYRVRDLMGADSSGRHGHDLMCKLLSRAVEAVRASAGFLLNTFDALEAADLAATRRDLAGVPVFDVGPLHKLSPASSSSLLQQDRSCLDWLDAQAPASVLYISFGSLASMSGADLAEAAWGVADSGQPFLWALRPGLARGAALPDGFAAATEGRGLVVGWAPQEEVLAHGAVGGFWTHGGWNSALEGACGGVPMLCRPCFGDQMGNARHVEHVWRAGIALDGGGVLERGAVEAAVRRLMRGEEGDGMRGRARELRSRAAAAVADGGSSRLSVDKLVNHILSL

SEQ ID NO: 6289 - protein, 470 aa, Medicago truncatula
MEKTIHIAVVPGVGYSHLVSILQFSKRLVQLHPNFHVTCFIPSLGSPSTTTKSILQTLPSNINHTFLPPVNPNDLPQGTTMESQMHLTLNNSLPYLHQALKSLAKEIPLVALVVDCFAFEALSIGKEFNMLSYIYYPTAATTLAWIFYLPKLDEETSCEYGDIPVPIKIPGCVPIHGRDLMSPTQDRSSQAYKQFLALLKLLSFADGVLVNSFLEMEMGPISAMKDEGSENPPVYPVGPIIPTIESSGDANHGLECLTWLDKQQPCSVLYVSFGSGGTLSQEQIVELALGLELSNKIFLWVLRAPSSSSSSAGYFSAQNDADTWQFLPSGFLERTKEKGFVITSWVPQIQILSHNSVGGFLTHCGWNSTLESVVHGVPLITWPLFAEQKMNAVLLSEGLKVGLRASVNENGIVERVEVAKVIKCLMEGEEGEKLRNNMKELKESASNAVKEDGSSTNTISQLALKWRNLV

SEQ ID NO: 6290 - protein, 470 aa, Medicago truncatula; identical to SEQ ID NO: 6289

SEQ ID NO: 6291 - protein, 514 aa, Dendroctonus ponderosae
MWLSSVFLFGVLCTATHAAKILGVFMMPSYSHQITFQPIWKELSLRGHEVTVYTPSPLNDPSLTNLTEYDLSFSYKIMETLGKAGFDVSKLFDLFTQVSEAQLKHPYMQDLIHNANNNTFDILLVEFLWLPYFAFKDIYNVPFVGITSLPLTLMASESLGMWKHPILEPEFLLGFSQAETFKQRVTSWAFNIAYRLIGQLKMTPTFEAQLKKYFKTVSKSARDLAKEVDLVLGNYNSVLQNVKPMVPKFVPLGGIHLHPQQPLPLDLEEFLANLQNDVIYFSLGTNVNPTSISKMQLAKIYKVLGELPYTVLFKHQLENLPEDLPKNFYVKEWFPQQDVLGHPKVKLFVTQGGIQSLDEAISRKVPMVIIPFLGDQQSNAARCAKLGIAEVINFQKYTEEEFKEKVNLVLSDITYQQNIEKQNFIFEDQPISSLDKAIFWIEYVLRHNGTSHLNYAGVDVPFYQFYHLDIFGFLAAVIWVFIFVARKIFIVAALSIKAPKKLVLKRNEKRTKFL

SEQ ID NO: 6292 - protein, 694 aa, Mustela putorius
MLNKNILLFSLKISLLGITLCGNVLIWPMEGSHWLNIKIIIDELIKKEHNVTVLVASGALFISPASKPSLMFEIYKVPFGKERIEGIIKDFVLTWMENRPSPSTIWRFYQEIARVLKDFHILSREICDGVLKNQNLMDKLKKSKFEVLISDPVFPCGDIVALKLGIPFMFSLRFSPASTVEKHCGKVPFPPSYVPAILSELSDQMSFTDRVRNFISYHLQDYMFDSLWKSWDSYYSEALDGSHWLNIEIILEELIQRNHNVTVLASSTTLLINSNPDSPVNFEVIPVSYTNSNIDSLIEHMIMLWMDHRPTPLTLWTFYKELGNLLDTFFRINIQICDGVLNNPKLMARLQKGSFDVLVADPVTICGDLVALKLGIPFVYTLRFSPASTVERHCGKIPAPASYVPAALSELTDQMTFGERVKNTISYPLQDYIFQSYWGEWNAYYSKVLGRPTTLCEIMGKAEIWLIRTYWDFEFPRPYLPNFEFVGGLHCKPAKPLPKVLWRYKGKKPATLGDNTRLYDWIPQNDLLGHPKTKAFITHGGTNGIYEAIYHGIPMVGVPMFADQPDNIAHMKAKGAAVEVDISTMTSEDLLNALRTVINEPSYKENATRLSRIHHDQPVKPLDRAVFWIEFVMRHKGAKHLRPAAHNLTWFQYHSLDVIGFLLACVAAAIFLVTKCCLFSYQKFGKTGKKKKRE

SEQ ID NO: 6293 - protein, 518 aa, Helicoverpa armigera
MNNWTLFLLSSICLSHVCAYKILVVFPYPGTSHSILGEGYVRHLLRAGHQVTYLTAIPYKKPHPNLKQVVVASVVEKFEFFKTLDFEKFISKEVDLTDMQVMYETMITVANRSLTHENIQKFLMDTNEKYDLVVAEWLYHHLYSGFAAIYNCPYVWSSSMEPHTAVLSLIDEPGNPAYFPDHMSPVSPPLTFSQRAYELYYLFYLRRVLWSIRGLEQKTYEEVFGPAAAKRGITLPTLEEVKYNSSLMFGNSHISSGDPQRLPINHIPIAGYHIQDVVPALPENLQKIMDEAPYGVIYFSMGSMMKSSTMPTKLKRDFLDVFGTLKETVIWKLEEELTDVPKNVIMVKWAPQPSILAHPNCKLFVTHGGLLSTTETIHYGVPIIGIPLFADQFINVMRAVRKGFALQVDLGYDTPANLKVAIEEIVSNPKYTQKVKDLSFIYHHRETKPGHTLVHWIEHVIETNGAPHLRSPALHMPFYQKMYLDLLGIVLLGLIVLIKAVQILLRLAKKSDVKKKRS

SEQ ID NO: 6294 - protein, 516 aa, Ostrinia furnacalis
MHHLYKFVLSALLCLTACEAYKILVVFPMASKSHGILGEGVVRHLLNAGHEVTFITPFPKDNPDPKLRQIKVSDKIDHDVNYIKQILDNELEPFNPFKVVELFMEFSRRTMQNPQVQEMLNDPKETFDVVVAEWMFSEIYAGFAAVYGCPLIWLSSVEPHTMILQLVDESLHPAYNPGLMSSSAPPFTFMERVKELFFLGASLLLKNVFLMSYEREAYEEMFVPVIKMKGRPVPTFDEIKYNVSLILGNSHVSLGQATRLPQNYKAVAGYHIDTNFKPLPEDLKNILDNAKHGVIYFSMGSNLKSKDMPEKLKMSLLKMFGGLKQTVLWKFEDTIEDLPKNVHILHWAPQPAILSHPNCILFITHGGLLSFAEAVHFGKPTIGIPVFADQFTNVERAVKKGFMKRVDLSYTMADELEVAIKEVTTNPSYTTRAKELSLIFHDRPTHPGSELAHWVSHVIKTGGAPHLRSPALHTPFYQKMYLDLVALVLVVVVALRLIVKRICCRRSRLSREKKNQ

SEQ ID NO: 6295 - protein, 550 aa, Drosophila obscura
MLIMEKRLAICLLVILLLAMGTRTIEGANILGVFSSYSPSHVIVHMAVVKTLADRGHNITVVTQMEPKFQPHENVTVIVALPTPEQEALTRAYMERVSSEKESFWSFLANLLLQPSPVLHGQYEWTLHPKVKSLYENPQTKYDLVILGLMLNDFQMGIAAKLRCPVIITWVGVPMPFTDSQVGNIDDPSYVPSVNVALEPGHLTMGFGMRFVNFFKNSFLKIVNVLIRHKMNEFYNQAFANDSDPDFPSYNEMKRRISLLFYNYHAPSEGPIRPTVPQSIEIGGIQVKEKPDPLAKDLAEFLDNSTNGAIFFSLGTNVKFSGIRPQIVEILYKVLSKLPQRVVWKWEDMESTPGNSSNIYFSNWLPQDDILAHPKTRLFITHAGKGGIAEAQFHGVPMLAFPIFADQPGNAEIMAKSGFGLHLDILTLTEQALEETIRELLENPSYRASVGRFSALYRDRPLTARQSVVYWTEYVLRHQGAYHLQSPLLHMDIIARHNLDVYGTLLLFGLVTLLLLRLVFRYVFRKVLSVVRGHSYRPKASNSKLKDKIF

SEQ ID NO: 6296 - protein, 241 aa, Papilio machaon
DLQQYLDASDNGVIYFSFGTNVQLSLLPQNKIEMFENVLSQLPYNVIWKRDTVVMKSKNVEVYKWLPQADLLRHPNIKLFITQGGLQSTDEAITAAVPLLGIPMLGDQWYNVEKYVYHEIGQRLYFEELTEEKLKNAILEVAEDKRYKDNIIRLRSLMVDQPQTPLERAMWWVDYVLRHGGAKHLRAPAANISWTEYLELDLLLFITCTLFILFGSIFLIMKVLVRIVASKIKHDKKLKNE

SEQ ID NO: 6297 - protein, 527 aa, Danio rerio
MNDRIVRMAASALVLCLFCLVSAEAGNLLVIPALGSHWTGTRPLVEELGRRGNRVVVVFPEENVNMVPAKHTTTLTYPVPYTKAQIQKGTDAAISKLFSADVSSDVGRFQNFFTTMDMLKVIISRNAEGLLLNKDLLKKLQDYNFDAILTDPFETVGVIASEYLSIPAIYMQTSHPCGADVLASQCPAPPSYVPKGLTHFTDRMNLWQRSVNFVRTLVQPVACSRMFAHADEIASKVLQKKTSVMEIMSRAALWFMHFDFAFEFPRPVMPNMVVIGGVDTKKPEPLSQELEEFVNGSGEHGFVVFTLGSMVSQLPEAKAREFFEAFRQIPQRVLWRYTGPVPENAPKNVKLMKWLPQNDLLGHPKVRAFVTHGGSHGIYEGICNGVPMVMLPLFGDQGDNAQRLVSRGVAESLTIYDVTSEKLLVALKKVINDKSYKEKMMKLSAIHRDRPIEPLDLAVFWTEFVMRHKGAEHLRPAAHDLNWIQYHSLDVIGFLLLILLTVIFVTVKSCMFCFRKCFKKSQKKKKA

SEQ ID NO: 6298 - protein, 515 aa, Halyomorpha halys
MISWLCFLVTVAMAESARILAFFPQETPSHQFIFRPVIEGLAKNGHDVVYVSAYPYKEIPMNITQIDLSKYDVNDYEFEDIDLMAIAETNLMVYTSEMYSYGEIMARYYVGNKEVQELIHSDQKFDAVMFESYFYQEYLSALIHKFNAIPIEVMTLGDCAWINEMSGIQDNPAYQVDCKSGLSGNMNFWQKLYNVYVTTFTILSSYYYLHYTQQSLMDLYFNYTGWESRPSIDILSRNRSLILTNFDHVFADPYPMAPHRKDIGGINIKPPKPLPEDLQKIMDESKHGVIYMSMGSHIDPSQFKDQISAFLEVFRELPQRVILKYDPEKAGEIPANVKVSKWIPQQDVLAHKNCVLFITHGGLLSLSEAIYNGVPLIGIPVFADQGKNMAMMESQGIGRVLNLRNITRDSVSWTVREILSNNRYREASLRRSKMLRDMRHSPVEEAVYWIEHTLKYPFALTPKSTNLSAIEFHLIDVKIFITLALILILYILYFVFKIAKNIALKAIRKPKQKVN

SEQ ID NO: 6299 - protein, 694 aa, Miniopterus natalensis
MLEKIILVLSLQISLLGITLGGNVLIWPMEGSHWLNIKIIIDELIKKQHNVTVIVYSGALFIDPTYNPSLTFEIYKVPFGKERMEEMIRNFILTWMGNRPSPSTIWRFYQEIGIVLQDFHALCREICDGVLKNQKLMEKLKKSKFEVLVSDPVFPCGDIVALKLGIPFMFSLRFSPASTVEKHCGKTPYPPSYVPAILSELNDQMSFTDRIRNFISYHLQDYIFHTLWKSWDSYYSEALDGSHWLNIKIILEELTQRNHNVTVLASSATLFINSNPDSLVNFEVIPVSFKKSNIDSLIEHMIMLWIDHRPTPLTLWTFYKELGKLLDTFFQINLQICDGVLNNPKLMSRLQKGGFDVLVADPVTICGDLVALKLGIPFMYTLRFSPASTVERHCGKIPTPASYVPAALSELTDQMTFAERVKNIISYPLQDYIFQSYWGEWNLYYSKVLGRPTTLCETMGKAEIWLMRTYWDFEFPRPYLPNFEFVGGLHCKPAKPLPKVLWRYKGKKPATLGANTRLYDWIPQNDLLGHPKAKAFITHGGTNGIYEGIYHGVPMVGVPMFADQHDNIAHMKAKGAAVEVNINTMTSADLHDALKTVINEPSYKENAMRLSRIHHDQPIKPLDRAVFWIEFVMRHKGAKHLRPAAHNLTWFQYHSLDVIGFLLACAASAIILVTNCCLFSCRKFGKTGKKKKRE

SEQ ID NO: 6300 - protein, 530 aa, Neodiprion lecontei
MTGKIIALAALIFFMSILHRGNASRILCVFPSASVSHQVVFRGLTLALRERGHDLVVVTPNPVRDPNLKNYTEIDVSFLYEENYETDYIELRRNARWIDWFWNVTPILHLYGEKTFDHPEFKKIYAPDSGEEFDLMLTETLYWPAFLALGKRFDVPIIGMTSLGLALNLQYSVGNPILTSHQSNWDLAMKEVSDSPTLFERLKNFYDVWKFIYNYNTEFMPAQHAIAKKYLGNEIPELGEIERNLSLIFTNQQGPISYLRPNVPNVIEIGNFHVSKKIKPLSKDLQKTLDESKQGFIYMSLGSNVKSTMLDKKSRSEFIAAFSKLPYTVIWKFEDEFLPGKPDNVIIIKWAPQQAILAHPNLKAFVYQGGLQSTEEAISHGVPVIGFPVMADQDMNVNKMVSLGVGKKLEITDVKRDDLIEAIQSVATDGSYKQRMLNLRELLKDRPYNSLKNAVWWTEHVIRHRGVPHLRSSTADEPWYQRGDMDVIFLIAAVFVISVMTASAVLYQLLVYSMKIFGNQQSVNRKEKLK

SEQ ID NO: 6301 - protein, 493 aa, Strigamia maritima
MLLTILLLALINPTTSGRIVFVTSVATQSHVLFLSPLIEELIERGHQITFINNKHPMKKSIVDNMTTIHIDVNPQFISNLTRLIFEEYRNDPFPALLHLERRNAIATCRTFVANDGVQHLIRNNTRFDLAIATSFVEECPFVVAKLLAPRVIYVNFMRHILSPYAHAMSVPTPYSFVSHLTLFTSPMRLIQRFTNAVVSFYHSVSFRDFDSTDEILENLVHDAPRIRQVRDKLSAILYGGDPVLSEAVPQMPYTVAVGGLHCRAARALVGELKSLVEASGENGFIYFSLGTVLETSSVNNATVRAFLDAFSRLRQTVIWRSAEEIDGLPPNVKIVRWAPQQDLLGHPKIRLFLTQGGLFGLQEAVYHQVPVVGFPAFFDQFANLKRLSDLGCGLRLDLFNLTAELIHSSIDRVINEPRFKACMVKKSLVFRDQEQSPLHRAVYWVEYFMRHRQMISAENPTGHLNWIAYFCIDVVLFFPLCFLGVFILAKRIK

SEQ ID NO: 6302 - protein, 519 aa, Plutella xylostella
MVSIKVLSLTLLLFLVNCSDCYHVLLVFNLPGKSLSILGESFVRHLLNAGHEVTYVTPFPMKNKPKNNFHEVDVSEGVDKLFAEICNITFLLENTHFESDEEEIMHLGVEVAEMTLTNPNMLKLLNDKTQKFDVVVGDYLASELVAGIAYYYDCPMIWSYSMGVDSAILKLVHEPTNPSYIPDYISLNIPPMSFKQRVGELWTLIRNTWVKRHSVMPRELAFYKKFYKPLLEKKGKPLPAYEDVMYNASLVLVNSHQASGGLAAIPQSVKLIGGHHINGPVAPLPDDLKEIMDSSTNGVIYFSMGSIWKSASMPITLRDNLVRMFGSLKQTVLWKFEEDIPNLPKNIHTLKWAPQHSILAHENCMLFITHGGLGSSTEALHFGVPIVGVPISFDQFLNINRAVSKGYALSVKLSYNLHNDLKVAIDTIATDPSFKSNAKALSEIYHDRPVKPGVEIPHWVRHVVRTRGAPHLRSPALMVPWYQKTYLDLVALVLLVVLSLFLLVKKLMFTVKSAKVKSN

SEQ ID NO: 6303 - protein, 530 aa, Laodelphax striatellus
MTSTSVILCLFLLSLFKCTTNAANILSIIPFPMKSHDRIYKPLLFELARKGHNITEITQFKTATLPKENYHQIVVETRHKDLYEILDFHEIRQKTTIWNVGFQDLKLFWDMDYAVIEDILKSNRVSSMINSKTTSFDLIICEGFFGYEALFAFGHRYSAPVIAVSSLGSTIYMNPHIGNPILSASYPNFLLPYTHDMGLMGRFHNSLLNLVTLLAITIYQLPYQQELVERFFTESFKQNSIKPIGINKLVKEVDLVFINRHPVLGFPRPLTPNVIDIAGLHLHKFDNNSNVDKELMKIMDDAIMGNVYFSFGSNVNMAKMPQQQKTAFMKAFSRIPQSVLVRWDDTTMPDRPKNVHFRKWFPQNEILGHRNCRAFITHGGMLSIEEAVYNAVPILGVPFFGDQPMNVLRAEQLGLGLRLEFDNITETSLNWALNEIITSKSYSETAKKLSTIFRDSPQAPLDRAVYWVEYVLKHKGADHLKCYARHLNWFQYTSLDVIAVGLLIAYFVFYCVHKIYSLFVRNMSKKLKRQ

SEQ ID NO: 6304 - protein, 529 aa, Caenorhabditis elegans
MIRMSVVSISLVLCTLSLVSSLNILVHSPAYAASHTNFMARLADTLTEAGHNVTFLVPIALEERRDKLGVKLTKDVIIVEQDEEMKSKLVPHSGSIEFLWIIEMDSSSIDAMFSWYNEIMILTCENFMRNKQVMSELKSRHFDVAIAEPFTICGLGLFEELNIKKTILVSSCAHYDFMLPHIGEPEDFSSVPTLSSKVGEEMSMTEKWENYRLVAETKASLAKLFDAETRIYRESFGSDIPDWKELMSSASLYFTNSNPFIDYPRASIQKTISIGGITVDFQQIKSEKLNKEWEEVLNKRQKSMLISFGSNVPSDKMPAAWKAGIFETIKSMPNVTFIWKYESDDVSFADGISNIHFSKWVPQTALLNDPRLSAFLTHGGLGSTNELAYCAKPAVMVPIYGDQTRNANMLARHGSVIVLHKKELANVQRVKKAVHDILYNKQYTESAERIAEMIKNQPKTPKETVVRYTEFVAKYGPFPQMAPHGRKLTYFQKTFLDIYSLFALGVVSVLTVAFLVIRYVLSCFKLKKD

SEQ ID NO: 6305 - protein, 527 aa, Aedes aegypti
MASGTRPLISKLLLAAAIITFSCNSLFVGETEAANILGILPTWAKSHYIIGAEYLRVLALAGHNVTVVTPFRLGDSPPNYHEIVMDGILDASAGLEKNYFKYKDGSFLMILSMLYNDLADTTCRFVLKHPKVVTLMKSDQQFDVVIVETFMTESIYGLAQHFNAPLVVFSTLGSNLWTNGLVGAPSPYSHMAHLMLGFTDHMNFYERMINTVVGVGEQVYYELVYLPRQKRFYDEAFSHASMSFDQQLKNTSLVLLNQHFALSSPRSYPPNMVEVGGTHIRDVRPLPEDLQQYLDEAPDGVIYFCMGSHIQSKHFPSDKRDAFLKVFSQLKQRVLWKFEDTSIPDIPSNVLIRSWMPQNDILAHRNVKLFITHGGLLGTTEALYHGKPIVGIPIFGDQLMNVQKAVRSGYGLKLDYELINEASVREVIETVLMNESFTERAREISGWYHDKPMTAAETAIFWTEYVIRHRGAAQLRSPAVELKSWQYYLLDVGAVLVGLCLFVFAMIYKCLGAIRTILDKVNKYKRD

SEQ ID NO: 6306 - protein, 402 aa, Paracoccus salipaludis
MARIAFCLPALSSHAAVHAALARALAARGHDCRMVGGEGLGPLAAREGIAFESLGTREPDLHNAGLLRTLAATAATTRAFVRQGPDALARLSPDLVVADQAEPGASLAAEAAGLPRATLASALPLDRDEAIPPPFVDWPWADGDEGRRRNRGGWRVADALMVLQSRALARGCRDHGLPMRRRLDDWISPDLDLRQMVPSLDFPHASGSGARAVGPLRDGGTGEFDIHTDGRPLVFASLGTLQGGRLALLAAIARAAEDLGVCLALAHCGGLTDAQAQALPGGAVVRDFFPQRAVLARAAACVTHAGLNTVLDCAAAQVPMVAIPLAFEQPATAARLAFHGAARVLSPRRATRATIREALGAVLSDPSYRAALAAPAAEIAVAGGVSRAADLIETRLVRRAAA

SEQ ID NO: 6307 - protein, 520 aa, Papilio xuthus
MRLMLILITTICLLNYSEANNLLVVFPIPGKSHSILGHAFVRHLLNAGHKVTYITPIPMKDVNPALRQINVESNKNCFAPEEVLDIQKLMRKEVDMKDMPTLFTMMFNIANATIQHENVQNLIQDPTEKFDAVIAEWMYSELYSGFSAVFNCPLMFFLSVSPHNMALSLIDGIPNPAYTADHIKSNTIPPFTLWSRVQELVTLLDWKIYTWWVNDRNVNSYDKAFKSAVVRRGRILPTLDEMKYNASLMFGNSHISTSDGIPLPRNFIEIGGYHIDGNIEPLSKDLKKILDEAKHGFIFFSMGSMLQSSKMPEAIKSGLAKIFGQLKQKVIWKFEGLLPDKPNNIFMLDWAPQQSILAHPNCVLFITHGGLLSTTEALHHRVPIIGIPMFADQFININRAAAKGIGKRVDLNYDTPKNLKLAIEEILGNSSYGDRINELNYIYHDRTTSPGAEITRWVQHVIKTKGAPHLRSPALLVPWYQKLYLDLIFLIIIIIVIFSIVIKRLIGYKKLNINVSKKRS

SEQ ID NO: 6308 - protein, 528 aa, Apis mellifera
MKRNIAGLSFLLHVLIIANELECYKILSVIPTPSYSHQIPYRQLWLELHARGHEIVVITTNPMPNISLPNFTQIDISQSYSCLKELNFIENRFEHLSWLTFLQNYVMSLYTCFLTEVFNSSEVKKLYAPDNPVKFDVLLAEFFYGPAMCAFAHRFNVPLIGLSSLGMITLNEFILGGLVLPSHEYTWEMEANTGTNLPFFKRLSNFVTMWSFLYNVNFNIFFFQQKLAEKYLGPLPPLTDIMRNTSLIFINEIDILSPARPKLPNMISFNFFHVSDNPTPLSKDLEEFLDDAEEGFIYFSLGTNVRSSYLPKEIIRMFCNIFSKMPYKIVWKYEQDLPEKSGNIYIKNWLPQQSILAHPKIKLFIYQGGQQSTEEAINFGVPVIAFPILGDQDYLVRRIEALGIGKYFDIRTIIPDQMKFKNAIDEIITNEKYKNRVLDIRTQIRETSQDVKKIAWWTEYVIRTKGALHLRSTLAWEPWYQRYDMDIIIFLTIVIFIIFLIVISIIVNILMYFYKMMDTSTHRKHKIH

SEQ ID NO: 6309 - protein, 542 aa, Strongylocentrotus purpuratus
MAHLSSNIIHFSCVLLIFMNMPSNIFSSKILISAIYGEGSHFLAGASLGEGLARKGHDVTMLISNAYEHRLEDPRYANLSFEVFKHPVPPEEVREAFAFASTLVFRDDNIEFFSLMKNMSKRTVDDCEAVVTDKELMLRLEKNDAIIVDITWPCARYIQVVLEEKMKSQRHRTMISLSATNPWSGYLKLGGAPVNYAYFPEISTGFNNRMTFSQKILNIIQTNLIAVVGEQLTPPLYREMGKRLGLRPNIHPIFDMQDFDLHLLNINFASDFVTPLSPSIIPVGGLTVRPLQTLNEELEEFVQSSGEHGVIVFTLGTYLASITTIRPEIVTMFAEAFRRLPQKVIWQLKELPDWELPSNVKAMPWLPQNDLLGHPKTRAFMYQGGNNGFQEACYHGVPIVVIPLQGDQYDVAARIEARGLGKKIEKLELNAEIIYETLTEVIKNPSYKKVADQVSAIYKDQPMSAPDRAAFWIEHVIKFGGAYMRSPANDLTFIQYHLLDVYAFLTAVIVIFLAVVYYTLKFCLTRCCRMIGLGSSRKSKTE

SEQ ID NO: 6310 - protein, 534 aa, Zeugodacus cucurbitae
MQWPIVYVGVFALVAIASMVPAGDAARILGFFPSPSQSHLIIHCALTETLARAGHNVTVIATKPNPYPNAAYKYIYIETPLLSATFMDKFINDPPPFYIKYPHLVTEASQMNNRTLWHPEMQQFLREHRVGSFDLLLLGYFINDFHVGLGAHFDCPVIISFMVQPIFSLNEMIGNPSEHAYVPTLLSGLKQPMDIWARLQTYLLYLYEYFVMGPLLESAQQTHYSYNFPVSSGYPNFLEARRNVALIFTNHWFAQGPIRPNVPNLIEIGGIQIKEQPDPLPTDIAEVLNGSPEGVIYFSLGTNVRGDLLKADKARIIFNVLSKLPYKVLWKWDENDCPGNASNIIIKNWLPQDDILGHPNVKLFITHGGKGSVVESEYHGVPMVGIPFYADQHANLKELQQLGFGLYLEYPELTEDSFRRAIEDVINNPKYTKAIRAFSKVYRDRPMTPRQSVVWWVDYVLRHKGAKHMQSPAVYLTRWQRMSLDVLSLLLAIAAVVVGFGVVMVRFCISRIRARVVKRKGSVTNGVSKKKKLK

SEQ ID NO: 6311 - protein, 527 aa, Macaca nemestrina
MLNNLLLFSLQISLIGTTLGGNVLIWSMEGSHWLNVKIIIDELIKKEHNVTVLVASGALFITPTSNSSLTFEIYKVPFGKERIEGVINDFVLTWLENRPSPSTIWRFYQKMAKAIKNFHIVSREICDGVLKNQQLMEKLKKSKFEVLVSDPVFPCGDIVALKLGIPFMYSLRFSPASTVEKHCGKVPYPPSYVPAVLSELTDRMSFTDRIRNFISYHLQDYMFETLWKSWDSYYSKALGRPTTLCETMGKAEIWLIRTYWDFEFPRPYLPNFEFVGGLHCKPAKSLPKEMEEFIQSSGKDGVVVFSLGSMVKNLTEEKANLIASALAQIPQKVLWRYVGKKPATLGNNTQLYDWIPQNDLLGHPKTKAFITHGGTNGIYEAIYHGVPMVGVPMFADQPDNIAHMKAKGAAVEVNLNTMTSVDLLSALRTVINEPSYKENAMRLSRIHHDQLVKPLDRAVFWIEFVMRHKGAKHLRPAAHNLTWFQYHSLDVIGFLLVCVTMAIFLVIQCCLFSCQKFGKIGKKKKRE

SEQ ID NO: 6312 - protein, 505 aa, Drosophila erecta
MKRSPVSWSLLWMGCTGLFLLADSPAPVKSHHILGVFVNVHRSQLMVHLAVCRALLQRGHHLTLVTTLPLEEQEVRGNVSHILIPWEQPTVEGSSSSDLLLRLQRMFRRLEHSGDLLDLPEWKRFLSNPPNTPFDLLLLGYHFNDHLLGVAAHFNCPVAIVSTQQPTGFVNSLMGNPEERSYVPQPYDGHQRSGISARVFGIWEKFIEILARRVLARIYSLHFPEPRYPSFETMRRSVVLALSNHHMISEGPIAPLLPSMVDVGGIVLEQQRKKTPLEISAGNRSLIIFSLGTRFTWRKSTAELVQTFTKAFSRFPDYDIYWTYDGPNGSAISLDYPHLKVAKWWPQSQLLQSGRTRLFITHGGKGSLSEALFYGVPMLGLPLIGDQRANLQRMHSKNWGLTLSTYSRNLTHLELAKAISRMISNSSYGETILKASQMYRDRPMNSSDLATYWIEYIVRHKGAKNLYNPARQLNMIEYHCIDIYLIVYGFLILTIAILRKVNRLL

SEQ ID NO: 6313 - protein, 519 aa, Strigamia maritima
MKLDTHLGLTLVFLFSTQLSEAYKILYLSPLASQSHKNVFDPVISELGTKGHEVTVVSPYKLAQPVTNVKEIIVDVPMNPEILKLMSEVMKHTDNHPLRSTFIFKPFTLAACEAYFGNPQVKLLLKAGQQFDIVIVNAFLNECALATAPLLGQYVIMHSPATLFPWTPVFVPQPPSYVPNIFLPYTSKMNFFQRLNNVLTNIGYDLMYNYHLVPAVQATVASHVAGNPSVHQAHKQVSFTLTNADPVLISARPSMPNVVDVGGLHCRKAKPLPTDLEDFVQKSGNDGFIYFSLGSNAQIKHLGKETKAHLLNAFSKLKQKVIFKSEEDLKDLPSNVKLVKWAPQQDLLGHPKIRAFITHGGLLSLQESVYHEVPVVAVPLFGDQPSNVARVEELEIGAKLAFNDISSDTLLAAVNKVLSKSYKENMKKYSAVFRDHLQHPLQRAVFWIEYVARHEGAKHLRSPGEDLNFFQYFLLDVIALILVAALAVFWVLFTVGKYAKRKFSPCKVKKSEKQEKKQQ

SEQ ID NO: 6314 - protein, 466 aa, Branchiostoma floridae
MEGRPKLHCSILILVILCLMLNRKSSAEKVLMVPRPQYDSHWMVEASIGQAFVDRGHTVTVVVGEDIVAKRRAERPDFTFETFPDDGEVMRLIKQASKQTEKTWDWKYCEHLLGKDGQDSDLMGRLKTAQYGVVISDSLLRCGTIVAANLGTPHVVNSPDGGKFIDKLATGVPLPLAYVATAESPFTDKMTYLQRVENACFYFGFVSIFKSWSFANEFDDLVHKYVSEKETIHSLRSRTDLWLYHTDTVLGFPRPSMPNMVQVGGLMADRPVVPLSVILGGCPNHTKTGWRADGRPPRRPSLRAHPKTRAFVTHVGKNGMYEALYHGVPMVCFPLFGNAARVVDRGLGVSLDFRTVTSDQLYHALLRVLTNNSYHETAARLSRLHRDQPQSPMERAVWWIEHVIKHGGLPHLRARAVELPWYQYYLLDVAAFLLGICSAVLGTLWYSCSFVCRKVCCKRGGKLKSQ

SEQ ID NO: 6315 - protein, 289 aa, Drosophila persimilis
MRRNASLVLINQHVSLSFPRPYAPNLIEVGGMHIDGKLSPLPAKIEKFLNESEHGAIYFSMGSNLKSKDLPPEKVQEILKAFRGLKQRVLWKFELEDLPNKPDNLFISDWFPQTDILAHPKVLAFVTHGGMLSTTESIYHGKPVIGLPIFSDQFFNMAHAEQTGYGIMLDFKSLKAADLKAAIERITSVPSYTEVIRGMSFRYRDQQQTPLKNAVYWVEHVTRHQGAAYLQSAAQRLNWWQYHNVDVLLIIFGVVILLLVALPLAIWRLLRGVFGGGKTQPQGEKRKRN

SEQ ID NO: 6316 - protein, 531 aa, Drosophila willistoni
MAPNPCQILLLALSGAVLIGGSQCANILGIFTSVSPSHLIIQMSTIRVLAEKGHNVTVITTLKPTVTHPNINLIQVPLTREEENILNEILAEMTRADNKNFVLNMISMFHQTGFIFDKLESVMFDQKIKNLYENTDNKFDLVLLGYFMNGYQLGLARKLKAPVIIVETILPSVMLSDIIGNPNELPYVPEFTLSVDKGKPMTFSQRLENVFSNLAFKVALFLQESRNEKVYKSLYGDDPAMPSYEQMKKNVSLIFFTSHGISEGPIRPNVPGAVEIGGIQIKDDPDTLPKNMENFLNEAKHGAILLSLGSNMKSSFLRPDLVQKMFYVLSKLKQNVIWKWEDLEKTPGKSANILYSKWVPQDDILAHPNLKLFITHAGKGGITEAQYHGKSMLALPIFGDQPANAESMVKAGFGITLNLVTLEEESFNESLLELLENPKYAQAVGTFSSLYRDRPLSARESVLYWSEYVIRHRGAPHLQSPVVHMGFIASNNLDIYLLVVIILLISLLLLKILIKFIYKKLINKSQKGKKE

SEQ ID NO: 6317 - protein, 539 aa, Drosophila simulans
MIEYTKIGFLIVLLLGTKTQSSDGANILGVFGTHSPSHVIVHMAVMKALADRGHNITVVTQMKPKMAAHENITVIIAPPTEERHKFIKEYMAEVSNEKPSFWETMVKAIVQSSNQLEGQYEFMMHPNFKEIYENPKTKFDLVILGLMANNYQLGIAAKLKCPVIISWVGIPLPFMDSIVGNVNDPSYVPTVNVALKAGQNTMDFGLRFVNFLKYGVMCVFETVLDYKMNQFYERAFANELEFPDYQEMKRRVSLLFYNYHSPSEGPIRPTVPQSIEIGGIQVKEQADPLPKELAKFLDNADEGAIFFSLGTNVNTNTFRPDTVDILYKVLSKLPQRVIWKWEDLKNKPGNASNIFFGNWLPQDDILAHPNTKLFITHAGKGGVAEAQYHGVPMVALPIFGDQQGNAEIMTKSGFGRWLDILTMTENELKETIHEVLENPTYRETIGKFSTLYRDRPLTARQSVIYWTEYVLRYQGALHLQSPIIHTDFVARNNLDVYGVVLLVSILLIVIIRFLFRKILNVASGYSNRRESLAKKLKSN

SEQ ID NO: 6318 - protein, 512 aa, Drosophila pseudoobscura
MRLASLLLLLIGQVYGYSYLMVLHTGSKSHHTVGVALARGLIAVGHEVTLISPFPQTKPLQNLIDVNTPNIISVMANHKARILENAKLPVLHRYPRIHGMGLDLTEALLAAPAVQQLLKEQRTFDGVIVEAFMNDAHYGFAEHFGAPLIVLSTLGATGWTSDLVGTPSPPSYVPHNLLQFSDRMDFTQRAQNLGFQVFEYFYQRWFNLPRQEALYRKYFANNTQDFYEMRRSTSLVLLNNHVSMSAPRPYSPNMIEVGGMHINRQARQPLPKDIEEFIEGARHGVIFFSLGSNLNSQDLPLEKRRAIVETLRGLKQRILWKFEDENFPDKPENVFISSWFPQDDILAHNKVIAFITHGGLLSTTESIYHGKPVVGIPFFGDQFMNMANAEIAGFGITVKYHQLEAPLLRSAIERITSDARYAEKAREMSNRFRDQLAAPLDRAVYWMEHVTRQKGARYLRSACQDLSLVEYHNIDVLATFFGGLSLVIVLLWVLIRFVLVKLRGSSKKEKAN

SEQ ID NO: 6319 - protein, 519 aa, Drosophila erecta
MRIFTLILGLLSGLEYSSGYNYLMVLNSAGRSHFNVGHALAKGLVKAGHTITVVSVYPVKKPISGYTDINVPNVINVMGGDIAALWASIQKPVTQKLIDHYQMGFRITRGLFEDSNFQEFLKSNQSFDAIICETFYNDAHYGLAEHFNAPLIGLSTGGGLTFITDMVGSPAPASFVPHIMLPFNDHMSLYERLLNVAFLGYERLLLDYYYLPNQEKLYKEFFPGNKRCFYEMRRNASLVLINQHVSLSFPRPYSPNMIEVGGMHIDGKLSPLPEKIERFINESEHAAIYFSMGSNLKSKDLPPEKVQEILSALRGLKQRVLWKFELDKLPNKPDNVYISDWFPQTDILAHPKVLAFVTHGGMLSTTESIYHGKPVIGLPIFSDQFFNMAHAEQTGYGIMLDFKTLNAVDFRKAIERITSDPSYTKVVQGMSFRYRDQQHTPLENAVYWVEHVTRHQGAAYLQSASQRLNWWQYHNVDVLLIIFGAAFLLVIVLPFTIFKLLNKKLSRGEITQSTKAKRN

SEQ ID NO: 6320 - protein, 525 aa, Spodoptera frugiperda
MNGCFGVLILFFAICGSSVVKSARILAVFPTPSFSHHSVYKVYIQALVEKGHEVVVVKSTNNVNYKDINDNYADDYEATRYNVTEIDATLSQDYFKKLMKRAQVFRKRGLVADSYSVTADNYMGIVRMMSDQFKLPAVQKFLNNKKQKFDLLITEAFIDYTLVYSHLFNDIPVIQISSGYAVAENFETMGAVGRHPVYYPNLWRDKFYNLNVWDLINELYVELRLYNEFYKLADQQNRLLKEQFGQDTPTIQDLRNRVELLFVNTHPVFDNNRPVPPSVQYLGSLHLTHKHPKPIYGTIGELLDNATNGAIYVSFGSGIDTEEMESEFIEMLLKTFEALPYLVLWKYDGYLNRMPENVYIQSWFEQYDLLHHKNIRAFVTQGGVQSTDEAVEALVPVVGMPMMGDQAFNTNKYMELGIGRVVNTVSVNSKELIDAITDVVENPNYRKKINELRHVIRHQAMTPLHKAIWYTEHVINSKNRRGETMLKTKASNVNYSDYVMSYIFVPLASYTIMNHLRQLLRLNFV

SEQ ID NO: 6321 - protein, 425 aa, Dendroctonus ponderosae
MSKELTVQSKIRKIFAMYNEFAEAILGNQQFREIYTDENQKFDLIIAQIYVSPIMFGLSEKLKAPVIGVSSMGGWSGTHVAAGNHNPPSLYSEMFLHYNGDLTFVERIKSTLYYIWSRLYVYFIAMPKWDAIMRKYLGQDLPYLADIERNVSALFLNINPILYTPRPMVPTVVPLSFMHIQPPKELPEDIATELESPQNGVVYFSLGSNVKSVNIPEKIRSLLMKAFAELPYKVLWKFENEELLGKPKNVVIRKWLPQQDILAHPNVKVFISQCGLQSTEEAIDREIPMVGIPFIADQEMNSKRLAAWGVLRHIDYLNTTKEELVETIIDVAENPSYREKMQGLRRLMQDEPWTGIQKAVWWAEYVIRHKGTKHLKSPTVDIEWYKYLLFDVFAVLIGAPIAVLIIIIKLARNTTGKTKNKSKTQ

SEQ ID NO: 6322 - protein, 528 aa, Drosophila ananassae
MLVARPVILLLAILIASSNGANILGLFSSHSPSHLIIHMSVAKTLAEAGHNVTVVSMLPPKVTHKDIHVIVIPVTDEQEKVIENQMSEMASQRNSIISTLNRLMNGMDVMINSQADLLSHPQFQQIYDTKFDLMIMGYFLNEFQLGVAAKLKVPVIIDWMNAPMLAIDEFTGNPTEVSYVPNIGTTATPPMGFLKRAENLAKHLFLKYMMSALLSKSERIYEEKFGNDKSLPSLSEAKKNISLAFVNAHLISEGPIRPLVPAMVEIGGIQVKDKPSPLPKDIDEFLSKSTQGAILLSLGSNVKSSSIKPEIVQSIFKVLSGLKLNVIWKWEDPKNTPGSSPNILYKKWLPQDDILAHPNTKLFITHAGKGGITEAQYHGVPMVALPIFGDQISNAQAMEKSGYGLALDLLSITEESLSKALNEVLENKKYEEAVGKFSALYRDRPFSAKQAVVYWTEYVLRHKGARHLQSPVVHMNFIELNNIDVHALIIAILVLVILLLRLVVKFVWNKLCSKSKCTSNKSKKQKKP

SEQ ID NO: 6323 - protein, 859 aa, Eumeta japonica
MNIEWDFAETAFNTIVDSYYDTPYMEADYKNLFEPLARARGVSLPSYQEALHNVSILFENSHHAIGTPKSLPLNIVEIGGYHIPEGVPKLPEDMQSILDRSTNGVVYFSMGSVLKSAHFSEDTRKGLLRIFGSLPYTVLWKFEEELKGVPANVHVRPWMPQPSILAHPNTKVFITHGGLLSTLEAVHFGVPLIAIPVFGDQPMNAARAARSGYALKVDYGDRMVEELRRALDSMLEDDSYYRQAKRLSGLFRRRPVSPQKLIVHYTELAIETGGAGHLRTRSALYPWYQRLFLDQLAFVVGLVVGVVFVVKRLFRGRPESETKPSSESGGAQGGGAVRHVGLRLLSEAGHAFPRIADEPAGPQYPPTRPVGFAKRCGLPVLVPRVCQVQDYSTLFLLPDPVVVPLAGNAPIAILMQHSRSALASTHALSAERAADTNEPCQARAVSSRQSATRGHSASACGRSDLDPDPDLELRPDIHFGSILVFSRSPSPTIGPPCVQSADNWMKLAPLRKNTGGGILPLGGGLMPVWWGALSVVTCEEVVTGTWADGGVDSGVWVGADSVRAPDRDLADLSVVEVAELAESDSDSPSEPTRLLSEHVSSSYSIVPLKMALHWYSLATRGKKGIPMLRKLRHITDRDILKIVYYSICRSRINYCIPLGGGAAETYLIEAERAQRAILKVAAFLPFRYPTTDVCAPGMSSRMRYLLLLLLAAAVADGYRILVLFPVPSKSHSNLGFGLVRPLLDAGHEIIQNDPGARRRRSSRGIKLHVPSGRGAEQRLGSLRVLSSDSGYLYAYKFKLYGTDACPARITVIKCGRYRSYVRRVAWEEMDTGNLNCMQKTNTATWRIHHLQNQDLLPWL

SEQ ID NO: 6324 - protein, 529 aa, Ursus maritimus
MVAKEWISAIVLLQLCYTGCGLCGKVLVWPCDMSHWLNLKIILEELTERGHEVTVLVSPESFIIDYSKASTLKFEVVPMPPNREKAEKTLNDFLDVATNVMPTLSAWQSAMKLQEFLLRETGNLKLLCESVVYNRSFMKKLQETHYDVMVIDPVLPCGELIAELLTVPFVYTLRVSIGETLEKYCGKLPAPLSYVPVAMVGLTDRMTFLQRVKNVMFFIFSNFWIQQLDTQVWNQFYSEALGRPTTLCEIMGKAEIWLIRTYWDFEFPRPYLPNFEFVGGLHCKPAKPLPKEMEEFVQSSGEDGVVVFSLGSMVKNLTDEKANLIASALAQIPQKVLWRYKGKKPATLGANTRLYDWIPQNDLGHPKTKAFITHGGTNGIYEAIYHGVPMVGVPMFADQPDNIAHMKAKGAAVEVNINTMTSEDLLTALRTVINEPSYKENATRLSRIHHDQPVKPLDRAVFWIEFVMRHKGAKHLRPAAHNLTWFQYHSLDVIGFLLACVATAIFLVTKCCLFSCRKFGKTGKKKKRE

SEQ ID NO: 6325 - protein, 857 aa, Leptinotarsa decemlineata
MLLILLCVAQNVLQIQSSKILTIIPTASYSHHSPFQPLWRELALRGHHVTVLTTDPQKDESLTNLREIDMSYTYEIYKKHNVSDLLSDDSKSFMEMGKKLGIVFREAQHAQLSSAEVQELIHNKNYSFDLLIVEAQTPGMLSFAWRFQCPIIGVASLDSAMQYHDSMGNPIHPVLNPDYNLEVGEADEMTFLERFLSFIYIAAYKNLIYHKTFPAQYEIAKQYFGEDLPPLIDIQNNMSLLFVGTHPLFHNLRPLNLNTITLGGGMHIKQQKPLPEGLKQFLDGADNGVIYFSLGSNVKSKTMSNEFKKAIIGAFAEIPYKVLMKIDGELEDHCRICITMLFKLLCVVLQILGIHSARILTIIPTAFSSHHSPFQPLWRELALRGHQLTVLTTDPQKNTSLINLKEIDMSYTYDIYRKYNFTELLSSTDSIMELGSKAAVMFDEVQHTQLSSPEVQELIHNKNIHFDLLMIEAQSPELLGFAWRFQCPTIAITTLDCAMQYHDSLGNPIHPVINPDFNLEVGHPEEMGFADRLRSFLFIPLYKYFMYHMTYPRIHNAARKFFGDDLPPLKEIQDNISMLFISTHPLFHNIRPLNPNTITIGGGMHIRQPKPLPEDLKKFLDGAENGAIYFALGGNVNCESMSNEFRKTLVDAFAQIPYKVLIKIDCQLGDISSNVLVQKWVPQQDILRHRNVKLFITHGGILSLQEAVINNIPVIGIPFFGDQKTNLNKIVKWGSGIKLDRRKLSKNVLLYAINEVINNPKYREKAREMGDIYRDEEIPSLQRAIYWTEYVIRNKGARHLRSLAVKMPAWKYYMLDVIAFLTSIVLLITFVCYLALKFFFRSISRLSINKFSEKKYN

SEQ ID NO: 6326 - protein, 534 aa, Caenorhabditis remanei
MKFSIFILLILAELCTTYKVLVFNPAFGASHSNFLGKISDILIDAGHEVTMLIPVFVDGKKDLIGSKKVKNIIRLGQDPRIYQMQKEGATEELMRKKIWTMGAEITSMLGFIGNFSKTSAYQTDYMFAQTELIEQLREEKFDLGITESLFLGAFSFFDEIGIKTIINADSTLYMNGVKDALGEPAAVSYYPGLFSPIDDKMDFFGRVKNLLGYQFGMWFSTVKYDAEIGALPKSYKGSRDWRKILSSVAFNFVNSNQYIDYASPSLPKTVFVGGMQVNTKKSGKATLSKEWDEVLSKRKTNVLVSFGSNAFSCDMPDEFKNAFLEVFASMPETTFIWKYEEANSTLANHLPNVKLTTWMPQNDILADDRLTLFITHGGLGSSVELAYQGKPAVVIPLMADQPRNAHMLTRHGGALQLDKTLLDKPSEIKKAIETVLNDSNYKKNAQRLAKILEDQPNKPKDVVLKHCDFAVEYGPLETLNSEGRHLNTFQYYSLDIAFAVLVVFLIVLFILHLIIKFVFRLLKRTLLSPKKKVD

SEQ ID NO: 6327 - protein, 503 aa, Caenorhabditis brenneri
MRSFLLLFCLTTVYFIVDAAKILVYCPSISKSHVLLCAKYADLLHNASHDTVLFIPSYSSLLNDYDGAKHAKVWRLHNVTDAYDKKFDSFADVMENSHIGFIDRMTYDVDFWMDMCEDVVKQFDRLQPLIDYQFDLAIFNDIDPCNPAIVRSLNIPKTALLSRLPTLPSYVPSMEENPNHDRMSFFERMSNAYKYFQSIVVHYLQDRRVLHIFRKHISPDFPSITGIIRNVSLIMVNTDEIFDISRSYSPKFVYVGMIGAEKHANVTLSEDLDKIFSKGKLGSVFVSFGTVTPFRVLPKRIQSSIFNAIQKLPDYHFILKTVPGDTTTAEMFAGVPNVDFVNWVPQNTILKHEHLKLFVSHGGMNSVLETMYNGVPMVIMPVFTDQFRNGKNVERRGAGKMILRQTVTTETFYDVIHEVLKNNNYETAAKRISRMMKSRPFTPEERVTKWVNFILDHDTFDHFHLESNNLSFFEHNHLDVFFVFIVLPFVTYFVFRRVLKSSS

SEQ ID NO: 6328 - protein, 385 aa, Daphnia pulex
SKERYDLIILDGFSNDCTLLLAEVFDVPFIYLNCFPPTPWLLYAIGSPLAMDHFPNPSGTRDKMDLWQRTFNVVTQVVTGLGGLFIYNWHILPTIDRVASRVLGKHNLTPILDIQSRRLSLLMTNTHFSINFQLPTSPAVVEVGGLHLGGKLKRLPKDLVSFLDGSGDAGFIIVSFGSMLRGDGLPKDFRRLFLSVFARLPQRVVWKWENQSKLGESEELIPSNVKTISWLPQKELLSHRNARLFISHGGLLSKQETIFNGVPAIFLPVWADQPINAQKAEDDGYAIRLCWDELTEEILYNAIQAILTNPRYAKRMQQVSALMQDQIDKPMGRAIYWIEYVIRHQGAPHLRNASRDLMLPQRALLDVMCIFFIFTFSMIYVIYRL

SEQ ID NO: 6329 - protein, 385 aa, Helobdella robusta
MCTLILPKYLNVPFVSLANSYFAFDVRSPALPSFSFRYFQAEDNQKEMSFFVRFKQLMIFLFFSSSLSPLNRNLTLLHKYSPEYDTWEDLLRESLLFFHEVDHHFGNFLPVFPNHISTAGLTGIPAKNLPENILNFVNGRIVDGKELGLILMTFGSNVNYMSRSTMKKFLNAFGLLNETVIAKFSIDKKDLELISSIPPNVMVLKWLPQNDILGHPSTKLFITHCGNNGQHEALYHGVPMLGFPLFAEQHMNCKRMTVGGFGLSLNILSFTEDELLQTILDLLQNPKYENSIQHMSEAFRDQPMTAQERIVFWIEHVIKHGGSHLRSSAMDLPLYQFLCLDSVGCLLMIIISTLFFFAQLLILLWKKVAKHYKVKSSRNQLKKRS

SEQ ID NO: 6330 - protein, 519 aa, Saccoglossus kowalevskii
MQKLKKAAGIKNEDGNFTLGDLRCDKDTKKQYTKNIKPFERMGKHKILLAVLYVLILGFHVVHCANILIYGMHAAGSHTQNIAYVGEALIRHGHSVDVLTVSSDKFIHLYTELGVPTLEPVIINYENEDILPHFFDNKLTYGEAFEKMVGTNAAQCDAVLQHKKHLRDTLKPYDIAVTDAVCHCCAMLLKYIGIPYVLLHTMKDVGYATDVTAPLSYYPIEETTMMLTNKMTFTDRLQNTLASLLLPSYKDINMAFLRLYHKHNITPGIYSFQQASLHLLVKDFTIDYVHPLIPNVVPIGLLTTRPANGLPSELEEFMHSSGNEGVIVVSLGTLDQLLQVFSDNIKIVKWVNQNDILGHPKTRLFLTHGGTSSYREAIYHGVPMVCIPLMFDQYDTAAKIISKGVGSYVKMKSLNNENLYEAMVEVLSNKKYSEKAKQLSAIVKDVPMNATDTAVFWIEHVLQHGVTHLTFHEKQLSVIEYYLLDVLTVIAGTICIIFWSLRWFVVVLKRSVTNTTKYK

SEQ ID NO: 6331 - protein, 454 aa, Haemonchus contortus
MAHSHVRFMGNIADALFESGHNVTILSGIMDSRVNMVGHTNSIRQIPFHSKYLDQDGFGDLDLGNAAFWTSPVIEGRSMSTEDVRKVSERFRLLCKGLIENRELLDRLRNSRFDVALHELYELTAVGVLELIGVKKAIVVSAAGMTLHMKEITGIPPNPSFVPGLFTTYSDEMTFWERLDNFKLDIELNYRHLQWEKDLWKMFNDVSPGFSDLRELLKQKTGVILINSNEFTETPRPRGNIVRYIGGLAIPEPKPLNQKLNAILDKRHANVLFSMGSFAKASTMPLHMKKDILNAFAAFSNTTFIFKYDGEEDLELFKPYPNVHVMKWVPQVDLLSDRRLSLFITHAGLNSITEATYFGKPMITIPLFGDQFINAKNVRRMGLAVLIERNNLNKDTLIAAIREVLSPNANYAHKASTVARILRGRRAAARAEVSQWVELVAEEGLTAVWLFTAD

SEQ ID NO: 6332 - protein, 502 aa, Chelonia mydas
MIPLDGSHWFSMRSVVWRLWQRGHEIVAVVPEASVQIQPSEHYTVKTYSVPYTKEYLEAEFKRLGHHIFAPQPFLEKITKTFARIGNITAHLLSSCKQLLSNKELITHLKDSAFDAVLMDPMFLCGQIVAEYLSLPSVYFSRGIPCGFEFQATQCPNPASYVPKFFTSYTDHMAFPQRVWNVLVSSAEFLSCSLLYSSHEDLIREFLQQDLTVPELLSHASIWLLRYDFVFEYPRPVMPNMVLIGGINCGQEKPLSQEFESIVNASGEHGFVVFSLGSMVSEIPMKKAKQIAEAFGTIPQTVLWRYTGEAPPNLANNTKLIKWLPQNDLLAHPKARAFITHGGSHGIYEGICNGVPMVLMPLFGDQMDNAKRIESRGAGVTLNVLEMTSKDLSDALNAVINDKSYKENIMHLSALHLDRPIHPLDLAVYWVEFVMRHKGAPHLRPAAHDLNWIQYHSLDVIAFLLAAVLITMFISLKCCQCCCRKCFCKKGRVSKSRKSKAE

SEQ ID NO: 6333 - protein, 521 aa, Heliothis virescens
MAYKFTAGLFLLTLLVSSEALRILVCFPMTSKSHSILGHGYANRLLEAGHEVVHLTSYPSRKVVQNLTEIDVSYLQDFFKEATEKDDAFKLKNMIGKKNFEESLLFFYFVFTMHKNIITDPNVIKLLSDRKEKFDAVILEWFFTEITAGIPALFECPLIWACSTEPHWQALRLIDEIPNPAYTLDLFSSNRIPLTFWQRVEELWKVVKRNVQLAIYYPFEKWAYNSIYSEIAAKRGVTLPSYDEARYNGSFMFLNAHPSIGGSMKLPQNVVNIAGYHIEKTKPLPKDLQKLMDEAKHGVIYFSMGSIVKSDGMSEEMKRSLLDMFSKYEQTVIWKFESDLTDLPPNVHLVKWAPQPSILAHPNLKLFITHGGQLSTSEAIHYGVPLVGLPVMADQHYNMRSVETKGFGIKVTLAEDMAPELDAAVRKILTDQMYTNRAKELSTLFHDRVMPPGAALAHWVEFVVRNRGAPHLRSPAIAVPLYQKLYLDLGVVLAIFIGFIWKLVKYVLSRRSHKNNKKKRS

SEQ ID NO: 6334 - protein, 528 aa, Papilio machaon
MLINRKTFFISLLVLIANSEGLRVLVFFPMMSKSHSILGQGVVSRLLEAGHEVVHITSYPRSKPEPRLKELNVSTIGERLRDEMKNSASDNPFALRNLVGKGNVGDSVLFLYFTYDLHRRVLEDKLVVDLLSDTNEHFDAVVIEWFFNDVVAGIAPLFKCPLIWFGSTEAHWQVLQIMDEIPNPSYNVDIFSKSRSPLTFWERIMELWMIFKKSMMMNLVVVPFERSLYNRVFPSIASKRGVTVPSYDEAIYNGSFLFLNSHPSIGTPFKLPQNAKYIAGYHISKEMNPLPKDLQILMDSAKHGVIYFSMGSNLQSSDMSETMKDSLLKVFGQLKQTVIWKFEQDLPNVPSNVHLVKWAPQASILSHPNLKVFITHGGQLSTTEAIHFAVPVVGIPVMADQHVNMRSVELKGSGLVVTLAEDMAPKVKIAVEEILQNPYHKKKAKEGSEIFHDRILPPGEELVHWVEYVVRTRGASHLRSPALGVPLYQKLYLDFIIVLITIVYLMVKFINVLRRKCSDYKSKKLKKN

SEQ ID NO: 6335 - protein, 693 aa, Tupaia chinensis
MLNNILLLSLQLSLLGNALGGKVLIWPMEGSHWLNVKIIIDELIKKDHNVTVLLYSGALFIAPTVNPSLTFEIYNVPFGKERIEGVIKDFVLTWLENRPSPSTIWRFYQEMAKVIEDFHMVCREICDGVLKNQKLLEKLKKDEFEVLVSDPVFPCGDIIALKLGIPFMYSLRFSPASTVEKHCGKVPFPPSYVPAILSELTDQMSFADRVRNFISYHLQDHMFETLWKSWDSYYSQALDGSHWLNIKSILEELIQRNHNVTVLASSATLFINSTPDSTVNFEEIPVSYKKSHIDSLIEHMIMLWIDHRPTPLTLWTFYKELGKLLETFFRINVQICDGILNNPKLMAKLQKASFDVLVADPVTICGDLVAVKLGIPFVYTLRFSPASTVERHCGQIPAPVAYVPAALSELTDQMTFGERVKNTISYPLQDYIFQSYWGEWDSYYSKVLGRPTTLCEIMGKAEIWLIRTYWDFEFPRPYLPNFEFVGGLHCNHSKPLPKVLWRYKGNKPAALGANTRLYDWIPQNDLLGHPKTKAFITHGGTNGIYEAIYHGVPMVGIPMFADQPDNIAHMKAKGAAVDVNMNTMTSADLLNALKTVINEPSYKENAMRLSSIHHDQPVKPLDRAVFWIEFVMRHKGAKHLRVAAHDLTWFQYHSLDVIGFLLACIISAMFLVTKCCLFFYKKFHKTEKKKKRE

SEQ ID NO: 6336 - protein, 438 aa, Anopheles sinensis
MEHSLSKVVTVIVILVVLTVINVCGYQSYNILYISSVASPSHFLWSEQLSKIIARAGHNVTLLNIFKEGRQENLHFMKLNEVDEYLALDDPIDYLELHRLSQFELQASFLDLEITVCHLALTSNQFVRLMGYPKKFKFDLIIHDHAAGPCLLLLMERFNHPPLIMASASDVLQSTEHFFGSPMFPGLIPNQFTDLSITMGYIERVYNFIITFLESMSRKYHINPRIDQIVKNYYPNMSSVSHLEMDTAVVLLNSIAILSPPEPKLWRVINVGGLHIETPRPRQGKSYLMGLSRNASFEKCVYVSFGSNIQIMSVENPFAQSLIAVARQLPSVMFLWKINQLDGVVPENVFIADWFPQNDILGSGKIDAFVTHGGLLSVQEAAWYGVPMLGIPNYGDQYQNVRRIVRLGAGKRLNLEDVSPEVFKEHLMELIHEERLVH

SEQ ID NO: 6337 - protein, 509 aa, Papilio polytes
MKFCVILIIMTIVGFVKPANILSVYPCPSISHQVVFRPLTLELLKRGHRMTVITPDPMYPKGGHKNLTEIDVHDISYSVIKKYLASHVTGSKSDLINQVKGIMDLISISFEEQMKTEEVQNVINNNNETYDLILIEAIYVQALAISHVIKAPTILISSFGMYLGIHELMGIPTHPILYHSMFRQRLYNLTLLEKAKEVYNQIVINYEVKIREEKENEVLKNIFGPDTPPISVLKNYVDLLFVNLHPIWEGNHPVPPNVVYMGGLQVQARTPKTLPQDLQQLLDSSENGVIYFSFGTNVNLQTLLPPEKIQIFENVFSQLPYNVIWRRDNDRVVIKSDNIKVYQWVPQADLLRHRNVKLFITQGGLQSTDEAIIAGVPLLGVPLLADQWYNVEKYIKHGIGQKVDFEDITEYMLKNAILEVAEGEKYKKNIVRLRSLMADQPEAPLQRAIWWIDYVLRHGGAKHLRAPIANITWTEFLQLDLIMFIAFVTVSIPMHRGKIIAYFYLIGYT

SEQ ID NO: 6338 - protein, 520 aa, Danio rerio
MAAFVLLLYLFCLATAEAGNILVVPSDGSHWTGMKPLVEELGRRGNQVVVVIPEASLSMGPSQHTTTLSYPVSYTKAQIQEIVKAGVTTLISTYVSTDLPRFQSFINRMNSLSNIIIRSAEGFLSNKDLIKKLQDYNFDVILTDPFELVGVIAAEYLSVPAIYIQTSHPCNVDTLASQCPSPPSYVPHILTHFSDRMNLWQRSVNFIRTLIQPMACRRMFTRADEIASRVLQRKTSIMDIMSHAALWFVHSDFALEFPHPLMPNMIIVGGMDNTKAEPLSQELEEFVNGSGEHGFVVFTLGSMVSQLPEAKAREFFEAFRQIPQRVLWRYTGPVPENAPKNVKLMKWLPQNDLLGHPKVRAFVTHGGSHGIYEGICNGVPMVMLPLFGDQGDNAQRLVSRGVAESLTIYDVTSEKLLVALKKVINDKSYKEKMMKLSAIHRDRPIEPLDLAVFWTEFVMRHKGAEHLRPAAHDLNWIQYHSLDVIGFLLLILLTVIFVTVKSCMFCFRKCFKKSQKKKKA

SEQ ID NO: 6339 - protein, 534 aa, Nilaparvata lugens
MSNSTSVIFCLALLSLLNCTANAANILSIIPFPMKSHDRIYKPLLFELAKKGHNITEITQFKTGSLPKQNYHQIVVETRHKDLYEILDFHEIRQKTTMWNVGFQDLKLFWDMDYAVIEDILKSNSVNSMINSKDAHFDLLICEGFFGYEALFAFGHRYNASIIAVSSLGSTIYMNPHIGNPILTASYPNFLLPYTHNMALHERFHNSLLNFVTLLATTAYQLPNQQELVDRYFTESFKQNSIEPISLNQLVKEVDLVFINRHPVLGFPRPHIPNVIDIAGLHLHKFDNNSNVDKELMKIMDDAISGFVYFSFGSNVNMAKMPEQQKSAFMKAFSRIPQTVLVRWDEVTIPDRPKNVYFRKWFPQQEILGHKNCKAFITHGGMLSIEEAVYNAVPIIGVAFFGDQPMNVLRAEQLGFGLRLEYDNVTETSLYWALNEIITSTSYTEVAEKVSSIFRDSPQSPLDRAVYWVEYVLKHNGAAHLKCHARHLNWIQYTSIDVVALAIFIIYLIFYCIRKIYSILLSSNSSKRSKHKQQ

SEQ ID NO: 6340 - protein, 547 aa, Harpegnathos saltator
MQMIIHAICIVLYLWLLPTNNIADGKRILAISISPWYSHQAVFRTLFTALNKRGHELVVVTSRPMRDPTLKNYTEIQVSAVIEVLPEFNEFIQSKSLSLFEKNMYLMRFLNNIDQRAFKEPGMIKLYRHDNNEKFDTVIIEALTGPAFYAMAQRFNVPVIEVSSVGMYNCQRYFRGYPIAASHPSNWENYVKEASSMWQKLQNFFHTWMFIYTWANKFMIMEQEITNKYFGNDAPNVMDAMKNISLTMINDNPILRYARPEQPNVISFSGFHINKIPPTLPGDLRRFLDNATEGFIYVSLGTTASWSNLSKELLGKFVEVFSKLPYKIVWKYDSDEWSSRKLDNVFISKWFPQQGVLAHPNIKLFIYQGGLQSTEEAVHYAVPLLGFPIIYDQHSRLQRLASLGIAIYLKIEELTAENLDEGIRRILSDKSYKENMIRMSVLAKDQPYDSMENAIWWIEYVMKHKSRMHYLRVNGIDKPWYQLCDIDIIALLSTTLFVIACAAALIILQILHFLFRHFCAPRTSLQKFLSVRSSAKRDALKSKPSRK

SEQ ID NO: 6341 - protein, 534 aa, Salmo salar
MFNLLPRMVSVRLLLLSVALLLCGCLGTQGGNVLVFPGEYSHWLNMRVILEELVERNHSVTVLVSTASPSINFSRPESFGFKVYDVPFEKQDWQALKEDLINWWLNESQKVSMLQLGLWIRDFLQKMNVLTVNMCKSMFNNEELLESLRQSKFDALLSDPMFPCSDLIADALDLPLIFSLRFSFGMVIERQCAQVPTPSSYVPSPELPYTDKMSFFERVHNFVTYTFCYVFMNVHLLTTMDTLYSEIKGSPTRFCELMGKADIWLIRTYWDIEYPRPFLPNFKFVGGLHCKPAKPLSEDMEEFVQSSGDDGIVVFSLGSMVKNLTTERGNAVATALGRIPQKVLWRYSGEKPETLAPNTRVYEWIPQNDLLGHLKTKAFISHGGINGLYEAIYHGVPMVGIPLFADQLANVMHMKTKGAAVMMDFNKMTSDDLTEGLNSVIKDPSYKENMMRLSSLHHDQPMKPLDTAVFWIEFVMRNKGAKHLRVESHNLTWYQYHCLDVTAALLSVVALFIIVSVKTCTFCFRKTKARQKTE

SEQ ID NO: 6342 - protein, 513 aa, Aedes aegypti
MLHSTVKCFSAIVLILLSATIQCENILFLQTTPSRSHHIWNKQIFNRLYENGHNLTILTFEQEQSIPGKSFFYVPRLYARTMAEFAAENNAESVMGPIGNIINMYSFYEKASRLLAQEPVIQHLMNYPRTFKFDLIIHDFTMGQFLLGFVERFGNPPLVSVSAFNIPSYTMHLADIPVRFTTLPNYACEYGQPMNFLERISNMFYWMLDFYHRQFKFMVAEDGRVGELFGSNSTSVKIIEKRSSIVLVNSDFTMDYHQALPPNVIPVGGLHISRPEKVPQIISDFMDMPSKGVVLLSFGTNVQSEGLGKHINEAILKTFTNLPEYNFIWKHGDPESLGTVSPNILVQKWIPQGAILSDPRTKLLIGHGGLLGLQEATWYGVPTIGIPFFADQLQNVDKLVRGGGGLRLFLDELDENTLKQAIDSILLDKNYQQNMAARSRLFRKQPQPPLERAIFWIEKVLNIKGLPYLASPTQDIPFYQLYGIDLIGATILIIVTIHILCKLALSFSFNKQI

SEQ ID NO: 6343 - protein, 413 aa, Loxodonta africana
MSMKWISLLLIQLSCYFTCGTCGKVLVWPTEYSHWINIKTILDELIQRGHEVTVLTSSASILIDPNTPSAIKFEVYPTALTKDDFEFLFMKWIRKSDDLPKDTFWTYFSTFNEKKWDLFYSEVLGRPTTLYETMGKAEIWLIRTYWDFEFPRPVLPHFDFVGGLHCKHAHPLPKEIEEFVQSSGEYGAVVFTLGSMVSNITEERAHTIASALAQIPQKVLWRFDGKKPDNLGPNTRLYKWIPQNDLLGHPKTKAFITHGGTNGIYEAIYHGIPMVGIPLFADQPDNIARMKAKGAAVSLDMNTMTSTDLLSALKTVITDPSYKENAMRLSTIPHDQPVKPLDRAVFWIEFVIRHKGAKHLRPAALSLTWYQYHSLDVIGFLLACVAIVTCLVIKCSLFGYQKFFKTEKKKKKK

SEQ ID NO: 6344 - protein, 485 aa, Loxodonta africana
MSKKWISVLLIQLSCYISCGTCGKVLVWPTEYSHWINIKIILHELIQRGHEVTVLTSSASILIDPSTPSAIKFEVYPTSLTKDDFEIFFMKFTRKWTYDLPKDTFWTYFSQIQEMEWEYSDFIENLCKEAVFNKKLMMKLQKSRFDVVLADIIAPCGELLAELLKIPFVYSVRFTYGYTVEKYSGGLLTPPSYVPIVLSELRDRMTFLERVKNMIYVLYFDFWFQALNEKKWDQFYSDVLGRPTTLYETMGKADIWLIRTYWDIEFPRPFLPHFDFVGGLHCKPASPLPKVLWRFDGKKPDNLGHNTRLYKWIPQNDLLGHPKTKAFITHGGTNGIYEAIYHGIPMVGIPLFADQPENIDRMKAKGAAVSLDMNTMTSTDLLNALKTVINDPSYKENAMRLSAIHHDQPVKPLDRAVFWIEFVMRHKGAKHLRPASLSLTWYQYHSLDVIGFLLACVAIVTFLVIKCCLFGYQKFFKTEKKKKRE

SEQ ID NO: 6345 - protein, 587 aa, Nylanderia fulva
MLKSIIIVSILWIIADAARILVVLLEPSYSHQVAYRPIMIELAQRGHELTVFTPIPMNDSSLQNYTEVKLEYSSYKVDEKMDVFAYGKLGVQSILDDFYHRNEEMTDSALSNPVMQQLISPNYTEKFDLVIVEFLFYDAFYALSYRFNAPLIGISSASLLTVHHYAFGNPILWSHLPDLLVNDLDDEMNFIHRFYNAYYSLFQIYWHKYKIIPVQEKMVRKYFGDSVPPAHKLVSNMALLLSNYHPFLSPNPYAQEIIPIRGSRPIITQKNHSLPQDLQKELDDATKGFIYFSLGSNIRGVFLSDERRNMFRKTFEKLPYKIVWKFESDFPDKPNNVIIRNWLPQHEILSHPNIRLFIYQGGLQSTEEAIENGIPMIGFPVVADQYYNIKQLVKYGSGKSFSITDVTEDELRETIYEVITNSSYKENMLKLRNLLHDRPYDELNYAVWWIEHVIRHKGAPHLRNKLRDMPWYKTQLWDIIGFTLLVLLVSVYSLYHFITRGQLWNIIIILTLVYLFPFIVYIFIIIKLFTYICSLYHFIRVSYYLRRLYYLSTKLRTYTYVIFSKNSKCVSIEKKKQECDNIKLKTL

SEQ ID NO: 6346 - protein, 511 aa, Anopheles sinensis
MKLQILLLAGLLVASCCSAADILMITMGGTKSHKIPFWELAKGLVPRGHNITFLNGFPADFTLHGLQEVTPSGLVEYIRNYTNWDLLGARMRGDLPLSVWDVFRYPWQICDATLEDKETMDLLGRKFDLLILDGAFPECALGLVYRLGVPFMYINTVGFYTGTMALAGNPTPYSTTPAFYRPLTDDMNFLERVSNTICRMFTETLIVPTMMMVQHMVRRHLGSDVPSVWELGRNVSFILQNGQASVTYPRPLLPNVAEIACIHCKPAVALPKDLEDFIAGAGESGFIYVSMGSSVKAANMPDHLRKLLTQTFARLPYRVLWKYEASPALLTDLPANVKIGRWLPQQDILGHRKLRAFVTHGGLLSMFETVYHGVPVVTMPVFCDHDANAAKASTDGYALKLDLETLTTEKLVRAIHKVIHDPKYRKEAKRRQILLKDQRSTPLETAIYWTEYVIRHNGAYHLQSPARNLNFLQYYCIDQILFFIAVVYLMRALTRLYLSPKIVQLTKEKLH

SEQ ID NO: 6347 - protein, 532 aa, Caenorhabditis nigoni
MHCLLTFVFLLSGTTHAKNILIINPIFGYSHVKFISKIADVIADHGHNVTLFQPFHTNMKNLDGLVKNKNIEIINYYPDHYEDLLKSEDQTFTALWDSRLANNPVLFSFMVPKMITGEFEKTDTQLYLDTNLHAELKSRKFDVAIAEAFGASSFFFAHLLDLPCIPVFSAVRFEIVNELFGQPSALGYTTRDGSKGAPDAGFLDRLNDVYRKYFEDLGHSGIFQYQNELFQKTMARPVPSWKNLVTQSPIFITNSNPYLDFAVPTTATIVHAGGITMDLNKVKHVGPLTEEYENILQERESTVLISFGSVYRSFQMPDNFKAGLIKMFESLPDVTFIWKYEEDDAEFKKRLPKNVHLKKWVPQTDLLADKRVKVFMTHGGLGSTMEVAYSAKPALMVPISGDQPQNALMLARHGGAVPYDKFELQDGEKLTRVMKEMVTNPKYQKRAQELFEVLSNQPIDIKMSLMKHLDFAMQFPNLRSQVPEINQVGLIAHYYLDVVMFLALSFAFAFYLLVKLLIKVYFKFIGKKTKTA

SEQ ID NO: 6348 - protein, 282 aa, Drosophila busckii
MLLNSHRGVDVPRPSMPGLINVGGAHIQPAKKLPEEMQGFLDNATHGAVYFSLGSYMKSTDMPPEKLAQLLQAFGRLKQLVLWKYENATLGQLPPNVMISKWLPQNDILAHPNVKVFITHGGMFSTQEGIHWGVPMLFIPLFGDQHRNAIRSVRGGNARLLSYSKLNADQLVEHLEALIYEPQYKRNALEMSQRFRDNAIHPLEEASYWLEYIVKHRGAAHLKSHGAFMPLYQYLMLDVLGCVLLALALVWYLLGKLYRWWIAGVAAAASASSQARQVKKQL

SEQ ID NO: 6349 - protein, 648 aa, Trichinella zimbabwensis
LDFSDQQNVLQLVNFICLTSYSCAFFSGSAQEKQRKTELCQCASQTNQQAEMFARNHAFKAYIVWILLNVFLIYFVQSLKIVIFTPDSPNAGREALNKLAQELAFRNHDVFTFRTLLLPEQPYLVVQRPHKVTEFKLQIDLPSEWIVHLRAFGNASIWTTEYGDQKYLHSLWKAQVEACSTTLNSDFLDRLRHITPDVCVIPSDDPCALGIVHALKLPFIYYDSDGLQDETILSVRPQLFLQGLPPSSYSTLPRRMSLFQTILNLFLFSSAHIRDTYIPLLHCFFASEKFKLLEWPILKLFKNNSQLSVEFAQLWSLKQIRAQALAVFVNTDWLLEDAHGLFPPKIIPVGGFHMDLPRPLFRPYNESVDKASDGVIVVSFGNRVNSSAMPLSVARIFLQTFQKLPKCRIFWRIDSTTIDGILPEQVPSNVNLTQYLPQVDFLGARKMRMLISHGGAQSIMEAVHAGVPVLGIPLMIPTYQTLRKLEARGMALILDKSNLTAQNLLTAVLALLHNKKYTLAAKQISKMFKDRPISPIDSTIHWVEFVGRYKRGSFFTYEKDILFSMNSLTYAMFFSVVLAGFSLAYYYWMFGRKHCTTLAAEDCNSKASSTDSEIDSSDGKHISDEKIPARRETRSTSKKVNSLSDVAK

SEQ ID NO: 6350 - protein, 521 aa, Trichoplusia ni
MKMDSLKWIIFSCLLCLYGTEAYKILAVFPLPSKSHGILGDNMVKHLLDAGHEVTYITPYYKETKTHPNLKQIDVSANKEVINENTMDIKLVMAGIINLEDPDLVFDMMFTIASKTLENPNVQEMMRNQKFDVVVAEYMFVDLYSSFATVFQCPLVWFSTVNPHWMIMNLIDGPLNPAYNADYTHNRVTPFTFYDRVMELWHQVVEQYKLTHKYYYHEVGAYEKSIVPMLKEKGIPVPEYNEVRYNGSLVLGNSQVAISDAIALPPNYKHIGGYHIDDEVKPLPENLKKIMESNKNGIIYFSLGSNIKSKDLPVEIKEGILDVFKGLKQTVIWKFEEVLANAPKNVHIVQWAPQQSILAHPNLVLFVTHGGLLSITETIHHGVPVVSIPVFADQFQNAKRAEIQGYGRNVRLTPNLPKDLKKAMDDVLGNPSYASVAKELSKAYHHRQTKPKDEINFWIDHVVQTRGAPHLRSVAISLPYYQRYFLDVLAIILISLLTIIYAVAKLWCSLTSKSNGKYKTN

SEQ ID NO: 6351 - protein, 531 aa, Chilo suppressalis
MKSCTVIKKARKEKMWMVFFFVCVLHCTVAYKVLVCFPFPAKSMNNLGEGIVRHLLDAGHEVTFITVYPKQVTHPKFRQIDVSGNAALIENDEHVNITYILENSAEVSSDKEFLQELTWKIAVNTFQDANMRRLVEDTQGKFDVVIADLLETELYAGLAVLYDAPLIWSYSMGAHWLAIRMIDDPTNPAYSTDYYASVSPPYSVGQRFQILWQQIMWRYAKYFKYMPKEKNSFKSIFGPLIAKRGRKLPKYEELIYNASLVLSNEHHATGKIPKTPQNWKLVGGYHIQDPPVSLPKDLQVMMDNAKHGVIYFSMGSMWKSEMIPKRLTDELLKMFGGLKETILWKYEADLPHRPKNVHTIKWAPQQSILAHPNCKIFISHGGLLSSTEAIHFGVPIIGIPISYDQYINIEKSVTKGYALKVSLSYNLAKDLKPAIESLIQDTKYKENVKFLSSIYHDRPIPPGKELVHWIEHVVRSRGALHLRSIALDVPFYQKAYLDIIAITIITFTLITCLIKQLFRRKPTKQIKKKVN

SEQ ID NO: 6352 - protein, 530 aa, Equus caballus
MASEKWVLATLLLQLCFTGHGFCGKVLVWPCDMSHWLNLKVILEELTERGHEVTVLVSPYNFIIDYSKPSALNFEVIPVPQEGETAANSLNDFLDLATNVIPTLSLWQSARKLQEFFLQITGHLKLLCESVVYNQTFMKKLQETNYNVVVIDPVMPCGELIAELLEVPFVYTLRFSLGGIIERYCGKIPAPPSYVPVAMGKLADKMTFLQRVKNLLFSILFDFFLHQYDFQLWDQFYSEVLGRPTTLCEIMGKAEIWLIRTYWDFEFPRPYLPNFEFVGGLHCKPAKPLPKEMEEFVQSSGEDGVVVFSLGSMVKNLTEEKANLIASALAQIPQKVLWRYAGKKPATLGANTRLYDWMPQNDLLGHPKAKAFITHGGTNGIYEAIYHGVPMVGVPMFADQPDNIAHMKAKGAAVEVDINTMTSEDLLNALRTVTNDPSYKENAMRLSRIHHDQPMKPLDRAVFWIEFVMRHKGAKHLRPAAHDLTWFQYHSLDVIGFLLVCAAAAIFLVAKCLLFSCRKLGKTGKKKKKE

SEQ ID NO: 6353 - protein, 419 aa, Ancylostoma ceylanicum
MTKNLSSILEWQCETLINDEDLLRKLRDENFDVGISEAYYICGLGLFEALNIKATIAAVSNPHLDAVAYAIGEPAFPSYVPGSLSTTGDRMTFIEKLQNVVALVIGRAVVDYLYNKEIAVFRRKYGSFKEYTELIAQASFVFTNGNPYLDFPHPTLHKTVTIGGFAVSQAASEKHTLSKEWDAILNARRRTVLVSFGSVTKSIDMPENFKRTLLEVFATMPEVTFIWKYEDPSSKIAESLPNVHLSAWVPQIPLLEDERLSAFVTHGGMGSSNELAMMGKPAIVIPIFGDQMRNSRMLARHGGALVLEKSDLSNFEKLKSALEEVLNDPSYARNAERLSQMLRDQPVSSQELLLKHAEFAARFGKLPNLDPYGRHLSIIEYYLLDIVAAVVTTLLLILFIIVVLVRKCFCSRHPKLKPE

SEQ ID NO: 6354 - protein, 486 aa, Haplochromis burtoni
MELRLSACVLMVLCATSCANGGNILVWYADASHWINMKPVLETLVDRGHKVTVLIPSSSVYMNTNEPTRFHYEPFNVSFSLEAYKKLLEDFLQFSIYEMDYMNYWKIYIRYINISKTNLQYNIRYLDGVVKSEAIMKKLKEGNYDLLLADPWKAGSDLVADILGIPLIFSLRFSLANNWERHCGQMPAPPSFVPGAMSKLTDKMDFSERVWNFLFYALQDIMIDHTFWNVLDRYYSDVKGTPTSACELMSKADIWLIRTYWDFEFPRPFPPNFKYVGGIHCRPAKPLPGVVWRYIGEKPETLSANTRIYDWIPQNDLLGHPKARAFITHGGTNGIYEAIYHGVPMVGIPMFLDQPDNMIHMKEKGAAVILNLNYVTAEDLRDAVNTVIDDKSYKENAMRLASIHHDRPMSALEEAVFWIEFTLKNKGAKHLRVQAHELTWYQYHSLDVLDFILTIALLLIFIFIKTCSFCLHRCCVRRGKTKRKAE

SEQ ID NO: 6355 - protein, 511 aa, Tribolium castaneum
MKLFLAIFQVIFVCNAKGAKILGVFPTPVRSHHILGHSLLSALAEKGHEVTLISPYEEKNGPGNKNYKHISLTGFDRKPIYINLKDSAFDIFLKLPLIKMIKFELAEDTLNHTNVQLLMDSDETFDVVIVEEFTEEALKALAVHFKAHLVVLSTVCSNPSVETSVGNPQPFSYVPYHLSSYSKSMTFHERVVNTLLHIYDQLLNHFYIYPKHEQVIKKYLPNAPPLKSIIYNSSIVLVNSHLSLNQPLPRVPNMIDIGGFHIKAPQKLPQDLEEFLDSAKDGAIYFSLGTFLQSSKLPAEKRNIFLKVFSKLKEKVLWKWEDDTLPGRPPNVKVAKWLPQQDILAHPNVKLFITHAGILSTTEAIYSGKPLLAIPVFGDQKTNAQNIHSNGFGLFLPYNNISEDDLTVKLNELLKNPKYARSARKRSEIFHDRLVKPMDTAIYWVEYVVRHGGAPHLRVAAVEFPWFKYFLVDVFVFIFVFIVLLFYMFYTSFKIFISYRTIRVAITFTFI

SEQ ID NO: 6356 - protein, 525 aa, Aethina tumida
MCRLVILAALVAVTIPVAHSARIIGIFMTPSYSHQVVFQPIWKELSLQGHEVTVITPNPLNDPTLTNLTEIDIGEISYESWKKSSLSTLGMSAHSTMEELKAITKAYIDVSHVQLSHPVFQKLIHEKSKEKYDLFLVEYLWPTMYPFKDIFDCPMVGIVSLPLLSSAYVNLGIPRHPVLDPDYVLPFSTDLTFKERITSTLFTLLNTIGGPLTLKPKINAVTKQYFGDDVRDYREIAKEVSLVIANSNLATQNVKLGVPQLVEISGIHIKPKKPLPKDLQKILDDATEGVIYFSLGSNVKSSQLPKEKIEEFMNAFVGLPYKVLWKFETDDIPNLPKNVVVRKWLPQQDVLGHPNVKLFITQGGLQSIDEALANKVPVLTIPFFGDQRFNSDRMFRNGGGLMINFHSFTSEEMREKILTLLTDKRYQEKINQLSEIAFDHPMSPVDKAVWHINYVLRHKGADHLRHKAVNMPWYQFQMLDVYAVLVISLAIILTIISKITFKVFKGVKSVVRSLGIMTPTKKKVL

SEQ ID NO: 6357 - protein, 445 aa, Tribolium castaneum
MEGAYEKVRDQFDLMAMKDMSDWETIKNLWSFAEVTCLLDQKTKGLRQITNYPNDFKFDLIIVDVNYGHCLYPLIEKFGNPPVIGVNPFINQPNLFRNIWQSYIPFMTHSFGAQINLWQKIKSFFFMLLLEVSRLTHYIPRQQELAYDYFGPMKSSILEIEKNMSLMLINYNPVFNYVEALPPNMIPVGGLHIQPKRLPDDLKKILDNAKFGAILFSLGSNVRSKELGPERIQAIIKTFSKLKQTVIWKFENDKLEGIPANVHIRKWVPQNDILGHPNTILFISHGGLLSSHEIMYNGVPVIGIPFFLDQLQNVDTFIAKGVGEKLSFFEITEHNLFQVIQKVLNNNTYMENAKKWSALYKHQMNKPLDVAIFWIEYILKFKTAEHLNLATRNMNFIESANLDLVFVSLLSLVSILFIVYCAIYLIYKCIRRKSISKKLDIKKKL

SEQ ID NO: 6358 - protein, 522 aa, Bactrocera oleae
MGPGTYIALTLTVVGFAPIFTESAKILAIFPFTGPSQYMCVQPYLKTLAARGHEVTSISVFPQKTPLKNFRDITLSHEYKDHDEFIIAAIEDMCETKLNQLRALLEYSIMGSLPVLQNEEFQHLLRSDEHFDLIIIEAFSLNSLYALGRHFNAPMIGISTISADIVNDQLVDNVSPIAYVPTPIGMNLDRMNFWQRLDNLYENTMELLYTHLVIIPEQQRDYEKYFPNATLRLTDVRRDFSLLLLNQHYSFSWPRPLVPNAIEVAGMHIDHKPNKIPTDMEDFINASSRGAIYFSLGSNIKCVNLPKHKLQELMNAFASLPVNVLWKFEKTDLAGKPKNVFINKWFPQSDILAHPKVKLFVTHGGMHSLIEAVHHAKPVVGTPVFYDQHLNVEKAVSKGFGVAINFRNFTSTELRNAILEVLNNPTYTEKAREISASFHDRPMKPLDAAIFWTEYVLRHKGAPQMRVAARHLNFLQRHSVDTMAVLFGIPLLLAIFITHRIYKFLLVIFLSKDHVNIKRKNE

SEQ ID NO: 6359 - protein, 532 aa, Daphnia pulex
MTYVATISLTVCLLVGLLVIPELSAYNLLFLSPITSPSHSNFFKPVVKAMVDRGHFVTYYSGLNHNNQKMATNNQTINFRPLSSSPALHKISTDHQVDFNIRDKPLLFLSQLPQKMENYCTAIYNDPVFQQLINTTEKFDIIVIEGYLNDCVLPLVAMFNVPFIYMSGVAPMPWLLNAFGSPLATDHVPNVVHSYTDEMNFWQRTVNSVSSISGVYLRHWFVMPVVDRMAQKMLGKNLPAIEEIERHYMSLLIVNTHSSINYQLPLSPAIIQAGGLHCVPPKPLPKDLESFVDGSGDAGFIIVSFGSVLKGVDMPNNFRRIFLSAFARLPQRVLWKWEDQPGENDSIPSNVKLLPWMPQQDLLGHPKIRLFITHGGLFSNQEAVYHGVPFIVMPIFADQPINAQKAHDDGYAIRVDMDSMSEEILFDAIQRILTDPKYAEKMNQVSALARDQMESPLDRAVYWIEYVIRHQGAPHLRIASRKLSLFQRYLYDVLLFVLFSALSFLFLVFYLCRHIICSNGRVKINGQKKKKN

SEQ ID NO: 6360 - protein, 1040 aa, Drosophila willistoni
MLLPPSNGANILGLYSGHSPSHLILHMSVAKTLAEAGHNVTVVSMLEPKVKCKDIHLIVIPVSDEQELLIENKLKQIAMKKNTLYDTFYHLMNDMKVMIDTQYELLSHPKFQQIYETKFDLMILGWFVNDFQLGVAAKLKVPVIVDWVMGPTPGTDALVGNPAEISYVPNMMNPVSKGKIMSFGKRLNNLATHWFYKYLNGLFDKCFDEYYYEHFGMEKNLPTIKQLKQNVSLAFVNCHLISEGPIKPLVPATVQIGGIQIKDTPDPLPKDIEEFLSSSKHGAILLSLGSNIKSSSVKPELTKIIFKVLSSLKQNVIWKWEDLDNVPGNSTNVLYKKWLPQDDILAHPKLKLFITHAGKGSITEAQYHAVPMVALPVFADQPRNAAIMQNSGYGFSLDLLTLTEDTFEAALREVLENKKYAKAIGEFSTLYRDRPLTARQEVVYWTEYILRHRGAPHLQSPLVHMDTIAAYNLDIYVLLIVILAISLLITHFLLKYFVHKVFSKAVPSEGANILGLYSGYTPFHLILHMSVAKTLAEAGHNVTVVSMLEPKVRCKDIHLIVIPVSEEHQRIIENKLKEYATQENTIYNAFDNLLNGLKVMVDSQSELLSHPKFQQIYETKFDLMILGWFFNEFQLGVAAKLKVPVIVDSVMGPTASTFQLVGNPFEVSYVGNPLNVIQKDEDTSFGKRLKNYATHWVYAYLMRQFDKLYNGFYNDHFGMERDFPTFDQMKRNISLVFTSCHFISEERIRPLVPATIQIGGIQIKDTPHPLPKDIEEFLSSSKHGAILFSMGSSIKSSSLKPKVVQKIFNVLSKLKQNVIWKWEDLDKLPGNSPNIIYRKWLPQADIFAHTKTKLFITHAGKGGVTEAQYHGVPMVALPVFVDQPGNAAIMQSSGYGLSLDLLTLTKETFEAALREVLENKKYAKAIGEFSTLYRDRPRTARQEVVYWTEYILRHRGAPHLQSPLAHMAAIAAYNLDVYALLLVILAISLLITRFVVKFVLLEIYKRFALSWLKYSQKKKIMSKKKTKKKNMFITISSKIF

SEQ ID NO: 6361 - protein, 535 aa, Caenorhabditis brenneri
MNVIYYCLLFSLYISSSLSYKVLVFNPAYGASHSNFLGKISDILIDAGNEVTMLIPTYMKSKKGQVGSKKVKNIIEIGQDERAEKMFEENKVEEIVKTKVWRMDPEMMSVFGIVGKMNVALGYQCEYIFKQTEILEKLRQENFDLAITESLFICPFAVFDHLGIKTIINAESNLFKDAVKYAHGEPAAISYYPGLFSPNNDKMSFLTRVKNLITMLFTKYLFGSRYEQELKIIEPYYNNTKSWTELLSSVAFYFINSNKYLDYASPTLPKTVFIGGMQVNTNKKKTKLSEEWDNLLSIRDQNVLISFGSNAHSCDMPDEFKTAFLEVFESMPETTFIWKYEDANATLAHHLSNVKLTTWMPQNDILADDRLTLFVTHGGLGSTMELAYQGKPALIIPLLADQPRNAHMLTRHGGSLQFDKRKLGSSEHLREAIQTVLNDQKYTDNARRLARILNEQPFSPKEAVLNHCDFAVEHGPLETLSSEGKYLNTFQFYSFDIALAVVAVFLIVFVFISFVFVRLLRLLSRVVLYQKKKME

SEQ ID NO: 6362 - protein, 524 aa, Musca domestica
MSTTSPRYALLFITFVALAFTSCHASRILCVFPSPSLSHLLIHASIAETLALDGHNVTVIATVAPSKIKIRQVNYIHIEGPMFNDAFAKEMLNKPAHVYQKFGSTVNHVLNMANATMNNPKMLQFLQIHKAGDYDTLILGYFMNDFMLGLGAHFQCPIILSFMVQPIFSINTMIGNPAESSYVPSLFMGFKQPMDFWQRVKNFVANAFEYHFFAALMGQREQEMYGYNFPADRYPPLEEVYKNVSLVLTNHHFSQGPIRPNVPALIEIGGIQIKEKPDPLPKEIADIMDSAENGVIYFSLGTNVQGSNLSPEKAKMIFNVLSQLPYTVLMKWGDKAFPGQAKNIIYKSWLPQDDILAHPKVKLFITHGGQGSVVESQYHGVPMVGIPFFGDQHSNMANVRSSGFGLSLKYATLTEEELRSTVLEVLNNPKYRENVQTFSKLYRDRPMTPRQLVRYWVDYVIRHNGAKHMQSPAVHMTWWQIQSLDVIGFLLVVVLGVVGVFVGLCKFLCCKGKKKSVNLKKKNK

SEQ ID NO: 6363 - protein, 529 aa, Athalia rosae
MSMMFATDAIVYSFAICFLSLLQFGNGYRILSICSRASFSHQIVFRGLTLALNKRGHEIVAITTDPMNDPKLKNYTEIDVSHLYKSNLKVNIAEFTDWSALFPDISEGVNLQTVEIFEHPEFKKLYAANANEKFDLILLELLYWPAFYPLAKRFDAPIIGMTPMAGLTINIKYSLGDPMLPSHPSNWEIYTADQPQSFWCRLITFFSFWKFLYYYKTLHTKSQEAIAKKYLGPDIPDLSELETNVSLVFVNRRTSATFAEPNVPKIINIGSYHLDTRTDKLPQRLGEFLNDSENGFIYMSLGTNMKSTMLSSKVREALLSVFSRLPFKVLWKFEDESLPGLPPNVFIMKWVPQQAVLAHPNLKAFIYQGGVQSTEEAISNAVPLIGIPTWADQKMQIDKLVSLGVARKLEVAKLDEKSLVDAITAVTLDSSYKEKMVNLRKRWIDNSQDLLENGIWWTEHIIRHRGGSHLHCIIADTPWYQRQDMDLIAFISSGCTLVSIFLLFLLHRLLSCVSAIRRYNSAETKRKTS

SEQ ID NO: 6364 - protein, 519 aa, Tribolium castaneum
MKLTLSLLVFVLISTVNSAKILGVFPVPGRSHYILASSLMRALAEKGHDVTVISCFGEKIPPKNGTYRDIVATGVFDEMQKEMNSKNMSMFEIGGASPLLNAFFMAVLLPEMTEKALKHENVQKFINSDEKFDVVIVEQFANDAQKALSTHFGAPLITFSTLGANYWVNPLVGNPSPPSYIPDLMSDYSVPMTFVERLENSLVYVMNELLYNFYIFPKQNELMKKYIPRAPAHINDVLYNSSIILMNAHPSINQPVPYVPNMVDIGGFHVKPPKKLPQDLQEFLDGAKDGVIYFSMGSNLKSADLPNDKRDAILKTFAKLKQKILWKWEDENLPGKPPNVKTAKWLPQQDILAHPNVKLFITHGGLLSTTETIYHGVPILAVPIFGDQKLNARSAVKGGYGVHLPYEELNEETLTNSINEVLSNKKYKENVQKRSKLFHDRLVSPIDTLTYWVEYVVRHRGAPHLRVAALDLPWYKYLLLDVIAVIALVLLTLLLIFCYVVKLVCKKLCSKKSKKTKKE

SEQ ID NO: 6365 - protein, 427 aa, Ceratina calcarata
MKLVSILFVCAVFATSDGYRILGMFPYNGKSHFIMFEHLMKALARKGHQVDVISTFPLKKPYPNYNDLIVLPTARDFMNNMTYDEMHNMIRASSAFAVATMTGNDICENLKYPKFQELIRNPPKDPPYDVVIMEVFGAHCYAILGDILKVPLIGASSSKLYPWHHDYIGNPPNYAYQPNNLISYPNNMNFWQRTYNFLSAVQSQYQFNSASSLQTDMLRKYVSPDAPDIRELEKKFTMILVNSHISTNGIRDMTPAYIEVGGLHVQEEGVEITPSLEKWMNESTQGFVYFTFGSMVKIESMPRHYLEIFYKSLANIAPIRVLLKIAKPDELPPGLSSNVHVLTWLPQIKVLKHPNLKAFITHGGLMGTQEAIHYGVPLLGIPLFADQFTNIETYVRLNIAIQLDLDTLTVEKMDEALNAIVHDPKYR

SEQ ID NO: 6366 - protein, 524 aa, Aedes aegypti
MDRIVKCVVLVCLVGVPLCKGINILCLMGVPSPSHHIWNRVLMEALASRGYNLTIVSPDVEKVQKPNLTYIHLEEVYHTIHDGDTAIDFYEMAQQNLVTSMFTFYEYAYSLCEGVMRSKGLDTILNYPDNFKFDLVLYDFTCGPCLMGLYDKFGQPPLIGVTAFNIPPYTVDFIGGHKYPAYIPYYTLTYDTDMTFFQRLENLFIYTVDYFYRNYYYIPKTDEMLRRMPVFRDGPYLGDLDRKMKLMLVNSHHSVDFPEPIPQNMIQVGGLQIIPPKPLSAEIEEFIKNSKKGAILFSLGTNVLSSDLGEERIEMFLEAIEKFPDYNFLWKFEADQTKYKIPKNLMMRKFLPQNDILANPRTKLFITHAGLLSTHEATWHGVPMVGIPFIADQYRNLEKSLRAGVAERLIVWTLTTDKIVQTVRKVLENPSYRTKMREKSALFRDQPEKPLERALWWIDWCLRHPEAETIQSPTLRLGLWKSELYDVKIFVILAAVAVFLGVKRVFSVLTGTNKSHIKHKKKVN

SEQ ID NO: 6367 - protein, 514 aa, Papilio machaon
MKFFLIILVITFVDFVKSANILAVYPCPSISHQVVFRPLTLELLKREHRLTVITPDPIYPKGGGHENLTEVDVHNVSYSVIKKYLASHVTGSKSDLINQVKGIMDLISFSFEEQMKLKEVQNVINNNQEAFDLILIEAIYVQALAISHIIKAPTILISSFGMYLGIHELMGIPTHPILYHSMFRQRLYNLTLLEKAREVYNQIVINYEYKIREEKENEVLKSLFGPDTPPISVLKNYVDLLLVNLHPVWEGNHPVSPNVVYMGGLQVQTRTPKSLPQDLQQFLDSSNNGVIYFSFGTNVNLTFLPLEKIHIFEKVFSQLPYNVIWRRDNDSIVVKSDNIKVLEWVPQADLLRHKNVKLFITQGSLQSTDEAITAGVPLLGIPLLADQWYNVEKYVYHGIGQKLDFEDITEDILKNAILEVAEDNRYKNNIARLRSLMADQPQAPLERAMWWIDYVLRHGGAKHLRAPTANISWTEFIHLDLIIFIACYCFIILISTVLVVKLLVYFILCTYNYK

SEQ ID NO: 6368 - protein, 516 aa, Eumeta japonica
MLKECAVLCIISSMIWTIEAFKVLLMFPLPAPSHGILGNGYVEHLLNAGHEVTYITPFPREDPPPNLHQVVLNYPDEVLPSKILNIENILSDKQNINLNRMMHFFFNVHEHALRHENVQKLMTAQNENFDVAVIEWLYGEVSAGFAALFQCPLIWSSSVDPHWLILQLVDEAANPSYVPDILSNNLPPFTFSQRVQELWTQISTSMTMKSFDKKYTALYNEVFVPAGNRKGILMPPYEEVKYNASLVISNSHVSLGEPVRLPQNFIPVGGYHIDTKPKPLPKDLQKLMDDARNGVIYFSMGSNLKSKDLPDKMKRDFLETFGQLNQTVIWKFEDALSGLPKNVHILKWAPQQSILAHPNCILFITHGGLLSTTETVHFGVPIVGIPVFADQFINVDKSVSRGFAKRVDLSHETPKRLKVAIHEVIGDPSYREMVKYLSMVYHDRPVPPGRLLVHCGARGQNPRRAASELARASTPWYHKTYLDLAALIAAVTFGLYITAKCLFNSIFLTYDNKKNQ

SEQ ID NO: 6369 - protein, 429 aa, Pogonomyrmex barbatus
MKPIVKMTFWMTCFLYIVTTIDTARILAIIPIPSYSHQIPYRTIWTTLSRRGHEVVLITSDPIDDPGLINLTEINFHSNYKILRKIDFVEMMSHSWMSTQYTQLWDLCLEISENIYKHPEIRKMYELDSNQKFDVVIAETTLTPSLYALAYRFNAPLIGVSTLKLYNHNHFLLGAPVLSSHISTWEMEDDTGFNLSLWQRIKNFIRQWYHIYCVLNHYYPKHQAIAEKYLGNDIPDISDMERNISIVLENQQEVLSFSRPKAPNVISFGNLHISKKLMALPKDLMEFITNAPNGFIYMSLGTNVMMTSFPNNIQQIFRDVFANMPCKVLWKYEGELINKPDNVYIAKWFPQQSVLAHSNIKLFIYQGGLQSTEEAIYYKVPVLGLPVLADQYAQLNRLEYLGIGKHLNIMNISKGYLNETIMDMLNNKR

SEQ ID NO: 6370 - protein, 522 aa, Spodoptera exigua
MALPICLFLGLLLSSSCEAYKALVVFGMPSNSHFNLGNGVVRNLLKDGHEVTYVTPIEYKNPPPNLRQIDVSSNFNALPSDKINIKILMEAPTPSGHRKFVKMLMINLVRRTLEHENIQRLLNDTNEHFDVVIVEHMFSDLSAGYATIFNCPLIWVSPVEVNSLSMGLVDVLPNPAYTSDALSLYMPPFNFLERLEELWIRITDEYNDYMVYEPLEAAEYERLIVPQIQKRGRQAPPYSKVRYNASLVLGNSHVSIGLPLGLPQNYKSIGGYHIEEEVKPLPEDLEKIMMSAKNGVIYFSMGSNLKSKDWPEEIKRDLLKLFGELKQTVLWKFEEELPNVPKNVHILKWAPQPSILAHPKCVLFITHGGLLSTTETIHYGVPTIAIPVFGDQFINVKKAVTRGFALQVKLSYSLATDLKVAIQEMLHNPKYRQRVKELSYIYHDRPVKPGAELRHWVQHVVNTRGAPHLRSPALLVPLYQRLYLDLIALLLVILRVLYVLLRNLYRRIKSKKIVSNKKDKKN

SEQ ID NO: 6371 - protein, 526 aa, Aedes aegypti
MAARSTVVSAAILLLLVTFSEGAKILGVLPTGGKSHFYIGAGYLKTLAEAGHDVTVISPFPLKNAPKNYRDIELTGFLEEFEKEYDQNLFNFKSSGGFIGPLFMIYMMYETFGGMMCKAVLQHPNVINLLNSKEKFDVVLVETFITESLYGFAQHFDAPLITFSTFGSSMWSNDLVGTPAPPSHVAHFMLSYTDKMSFWQRFHNTAMTIVDRLYYELRYLPNQKRMYDAAFPNAKMSFEQQMKNVSLVFLNQHFSLSSPRPYPPNMIEAGGIQIEEGKPLPKDLQKYLDEAKEGVVYFCMGSNIKSIHFPEEKRNAFLKVFSKLKQRVLWKFEDENMANQPSNLMIKAWMPQNDILAHPNVKLFITHGGLLGTTEALFHGKPMIGIPIFGDQPMNVQKAVRSGYAVLLDYDDINEENVDKALSAVLNDPSYARNAKLVSERFRDKPMTPKETAVFWTEYVIRHRGAPHLRSSAMDLSLIQYHLLDVYAVMLVMALAVVALNICIAMKILRKVFGRKPSVDKKKKRS

SEQ ID NO: 6372 - protein, 1273 aa, Operophtera brumata
MLRLIIAHCAVLYITEAAKILAVIPTPSISHQVPFRLFTQELARRGHEVVIITADPAFQKGETPPNLREIDVHDISYDLWRTQFLPTSSTGNKEDSKLQLAAATKLNLEILVEQLKTNEVQSIIKNETFDLLLLEAWVRPALFFTHIYKDVPVIAISTWGGYFDNYEQIGAASHPLLYPKSSAQILNNRTMWDKVTELYNYWYLDSIFQNREKVENRELRKFAPDMPDLSELHKNIDMMFFNMHPLWDGNRPVPPSVIFMNGINKKPQKELPKPSTLPAEKIQTLVNVFSKLPYDVLWRWDKDELPGKTKNIKTFKWLPQSDLLRHLSIKVFVTQCGLQSTDEAITAGVPLVGIPMLGDQWYNAEKYVHLKIGKTVDMETLNEGNLKAAINGVLNDDSGKHLRAPSANMTWREYLELDLLLVLLFIALVLVLSVITALYYAVRNMPVISFTKCLSFIMLRLVVTSCALLYIAEAAKILAVFPTPSISHQVPFRPITQELARRGHEVVIITADPAFEKEKSPPNLREVDVHDISYDLWKAKFLPTTSTGYKEDLKLQLPTLTKLIFEIFVEQLKSNEVQGIIKNETFDLLLLEAWVRPTLFFTHIYKDVPAVTVSTFGGWNDNFERIGAASHPLLYPKSSAQKLNNRTMWDKITELYNYWDSDSNFQNLEAVENSELRKFAPDMPDLSDLHKNIDMMFFNAHPLWDGNRPVPPSVIYMNGIHKKPHKELPKDLETYLNSTTNGVVYVSFGTNVKPSTLPAEKIQTLVNVFSQLPYDVLWSIKVFVTQCGLQSTDEAITAGVPLVGIPMLGDQWYNAEKYVQLKIGKTVDMETLNEGNLKTAITGVLNDDSGKHLRAPSANMTWREYLELDLLLVLLSIALVLVAFVISALYYAVNNMPVISMWCLILASCALLYISEAAKILAVFPTPSISHQAPFRPITQELARRGHEVVIITADPAFEKGKTPPNLREVDVHDISYELWRAKFLPTSSTGYKEDLELQFTAAATLCIEILVEQLKTNEVQSIIKNETFDLLLLEAWVRPTLFFTHIYKDVPVIAMSTWGGWFDNYERIGAASHPLLYPKSSAQILNNRTMWDKVTELYNHWNLISIFQNREGIENRELRKFAPDMPDLSELNKNIDMMFFNMHPLWDGNRPVPPSPSTLPAEKIQTLVNVFSQLPYDVLWRWDKDELPGKTKNIKIFKWLPQSDLLRHPSIKVFVTQCGLQSTDEAIIAGVPLVGIPMLGDQWYNAEKYVHLKIGKTLDMQTLTEQYNFIVL

SEQ ID NO: 6373 - protein, 491 aa, Bactrocera dorsalis
MPQVADALAQAGHNVTVYGASKNVIPKAKYKYIELEPKTQDNLIASALVGSSILYKFANVVETIASASNDSLTHPRVQSLLREHGPGDFDLGHSRLLYERLPLSLWRRIFKCPLILSFMIQPVLAVNSLVGNPTELAYTPTVLGNQRQPMNFVSRVKNFISIGMELLMAEFGIHFQTKIYNYNFPASSGYPSFEEARRNVALIFANHWFAQGPVRPHVPSLIEVGGIQVKEKPDPLPTDIAELLDGSPEGVIYFSFGSLIRGNTLKPDTVHIIFNVLSKLPYKVLWKWGADYPGNSSNILFKSWLPQTDVLAHPNIKLFITHGGKGSVVEAEYNGVPMVGIPLFSDQPANMEEVRQAGFGTYVPYADLTEESLREAIEEVINNPKYRKAVREFSEVYRDRPMTPRQSVVWWVDYVLRHKGAKHMQSPAVYLTHWQLMSLDVLGVLLAIAAAVVGLLIILWRFCITKLVARLIKTNGVNGTKRNAKKSAKVE

SEQ ID NO: 6374 - protein, 1040 aa, Trichoplusia ni
MRLLVTCLLLLGIALSCEAYKFLVVIPMPARSHGNLGQGVVRHLLKAGHEVTYISAIPYKNPSPKYRNIDVSASVQLPEELINIKSIMNKEAPEMDPTMLVFMMSMIIKMYVESKEVQALFTNPKEQFDAVITEWMFSDIPSGLAAVFDCPMIYLSTVEPHWRILKIVDLATNPAYDVDATSTYSPPLNFYQRVNELWIRIKSTFLETFVTDAVEKQTYDDLFVPIIQKRGRKAPSFEEVRNNVSLVLGNSHLSMGFPSSQPQIYKSIGGYHIEDTVDPLPKDLQSLLDNAKHGLIYFSMGSNLKSKDLPREVKQNLLKMLGTLKQTVLWKFEEPLPNLPPNVHIVQWAPQRSILAHKNCVLFVSHGGLLSTTEAIHFGVPVVGIPVFADQFTNVLRSEAKGFAKKVDLSYTMDGPLKAAIEEVISNPRYAEKAKELSFIYHDRPVKPGDELVHWVQHVVRTRGAPHLRALAYHVPLYQRLYLDLVALLILAYIIMKILVKRAYSAVFSKNKSDKKKTKMASAINLLLCFFILSTCDALKILVIYPLPSKSHSILGEGVVRPLLKAGHEVTYITAFKYKDPPANLREIDVSETFNFLPSAQINLKKILASEVPLTMPGLMIPLMRSLQAKSLEYDHVQKFLGDPNEHFDVVVAEWMTVYFLNGLGPLFNAPFVWATSMDVHSHAISMIDAAPNPAYTTDLSTTRFFPFSFLDRVGELMHRITDFAEDYMYHEPAEEELYNRLIAPLIAKKGRKPPPFSDVRFNASLVLGNSHISLGSIYTLPQNYIPIGGYHIDENIEPLSKELKTLMESNKNGVIYFSMGSNLKSKDWPEDIKTGLLKMFGNLKQTVIWKFEEDLPNVPKNVHILKWVPQTSILSHPNCVAFITHGGLLSTTETVFSGVPIIGVPVFGDQLVNIQMAANRGLGLGVKLSYKVVEDLKVAIEEMVSNPRYKEKAKQQSLIYHDRPMKPADELVYWVEHVVRTRGAPHLRSPALLVPLYQRLYLDLAALVVLSLIALLCLLRYLSNAVSSKCKVNSDKKRN

SEQ ID NO: 6375 - protein, 382 aa, Cephus cinctus
MIIGHQLKIPIIGVSSSELYPWGHEMIANPRNLAFVPFELLPMTPPLSYWERMKNFLLYWWSYHEFNYYTRVQDDMIRKNFGEDAPGVRELERSVSMILANSHSSVNGAKPVTAGLIEVGGLHVRDDGPELPENLQKWLDESAHGFIYFTFGSMVRIETLPKETLAILYRSFGKIAPVRVLMKIAKPQELPDGLPGNVITQAWIQQLKVLKHKNIRAFITHGGLMGTQEAIHCGVPMIGVPLFADQFVNIHNYVEKKIALFLDYKAITEEKLDAAIDAILNDPVYLKSVRAISEKFRDRPLTPAETAVYWVEYIIKHGSQALRSPALDLTWWQEALLDVYVALVLALLVTVYAIIMIVGALVRLIFGKKRGSKRASRSKKNK

SEQ ID NO: 6376 - protein, 528 aa, Loxodonta africana
MSMKWISLLLIQLSCYFTCGTCGKVLVWPTEYSHWINIKTILDELIQRGHEVTVLTSSASILIDPNTPSAIKFEVYPTALTKDDFEFLFMKWIRKSDDLPKDTFWTYFSVVQEIAGEYSDCIQRLCKDVVFNKKLMMKLQQSRFDVILADAIGPCGELLAELLKIPFVYSVRFTYGYTFEKYSGGLLTPPSYVPIVLSGLQDRMTFLERVKNMIYVVYFDFWFQTFNEKKWDLFYSEVLGRPTTLYETMGKAEIWLIRTYWDFEFPRPVLPHFDFVGGLHCKHAHPLPKEIEEFVQSSGEYGAVVFTLGSMVSNITEERAHTIASALAQIPQKVLWRFDGKKPDNLGPNTRLYKWIPQNDLLGHPKTKAFITHGGTNGIYEAIYHGIPMVGIPLFADQPDNIARMKAKGAAVSLDMNTMTSTDLLSALKTVITDPSYKENAMRLSTIPHDQPVKPLDRAVFWIEFVIRHKGAKHLRPAALSLTWYQYHSLDVIGFLLACVAIVTCLVIKCSLFGYQKFFKTEKKKKKK

SEQ ID NO: 6377 - protein, 326 aa, Branchiostoma floridae
MNFVQRVQNVVCYSLLSILGPWLATNTYDGLVRKYISEDETIQSVVSNTDLWLYQTDHVLDFPAPSMPNMVQIGGFHIGAVSSLPKELEAFVQSAENDGVIVVSLGSIIKTMWPKKTQIFAAAFARLRQKVVWRYTGEKPAGLGNNTKLMAWIPQNDLLGHPGTRAFVTHAGARGMYEALHHGVPMVCLPLFFDQPGNSARVVARGLGVKLDFSKVTTDQLYEAITHVLTNNSYRETAARMSRLHRDQPQSPMERAVWWIEHVIKHGRLPHLRARAVDLPWYQYYLLDVTVFLVSVCTAVLGTVWYSCSLIRKKITCRTGDKVKSQ

SEQ ID NO: 6378 - protein, 531 aa, Neodiprion lecontei
MTSGCLISVTLILVAGVLQQGYASRILGIFPFPSISHQIVFRGLTVALRERGHELVVITTDPINDPTLKNYTEINVNFLYEDFNEDVDWIATRKKRTWLGLCHDIFPRLIQMTERVLNHPEVKRLYSPESGEKFDLLIIEMLVWPAFLPLAKQFDVPIIGMTSLGLPLQMQYGIGNPIMPSHPAHWDAEIKELGRLSFWQRLQNFVHAWRFVHFYRTDYLPRQQAIAEKHFGRGIPDVADMENNVSLVFVNQQAPISFVKPNIPKIIDIGGFHVSKQIEPLSKHLQRILDEATQGFIYMSLGTNVKSVMLSDETREEFLAAFSKLPYTVIWKFEDDILIGQPDNVIIMKWAPQQSILAHPNIKAFIYQGGLQSTEEAISHVVPVIGLPVFADQDTHVNKMVSLGVGTKLEILTVNRTGLLEAIQSVVLDGSYKQRMLKLRDLMEDKPYDSLENAVWWTEHVIRHKGAPHLHSTTADDPWYQRQDMDIIFIITTAILTALSISAVVVYKLMAYCIHLLNHNWQMISKKEKTC

SEQ ID NO: 6379 - protein, 412 aa, Loxodonta africana
MSKKWISVLLIQLSCYISCGTCGKVLVWPTEYSHWINIKIILHELIQRGHEVTVLTSSASILIDPSTPSAIKFEVYPTSLTKDDFEIFFMKFTRKWTYDLPKDNFWFQALNEKKWDQFYSDVLGRPTTLYETMGKADIWLIRTYWDIEFPRPFLPHFDFVGGLHCKPASPLPKEMEEFVQSSGEYGVVVFTLGSIVSNITEERAQTIASALAQIPQKVLWRFDGKKPDNLGHNTRLYKWIPQNDLLGHPKTKAFITHGGTNGIYEAIYHGIPMVGIPLFADQPENIDRMKAKGAAVSLDMNTMTSTDLLNALKTVINDPSYKENAMRLSAIHHDQPVKPLDRAVFWIEFVMRHKGAKHLRPASLSLTWYQYHSLDVIGFLLACVAIVTFLVIKCCLFGYQKFFKTEKKKKRE

SEQ ID NO: 6380 - protein, 520 aa, Aedes aegypti
MSRCVFLLLTVLCGLTRAANILYIDGVPSPSHFIWHRALINGLAAKGHSVTALSVDIEENPPQNVSYIKIEGVYESINELMGMESDFFELGDMNPFTSIAMFNDYIMLSCEMTLKSKGLQQLMAYPSDFKFDLIISDYLNGPCLSAVTQHRFGRPPYIAATAFHVLTTTNTLSGAYSYPGSVPDYALNTPQKMTYCQRFTNFLYNHWVELLKIYDMYPKVDKVVRKLVPDIPYVGDLDRDARIILLNSDPVIQYSEASMPNVISVGGMQIVKPKELPEDLKKLVDNAKNGAILFSLGTNVRSDMLGDKRIIEILSAMSQFPEYQFLWKFESDAMPFEVPKNVYIRKWMPQNDLLAHPNLKLFITHSGLLSTQEAIYNGVPIIGFPVFADQHQNINYCMEQGVGKKLLIKDVKSSDLANAIRELMTDGSYRENMSRLSKIFRDQKESPLERAIWWVEWVLRHPTSQILQSNAVRLDWFVKYSFDVIVPLVGLLLIVLIVPVKILCCVMFRKRRQQLKSKRE

SEQ ID NO: 6381 - protein, 738 aa, Rousettus aegyptiacus
MSINNILLLALQISILGNTLGGNVLIWPMEGSHWLNVKMIIDELIKKEHNVTVLVASGALFITPTYNSSLTFEIYKVPFGKEKIEGVIKDFVLAWMENRPSISTIWKFYQEIAKVMEDFHMVSREICDGVLKNQKLMEKLKKSKFEVLLSDPVFPCGDIVALKLGIPFMYSLRFSPASTVEKRCGKIPYPPSYVPAILSELTDQMSFTDRIRNFISYHLQDYMFDTLWKSWDSYYSKALDGSHWLNIKIILEELTQRNHNMTVLAASKTLFINSNTDFPVNFEVIPVSFKKSDIDSLIEHIIMLWLDHRPTPLTLWTFYKELGKVLDTFFQINMQICDGVLNNPELMSRLQKGGFDVLIADPVTSCGDLVALKLGIPFIYTLRFSPASTVERHCGKIPAPTSYVPATLSELTDQMTFSERVKNTISYSLQDYIFQSYWGEWNSYYSKVLGRPTTLCETMGKAEIWLMRTYWDFEFPRPYLPNFEFVGGLHCKPAQPLPKEMEEFVQSSGEYGIVVFSLGSMVKNLTEEKANLIASALAQIPQKILWRYKGKKPATLGANTRLYDWIPQNDLLGHPKAKAFITHGGTNGIYEAIYHGIPMVGVPMFADQADNIVHMKAKGAAVEVNINTMTSADLLNALRTVINEPSYKENVMRLSRIHHDQPVKPLDRAVFWIEFVMRHKGAKHLRSAAHNLTWFQYHSLDVIGFLLACVATVIFLVTKCCLFSCRKFGKTGKKKKRE

SEQ ID NO: 6382 - protein, 247 aa, Drosophila sechellia
FTKIERFINESEHGAIYFSMGSNLKSKDLPPAKVQEILKALDGLKQRVLRKFELDNLPNKPENVYISDWFPQTDILAHPKIIAFVTHGGMLSTTESIYHGKPVVGLPIFSVQFFNMAHAEQGGYGIMLDFKTLKADDFRQAIERITSEPSYTKVVQGMSFRYRDQQHTPMEKAIYWVEHVTRHQGAAYLKSAAQRLNWWQYHNVDVLLIIFAVMVLLLIVLPITNYNLLKKLLFTGERTQSTKVKRN

SEQ ID NO: 6383 - protein, 382 aa, Aedes albopictus
MNDFIVGVRSWLNCPTIMYCSAGFTSMTNVVGNPLEISAVPHILLGNKNPMGFLDRVKNTIIYTVDFLMGKILAHYTQPYYESNFPAEKGYPSFEQAKLDISLVMLNSYFTQTVPRPYLPNMVEVGGLQIKPKPDPLPEDIQAWLDGATDGAIFLSFGSNLKSSNLRQDKFDAIVGSISKLKQRIIWKWDTDQMPGKPANVMIGKWLPQDDILAHKNLKLFVTHGGLGSITESMYHGVPIVGIPMFGDQDTNVAQVVKEGWGASVSFDDLTEEKLTAAIKEVLGTPKYAQQIESMAERYKDRPQSSMDLATFWVEYVIRHKGAQHLHYQGADLNVLQRNLVDVFAFLGAVVYVAVKLVCFVLCRVKRMLCGGKKTTKKQKKQ

SEQ ID NO: 6384 - protein, 695 aa, Neodiprion lecontei
MWLTVEGGRKPKNTSAMALLSEARTGRAWYTGEYLKTGEEESLWGVVPKAPSGWHQPVAESSRVEFSTGLGLRCGQLRKDKGSGTGTWLACFYAGWSRDMFIQCVGGKPKELEPLQLGYGGENGEEERGGYRHRGWISHQAVFRKLKTLKPSKRGHDSILVTTDSVNDPILKKLYGNKSVVGPLNYGNCARILGVFPTPSFSHQVVFRGLTLELNKRGHELVIVTTDPVNDPSLKNYTEIDIGFMYEMHERLGRNMIEYRRSPPSLTQMSTLSSYMNLGTEKILTYPELRRLYERDSDEKFDLVIMEQLFSFALLPLADRFDAPMIGISSLVLSTNTQYGIGNTIIPSHPANWELQENINNPLTFWQRLKNFCKIWSTIYVFRTYFMPGQEEIARKYFGDDIPSLYEIEKNISLIFVNQVGPISYAKPNVPKIIEINGFHISKHKKPLPQDLQNVLDRATQGFVYMSLGTNVKSITLSAETRSEFVAAFSKLPFKVIWKFEDDNFPDKPDNVMILKWAPQQAILAHPNLKVFIYQGGLQSTEEAIEHAVPLVGFPVIGDQDAIVNKMVSLGVARKLEITAVNRDDLEEAILTVALDDQYKKKMLDLRSLLKDKPRDSLENAVWWTEHVIRHRGAPYLQSATADEPWYQRQDMDIVAFLSATSVITFVTILLISYKSLIFTINALTYSPLDKAKRN

SEQ ID NO: 6385 - protein, 483 aa, Ochotona princeps
MLGNILLWSLQLSLLGTTLGGNVLIWPMEGSHWLNVKIIIDELIRKEHNVTVLMASGALFITPTINPSLTFEIYKVPFDKERIEGVIRDFVLTWLEHRPSPSTIWRFYHEMAKVMKDFHMVSREICDGVLKNQKLMEKMKKSKFEVLLSDPVFPCGDIVALKLGIPFIYSLRFSPASTVEKHCGKVPFPPSYVPAVLSELTDQMSFTDRVRNFISYRLQDYMFEALWKSWDSYYSQALGRPTTLCETMGKAEIWLMRTYWDFEFPRPYLPNFEFVGGLHCKPAKPLPEVLWRYKGKTPDTLGPNTRLYDWIPQNDLLGHPKTKAFITHGGTNGIYEAIYHGVPMVGVPMFADQPDNIAHMRAKGAAVEVNMNTMTSEDWLNALRTVINDPSYKENAMRLSRIHHDQPVKPLDRAVFWIEFVMRHKGAKHLRPAAHDLTWFQYHSLDVIGFLLACLATSIILITKCCLCVYHVFGKTGKKKKRE

SEQ ID NO: 6386 - protein, 1000 aa, Symbiodinium microadriaticum
MDQQITAEGPTIAIFNVAMIGHVNPTFALVQELCKRGCKVSYFLPPVAPIRAAAIESGAVVEGYLPEDPSDFVMEKCGIDEPLCHAVPEIVEDDRAEYERAVWPLAHVESMSSSGADSTKLGIQCASLVTYPGMGSLSGLMSTLEAEGRLERAGAIRKPYGKAIQDKFGVDLRCNLLTRRQFYAKTNFVTTCEDLIAELPASGEQKWADELSTEFSFSAVGCLVSSSAPHVITARSDSFIPRVKSFGHSLPVAELSDQLAKGRKIIYAALGTMALSDRWSIDLGRISGYNLPHGTTGKAFCQHVWKALLAAMEELGDEFFCLLSVGKQPDALDFLGSSEAEIFELVPSNVLIRGFVPQVDMLNNYTSAFISHVGVNSLQESLMAGVPLVAIPQAVDQPANACKVEQRGWGQAFFKPMETVSSTALAESLRQVCDENSMYRQQVQCARSELAGGAPRLAERLLSMSYQSSAAMGGVCHSELWETLLERTEAWQPPYFIRGATNLREANESAEFWFHRRNGSVLAHADLTLPKFADFHPYCSRPNFESVRERLRRLGKHWRLMPHPHVNMSRWAPNSHDGGIYRTDLWQPAWEATVEQGEAIVFFPNIFHETQVPEATTFQFQLPVPARIQAARPPRPGVLLPELLSATFPSRLRSRMADDSARRRDEAEALSAMFGDDFFETDVCEWILRCTDAHAELTVQLPTDYPSRSPPALLLDAPLCERGQAEAMCRSFLEDFSPGEEYGATLATRFFEAFERQQDGGHAVSGEAALQDESAPVAAVVKLEGHLAAEIAAALLDAGFQKHSTQIYVHGELGVAAEIGEELHLSVDGVDALRELSEWVASQLVLDLSELSCFGKRVLAWANSRRAASESADGSADGIIESESEVPEVGGAKLTGNAAWRARLQAGETVEFRGSGNSLHPRIKSGECCRYVPVRKHEDIKEKDIVFCQIKGRYWGHMVKKKTFVGGKDDYEYTISNIHGWENGTCALEHIYGKVVDHWK

SEQ ID NO: 6387 - protein, 527 aa, Drosophila grimshawi
MSQSSSKVGFIGLTLLCLLSCVASYNYMVVLPCAARSHYNVGSALAKGLAAAGHQVTLVSPFALKKPIKNINDLPVPSILKAMSGDIGNLLKTSEASIIQQILGLYDMGIRRTGVLLSDSSVIELMQSNQTFDAVICEVFLNEAQFGLAEHFNAPLIGMGTFGAISWNTDLVGTPSPPSYVPHPLLKFSDHMSLVQRVINLAFLSYEYLFMELYYLPQQEQLYTKYFPNNKQNFYDMRKNTALMLLNQHVSLSFPRPYSPNMIEVGGMHINRKRQPLPQDIEEFIKGAQHGVIYFSMGSNLKSKDLPQQKRLELIKTFSKLKQRVLWKFEEPNLPGKPENVFISDWFPQDDILAHENVILFITHGGLLSTTESIYHGKPFVGIPMFGDQFLNMERAEQNGYGRSLVYEQLSAERLLAAIQQLIEDPKANDLVKAMSARYKDQPQLPLERAVYWVEHVTRHGGARYLRSASQDLNFVQYHNLDAILILYGGILFFVLYCIALLICCAWRALQNFFMGRKTSQDKMKQH

SEQ ID NO: 6388 - protein, 525 aa, Austrofundulus limnaeus
MRGRVWFPTAGLLVWLCCLNAGSVQAGKVVALPVDGSHWLSMKILVKELTRRGHEVTVLVPESSLLIKGSDSYKTEIYPVPYTQAELDSILNSFREGVFEKHPGIMDLFANVDRLVNFTSIQVTACESLLDNEPLMRQLKNEGFDILLTDPFLPCGSVLAKILSIPAVYFLRGLPCELDVKANQCPSPPSYVPKFFSGNTDRMDFPQRVNNMLMFSLESYLCTVLYKPFDGLTGRLFDMTYKELISEGAIWLLRHDFTFEWPKPLMPNMILIGGINCAKKAPLPADLKEFVEGSGDDGFIVFTLGSYVASMPEEKAKMFLDAFRQIPQRVVWRYTGVLPKDIPKNVRILKWLPQNDLLAHPNAKVFMTHGGTHGIYEGICNAVPMLMFPLFGDQRDNVHRMVARGVAEEMSIFEVTTEKLVAALSRMIQDKSYKERVVELSQIHLDRPVEPLDLAVFWTEFVIRHKGAPHLRVAAHDLNWVQYHSLDVVGFLLTVLVVTLWVMLKSCQFCTRKFCGKKTTKKKSE

SEQ ID NO: 6389 - protein, 518 aa, Anopheles sinensis
MRESLVLLVLCTVGYAVNGANILCLMGVASPSHHIWNRAIMDALAREGHNLTILSADVEKDQPSNVHYVHLEEIYPTLYTGPESLDLMEMANENLFKSVISFYRDFVVNECAGTLKSKGLRTVMDYPDEFRFDLVLHDFTCGPCLLGLLHKFKYPPLVSVTAFNNPPYSTEVIGGHKFYSYLPFYSLSYDTDMNFFQRVHNTLLSVTDVIYRNYVSNPRIDAMMRKYFRYEDMPYAPELHQRSKLMLVNAHYSIDFPESTPPNLIAVGGLQIREPKALPTDLEQFVNASRKGTVLFSLGTNVRSDQLDTERQKMIVEAFRQLPDYNFLWKFESDLGIPLPKNVLIRPWMPQNDILAHPRTKAFVTHAGLLSTHEATWYGVPIVGIPFIADQHRNLERCIRSGVAKRVAFQTMTTGQLRDAIREVLENPQYRSKMAAQSALFRDQPEKPLARAVWWIEWLLRHPNTTQLESPVLRLGFVRTYLLDVALFLAAIPILGLCVLSKLCRRVPSRVDGDKKRK

SEQ ID NO: 6390 - protein, 542 aa, Musca domestica
MERSKLSLICVFAVIASLSLQITPTNGANILGIFTSHSPSHLIVHMSVVKVLAERGHNVTVVVTQKPKVTHKDINVIVIPPKPDVEEKLNREVSGMALKKNSLINTVSNFFGSLSLLIDMQRDALQDARFTALYDNPQYDLVIIGFFFNNFQLGAAAKFKAPVAISWSGPSISMTDNFIGNPLEVSYVPNMNMAIKAGEKMTLLQRIQNIFMNGFFDMIMTAMDFKMRAFYNELFPNDGSFPTLKEMMKNISLVLVNGHFSEGPIRPNVPALVEVGGIQVKDKPDPLPKDIADFLDGAKEHGAILFSLGSNLKGSSIKPETATYIFNVLSKLKQKVIWKWEDLKNTPGKSANILYKKWMPQDDILAHPNIRLFITHAGKGGVAEAQYHGVPMMALPVFADQHGNADKIVKSGYGKQLELLTLTEDKLRENVLELLNNPMYRKNVQEFSKLYRDRPLSARENAAFWLEYVIRHHGAAHMQSPLVHMNFIESNNLDVYAVLLAVFYVLYRIFRLMLCFACKKLLKKNCSGAASKDKSKKKVKKQ

SEQ ID NO: 6391 - protein, 543 aa, Oryctes borbonicus
MRLLYFALLLVSVQSGDSANILAIAPFGGKSHYSIIEKLLKALVARGHEVDVISHFPSKTPIPRYNEFSVRGSLPIYQDNMTIDSVRDKNLIQQLTLIFANGGVSVCEAIFNTKIAQDLRNSTKKYDLLITHYFATNCMLAFAHLFSVPSVAVITSVSLPWAPSLIGLPDNPAYIPNYFTMFLPKMGFGDRFFNTMTYIITKIGFEVQSNKQSNAVVKKFFGPQLPDLDDLARNVSLVLVNSHFSTHQSRPVVPNFVEVAGLHIDGNATLTKHYEEILKTDTKIEGIIYLSFGSMIVTESFSEEVLLAFFNAFKRLPYKVLWKASRERFPKHLKLPNNIQFEPWMPQMEILCMLFQVQIYINTFLKSLLCLKYFTGHPNVKLFVSHGGMLGTSEALYCGVPVLGIPIFADQLLNIRNSVSKGVAIEIPYNQITEEKLVVAIQSLLNDPTFKTNTERVSRLFKDRPMSALDTAVYWVEYVIRHNGAPHLRSIAADLPWYQYYLLDVIFVFIVCVSTFCFVLCKLVIYIVLKLLVALYKNKIKKE

SEQ ID NO: 6392 - protein, 537 aa, Drosophila virilis
MRMVRGNVLLMILAPLLVLPDSRVNGANILGMFSTFSPSHLIVHMSMMRALADRGHNVTIVTALKPKLVPHENITYILAPLSEHHLAFVNEYMANSAKEKHSMAMTFLKTIIGTGQLMDSQYEFLLHPNVRALHEQPQVKFDLMILGYVFNDYQLGVAAKLGIPAIISWVGVPFSFVDDEVGNIYDPAYVPNVNVVQDKRLRTMGFGLRLRNYLSWLLLKGIGLALDVRMNNYYTRVFGEDPALPSYQDVKRRVSLLFYNYHSHSEGPVRPTVPQSIEIGGVQIKEQPDPLPKELAEFMANATEGAIFFSLGTNVKSSYFKPHIMEAIFQVLARQPLHVIWKCDDLQHKPGHAANIYFHNWLPQDDILAHPNTKLFITHAGKGGIAEAQYHGVPMLALPVFGDQPGNAELMVSAGFGLSLDLLTLTEDRLEQSIRELLHNPAYRQNVRKFSQLYRDRPLTARQSVVYWTEYVMRHNGAYHLQSPWLHMDFVARHNLDVYACLLLALAVSLFVFALLLRFTLKQLRRLARSKDKVKEN

SEQ ID NO: 6393 - protein, 518 aa, Polistes canadensis
MVSLIATTVTVLLIHNIGFTSSARILAIMPTPSYSHQIVYHSIFRNLNLRGHHITLVTTDLLPDRNLKNFTQIDISHTYQLKKSLNFLETRHEYSWLEIIGVMLLEITEKLCILTFEHPDFKKIYAPDSYEKFDLVMVEIIWTPAFSALGHRFKAPLIGVTSSGLLQQNHFIMGNPVIPSHPSSYELNIGIGLNVPFWKRVQNFVLTWWYIHVTCNNKLYKPQQKIAEKYLGNIPSIRELEKNISIIFMNYQEEISFTRPNMANIINFSGLHIASNASNKPLPKGLKEFIDNGSNGFIYVSLGTNVHSSMFPKKLMDIFLNVFSNLPIKVVWKFKGNFLKIPENIYIAEWFPQQAILAHPNLKLFVYQGGLQSTEEAIHFGVPLVGIPIIADQDMQVIKMESLGTCRSVDILQITRESLNEAIMDTLNNKSYKENMLKLKNLTKDKPYNSMERIIWWTEYVIRHKGAPHLRSSIVDEPWYQRYNTDVIAFLSVTLFTIVLLNLYLTDKTTKRKRDISR

SEQ ID NO: 6394 - protein, 518 aa, Papilio machaon
MKLCVIFILVTIINFVVSANILAVYPCPSISHQVVFRSLTLELLKRGHRITVVTPDPMYPKGSGHENLTEIDVHDRTYAVLKKYFVSYVTGSYWDLLNQVKGILDLVSASFEELMETKEVQHLINNKKKNEKYDLILLESMYPQALAISYTFRAPTILISSFGPYVDSYKIMGIPTNPILYHHMFRQRLYNLTLFEKLNELYNQLVIHYELNRREEKENELLKKFFGPDIPPLNVLKNYVDMLFINIHPIWEGNTPVPPNVIHMGGLHMKEPKNLPQDLQQYLDASDNGVIYFSFGTNVQLSLLPQNKIEMFENVLSQLPYNVIWKRDTVVMKSKNVEVYKWLPQADLLRHPNIKLFITQGGLQSTDEAITAGVPLLGIPMLGDQWYNVEKYVYHEIGQRLYFEELTEEKLKNAIIEVAENKRYKDNIIRLRSLMVDQPQAPLERAMWWVDYVLRHGGAKHLRAPAANISWTEYLEQDLLLFITCTLFILFGSIFLVMRVLVRIVASKIKHDKKLKNE

SEQ ID NO: 6395 - protein, 550 aa, Lucilia cuprina
MNFIFVILIALKLSHAENILMITMGGTKSHKIPFWELANGLIKRGHHITFVSGFPADFHMVGLKEMTPKSLVNYIKNFTDWDLVGARLDNKAPIPAWKALRYPAESCNSLLEPDAETGVAVTDELLTQKFHLAIVDGAFPECALGIVHRLSLPFMFINTVGFYTGSLAIAGNPIAYAVTPHVFTALTQTMDLWQRVQNYVTHILADLLHMYYTNQVHDVLIAHFGSSVPHPFTIAHNVSFILQNGHAIVTNPRPLYPNVAEIACMHCRPAVKLSHELEEFFETAPAGVIFFSMGSSVKPANMPEKFRNLLLKVFARLSQYHIVWKWDEHSSTKTRTMEAPTILSMRNTTKSTHIITDIPKNVYLSGWLPQQDILGQRKLKAFITHGGLLSMYEAIYHGVPMVMLPVFCDHDVNAAKAEQDGYAIRLSLEIITADKLYHAILAIINNDKYKREINEKRQLLLDQMNTPLDTAVFWTEYVLRHQDTTHLLSPVRNMSILKVCILFFSYNCVGFMYVLGIFIILKKILHYAFATTANTQTVSERLKRKFIKQC

SEQ ID NO: 6396 - protein, 342 aa, Ursus maritimus
MRYLQTDIHRSTINKCQEAKATQVAIDRYSNKQDESSGENGIVVFTLGSIVSNMTEERANVIASALAQIPQKVLWRFDGKKPKTLGPNTRLYKWIPQNDLLGHPKNKAFITHGGTNGIPMVGIPLFANRPDNIRKMKAKGAAVTLNLNTMSSSDLLNAQRTVINDPFYKENAMWLKTIHQDQLIKPLDRAVFSIEFVIRHKGAKHLRPASYKLTWFQYHFLDVIGFLLASVATVTFLVIKCCLFCCRKFKKRKKGNRLLRHSRHRTHFLEQRLNMGGGAIFKDTSHDPSTDGREVKVWSKILAHCLGKSFVFIVHNPLEIQNILSCKFPVTGILNGSNWLPT

SEQ ID NO: 6397 - protein, 515 aa, Tribolium castaneum
MHLLKLFGFLSLFFYSCECYKFLALFQTSTKSHYILASKLFKEIAKKGHEVTFITPFEEQTPTKNLNVVPVKTLQTFFCTRRNSMFEFESANPLEKAKFLFEISYNFTEHLIQSTEVQTLLKSDEKFDGVIIYQYLNEALLGVAHHFKAPVILFSSMPLYAPESFLLSHPNPPSYVPNILVEYTGRMNFWQRLRNTFYDTSMIAYYLWNYLPKHRELVRKYVPGGPDLYDFVNNASLILINSHVSANEAVPLVPNAVEIGGYHIEEPKALPQDLQKFLDDSKNGVILFSMGSIVQSTHFPEEKRRELFKTFAKLKENVLWKWEGDDFPGLPKNVKVMKWIPQSDVLAHPNVRAFISHGGLLSTMESVYHAVPIVGIPVMADQKMNIELAVSYGYAVAVPYPELREETLTKALDKVLNDPTYRNNIKKRSLIMKDRPIKPLDNALYWIEYVIRHEGAPHLRYPGMDLTWYQRNLLDVAGFVLVVIFSLVFVIVKICKLLFREKSKAKVVSKKKKNN

SEQ ID NO: 6398 - protein, 507 aa, Diaphorina citri
MIRLTLIFLGVLLCHIDASNILAFFPMALNSHIKPFQPLLYELSRRGHNVTEVSSFPPPPGVDNYTYVYVPHLFNATNTMEFRNRTHADLIGLFHSLCLAQMEQVLRTPEIQTFVQRDDSHFDLVIIEGTFCGECLLAMGHKYKAPVINFQPLGYWPSNYYVYGNLLSPAVIPDFRLPSTTQMNFWGRLDSLWFAVTDLFLTNLFYYPKQVALMDKYFKYPGYQSRPPMVDMLRNISMTFVEHDISIGVPQALTPNMLFTGGMHIKHAKPLPPDLDKYMSDAPNGVIFFSFGTNVRFANMPPYVLNAFVESFSKIKQKILWKTDVEVEVPPNVLVRKWFPQADILGHKNCRLFLTHGGIHSAMEAGYHGVPVVMMPGFSDQFQNVLLMQEKGLGRVIDMDSLDSDVVVEAVNAVLGDKTYAANAKRISAIMKSSPVSSLEKAVYWTEYVIRHEGAHFLKPASTRLSLVQFLCLDILLVVISVMAAMLFVLFKCGQVLLRAKKKDKTE

SEQ ID NO: 6399 - protein, 615 aa, Zeugodacus cucurbitae
VQSYLKTLAARGHEITSVSAFPQKKPLKNFRDITLINEHKDHDELIDNAVEAMSESKLSQLRSFMDYVLMASLSVLKNEEFQQLLRSDAHFDLIIIEVASQDSLYVLGKHFKAPMIGVSTFGTDVVIDQLVDNISPVAYVPALTGRNLDRMKFWQRLDNLYAYTIELLYNHLVIIPEQQRYYDTYFPNAFNRCAQRFFSFTDLAGKPMNVYINKWFPQPDILAHPKVKLFITHGGMHSLIETVHYGKPIVGMPVFYDQYLNVEKAVSKGFGLALNFRNFTSVELRDAVLEVLNNPKYTERAREISATFHDRPMKPLDAAIYWTEYVLRHKGAPQLHFSLLLLNQHYSFSWPRPLVPNAIEVAGMHIDHKPSKIPDDMEAFINASPRGAIYFSMGSNIKSEFLPKHKLQDIMNAFASLPVNVLWKFEKTDLVGKPKNVYINKWFPQSDILAHPKVKLFITHGGMHSLIEAVHYGKPIVGMPVFYDQYLNVEKAVSKGFGLALNFRNFTSAELRDAILEVLNNPKYTELAREISATFHDRPMKPLDAAIYWTEYVLRHKGAPQMRVAARHLNFLQRHSVDTVVVLFAIPLLLILLITRLILVIFRGKDCVSKKLKHE

SEQ ID NO: 6400 - protein, 979 aa, Tribolium castaneum
MFIRNLFLFCILLCASESYKILAIFPTPSHSHHTLASKLVKELAKRKHEVTFVSPFPQKETVENLKEISVEEIIPIFNQQKKHLFKLNELTLFENVIFVNNIGLLVTEELLRNEKIQKLLESNEHFDLIILPQFINEGLLAIGHHFKAPVVLLSSMPLFSWSSFLLGHPTSSSYVPNIQTHYTGHMNFWQRLCNSIYDAYSILYHQWVVLPKHRQLVKKYVPGQPDLYDFLNNASLVLVNSHVSSYDATIQVPNVVEIGGFHLEEAKKLPEDLQKYLDGSKEGVVIFSMGTLMKSSSMPKEKLQALLQAFSKLKQQVLWKWDSEEMEGKPGNVKLVKWLPQSDVLAHPNVKVFITHGGLLSTMESIYHGVPTLGIPVFTDQKANIEFAVEAGSGIAVPYPELSEEKLSQALDQIINNASYKTNALKRSKIMKDRPIHPLDYAIYWIEYVARHEGAPHLRYPGMGLAWYQRYLIDVAFFVGCECYKFLALFQTSTKSHYILASKLFKEIAKKGHEVTFITPFEEQTPTKNLNVVPVKTLQTFFCTRRNSMFEFESANPLEKAKFLFEISYNFTEHLIQSTEVQTLLKSDEKFDGVIIYQYLNEALLGVAHHFKAPVILFSSMPLYAPESFLLSHPNPPSYVPNILVEYTGRMNFWQRLRNTFYDTSMIAYYLWNYLPKHRELVRKYVPGGPDLYDFVNNASLILINSHVSANEAVPLVPNAVEIGGYHIEEPKALPQDLQKFLDDSKNGVILFSMGSIVQSTHFPEEKRRELFKTFAKLKENVLWKWEGDDFPGLPKNVKVMKWIPQSDVLAHPNVRAFISHGGLLSTMESVYHAVPIVGIPVMADQKMNIELAVSYGYAVAVPYPELREETLTKALDKVLNDPTYRNNIKKRSLIMKDRPIKPLDNALYWIEYVIRHEGAPHLRYPGMDLTWYQRNLLDVAGFVLVVIFSLVFVIVKICKLLFREKSKAKVVSKKKKNN

SEQ ID NO: 6401 - protein, 438 aa, Sipha flava
MDFRRPFVVLLLIGFGCSGLPNGKSSNILAFLPTETRSHFNGFKPLLETLVARGHNLTLVSPFPLSPVTDDGSPLLYTHVQVEFHNKVSGVDFLDKNSETNTWPSYVYVLWLGPRITRFAVDKPSVKEFILNDGGRFDVVIIENFFHECFVALGHKYGAPVVQLLPLAANSRVSQWHGNPYHPAYIAELFNDYAAPMTFRQRVGNTVSAAFNTWVNRLVYMPQQRAIMLEHFRYPGHERRPDLDTMVQDVSLTLVNSHPLVSSVAPFVPGYVQVASMHVQPVKPLPRDLKNILDAAERGVIYFSLGSVIKSSKMPRETVALLLSEFAKIEQIVLWKWEDDQLPDLPKNVIVRKWFPQNDILSHPNCRLFITHGGIHSLIESIYHGVPMLLIPVFADQVHNAAEAMRRGFALYVPYFELTAEEFSEKLQTILQDPGSST

SEQ ID NO: 6402 - protein, 525 aa, Culex quinquefasciatus
MSTSGKSLSAVIVLLVLVAVPLISADNILFLQSLASKSHHIWNKQIFERLYDNGHNLTILSFEEEPSVPGKTFLMVRGLMDKVMQEYGGAEWDVTVEQSAIVNVFFLYDFYERASRHLAQEEAIHRLLAYPRSFKFDLIIHDFTMGHFLLGFVDYFGNPPLVSVTAFNIPSHTPDLSDAPVHPSYMPHYASSFGSQMNFVERAKNTLYWTLDHVCRNYIYMTSEDRRVKQLFGPDAPSVKDVEKRSDIILVNGHFSMDYYQLLPPNVISVAGLHVSRSEEVAPIVKQFIARANKGAVLFSFGTNIQSEMLGPDVNKQILAAFRSMPEYGFIWKHGDPLSLGVVPPNVLVLKWVPQSAILANPRTKLFISHGGLLSTQEATWHGVPVVAVPFFVDQYANADKLVRAGVATKLLPKDVNEKTLKEAILRVVEDPSCRSKMKERSYHFKGQPDHPLDRAIFWIEKVLENKGLAYLRSPALEMSAIQVYNLDLLGAVALAAFLFYVLLGKILGCFIPKTNKRKTKSKTT

SEQ ID NO: 6403 - protein, 660 aa, Diabrotica virgifera
MSDGRSVRKTVTFSIPHMSHQMVLGLLERTMFLLFLLLDSFSFIQCVKILGIFPTPSYSHQIVFQPIWKELSLRGHNVTVVTPHPLNDSSLTNLTEIDVSFVYDIVPKYGWPKEYLKLPSTLHKLDYFLNAGNDFTMEIFEYGPVQRIIDQRDAFDLLIVQLSHNMNLLLYGLAFNLHIPILVNECLNNTSQASQARLSNSCALRKTIRRKRNEIQAAPPNPVNLEELRIPEHYRIYEVSDGVKENFLLADNGKGSNRILIFRRDSWLQHLQTSPIWFADGTFSIAPPLFSQVFTVKATKNNGVHPIFYALLPNKSRATYSRMFDLIKNLKPNLSPTAIHCDFEQAAFAAMEDCFPGVNINGCFFHLAQNMKKHVAQLGHLTEYNNDAQFALNFKMVTSLAFVPVRHLDQAIDVLENALPVDIQEYLDSALQGVVYFSLGSNVKSANLTEQIRKEIVAALGELPYNVLWKWETDYLPDKPDNVMTKKWCPQQDILAHPNIKVFVMQGGLQSIEEAITLEVPFVGIPLITDQHANVKRIVELGLGVKVDYKTLTKDILQNAIMEVAQNPTYKEEVRKAKSILLDEPMKGVEKAVWWIEYVIRHKGAKHLRSPAADMSFCEYFMVDVVLFLLTCITVVLYSAYKLLTVLRSMLRSLKKIKKQ

SEQ ID NO: 6404 - protein, 1038 aa, Halyomorpha halys
MIFWLCFLALVALAKSARILAFFPQGTPSHHFIFRPVIEGLAKNGHDVVYVSAFPYKELPENITQIDLSNYDIMSEFADVNIMDMTELNIMLYTIFMYSFGELMARYYVGSKEVQDLIHSDQKFDAVMFESYFYQEYLSAFIHKFNAIPIEVLTLGDCAWVNEMSGLQDNPSYQVDFKSGLSGDLSFWQKLHNVYATAFTIISNYFFLHYTQQSLMDLYFNYTGWESRPSIGILAKNRSLILTNFDHVFAYPYPMAPHRKDIGGINIKPPKPLPEDLQKYIDESEHGLIYMSMGSHIDPTHFKDQIKAFLEVFSELPQRILLKYDPEKAGEIPPNVKVSKWLPQQDILAHKKCVLFITHGGLLSLSEAIYNGVPLIGIPIFADQPKNMAMMESQGIGRMLKMKNITRDTISWTIREVLSNNRYRDEILRRSKILKDRRNSPVEEAVYWIEHTLKYPFSLTPKSTNLSAIEFHLIDVKIFITLVLILVLYMLYSGFTIAKKIVLRAIRKPKQNIPVMTKGNVSLLLLLALAAYAESARMLAFFPMPARSHHFVFRPILEELAKRGHEIVYVTGFQYDKEPKGITQIPLPAPKPSSSDKFSWVEFGEANVPITVIALYEIFLSLAPLHLGNPRIQELIHSNEKFDAVLVESYFVQEYLSAFLHKFGAVGIEIMPLGDCAWVNELSGLPDNPAYQLDYKYDHTNDLTFFEKLYNIYVTTTLTLFGYYYLHKQQAVADTYMNYTGWETRPPLYKMVSNRSIILTNSHFALGYPAPAAPHKKEIGGINIRKSKPLPKDLQTYMDQSKQGVIYMSLGSNMNVSDIATENIREDFMSVFKELPYNVLMKWETDYPGKLPPNVKTSSWFPQQDILAHKNCVLFITHGGYLSISEAVHFGVPLVGIPIFGDQAKNLVLVEDAGYGRTLKFRNITRDTVAWTVNEVLSNKRYKEEALRRSKIFRDRILSPAEEAAYWIEHAIKYPNALTPKGAWLTFVQLHLIDVKLFILATVICLLCVACKLLTAIGKLCKSKPNQKQEAKKKLKKN

SEQ ID NO: 6405 - protein, 512 aa, Drosophila busckii
SSVAMRVCWGVPLLLLAATPARAANILALFSTFSPSHLIVHMAMMQTLADAGHNITVVTALKPKLAAHENITVVLASPTEQGLLAINQQMEQSTKQKLSMLSAMLKLLTNTQQMLGGQLDFIMHPNLRDVYEQPQIKFDLLWLGYFLNEFSMGIAAKLDVPVIMSWVGVPFPFVDEHVGNVCDPTYVPGVGQTPLQAQDMTFSWRLRNYFNWLVFEGISYGMEHHMQKYYSRAFSHLPESYMEAKRRTSLLFYNYHSHSEGPVRPTVPQSIEIGGVQIKDQPAPLPAELRDFLDNGSEGVIFFSLGTNIKASFLGSDTVRIIYNVLSRQAQRVIWKWDDSTQTPGNATNIYFHSWLPQDDILAHPKIKLFITHAGKGGVAEAQYHGVPMLALPVFADQPGNADAMVKAGFGLSLDVQQLSEQQLEQHIQELLSNATYTLKVKKFSQLYRDRPLTARQSVVFWTEYVLRHKGAYHLQSPRLHLSFVARHNLDVYAAILSTLLLCWLLLRFVAR

SEQ ID NO: 6406 - protein, 386 aa, Spodoptera frugiperda
KFLNNKKQKFDLLITEAFIDYTLVYSHLFNDIPVIQISSGYAVAENFETMGAVGRHPVYYPNLWRDKFYNLNVWDLINELYVELRLYNEFYKLADQQNRLLKEQFGQDTPTIQDLRNRVELLFVNTHPVFDNNRPVPPSVQYLGSLHLTHKHPKPIYGTIGELLDNATNGAIYVSFGSGIDTEEMESEFIEMLLKTFEALPYLVLWKYDGYLNRMPENVYIQSWFEQYDLLHHKNIRAFVTQGGVQSTDEAVEALVPVVGMPMMGDQAFNTNKYIELGIGRVVNTVSVNSKELIDAITDVVENPNYRKKINELRHVIRHQAITPLHKAIWYTEHVINSKNRRGETMLKTKASNVNYSDYVMSYIFVPLASYTIMNHLRQLLRLNFV

SEQ ID NO: 6407 - protein, 562 aa, Drosophila pseudoobscura
MMERLFSPIEQSFFSYQLKAYDYTYIVGTFREVHSISLYLRSAMRILFVFIGSILLALGGLPLPAEGAKILATLAWPGRSQYIFVENYLKGLAARGHEVTVINTFKNKATPNMRFIEALKVQEFHQQMLAELEASTLWQELNAISGLEEKVAAFTLDDEGVQKLMKSGETFDVVLAEMIEVPALYGMAQHFNATLVGFSSYGSDYRIDSQLGNTSPLSYNPSIMSPRTDRMSFCERLTNHYEYLVEMLHRQLVHLPAMERMYNKYYPNARQTMDEVLDSFALVLLGQHFSLSYPRPFLPNMIEVGGLHIAHKPQPLPEDIKAFIEGAEHGVIYFSMGSNVKSKDLPQETRDTLLKTFGKLKQRVLWKFEDDQLPGKPANVLIKKWFPQPDILAQTNVKLFITHGGLLSTIESLYFGKPVLGLPVFYDQHMNVARARRVGFGLGLDLYNLNEQDLEEAIHKLLSEPSFAKASAQISERYRDQPQPSLERAIWWTEYVIRHQGAPHLRATSRDLNFIQLYSLDTLFVLVGLPLLLVALLLKVSCRLLQGRKPKGCPYADKLKKQ

SEQ ID NO: 6408 - protein, 223 aa, Capitella teleta
KPLESELAEYADSATKGLIVVTFGSMSRQIPSDVMQKMLNVFGHFPTISSSYGTLKISTKASPGNVKLSKWVPQIDLFAHRNTKLFIGHGGNNGQMEAVYYGLPMATLPIFGDQFYNAQRITARNYDRVVNIREFTKDELYEAIADVLGNQTYADNIQKCSRIFHSMRDPHERLLFWVDHVLRFGGDHLRPTYMDLTLWKFFMLDVVGAILVFLLATVYCIWK

SEQ ID NO: 6409 - protein, 512 aa, Photinus pyralis
MEAAKLIALILSVTRVSESARILGAIPTPSYSHQVLFQPLWRELSLRGHQVTVLTTNPINDPTLTNLTEIDLSSSFKILDDKLLEIINSSQNVLKVMQLTIKTFHDVNDFQLQHPEVRSLIDDEDQHFDLLIVEYILSPMFYFSKRFRCPYIGLLPLDSSNINYRSFGHPAHPTLYPDMLMGIHGETSLLERVQLILFELFMVCIAPMVRGWEQEMAWNHFRDTTPVETIRAEISLLFVNSDPVLHYNRPLLPSVISIGGTLARIPTKPLEKNVREFLDGASQGFVYFSLGSNVKSKDIPARSMDVILATFRRLPYKVLWKYELSDLPNLPTNVFISQWVSQMEVLGHRNIKTFITHGGVHSMQEAIFSRVPMVGMPFFVDQPFNVKKMTHLGVALSVDYKTMTVEELESSILEVIDNPRYRNRIEELADLAEDQPTTGLERAMWWTEYVLRHKGAPHFRSPYLDIPWYQYYLVDVFGTVFLGVSFGIFVTVKIVSVSLRYIFGKSSKITKI

SEQ ID NO: 6410 - protein, 349 aa, Capitella teleta
DPWNNGVPWLPSFTPFAFLPYSHEMNFMERLKNTAYFVSITLFGISPKLSPEIVQRYSQYGSFSSLGEISAKSKLWILTSDPVLDYPKPMMPNMIEAGGISTKPAKPLDVTWTDVLQKSVKGVVLVSFGSVVSNFPEEIATKLLTAFGRLEQTVIFRFNNKDELTIPANVVISDWIPQNDLLANPNTKVFVTHCGNSGLYEAVFHGVPMIAMPVAGDGFHNAKRVVYRGYGIFVDAFNFQADDLVSAINRVAKDPSYKQRIAKASMIFRDRPETPVQRAVSGVEHILKYGGDHLLSHSSKMPLHQLLMLDILVVTLLCCVIGAFVSFRIIICVLRLCCSRRDHHKSKKE

SEQ ID NO: 6411 - protein, 354 aa, Aethina tumida
MLSVLLIFSTVNQVFSARILGFFPTPSISHQVTFQPVWKELSLRGHNVTIICIQSMPGILSTHDMVGNPTNPVTTTDLLLPFDDNKSFPERIKTVLYQITFRLYWNWYLLPRVDTIARKYTNDNIPYMGDVEKNASLLLLNTNVVMNYPRPNVPSIVEIGQMHIKPKKPLPKNLKYFLDKSKRGVIYFSLGSNVKSANEPEEFVNNVKAAFASLPYDIIWKWERETMKNKPDNILLHKWLPQQDLLGHPNIRVFVTQGGLQSIEESISNGVPMVILPIIADQPFNAKRMENLGIAKVLEIETMTRDQLHEAIVEYQKLILDQPNTGIEKAIWWIEYVLRHNGAAHLRYSADKLK

SEQ ID NO: 6412 - protein, 516 aa, Tribolium castaneum
MTRFFTALFLLSIVWSAQSAKILVNAPMPAYSHFSLSFRLAKELADRGHQVTVINPYPQKTPIKNYRDISVEEHVEYIEELKKNLFGMNNMGFVANINFLLTMCSDLTERTLINKNVQQLLNSGETFDLVITAHFLNEAHFGLAHHFKAPLVVLSPGAANSFTNHFVANPSPSSYVPNVMAGFTNHMSFWQRTTNLIANAVFDGTREAIMMPIQRKIFKKYIKSDVELDDVLFNVSLILTNSHVSVQDAIPHVPNMIEIGGFHVKPPKKLPDDLQKFLDESKEGVILFSMGSNLKSKDLKQDVRDGILKAFSKIKQKVLWKFETELEGAPKNVKIMKWLPQQDILAHQNVVAFISHGGLLSTIEAVYHGVPIIGIPVFGDQESNIAAAASKGYAVPVPLKELSEEKLSWALNEILNNPKYRENIKQRSKLMQDQPLKPIDSAIYWIEHVIRHKGAPHLKSAGLDLKWYQREMIDIFLFLTLVTVVLFVIFYLIIKKILGLCCGKKPVKVSKTKKNK

SEQ ID NO: 6413 - protein, 561 aa, Lymantria dispar
MRSRFDRAPRNDVTPKASGQRVRGDPSPRARGLYKYGTRGRPSLVDDSTRRNDTMTAYLIVFCLCCWSAARSANILAYFPTPSYSHQLVFRAYVELLAERGHAVTVIRPLTRVDFNRNAGNLTTVDLDGDGLLLLMKASTTHRKRGIVADTDTVTANNYEALVRMVDRQIHSEPFQRHLKKSDRRGYDLLVVEAFVDYALIASHLFGDVPVVQISSGHATAENFETMGATSRHPRYYPNLWRFNFGPLSVWDGVRELYTELRLQREFGLLADRQDALLKRRFGPEAPGLRELRSRVRLLFVNVHSVFDNNRPVPPSVQYLGGLHLHDRRAEPLSEAVARFLDESRRGVVYVSFGSGLATEDMDADMTAALLDAFKMMPYDVLWKHDGRVDGLTIPANVFVQKWFAQFEVLQHKNVKAFVTQAGVQSTDEAVENLVPLVGVPLMGDQAFNAHRYVELGIGVALDATRLTAADLARAVEQVTSDRAYRANLERLRRLLRHQCASPTHKAVWYTEHALRRDGDALKTKAANVDYAEYCMSDLLAPLLSVSLMSHLHSLIRMFVW

SEQ ID NO: 6414 - protein, 347 aa, Tribolium castaneum
MGSHKSGLKITEYTLANPKVQELLQSGVNFDLVIVEQFFCEALFGFAKHFNAPLVVFSSIGPSEWNNNQMGNPHLPSYMPMTKLTYNSQMNFYQRIKNTAAFLFDATYKRYVTYPIHDKLLKKYFPKSMDLEDVLYNASLMLLNSHYSITEPFPLVPGMVEIGGFHVSNSEALPKKLETFLDGAKDGAIYFSMGTNIKSSNLNPNLIQDIVDMFSQLKLKVLWKFDKTIPKLPPNVLVEKWFPQNAILGHVNTKLFISHCGLLSTTESVYFGVPMIAIPVFGDQKMNAAKAEHFGFALTIPYPLLSGETLRQGISEVLSDSKYVENVKLRSRLYHDRPVKPLDLAMN

SEQ ID NO: 6415 - protein, 528 aa, Drosophila pseudoobscura
MKPLSRKTSFAALLLLCLLSCVSAYNYLVVLHTAARSHYHVGSALAKGLAAAGHQVTIVSPFELKKPIKNIRDVPVPSILNAMKGHIGKLLEKSQEPIVTRIIDFHHMGLAITESMLRDPIVVELMQSNQTYDAVISEVFLNEAHFGLAEHFKAPLIGLGTFGAISWNTDLVGTPSPPSYVPHAMLKLSDRMTLFQRIKNLAFVSYEYLFINYYYLPLQEAIYRKYFPNNKQDLYETRKNTALVLLNQHVSLSFPRPYSPNMIEVGGMHINRKRQPLPKDIGEFIEGAKHGVIYFSMGSNLKSKTLPLEKRQALLDTFSQLKQRVLWKFEDTELPGKPKNVFISDWFPQDDILAHENVIAFITHGGLLSTTESIYHRKPFVGIPIFGDQFLNMARAEQNGYGVTVNYVELTAPKLLAAIERLIGDPEATKKVQDMSDRYRDQPETPLERAVFWVEHVTRHKGAKYLRSASQDLGFIQYHNLDAILILYGGIIFVLYCLFLLIRRVWRLLQELFIGIANNKTKPKAKLN

SEQ ID NO: 6416 - protein, 533 aa, Drosophila guanche
MVVGRLGFDGLLVVIVIVIVVLLGQQTVQTANILAVFSYALGSSYVLVTPYIQQLVSRGHRVTMISAPVTYMPDIEGVQHIRVAKLKELTEDLEIYEYEAAVPTKWYEASFIADYFYNCSKLILEDAGVRSLLHNASAQFSMVVLGVPHTDALYGFGKHYNASLVGLAAYGGAWNIDFLAGNSAPSVYEPMSASGFTAGLSFFEKWINLIFISEERLVERFIYLPRQLKLYKRHFAADSSSLLEMRRKFSLILLNQHFSLGRVRSNVPNLVEVGGMHLAQLAEPLGAELQSFLDGATDGAIYFSMASDMLEKWFPPDFHETMLTAFGQLKQRVVWTTKRQESEITSNNVYIRRRQPQREVLHHPNVKLFITQGGLLSLIEASYYAVPVLMLPVYFDQHINAERMERLGIGRCLNFHELTPKVVLEGIQEMLHNASYALNARELALRFRDQPMKPMETAVWWTEYVLRHKGADHMRINEQDMSLMQYYSVDLFSVLFGRIGLTALIVGFLAYTVATIALQSAHYLFKLSIPVVS

SEQ ID NO: 6417 - protein, 530 aa, Musca domestica
MNFLGFVFVIIGFACVALIQNNEASRILSVFPSPSKSHLLIHCAVAQTLAEAGHEVTVLATIGNRDDATTMAMHRRAAYKFIAIEGPTFDRAFSQEMVNRPMAIYRRVFNILETIFTLANSTMNHPQMQEFLATHKAGDFDALILGYFMNDFMLGLGAHFQCPVILSFMIQPIFPINRIIGNPSESSYVPNLYTGLKQPMSFRQRVKNYLSTIFEQKILATILEWNLQKLYRYNFPADRYPPLEEVYKNVSLVLTNHHFSQGPIRPNVPALIEIGGIQIKEKPDPLPKEIADIMDSAENGVIYFSLGTNVQGSNLSPEKAKMIFNVLSQLPYTVLMKWGDKAFPGQAKNIIYKSWLPQDDILAHPKVKLFITHGGQGSVVESQYHGVPMVGIPFFGDQHSNMANVRSSGFGLSLKYATLTEEELRSTVLEVLNNPKYRENVQTFSKLYRDRPMTPRQLVRYWVDYVIRHNGAKHMQSPAVHMTWWQIQSLDVIGFLLVVVLGVVGVFVGLCKFLCCKGKKKSVNLKKKNK

SEQ ID NO: 6418 - protein, 590 aa, Zeugodacus cucurbitae
MFKLRASTTHRAKVFSCAFLLLIGCSLPTYTSAANILCFFQTFSATTLYMHSQIAELLAWSGHNVTVIGTIPNMLPAARYRYIQIKFPKRHLELLSPFQRGNRTVYWEFIVMFGNTLLLSDLAFSQPLMQKWMKNAKEDDFDLLIFGYFLNDFQMGLASLYKCPIIISATTAPTFWLNRLVGNPAESSYVPSALTPYSQPMDFWNSWWNFWIVLLERTYFSRVMEQENDEFFCLHFNCQNIRMWDVRRNITLIFTNHHFSQGPVRPNVPAMVEIGGIQIPEYRVPLQPHIADHINKAQNGVIYINLGKSVNCTELPKALLDSLHDVLVETQMHVLWRWTHCTKPRQSSRILYTKWMPQNDILALKSVKLFITHGSMSSLGEGQYYAVPMLGITYLSEHVGNVEYLVQFRFAQRIDAYRTNVNEIRRKIFDILNDPSYKERMVLYSRIYRDRQLTPRETVLYWVNYVLRYQGTPHMRSPAAEMTQLQMLGLDLVIFTVSSLILIWKFRGFIWRCITGRLMANIRKLLYKYVFVKDYEIVIERYSNIRYDEAVVDAARECQIRPQATRDPDVPRVVPVKAPRQRKGSGRRRR

SEQ ID NO: 6419 - protein, 415 aa, Aedes aegypti
MIGPSLSEVILTHPKVKTLMNSGEQFDVVIVECFVSDVLYGFAQHFNAPLVVFSPFGASLWANELIGTPYPFSQIPHTFLSYTDRMSFGERFINTLLWNVDSFYYRNIFLPRQEEMYKTYFPNAMQSLPQVMKNVSLALLNQHFSLSFPHPYAPNMIEIGGIQIDDPKPLPEDLQHILDNSKHGVIYFSMGSMLKGCRFPEEKRNAFISAFSKLNETVLWKYENTSLPNKPKNVFIRKWMPQSDVLAHPNVKLFITHGGLLGSTESLYHGKPMVGVPIYGDQRLNMARAEKAGYGTHIEYENLSEETISNAIRSVLDDPSFSSNAQLISERYRDKPMTPAQLAVYWIEYVVRHRGAPQLRSAILELSFIERNLIDVYSVMMLLVGTVLVSLCVALRKIMRFIGLLPKRIDKIKQQ

SEQ ID NO: 6420 - protein, 522 aa, Haemonchus contortus
MNWYILVNLLLVIESVVSYKILILAPKYGISHMNFMSKVADTLVDAGHNVTVYSPNILPHNGPMPTKARTVEADFDGLFLDVESAQRHVWNSDIASYVQLSKVVFKPLRVLVKALYSSDEFHAWIREQNFDIAVSEGFFALDCLLYMMGIRKFVVTVSTNPVEQVVNALGIPVTPSFVPVNNKGFSVPMTYMERALNLLEYVFVKAVIEYSLQPEFDTYFDEKFGKDVWSMQKQAEQTSYIFVNNDEAIDFPRVISHKWHYIGGLRRRMPKPLSPEWEKVYARAKRGVILMSFGTMARSTEMGEARRTAFVKAFQAFPDITFIWRYENLTDNFCNASNIILYDWLPQVDMLNDKRTLAFITHGGMGGVFESAYAGVPVITIPLFADQLRNARMMQYRGMGVVINKDDVTTDRLIAAIQEILQPRYSEAVRRLSEQLQNKPFTPEDILVRHIEHAIRFNVTASLNNASTHQSVIQYYMLDVIVPFLILVTIIILVICRIIFAAISLGLRLLQVKAGAMKIKQN

SEQ ID NO: 6421 - protein, 534 aa, Caenorhabditis elegans
MKFPIFLFLILVELCFSYKVLVFNPAFGASHANFLGKISDILIDAGNDVTMLIPIFVNGKKELVGSKKVKKIIRIDQDPRIAQIHKEGSTEEIMRKTIWKMDSAITSMFGFIGNFSKTAAYQTEYMFQQTELIEQLRKEKFDLAITESLFLGAFALFDEIGIRSVINADSTLYMGGMKGALGEPAAISYYPGLFSSIDDKMNFFGRVKNAVGYLFGLWFSVLKYDDEIVAFPKSYKGSRDWREHLSNVAFNFINSNQYIDYASPTLPKTVFVGGMQVNTKKSGKSTLSKEWNDVLSLRKTNVLVSFGSNAYSSDMPDEFKKSFLEVFASMPETTFIWKYEVANATLVDHLPNVKLTTWMPQNDILADDRLTLFITHGGLGSSVELAYQGKPAVVIPLMADQPRNAHMLTRHGGALQLDKTWLNNSEKLREAIQTVLNDVSYKHNAERLAKILEDQPHKPKDVVLKHCDFAVQFGPLDTLNSEGRLLNTFQYYSVDIVLAIFVILSVILFVVYLVIKLLFRFLGRLFSISKRKVD

SEQ ID NO: 6422 - protein, 274 aa, Necator americanus
MIDFPRVITSKFKYIGGLRMPKPKRLCQEWDSVFASAKRGIILMSFGTMARSTEMGIQRRDAFVRAFKAFPDITFIWRYENSSDYFTDASNIILYNWLPQVDMLNDERTLAFITHGGMGGVFESARAGVPSTVKVITIPLFADQLRNARMMEYRGIDKDDVTENRLITAIEEILKPRYVQAAKRLSEQLRNKPFSPEEVLIRYVDYAIRYNISETLTNIAPHQSFIEYYMLDIIVPFLVVSLLVAILTLRLVYSIISMILKLFPRVNTIKTKQQ

SEQ ID NO: 6423 - protein, 553 aa, Papilio machaon
MDDRLSLDVLCTMKLLVFLVSLVTLSVAVAAVAVEGQGHVPEAQSRGRVLLVFPVPGKSHSILGNSIADILIDDGFEVTYVTPFPSQSNRTGLTVADISSLLVADRDANHLDIANLFENPKPSHWVLTMGHMFARQALHHVALQELLNDDKVTFDLVIADWFYSGLLAPLAAVFDCPLVWYSSGDVSWQSLRYVHEASSAALAVDPQERRAPAAPLNTGDKLRQLLLQLYLTGWTHYYTSHIDAVVYREVYSAPLLLRGRRPPPYEPLVYNGSLLLVNCHPPLGNNLPLPGNVQYVGGHHLSTAPKPLPSDLQRLLDDSTHGVVYFNLGSNVRSRDLPEAMTRSLLAVLGQLRQTVLWKFEERLDHLPANVHLLDWAPQESILAHPNVLVFISHAGLLSVMEATQHGVPLLGLPIFGDQFVNIDKVVQRGCGLRVDFSDDLPARLQEALREILDNPRYQENAKQSSRMFRERLAGPRAALAHWARLVASTRGAPHLQPPARHMSTFVWLHLDILLVFGTIGWFLSKVVKVIRVHLKDSQKDSQATDNSIKKNN

SEQ ID NO: 6424 - protein, 432 aa, Nitrosococcus halophilus
MTHFGLLCPALTGHLNTLLPLGQALQKRGHRVTLVGLLDAEPPTRAAGLEFRPIGETERPAGAIAELTAQASTLSGRAALRYAVAVFQQDAALLLREAPAVIKAAGIDALLVDQFSRGGGTVADFLNLPFITLCSGVVLNREPSIPPFNTSWNYHPAWWAQLRNRLGYGLLSRVTQPLTEVVAEYRRTWNLPPLSHPNEAYSQLAQISQQPAELEFPRQQLPPWFHFTGPYHSSGSREPVPFPWEKLTGQPLIYASMGTVLGRFKGVFQQIAAACEGLDAQLVISLGGSVPPEALPALPGSPLVVGYAPQLELLQRAALTITHAGMNTTLESLSNGVPLVAIPIANDQPGVAARVAWTGAGVRVPLKRLRVPRLRQAIAQVLTHDSYRKHALRFQAAIQRAGGVDQAVEIILQAVSTGKPVLRETNAPGMGG

SEQ ID NO: 6425 - protein, 543 aa, Drosophila erecta
MTQNRSTWIGCSLGGLLVALLALQSMPQGTEGANILGVFTSYSPSHFIVHMSIMKTLAEKGHNVTVVSSVPPKVTHKSIKHIVIPMSAEDEKTISDGMSLMAKEKPSIWNTMISIFSSLALIIDKQVDVLEDPRFQELYLNKGNKFDVVFVGFFFNTYQVALGARFNCPVIVSWSGPPMMMVNEVLGNPELSSVPQMHISTSHGQPMNFQQRMQNFVGTLGFNVLSFFLEHKYNKFYERLWGNDKSIPTFEQAKKNVSLAFFNSHGISEGPIRPNVPAVIEIGGIQVKRQADPLPEDIKEFLEKGKHGAILFSLGSNLKGEHIQPEVVQTIFKGLSSLKQQVIWKWEDPKKTPGKAANILYKKWLPQDDILAHPKIKLFITHAGKGGVAEAQYHGVPMLALPVFADQPGNADKLVASGYGLQLPLATLDVDEFKASIKEVIDNPKYANTLKSFSQLYRDRPMSPHESVVYWTEYVLRHHGAAHMQSPLVRMNFIASHNLDLYIIAALVLYIVFLINKIVWKFVWRKLFGKSNKASQKKKVKKQ

SEQ ID NO: 6426 - protein, 529 aa, Drosophila persimilis
MKSLSYKTSFAALLLHCLLSCVSAYNYLVVLHTAARSHYHVGSALAKGLAAAGHQVTIVSPFELKKPIKNIRDVPVPSILAAMQGNIANLLTSSKQPIIKQIINFHHMGLNITEFLLSDPVVVELINSNQTYDAVISEVFLNEAHFGLAEHFNAPLIGLGTFGAISWNTDLVGTPSPPSYVPHALLKFSDHMSLVERVANLAFVSYEYLFLNFYYLPHQEAIYKKHFPNNKQDFYEMRKNTALVLLNQHVSLSFPRPYSPNMIEVGGMHINRKRQPLPKDIEEFIEGAKHGVIYFSMGSNLKSKDLPLEKRQALLDTFSQLKQRVLWKFEDTELPGKPKNVFISDWFPQDDILAHENVIAFITHGGLLSTTESIYHRKPFVGIPIFGDQFLNMARAEQNGYGVTVNYEELTAPKLLAAIERLIKDPEASKKVQDMSDRYRDQQQTPLERAIFWVEHVTRHKGAKYLRSASQDLNFIQYHSLDAIVILYGGIIFVFYCLFALIRFLLRSLQECCAGRAEARSKKPKAKQN

SEQ ID NO: 6427 - protein, 531 aa, Drosophila pseudoobscura
MVQNVGRVFLLAAVAVAFIGGSQGANILGLFPSLSPSHLIIQMSAAKALAEQGHNVTVVTVLKPAVTHKDINVIQVPLTKEEAASMSAIIEKMSKNDNKNMLTTMFRMIGQMGFMFDKMVDALKDPRVRDLYENKDNKFDLVLSGFFMNEYQMGFAKKVNAPLIVVATMPPNLLLNFLVGNPEEIAYVPSINDSLERGQGMSFKQRISGFIMSLGFRVFGKVLEYRNKNSYKELFGDDPNMPEYSEMMKNVSLVFFASHAISEGPIRPNVPGVIEIGGIQVKDTPAPLPKNMAEFLGNATDGAILLSLGSNVQGSHLSPDTVQKMFNVLSKLKQRVIWKWEDLDKTPGKSDNILYSKWLPQDDILAHPKIKLFINHAGKGGITEAQYHGKPMLSLPVFGDQPANADAMVKKGFGLTQSLLTLEEQPFREGIEEILSNPKYSQAVSTFSKLYRDRPLTARETVIYWSEYVIRHHGAAHLQSPLVHMSFVAANNLDVYALLAIILVVFLLLTKAVIKFILRKLSSKPKKVKKQ

SEQ ID NO: 6428 - protein, 1051 aa, Bicyclus anynana
MSTGLKISVVYFITFNLYLTSGARILGVFPTPSISHQVVFRPLVQELVKRGHEVTVITTDPAFKPGQAPNNLTEIDVHDLSYKIWTNALQEKKTGNEDDDLYSQIQLILISVSKVFEAQIATDEVQKIITKKKGQFDLLILEAFVKPTLAFTHIFNIPTIQISSFGGLQYNFEVIGAPIHPLLYPTVLSQRVYNLSSFEKLQQLYKLHKINRFFDLAEQDDDKLVKKIFGPDIPSLRNLANNVHMLFLNNHPIWSDNQPVPPSVVYIGGIHNNQQKKLPKDLNDLLDKSKHGVIYFSLGTNVRPSVMPPKKVQMMIKVFSELPYDVLWKWDLDSMPGKSDNINLYKWLPQSDLLRHPKIKLFITQGGLQSTDEAIDAGVPLVGIPLFADQWFNTEKYPYHKIGVKLDLPSLTEEIFRDAIVTVISDKSYRENILRMRNIVRDEPQTPLERAVWWTEYVLRHGGAKHLRAAGANISWTQYLEIQLIVIVLPVLLFVILLFLWVLKFLKHFVREIIGSSIKINGARILGVFPTPSISHQVVFRPLVQELVKRGHEVTVITTDPAFKPGQAPTNLTEIDVHDLSYKIWINALEEMKTGVEDDDVYSQIQVVITSMSKVFEAQIATDEVQKIITKKKGQFDLLLLEAFIKPTIAFTHVFNVPTIQISSFGGLQYNFEAVGAPLHPLLYPTIVSQRINNLSSFEKLQQLYKLLKINRFYDLAEQDDDKLLKKIFGPDIPSLRDLTDNVHMLFLNFHPMWSNNQPVPPSVVCIRGIHNDKQKELPKSRSFPFTAIGVSQLFVIAASIIIWYYLQDLNDLLNKSKHGVIYFSFGTNVRPSIMPQKKVQMMIKVFSELPYDVIWKWDLDSMPGKSDNIKLYKWLPQSDLLRHPKIKLFITQGGLQSTDEAIDAGVPLIGIPLLGDQWYNTEKYQYHKIGVKLDMPSLTEDIFRDAIVTVISDRSYRENIIRLRNIFRDEPQTPLERAVWWTEYVLRHGGAKHLRAAGANISWTQYLEIQLIVIVLSVLLFVILLFLWILKFLKHFVREIIGSMIKIKTN

SEQ ID NO: 6429 - protein, 461 aa, Papilio machaon
MNVEDARDIKTAAKGCALCQSVDPVHPKDQVPENLTEIDVHDISYSRWNKAILEIEDGSRDVSKQVEAMSDINMEIFEEQVKSKSVQKLLSYKDDYFDLILVESLLAFSLGFSHVFKAPVILVSSFGGVWDNYDAMGAPTHPLLYPSMVRDRLNNITMWEKIIQLKKEYKMRNLDRNHENMNKFLKKVFGADTPPVQKLFDNVAMLFLNQHPIWDSNRPVPPGVIYMGGLHQNPLKELPKDIKLHLDSSTNGVIYFSLGTNVKPSYVPPEKLQAIINVFSRLPYDVLLKWDNNELPIRSNNIKIFKWLPQSDLLRHPKVKLFITQGGLQSTDEAITAGVPLIGIPLLADQWYNVEKYVQHKIGVRIDIDSLTEEMFENSIHTVINDTSYRENIVRLRSIMQDQPQRPLERAVWWTEHVLRHGGALVDASNNIICCNNGPRPVEYHDHIENRRQVKVIPRFS

SEQ ID NO: 6430 - protein, 520 aa, Anopheles sinensis
MVRCIAAFYLLVTSVRYLQCANILCLTPVPSPSHHIWNRVWIEALAARGHNLTVVSADVEKATHPNVTYIHLEHAYSDLHDDLDLFQMAGNSALLGIKDLYTWGIAMCKGVLRSEGLRTIRSYPDDFPFDLVIADITCGPCLFPLIHKFGYPPLIAVTAFNNPQFTTDFVGGHKHYAYVPFFTMNYDSDMGFLQRFHNWILHNVDHIYRQNVFLPEIERMVQTHYRYEGMRSLSEIEHGTFLLLANYHYSVDFAESIPPAHIPVGGLQIRPPKALPDDLAQFLASGREGSVLFSLGTNVLSADLGEDRIQLFLDAFRQLPQYNFLWKFEATPNFSVPPNVLMRKFLPQNDILAHPNLRAFITHGGMLSTHEATWHGVPMVGIPFICDQYRNLHKSVSAGVAIRLAHDSLSTAAIKGAIMEVLHTPSYRENMRQRSALLRDQPEHPLERAVWWIEWALRHPNVNAIQSPTKRLSFWQYELYDVKLTLLLVTVIGAYLLKHIIVSYVMQSKVVSQPIGKKSD

SEQ ID NO: 6431 - protein, 562 aa, Drosophila simulans
  MOD_RES (109)..(109): Any amino acid
MIVYILTYLYKSMLSTVSIISVWQRRAQFGSVWLLVARLIFITMRIFTLILGLLCTLGYSSGYNYLMVLNSAGSSHFNVGHALAKGLVKAGHTITVVSVFPQKKPIPGXTDVNVPNVVKVMGGDIGSLWASIQKPFTQNLIDLYQMGFHITRGLFEDANFQDFLKSNQSFDAIICETFYNDAHYGLAEHFNAPLIGLGTGGGLTFITDLVGSPAPASFVPHVMLPFNDHMSLYERLLNVAFLGYERLLLDYYFLPTQEKFYKEFFPGNKRCFYEMRRNVSLVLFNQHVSLSFPRPHSPNMIEVGGMHIDGKLNPLPEKIERFINESEHGAIYFSMGSNLKTKDLPPAKVQEILKALGGLKQRVLWKFELDNLPNKPENVYISDWFPQTDILAHPKIIAFVTHGGMLSTTESIYHGKPVVGLPIFSDQFFNMAHAEQAGYGIMLDFKTLKADDFRQAIERITSKPSYTKVVQGMSFRYRDQQNTPMEKAIYWVEHVTRHQGAAYLKSAAQRLNWWQYHNVDVLLIIFVVMVLLLIVLPITIYKLLKKILFKGERTQSTKVKRN

SEQ ID NO: 6432 - protein, 527 aa, Eufriesea mexicana
MKHSVTGLFFVLCVLCVAKQTECYRILAVVATPSYSHQIPYWSLWLELHERGHEIVLVTPNPIPGIESPNFTQIDISKGYGVMKDINFVQLRLEGATWHDFVLEHLLDINEDSVRHVFEAPQMKKLYAPNSNEKFDIFLTEFLYMPSLYAFAHRFNVPMIALSSLGMITLNEYILGGLVLPSHEYTWEMQANTGPNLPFTKRLTNFVAMWRLTYVLYRDILPLHQKLAENYLGPLPPLVDIMKNVSALFLDQSDVLTPARPKLANIITFTSFHINENPDPLPKDLQEFVDGADAGFIYFSLGSNARSADLPMELQRMFCDVFAKLPYRVVWKFEKDLVGKPSNVYTGKWFTQQTILAHPKIKLFITQGGVQSTEETINFGVPAIVIPVLADQDYQAARMDALGIGKRLELATITKDEFENAVQEMITNKEYKKRMIRIQNLIRDTPYDLVKNLAWWTEYVIRSDGAPHLRSSLVMQPWYQYCDMDIVVFLTIVIFLIVSNTLNLIVKFIMYSYKRWQLSIHQKQKIS

SEQ ID NO: 6433 - protein, 569 aa, Poecilia latipinna
MQPALPTEFRHTHTHSDSESQPSTTGSTGSHTKLSLQRSEEAMRSRVWCPLTGLLAWLCCLRLGPVQGEKVLVMPVDGSHWLSMKILVKELGRRGHEVTVLVPESSLLIQSSDSYKTEVYKVPYTQAELDKNFNKLREGLFDQQPGLADLFVNVNRLVKFTSLQSVGCEALLDNEPLMTKLGREGFDMVLTDPFLPCGSILARIFSIPAVYFLRGLPCDLDIKANKCPSPVSYVPKFFSGNTDRMTFPERVKNMMMSFMESYLCTVLYQHFDELVSKRIQDGMSYKELISEGAIWLLRYDFVFDWPKPLMPNMVLIGGINCAKTAPLPAELKEFVDASGDDGFIVFTLGSMVSDMPEAKAKQFFDAFRQIPQRVIWRYTGEIPKDVPKNVKLMKWLPQNDLLAHPKAKVFMTHGGSHGVYEGICNGVPMLMFPLFGDQRDNVHRMVSRGVAVKLNIFDMTTETLVDGLKKVIYDKGYKERMVELSQIHLDRPVEPLDLAVFWSEFVMRHKGASHLRVAAHDLNWFQYHSLDVIGFLLFVFVAVLWVTLKSCLFCTRKCCGKRGAKKKSE

SEQ ID NO: 6434 - protein, 519 aa, Spodoptera litura
MNGCTVLILFFALTTTGMASSARILAVFPTPAYSHHSVFKVYVRALVERGHEVVVIKSTDKVDYKSDHRPYRLSNNNNVTEIDVSLSQDYFKKLMKQAQVFRKRGLVADSSTVTADNYMGMVRMISDQFNLPAVKKLIKEKPKFDVIITEAFIDYSLVFSHLFDDAPVIQISSGYAVAENFETMGAVSRHPVYYPNMWRDKFSNLNVWDLINELYVELKLYNEFNKLADEQNQLLKQQFGADTPTIQELRNRVQLLFVNTHPVFDNNRPVPPSVQYLGSLHLTDKHPKPLFGTVREVLDNATNGAVYVSFGSGISTDEMESEFIEMLLRTFETLPYTILWKYDGYLSRMPDNVFVQSWFEQYDLLHHPNLKAFVTQGGVQSTDEAIDALVPMVGMPMMGDQAFNTNKYAELGIGRVVDTVTVNTLEMIDAITDVAENPRYRKKMTELRHLIRHQAIAPIHKAIWYTEHVIDSSRQGETLLKTKASNVNYSDYIMSYIFVPLASFTVMNHLRQLLRINLV

SEQ ID NO: 6435 - protein, 521 aa, Tribolium castaneum
MMKLSTSLLFLFLGLICGTKSARILGIYPLPGRSHYRLGSALFRELAERGHDVTVISPFGEKDPPKNGTYRDIVLDGIFEGDEKHKGKQWNMFKREGLNPFVGAYVVATMASKFMGVILNHTKVQELLHSDEKFDVVITDNFLSDAFKAFAMHFDAPLIVINPVGPNFWINPLVGNPSPPSYIPDILLNYYHPMTFCERMVNTLIYGFNFLLYNWMVFPRHNEYVKQFIPRGGDLNDILYNTSLVLLNSHPSLNQPVPLVPNMIEIGGFHMKPAKKLPDDLQDFLDKSEEGVVYFSMGSNLQSVLWPIEKREVFLKTFSKLKMKVLWKWEDDELPGKPPNVKISKWVPQMDVLAHPNLKLFITHGGFVSSVETAYHGKPMLAIPIYGDQRNNANFAYKNGFGRYITYGNLTEENLLATINEMLDNPKYSENAKIRSQIFHDRQVHPMDTAVYWVEYVIRHRGAPHLQVAALDLPWYKYLLVDVIFVVVMALSSLIFVTWFVLKKVCKKICAKKNTQKVKTN

SEQ ID NO: 6436 - protein, 413 aa, Loxodonta africana
MSTKWISALLLIQLSCYVSSGTCGKVLVWPTEYSHWINIKTILDELIQRGHEVTVLTSSASILIDPNTPSAIKFEVYPTSLTKDDFEFLFMKWIRTWTYDLPKDNFWFQSFKEKKWDQFYSEVLGRPTTLYETMGKAEIWLIRTYWDFEFPRPLLPHFDFVGGLHCKPADPLPKEIEEFVQSSGKHGVVVFTLGSMVSNTTEERAHMIASALAQIPQKVLWRFDGKKPDTLGPNTRLYKWIPQNDLLGHPKTKAFITHGGTNGIYEAIYHGVPMVGIPLFADQPDNIARVKAKGAAVSLDMNTMTSADLLNALKTVINDPSYKENAVRLSAIHHDQPVKPLDRAIFWVEFVMRHKGAKHLRPASLSLTWYQYHSLDVIGFLLACVAIATFLVIRCCLFGYQMFYKAGKKKKRE

SEQ ID NO: 6437 - protein, 407 aa, Oesophagostomum dentatum
LYQTLFIVELDPDFKYSTGTQFVNHIIRYSSPYHNSADWRSLTFKRNEVFNSILGFNFIDLIKVQMYAYRVCKGILEDSGLIRLMHDSKFDLGVFEMFHHCPAGVMELAGIPKTMLVSAIGIGYHHYRLLGMERQSSFVPASFTMCGGRMTFLERLYNVFINGCGFVFSNIFEHFEQSLFERRFPGFKVLHDLVKDKTDFMLMNSNEFTESTRPTLRSIQYVGGATIPEPEPLDEDFDWILSRGSKGAILFSLGSLVKPSNMPLAFREGAFIFIDTFVDAFRAFPDYSVLWKDDIEMNFTYPNIHFREWVPQVDLLADGRVKLFITHCGMNSMQESLLFGVPMVTIPLFADQDSNAAVAAERGYSVNLNKLSITTEKIIDAISAVLGKPGEERYRITSYFLRLIQYV

SEQ ID NO: 6438 - protein, 527 aa, Neodiprion lecontei
MSRHFITATLIAIVGVLHPGCAARILGIFPFPSFSHQIVFRGLTLALRERGHELVVVTPNPINDPTLKNYTEIDVSFMYEHWRLDWISVAKKYTYYDFIMQSTPTFSTITEGILSHPKLQKLYEPESRETFDLLLFEALRWPAVLLFAKRYEIPAIGITSLSPTNQVHYQFGSPIMPSQPPYWNSRGIGFEKLTFWQRLCNFVQTWRFLFYYRTTYMQTQQEIARKYFGNDIPDLRDLEKNVSLVFANQQAPITFVRPSVPKIIDIGGFHISDRLEPLSKDLRMILDEATQGFVYMSLGTNTKSASLSNEMRGEFIAAFSEMPYTVIWKYEDDLLPGQPDNVHTVKWIPQQSVLAHPNIKVFIYQGGLQSTEEAISHAVPVIGLPVLGDQTSNIDKIVSLGVGKKLDISSVDRFDLVEAIQSIVRDDSYKRSMLKLRDLVRDKPYDSLENAVWWTEYVIRHKGAPHLHSTTADDPWYQRQDIDLIFIIYTAILTASTIALRVLYKLLAYSIYFLKHQHLIRKKEKVY

SEQ ID NO: 6439 - protein, 398 aa, Unknown
  Description of Unknown: Actinobacteria bacterium OK006 sequence
MGRFLFVVPPLVGHVNPAVGTAAALAGRGHEVAWAGHPELVRALVGSDAAVFPCALPEDGLSRPADLKGPAAFQFLWESFLVPLADAMAPGVRAAIEAYDPDVVVCDQQAVAGALISESLGRVWVTSATTSAELVDPLAGMPKVAAWLDGLLARLRNRICDGAGSADPRFSPHGVLAYTTRALLGPAELPDRVWLVGPSVADRPASGDDFPWDWLDASPLPTVLVSLGTANNDAGARFLNATARALGGLAGRVRAVLVDPGGLVEGPVPDNILLRPHVPQLALLPRLDAVVCHAGHNTVCEALWHGVPLVVAPIRDDQPIVAGQVVDAGAGVRLRFGRADAARIRAAVETVLDPAGGHRKAAEAVGESFRAAGGSASAAARLVALPAGSAVTRARGGA

SEQ ID NO: 6440 - protein, 537 aa, Monomorium pharaonis
MMRLTTSISPIITILWILITSNFAYGKKLLIITPTPSYSHQIVFRAICLALNKRGHDIVTLTPNVLNDTSLTNYTEIDFGFEYEKINDTDISPSRWNLTQLAGLKTRLRTLGHNIAEDVLSHPDLVKYYANGTDVQFDAVIAEMIMTPAIYILAHRFNAPLIGIMSMDLQNCHRFILGSPVLPSHPSNWELEDFTGLNLPFWKRLMNFVNTWWNIYSWFTFANKQQKIAEKYFGNDIPHIIDVSKNMSLILINQEPSLAYARPEIPNIVHFSGLHIAKTPPLLPQDLKEFLDSAINGFIYMSLGSNTKSKLLPNKILKIFRNTFVNLPYKVLWKFENDSFDIPSNVMISKWVPQQSVLAHPNIKLFIYQGGLQSTEEAVHYAVPLVGIPFVFDQVYQVMKMVSLGVARYLNIVQLTTSELHDTVLEVADDKRYKDRMLALRALTKDKPYDSLENVIWWIEYVMRHNGAPHLRFNGADTVWYQQFDLDVTVFLTITLFLVLCAILYTIGWISKQLYTYYDIGNRCILRKWIRNKVKLA

SEQ ID NO: 6441 - protein, 511 aa, Lepisosteus oculatus
MAREHCIGVAGFFVFLSLSALGPVEGGKLLVMPVDGSHWLSMQLLVKELAHRGHEVVVLVPEASIFIKGSDDYRSEHFPVPHSKEQLQVNGVFVHESNLAGILLGIEKLLNFTNMQVKGCESLLYNQPLMQRLREGGYDLMLTDPFLPCGAIIAETLSLPTVFFLSGIPCGLEMAAAQCPSPPSFVPQLFTENTDRMTFPQRVKNFMMLLVQSFLCKNLYASFDEVASRFLKTDVTYKELIGRGSIWLLKYDFTLEFPRPLMPNMALIGGINCAKQSALPAVSLVSHTAISLIPQCQQISSEFIINVYGFLSFQVLWRYTGPIPDNLPDNIKIMKWLPQNDLLGHPKARAFITHGGTHGIYEGICNGVPMVMLPLFGDQSDNAHRMEARGVGVVLSINQITTEVLLEAVNKVINNKSYKEKMTKLSALHRDRPVEPMDLAVFWTEFVMRHKGAQHLRPAAHELNWIQYHSLDVIGLLITIVVVLVIVTVRSCAFCFRKCCCKKPSLKNKSD

SEQ ID NO: 6442 - protein, 522 aa, Drosophila willistoni
MDHGGMAKILVVALILTLIGGSQSANILGIFTSTSPSHLIVHMSVAKVLAENGHNLTIITVLKPPVKHKDFNIIQVPLEKDQENQLNTAMASMAGKNFNMIRMLIDMLGQMRIVFDVGATALKDPRVVDLYENKDNKFDLAIVGHLLTEYQLGLAHKLKVPVILSATMPPSDSVGGIIGNPKDNTITGKGLKERFRTLALSNAFRIFNWFQDSRNIEHYKNLYGNDPAMPKYEDLRKNISLIFCNSHGLSEGPIRANLPGIVEIGGIQVKDKPAELPQNLKEFIGNATHGAILLSLGSNLKGDFIKPNTVKDMFKVLSQLKERVVWKWENLENTPGKSDNILYSKWLPQDDVLAHPKIKLFITHAGKGGISEAQYHGKPMLALPVLADQPQNAIAMAKAGFGLSLPLLELEEEKFRENLLEVLNNPKYGQSIKQFSQLYRDRPLTARQTVLYWVNYVLRHRGAAHLQSPVVHMGFLQANNLDIYFILLTLFVISIWLFKISITFIIRKVLKKKTVSEKVKNQ

SEQ ID NO: 6443 - protein, 518 aa, Culex tarsalis
MKSAWLLMFGGLLAISTLSETESAKILGVFPTTARSHYIVAASLMKALAKKGHEVTVISPFPQKKPIENFRDITTTKIWDAVKPLTSNMLNFAQMGALDSIKKTYSFGHTVTNETLTDPAVQKLINSNEKFDLIVLEIFMNDAMLGFIHHFNAPCVAVSTFGASKWTTDLVGTPSPPSYVPNPFLSFTDHMNFKERTLNTVMSMVEILVENIMDKPTQLEMYESAFPDPKPDLYELKKRAVSFVLLNTHFSIGYPRPYVTNMVEVGGMHINRVANALPDKIQRVMDNATEGVIYFSMGSNIQGKDMPPEKRDAFLKVFSELKQTVLWKWEDENLPNKPKNVIIQSWWPQDDILAHPNVRLFITHGGLLSSTESLYHGVPIIGIPVFGDQHLNMAKAKRGGYGLAVAYQEITYERLTNAIQTILKDPKYSDNAKAISQRYRDQPQTPLELAVFWVEYVIRHKGAPHIRTASMDLGFVQYHNLDVLAMLLGVPALILYLLGKLICGKKKSKKTQSSKKTN

SEQ ID NO: 6444 - protein, 530 aa, Carlito syrichta
MSMKWTSVLLLIQMSCYFRSGGCGKVLVWPAEYSHWLNMKAILNELVQRGHEVTVLTSSASILVDPSISSSIKFEVYPTSLTKDDFENVFGKLVDTWMYDLPKYSFLTYFSKVQEILWKYFECIRNLCKDIVLNKKLMDKLQTSKFDVILADPAGLGGELLAEVLKIPFVYSLRFSPGYIFEKYSKGFLFPPSYVPVVLSELSDQMTFTERIQNMLYMLYFDFCFQILDTKKWDQFYSEILGRPTTFSETMGKAEMWLIRTYWDFEFPRPFLPNVDFVGGLHCKPAKDLPKEMEDFVQSSGENGVVVFSLGSMVSDLTEERVNVIASALAQIPQKVLWKFNGKKPHTLGPNTRLYKWIPQNDLLGHPKTKAFITHGGTNGIYEAIYHGIPMVGIPLFVDQPDNIARIVTKGVALRVDFNTMSSTDLLNALKTVINDPIYKENAVKLSRIHHDQLVKPLDRAVFWIEFVMRHKGAKHLRAAVHDLTWFQYHSLDVIGFLLACVATVIFTITKCCLFCFQKFAKTRKKGKRE

SEQ ID NO: 6445 - protein, 530 aa, Pteropus alecto
MVSEKCILVVLLLQLCGVGCGFCGKVLVWPCDMSHWLNIKIILEELTERGHEVTVLTPSNTWLIDYKKPSQLNFEVLLPGYDKELMKKTNDKFVDLIINVLPKVTLWQSMIKLKEFFIEITEYLKILCESVVYNQTLVKKLQETNYDVMIIDPVMPCGELVAELLEVPFVLTLRISLGGIKEKHCGKIPSPPSYVPVPMMGLTDRMTFLERVKNTIFSVFFDFWIQDYDTHFWDQFYSEVLGRPTTLCETLGKAEIWLIRTYWDFEFPRPYLPNFKFVGGLHCKPAKPLPKKMEEFVQSSGEDGVVVFSLGSIIQNLTEDKANLFASAFAQIPQKVLWRYKGKKPATLGANTRLYDWIPQNDLLGHPKTKAFLTHGGMNGIYEAIYHGVPVVGVSIFGDQHDNIAHMKTKGAAMEVNMNTMTSADLLRALRTVINDPSYKENVMKLSKIHHDQPIKPLDRAVFWIEFVMRHKGAKHLRPAVHDLTWIQYHSLDVIGFLMACVAFAVFLVTKCCLFSYQKFGKTGKKEKRK

SEQ ID NO: 6446 - protein, 531 aa, Mythimna unipuncta
MAGRVLIIFLATIMMMMSMMVPSSEAARILAIFPTPAYSHHSVYKIYIQALAVRGHDVVVIKSTDRISYTSRDDNDDSVEDNFVVAKKPYNITEIDATLTERDYKRLFRQASVFRKRGLVADSSSVTARNYVSLVRMISDQFDLPVVKEFIARQQEPFDLIIAEAFIDYSLVFSHLFNDAPVVQISSGYAVAENFETMGAVSRHPVYYPNMWRDKFSNLNVWDTIGEIYNELRLQNEFSRLTDEQNELLKRQFGVSTPTIQELRSRVQLLLVNVHAVFDNNRPVPPNVQYLGGLHLAHKRPKPLFGMVREFLDNATAGAIYVSFGSGIDTDAIDGEFVEMLLRTFEALPFAVLWKYDGRLDRMPRNVFVQSWFEQYDLLHHDNVRAFVTQGGVQSTDEAIEALVPMVGMPMMGDQSFNTNKYFELGIGRVVDTVNVNARELVDAITDVAMNQKYRKRLVELRHLIRNQAMSPLHKAIWYTEHVIKNQHHTMLKTKAANVNYSDYIMVNIFVPFAVFSVMNHLRQLLRINLV

SEQ ID NO: 6447 - protein, 519 aa, Caenorhabditis briggsae
YYSKMRVLLYCFAVILLECFIVGSAKILVYCPSISKSHVLFIPSYSSALNNFDGAKHANVWRLHNVTHAYDAKLDSLANVMEDSHIGFLDRLTYDVDFWMEMCEDLARQHHRMQHLIDYGFDLALFNDIDPCNSAIISLQVSQHLQDGATLQRGHHGQDCMGPRQDDDYGRKLITDRISGLPMLPSYVPSIEENPNHDRMNFLERMSNAYKYFQSLVVHYLQERRVLHLFRNYISPDFPSIMEIIRNVSVVFVNTDEMFDITRSYSQKFVFVGMLEAEKSKNETLPEKLNEYFSKGKLGSVFVSFGTVTPFRVLPERIQLSVFNAIQKLPDYHFVVKTVIDDTTTAELFAGVPNVDLVNWVPQTAILNHPNLKMFVSHGGMNSVLETMHHGIPMVIMPVFTDQFRNGKNVERRGAGKMVLRQTVANETFYETMNEVLTDERYTKGAKRTSQLMKNRPFTPEERVSKWVDFIMTHDTSEQFHLESNSFTFIEHNQLDIFFVFILLPLITFFVYRRFLKRK

SEQ ID NO: 6448 - protein, 537 aa, Anopheles gambiae
MWGYKGTVPVSVMLLVLAATRMPTPACGARVLAIFPSPARSHQIVYRAFMKGLIERGHELTIMTTDPFAADHPNVTVIDWSYAYRIVEENLDVVDMKQRNMNFYQIAVELRRTTRLFLEAQLAHPDVQALIHSRDAHFDVVIVEYYQFTPMYAFAELFQAPMIGISSIDSMGMCHEAIGNVMNVVAHPEMNHKFTRDLTFLQRVEAVISNLMIQYHILPTDFAVFDRMIEQNFGSNMTRSWELMRRIDFLMVNAEPTLGYVRPLVPNAIQLGFMHIQPPKALPADLQNYLDRSVHGVVYFSLGTLIRSDSLNQHNLNLFLEVFKSLKYDVLWKHDGDLDLNGTTNIRMERWLPQQDLLAHPKVRVFVMQGGQQSMEEAIDRHVPLVVIPFNFDQFGNADKVTERGIGRSVWMERLTVESLRECILDVASNKRYKRNVARLGRLVRDQPMRPVEKAVWWTEYVIRHGGADHYRYPAAHMSFLVYHYYDVVGAAVLLAIALLAALHYLAGRLFRRFVGAIMSSFDRPHAVGKMLKEKAL

SEQ ID NO: 6449 - protein, 527 aa, Neodiprion lecontei
MTQVRFIISAIFVSVLAFEGGNGARILGVFPTTSISHQIVFRGLTLALNKRGHELVIATPNPVNDPNLKNYTEIDLSELYTIKKQRNLVDSRFMDWLSMLQGAAGNMYTYMNVILGHPEMRKLYALNNNEKFDVLIVEPLYWPAILALAPRFNVPIIGVSSLGLSISNHYSIGNPILPSHPSTWEFQNNIDSASTFWQRLNNFIRMCRYLYFYRMVYMPAQEAIAQKYLGDNIPSLADIEKNISLFFVNQQGPISFARPNVPGVVEIGGFHIVKCTERLPKDLQEILDDATQGFIYMSLGSNVESKMLSNETRAEFVAAFSALPYKVIWKFEDNVFPNKPDNVLILKWTPQQAILAHSNLKVFIYQGGLQSTEEAIHHGVPLIGLPVFADQDMQVDKMVSLGVAKRLEITRITRQSLLEAIHAIALDSSYKQKMLTLRSLLEEKPHDPLENAIWWTEYVIRNRGAPHLHSSSADEPWYQRQDMDIIAFISASSSISIFLALVILYRLLVKLRHGCSLQFLDAKKKMH

SEQ ID NO: 6450 - protein, 513 aa, Strigamia maritima
MKFLLLFFLINAIHGYKILLLMPSASKSHTHVTKPIISELAKRGHHITVVSSYTFPKPIQNVREIVPKPMIEDFSMFAKQVFAAAGTHVIPVFLSYKFLLGPTCENYLTNPEVKELLKQGKQFDLVMVSQILNDCALATAPLLGKNIMYFSASNLVPWLPTSVPQPRSYVPSSLSPYGSKMTFFQRLDNVVSWFGMRLIMDYIFIPHVQGIIAKHLPENPSVMEARQMVSFAMTNADPVITSPRPSVPNVVNVGGMHCKKPNPVPKEFEDFIQSSGENGFILFCLGSNVDSKDIPDEVKERIVNALGRLKQHVIWKHEKELDNCPKNVKITKWLPQQDILGHPKIRLFITHGGMLSLQESVYNAVPVVAVPLFAEQPGNVARIEEIGIGVKLLPQNISETSLYEAVTKVLDDKRYAENVKKYSVVFHDFIENQVEKAAYWVEYVIRHDGAHHLRNQGEDMNYIQYFLLDVIVFLLAILITMSWGSVKLCKIATRKFCSCKKAKIEKSKEKKEQ

SEQ ID NO: 6451 - protein, 542 aa, Pogonomyrmex barbatus
MKLIISISPIITILWILVMSNLVCSKRLLIITPVPSYSHQIVLQTINLALNKRGHEIVTLTPNILSNPNITNYTEIHFHRNKLNSFEYEKIANIDISQVRWNLRLLAELKIRAQLLGHDIANNVLSHPDLMKYYAKGTNAKFDAVITEMFTPATYMLAHRFNAPLIGILTLGLQNYHRFNLGSPVLSSHSSNWELKNHTGLNLSFWKRLENFINTWWDIYSWYNDFIYNQQKIAEKYFGQDIPYITDVAKNMSLILINQEPSFAYARPEIPNVIHFSGIHIAKTPPLLPKDLKKFLDEATNGFIYISLGSIRKSQLLPPKILEIFVNTFANLKYKVLWKFENDNFDVPSNVFTSKWVPQQGVLAHPNIKLFIYQGGLQSTEEAVHYAVPLIGIPFLFDQVCHVMKMVSLGVARYLDIVQLTTSELHDAILEVIDDKGYKDKMLELRALTKDKPYDSLENIIWWIEFVMRHNGAPHLRFNRVDTAWYQQFDFDIIVFLTITSFSVLCVLLIIIGWVSKKVYTYYDIGNRCPLRKWIRNKMKTA

SEQ ID NO: 6452 - protein, 363 aa, Capitella teleta
VALTKNEDSLIRLESMGFDLVVVDGYFMTKHKYLIAHRLKLPIVTLTDTLEPWVTRVPWLPSFVTLNIVPFSDRLTFLERVHNLFLFLAMYSRPLSPQIPRDLLDTYGVISVDDVIKTTQLWITTSDVVLDYPKPEMPNMLACGGMATKPARPLTDPWTRIVAEAQNGIVLVSLGSIASTFPTEISRKLLKSFSQLKRTVIWRFNNEDDLKVPSNVFVSEWIPQNDLLAQPKVKVFITHCGNNGQFEAVYHAVPMVAMPIFGDQFHNAKRMVHKQYGLEVMMQCFEPRDLVNATEEVIHNPLYSESIAKASNIFHDRPETPAERAASGVDVILKYGGKHLRSSAVDMPMYQFIMLDVLVFACV

SEQ ID NO: 6453 - protein, 690 aa, Aethina tumida
MLRLLLVITTISQVFSARILGLFPCPSISHQVTFQPIWKELSLRGHSVTIISPNVIKEPGLTNLTELDMGFTYDILSKPENNFGKIMRKDNHPIYNIHYALYTVELAITMMLESPDVQNLLKDDSEQFDLIMYEAVHPLAAIFSAKYRVPTIGIQSMPGFTATHDMVGNPTNPVTTTDPMLPFGVNKSFPERIKSVLYQMILRFYWNWYLLPRVDTIARKYLNNNIPYMGDVEKNVSLLLLNTNVVMNYPRPNVPNVVEIGQMHIKKKKPLPKNLKAFLDKSKTGVVYFSLGSNVKSANESKDFVYKVKAALGSLPYDVVWKWETDTMESHPNIRVFVTQGGLQSIEESISNGVPMVILPIIADQPFNAKRMENLRIAKVLEIETMTRDQLHEAIVEVAQTKEYKDNVLKYQKLILDQPNTGIQSMPGFISTHDMVGNPTNPVTTTDSLLPFDVNKSFPERIKSVLYQMIFRLYWNWYLLPRIDTIARKYTSDNIPYMGDVQKNVSLLLLNTNVVMNYPRPNVPSVVEIGQMHIKSKKPLPKKVKAFLDKSKKGVIYFSWGSNVRSANESEQFVNNVKAALGSLTYNVIWKWETDSMENKPDNILLQKWLPQQDLLGHPHIRVFVTQGGLQSIEESITNGVPMVVLPIIADQPFNAKRMKNLGIAKVLEIETMTRDQLQEAIIEVAQTKK

SEQ ID NO: 6454 - protein, 504 aa, Strigamia maritima
MKLILPFIISFNIALALGSEILYLMPVATKSHRNVFDPLIFELAKRNHHITIVSPYASPNFEPHQNVREIRLAYNIDSQMFTQDLFSNFETRSLISGFLPLKYVLAPCCESYLQNPQVKQILKQRKHFDLVIVSNVYNDCALATAPLFGSIIIMQSATSLIPWTYSSIPQPPSFIPLNVISMQSKMNLIQRLNNAVSWIVVQIIMRYDYGSYIQGTIEKNLAENPILSEAEKKVSLILTNADPVLTSPRPSVPTIQDVGGMQCKKAKPVPKELEEFIQTAGNDGFIMFSLGSFAQSKSMPKTLVKDLLQAFSRLKQNVIWKYEEELEDLPSNVKISKWLPQRDLLGHPKIRIFITHGGMLSLQESIYNAVPLVAIPLFAEQPGNAARVVEIGIGIKLDFQNISGISMYEAINRVLDDKSYVVNMKKYSAIFNDFIENQVDKAAYWVEYVIRHKGAGHLQTGKEELNFFQYFLLDVIVFILCISYIFAYVLAKIVQLIVRKKNRK

SEQ ID NO: 6455 - protein, 518 aa, Aedes aegypti
MIRWVILIVSFLQISVLIEGANILCLTPIPSPSHHIWNRAWMEALAARGHNLTIVSADIEPHSRENMTYIHLEKAYSFLTLDLNEMANENAFGGVRSLYAWGIGMCKGALHSEGMNIIMNYPDNFNVDLVVADVTLGPCLFGLLQKFGNPPVVGVTAYNNPSYTIDFIGGHKHYAYVPYVMLNYDHDMNFLQRMYNYIVFLYDDYYRHHTFLPTIEKMMRQYHKHSTIPSASELEKKVFLLLVNHHYSVDFAESVPPNHIPVGGLQVIPAKALPQDIQLFIEAGSNGAVLFSLGTNVMSSGLGKERIHMFLDVFKEFAQYNFLWKFETDLEFALPKNVMIKRFLPQNDILAHPNVKAFITHGGMLSTHEATWHGVPMVGIPFICDQYRNLHKSVQAGVAIKLEHDALTADKVRDALREILENPSYRDNMKTRSSLLRDQPEHPLKRAIWWIEWALRHPNCERIQSPSKWMSLWKSELYDVKLFMLSAFIVMTLYVKSLLTNALSMRKEDTEASNKKRD

SEQ ID NO: 6456 - protein, 469 aa, Aedes albopictus
MSRCIILLLAVICGFTRAANILYIDGVASPSHFIWHKALINGLAAKGHNVTALSVDIEEIPPSNVSYIKVEGVYESLFEEDGLESDFFEIGQMNAFSVLAMFNEYMIVGCQTTLKSKGLQQLLEYPKEFKFDLIISDYLNGPCLSAVAQHRFGRPPFIAATAFHGLTTTSTMSGAYSYSGSVPNHEFNTPQNMGYYQRFMNFLYNHWEELLRVYDMYPKVDKIVREVTPDIPFVGDLDKDTRIILLNSNPVIQYSEATMPNVISVGGMQIVKPKDLPDDLKKIVENAKKGAILFSLGTNVRSDMLGNERIIEILNAMSQFPEYQFLWKFESDAMPIEVPKNVYIRKWMPQNDLLAHSNLKLFITHSGLLSTQEAVYNGVPIIGFPVFADQHQNINYCIEQGVGKRLSIKDVKSSELVNAIREVMTDERYRENMSRLSKLFRDEKESPLERAIWWVEWVLRNPTAQILQS

SEQ ID NO: 6457 - protein, 512 aa, Diabrotica virgifera
MKRIFLLWFLIQITSGARILAVIGNPSFSHQLFYRPIWLELAKRGHDIVLLTTDPMPEVPANIKQIDWHFAYEIRHNKYDLAKRMKDCNFNIFTIMNSFQEVFHDIVDEELSSPEVQVLIRNETEYFDLVITEYLPATLTAFSERFKCSFVTVFSTEVGNSYHQVLGNMLNPVLYPEHMASYEINLNFEQRLSSTLYWLYNSFYKQSSWDKMNDALLKKHFGQLPPLRDIVRNVSVVLVNSHHVFSSKPMGPGFIRIGGGLHVSQKNELPQDIKSFLDSAAEGVIYFSLGTNVRSSNIQQDILNKFLNVFKRLPYKILWKLDADIPDIPANIKIFKWVPQQDVLRHKNIKLFITQCGAQSMEESILAEVPLLVIPFISDQKMNAQKIVNRGLGIEIDRTTMTDQLLYESIMELINNESYKRRVKKTAILLKDEPMSGLEKAIWWIEYVIRHKGAKHLWHPNLDLPLYKYFLLDVFAFLLLVIVVLSFMIYMVCYFLRKKFFSSCKVVKVKKC

SEQ ID NO: 6458 - protein, 541 aa, Toxocara canis
MDACQSVEIAGNGCVMLVSYFATLIWLVQFVYAYKIVLFVPNIAQSQVIFNVRIAEKLATAGHNVTLVLLKMFEFDKEKEVQTNVNSIKVLPWEMYVLDWSSAARPERNFKELTFWEARKDISVKLQLFPAACEKMVQNREFIERLRVERFDVAFAPMFDLCTAGIIKHLGIEAWIWLNTGRIMDYVAYYIGLPSPPSYLPPMMSDLPKNMTFIQRVKSFLGWAITIPIYKKSIVAPENALFRKYIDADFPDLIEVARRCPLIMVNSDELYDQARPVFHKVIYIGGTGMNQDDRKTLQGDLKKIADKATNIVVMTMGSHAQLSDMPSEWKTAFMNAFGKFNDHDFLIRYESDDLERVKPGNVHFYKWLPQNDLLQHSKTRLLITHGGYNSVQEAIHAGIPLITMPLFGDQFSNGHIVESHGLGRILRKNEINEQRIVETLSAVLKDPQYKKTAERMQRMIQRKPERPEDRLVAWTEFLAEFKTLDGLIPYAIHLGFIQYHCLDVIAFLALCVTVTAGVIFWLIKLLIRAVKIPFSRKQKTH

SEQ ID NO: 6459 - protein, 693 aa, Ictidomys tridecemlineatus
MFNKILLLSLQISLLGTTLGGNILIWPMEGSHWLNIKIIIDELITKQHNVTVLVASGALFITPSVSPSLKFERYKVPFSKETVEGVIKNFVLTWLEHRPSPSTLWRFYQEMTKVIEDFHMVSRDICDGVLKNEKLMEKLKRGNFEVLVSDPVFPCGDIVALKLGIPFIYSLRFSPASTVEKHCGKVPYPPSYVPAILSELSDRMSFADRVRNFISYHLQDYMFETLWKSWDSYYSNALDCSHWLNIKIIIEELIQRNHSVTILTSSETLLINSSPDFPVKFEEIPVSYKTRNLDSLIEHMIMLWINHRPTPFTMWTFYKELGKLLDTFFQINIQICDGVLNNPSLMARLQNGGFDVLVADPVTICGDLVALKLGIPFMYTLRFSPASTVERNCGKIPAPVSYVPAALSELTDQMTFGERVKNTLSYSLQDYIFQSYWGEWNSYYSKVLGRPTTLCETMGKAEIWLIRTYWDFEFPRPYLPNFEFVGGLHCKPAKPLPKVLWRYQGKKPATLGANTRIFDWLPQNDLLGHPKTKAFITHGGTNGIYEAIYHGIPMVGIPMFADQPDNIAHMRAKGAAVEVNFNTMTSADLLSALRTVINDPSYKENAMRLSRIHHDQPIKPLDRAVFWIEFVMRHKGAKHLRPASHDLTWFQYHSLDVIGFLLACATTVIFMVTKCCMFSFKKIGKTGKKKKRE

SEQ ID NO: 6460 - protein, 518 aa, Lissorhoptrus oryzophilus
MVKHKIIVLIFFISILQSSFCARILCVFQMAAISHQVTFQPIAKELSLRGHEVISVTPHPINDPSLTNLTEINTNYTYSIILGHGFEFFMSKELTVQSKVAKIFAMYNDYAEAILSNKQFRKVYNDPSQKFDLIIAQIYVSPIMFALSSKFNAPVVGISSMGGWTGTHIAIGNPTPPSLYSEMFLHYNGDLTYYERIKSTLYFLWSRLYVNFVAMPKCDAIARKYLGSDLPYLADIERNVSALFLNINPILYTPRPMVPTVVPLGFMHIKPPKPLPKDIAEEIESAKNGVVYFSLGSNVKSINIPKRIRDLLMQVFAEVPYKVLWKFEGEELPGKPRNVIIRKWLPQQDILAHPNVKVFISQCGLQSTEEAIDREMPMVGIPFIADQEMNAKRLVRQGVAKQIDYVNATKQEIIDAIIEVAENPIYRKNMKKLRLLLQDQPMTGLERAVWWSEYIIRHKGTKHLRSPTVDIEWYKYLLIDVFAAIFGVITLLLIVLIKLIKVLKRGCVRNVNEKKKKQ

SEQ ID NO: 6461 - protein, 242 aa, Saccoglossus kowalevskii
EWTEFVESAEEGIVVFTLGSQVNIGEDPEKASKFVRAFARLPQRVIMKYVGKPLNGVGENTKLSSWIPQNDLLGHPNTKAFVSHGGINGVNEAIYHAVPFVGVAAVGDQAENVGRLVDKGMAIAIDLQSFSEDDVYNAVKRVIEDPRYKDNAARLSSIQRDTPMPPGDTAVYWIEHILKFGGDHLKPASLQLNLIQYYLLDIALFLLAVAAIATIILKQVIRMVFKICCRPNNVKLNRKKKQ

SEQ ID NO: 6462 - protein, 549 aa, Eumeta japonica
MKLLLLLSLVYASDAYKILVVFPMPGKSHSILGQGFVDTLSQAGHEVTYITAFPIDRPPANVRQIDLSSVLDNMPPDILKITELVKSPFRAHMMAFMGTGMAMGTLEHENVQKFLADTTQEFDVVIVEWFFTNVFSGLATIYKAPLIWVSSMDPHWQVLQLVDEPSNPAYTASVLTKAIPPFDFFARVNELFMQLYVKFLTSIAHFLIERPAFNKHILPAFEKRGMVPPSFDEMAYNGSFMFFNAQPVLGIGYRLTQNTRYIGGYHIDPNTKPLPENLEKIFTNAKNGVIYFSMGSNLKSKDMSDYTKRGLLKMFGSLKQTVLWKFEEELKDLPPNVHVIKWAPQPSILSHPKTLLFITHGGKLSTTETIHYGVPVIGIPIFGDQFANMDQAVYKGYGIKVDYEEDLAKPLKAALDEMLNKPSYTETAKRMSAIYHDSIASPRQELVHWVEHVVRTQGAPHLRSIALHVPWYQKIYLDLIVVTALLLYVVKKVLCWVVTATHGYSQPSRSYQCVAGLLTMNWISGRGTNEQRFESELMKGEWATGTLTH

SEQ ID NO: 6463 - protein, 221 aa, Saccoglossus kowalevskii
DLNKLMQNSGDEGVIVVALGSFITFLPSKTLDTILTTLARFPHEIIFSYSGSTPRHIGDNINIFQWFNQNDVLGELSHPKTRLFITHGGLSSYREAMYHGVPMVCMPLMIDQFDTAAKIVSNGVGTYVKMKSLNNENLYEAMVEVLSNKKYSDRANQLSAAVKDVRMNATETAVFWIEHVTKYGVSHLTVHRKHLSVIEYYLLDVIAVIVTIMCIAGWSLR

SEQ ID NO: 6464 - protein, 527 aa, Oryctolagus cuniculus
MLSNILLLSLQISLLGTTLGGNVLIWPMEGSHWLNIKIIIDELIRKEHNVTVLMASGALFITPTINPSLSFEIYNVPFNKERLEGIIKNFVLTWLDHRPYPSTIWRFYQEMAKVMEDFHMVARQICDGVLKNQKLMEKLNKSKFEVLVSDPVFPCGDIVALKLGIPFMYSLRFSPASTVEKHCGKVPYPPSYVPAVLSELTDQMSFADRVRNFISYRLQDYMFETLWKSWDSYYSKALGRPTTLCETMGKAEIWLIRTYWDFEFPRPYLPNFEFVGGLHCKPAKPLPEEMEAFVQSSGEDGVVVFSLGSMVKNLSEAKANLIASALAQIPQKVLWRYKGKTPATLGSNTRLYDWIPQNDLLGHPKTKAFITHGGTNGIYEAIYHGVPMVGVPMFADQPDNIAHMKAKGAAVEVNMNMMTSEDWLSALRTVINDPSYKENAMRLSRIHHDQPMKPLDRAVFWIEFVMRHKGAKHLRVAAHDLTWYQYHSLDVIGFLLACIAAAIILVTQCCLCVYHKFGKTGKKKKRE

SEQ ID NO: 6465 - protein, 939 aa, Drosophila busckii
MKCCLLSLAGLLLLSAGHVLSYSYLMVLTTSAKSHFYVGEALAKGLVAAGHEVTLISAFPQQQPMKGLIDIPTPSIISAMAVDKAKILQRMNVPMIKRMPLFHALGLKLTRTLLAEPAVQQLLQEKRSYDAVICEIFLNEAQLGFAEHFKAPLIALSSFGASSWTTELVGTPSPLSYVPHALLKFSDRMSMYERAQNLLFTAYEKLLRQWRYLPQQQQLYEQYFPHNKQRFDEMLRNTALVLLNQHVSLSSPRPYAANMIEVGGMHIKRQLETLPQHMAQFIEGAQHGCIYFSMGSNLNTADLPPAKRQALINTFAKLKQRVLWKFEEPQLAGKPDNVYIADWFPQTAVLAHPNVKLFITHGGLLSSTEAIYHATPIVGIPLFGDQFLNMARAEQSGYGVTVMYDQLNVDTFHAAIAKVLYDPSYAQRVQEMSARFRDQPQAPLERAVYWVEHVSRHKGAKYLRNAGQDLSFIESHQNVGAALAKGLASAGHKVTLVSPFALKKPIANIHDMPVPNVLKAMGGLRITEALLKEPSVDQLRQSNQTFDAVICEVFLNEAQFGLAEHFNAHLIGLGTFGAISWNTDLVGSPSPPSYVPHALLKFSDHMSLVERVINLAFLTYEHIFMDFYYLPQQEEIYTKYFPNNKQSFYDMRRNTALVLLNQHVSLSFPRPYSPNMIEVGGMHINRERQPLPEEIENFINGAEHGVIYFSMGSNLKSTSLPQEKRQALINTFAKLKQRVLWKFEEKNMPGKPKNVFISDWFPQDDILAHKNVVLFITHGGLLSTTESIYHGKPFVGIPIFGDQFLNMARAEQNGYGKTVNYEELTTERLLNAINQILKDPKAKQLVAQMSERYRDQKEKPLDRAVYWVEHVTRHKGAKYLRSASQDLNFVQYHNLDAMLILYGGILFVFYVLIMLMRVAWHALQRGDEASSVKPKEKRN

SEQ ID NO: 6466 - protein, 557 aa, Monodelphis domestica
MLPHRDADLYGKKKLFTLDSTKVSTSRSTMLGKNSLLLALQMTLLGTVFGGNVLIWPMEGSHWLNIKIILGKLIEKHHNVTVLVASGALFISPINESSWKSEVYKVPFGKEKIEGVIRNFVLTWLENMPSPATLWQFYSEMTKVIHEFHQVSQAMCDGVLTNLKLMEKLQKGKFDILISDPVFPCGDLVALKLGIPFVYSLRFSPASTVEKHCGKVPYPPSYVPAVLSELTDKMSFSDRIRNFVSYHLQDYMFNTLWSPWDSYYSKILGRPTTLCETMGKAEMWLIRTYWDFEFPRPYLPNFEFVGGLHCKPAKPLPEEMEKFVQSSGDHGIVVFSLGSMVKNLTDEKSNVIAAALAQIPQKVLWRYKGKKPATLGPNTKTYDWIPQNDLLGHPKTKAFITHGGTNGIYEAIYHGIPMVGVPMFADQPDNIAHMKAKGAAVEVNFNKMTTADLLNALKTVINDPSYKENAMRLSRIHHDQPVKPLDRAVFWIEFVMRHKGAKHLRPAAHDLTWYQYHSLDVIGFLLACVATVVFIVAKSCLFCCRKFGKTGKKQKRA

SEQ ID NO: 6467 - protein, 447 aa, Chinchilla lanigera
MSRVTKRILLLLPLCCYFSAGSCGRVLVWHMEFSHWLNAHVILTELVQRGHQVTVLRPSSSAFLNLNSPSDMKFETFPTSSNTEEMRNFFQQMFDTWIYNIQQDAHWKYFPLLQSMFWEFSDIYYNISKDAVLNKKLLTKLQELKFDVLLVDVTFSGGDLETHYISQSMEKAETWLIQSYWDLEFPCPTLPNIEFVGGLHCKPAKSLPKEMEHFVQSSGEHGVVVFSLGSMVHNLTEERANVIASALAQLPQKVIWRYNGKTPDTLQPNTQLHEWIPQNDLLGHPKTKAFITHGGANGICDAINHGVPMVGIPLFGEQHDNIAHIEAKGAAVVLDFKTMSTADLVNALKEVMNNPFFKQNVMRLSTIHHDQLVKPLDRAVFWIEFVMRHKGAKHLRPLAQNLTWYQYHSLDVIGFLLACVVTVTLLVTKCCLFYYQKTVEIGKKKKE

SEQ ID NO: 6468 - protein, 515 aa, Caenorhabditis remanei
MIFLTSVLLGFLFQNVKTARILLTVMDQGRSHATSFNAFMHRLQQDNHTTALEFAKFHPDIDFGMEEKFVDMDGFQNPFASPDFDKIAFEEDYSFIHQAVAYGFGSETCNNILNHKREKFFEIVSEDWDLYLSDSLFAVCGYGMAEISGKPHVMMHSTDLESAQGSFKGFSRYIYSKIQNISFENFRNYATFVPSNLPFTMLDFSVSKYSHRVWAAYDWFGSYIFTAIVGNFAQKWALRSIIPFPYFSFSEYNRKSSFTFTDMPDSLFPPASRTNDFFSFGAYCKSSSKPLDSEFLSFIDDPKSKGTIIIAFGTFIDWRKAPDHYYETFSTVINQLTDYRVIWSMKGDRPLGLGNHVKTSGWVPQNQILHHNKTVLFLSHGGLKSTKEAICSATPTIFVPMFGEQTRNSWLIKEKGFGRIMNKFQINVRELETHIREVLDHPSYQQNANKFLTHYMDQPIPTLDEGAFRFNKLLKYYGKMPAYFYPKSLDLSYITALNLDLLILLPVFSLYLVSK

SEQ ID NO: 6469 - protein, 581 aa, Eumeta japonica
MKLFLLLSLVYASDAYRILVVFPMPGKSHSILGQGFVDTLSQAGHEVTYITAFPYEKPPANVRQVNISSVIDNVPSDILKITNLVNSPFRAHMAALMGPGMMVTLLDHENVQEFLADTTQKFDVVIVEWFYTSLLAGFASIYKAPLIWVSSMDPHWQVLEIVDEPSNPAYTASVLTKATPPFGFFDRVNELFMQLYVKFLTIIANFVLARPTYNKHFVPAFEKRGMIPPGYDEMAHNGSFMFFNAQPVLSIGQRLTQNTRYIGGYHIDPDTKPLPENLKKIFDNAKNGVIYFSMGSNLKSKDMSDYTKRGLLEMFGTLKQTVLWKFEEELRDLPHNVHIVKWAPQPSILSHPKTVLFITHGGKLSTIEAIHYGVPVIGVPIFGDQFANMDQAVLKGYGIKVDYEEDLAKPLRAALDEMLSKPSYAEIAKRISTIFHDVIASPRQELVHWVEHVVRTQGAPHLRSIALHVPWYQKIYLDLIAVTVILLNSLNEVVSAFDTPYALVDVNLCSFLRMCLGKNSNFLKLISKRCTRSELVNCANGSLLQHRNSMNIRGVSAEKDAIRHQTMETAKINQSGSFDVR

SEQ ID NO: 6470 - protein, 530 aa, Leptonychotes weddellii
MVSKKWISAIVLLQLCYIGRGFCGKVLVWPCDMSHWLNMRILLEKLTERGHEVTVLVSPESFIVDYNKSSTLKYEVIPMPHNRETAEKRFSGFLDMATNVMPTLPRWQSAIKLQEFLFNISGYLKLLCESVIHNQSFMKKLQATNYNVMVIDPVVHCGELIAELLTVPFVYTIRFSIGDNVEKYCGKLPAPLSYVPVTMAVLTDRMTFLQRVNNVMFSILFNFWIHQPDTQFWDQFYSEALGRPTTLCEIMGKAEIWLIRTYWDFEFPRPYLPNFEFVGGLHCKPAKPLPKEMEEFVQSSGEDGIVVFSLGSMVKNLKDEKANLIASAFAQIPQKVLWKYKGKKPATLGANTRLYDWIPQNDLLGHPKTKAFITHGGTNGIYEAIYHGVPMVGVPMFADQPDNIAHMKAKGAAVEVNINTMTSEDLLNALRTVINEPSYKENAMRLSKIHHDQPVKPLDRAVFWIEFVMRHKGAKHLRPAAHNLTWFQYHSLDVIGFLLACVATAIFLVTKCCLFSCRKFGKTGKKKKRE

SEQ ID NO: 6471 - protein, 1100 aa, Eufriesea mexicana
MKHMVTGLFFVLCVLCVAKQAESYRILAIVATPSYSHQIPYRRLWLELHERGHEIVLVTSNPIPGIQSPNFTQIDISKGYSDIRSINFVQLRFEGKTWYQFVQNELKAMCDSFARHVFDAPEMKKLYSPDSDVKFDVLLTEFLYMPSIYSFAHRFNAHLIGLSSLGSVTINDYVLGGLVLPSHEYTWESEANTGPNLPFTQRLLNFYNMWHLLYTLYRDVFPDQQKLAESYLGPLPPLLDIMRNVSVMFLDQSDVLTAARPKLANVVTFTSFHILENPDPLPKDLQEFLDGADAGFIYFSLGSNARSSDLPMELLQMFCDVFAKLPYRVVWKFEKELAKKPANVYIGKWFSQQTILAHPKIKLFITQGGLQSTEETIHFAVPVIVFPVLADQDYQANRMDALGTGKRLEITTVTKAEFENAVQEVLTNKEYKERMIKVRNLTMDTPYDLVKNLVWWTEFVVRSDGAPHLRSSLAMQPCICHLTDHKDIVEFRNYVATPVSRHFPVSAETAESYLGPLPPLLDLMKDVSAFFLDQSDVLTAARPKLANVITFSSSHMEENPDPLPKAVYLNTRSMKHAVVSLFIVLCVLCFTKQTECYRILAIVATPSYSHQVPFWRLWLELHERGHEIVLVTTNPISGINSLNFTQIDISRNSGQLGQMNLVELRFDGRVWHKIMEDVFLEKCTDYAIPVFETPQMKKLYAPDSNERFDVFLTEFLYTPSLYAFAHRFNVPIIALSSLGMISHNEHTLGGIVLPSHEYAWESQANTGPNLSFTQRLLNFIYMWRFLYILHRDVYPSQQKLAESYLGPLPPLLDIMKNVSAFFIEQSDVLTPARPKLANMITFTSTHIVENPDPLPKDLQEFVDGADAGFIYFSLGSNAKSADLPIEIQRMFCDVFAKLPYRVVWKFETDLVEKPSNVYTGKWFSQQAILAHPKVKLFITQGGLQSTEEAIHFGVPVIVIPILGDQDYQAARVNALGIGTRLELRTITRDEIENAVREVITNTQYKERMSRVQNLTKDVPYDLVKNLAWWTEYVVRSDGAPHLRSSLAKQPWYQYCDMDIVVFLTIVTVLVVSNALNIIAKLFVYSYKRFYSCNSQKQKVN

SEQ ID NO: 6472 - protein, 423 aa, Vanessa tameamea
MFLVRIIFVTLLIITKSEPARILALFPTPSISHQVVFRPLTQELAKRGHEVVVLTTDPAFPKGKSPKNIYEMDFHDLSYKTWKEFYVISTGNKGDLLNQIECVFTKVTKVIEEQLLSEEMQNMINNKNITFDLLIIEQFSRAALGYSHVYKVPVIQISSFGGMTETFESIGVPSHPNLYPAPARQRILNLSIWENMLELYSYRSIHKAVNGMENVENEMLKKIVDPNIPPISELRKNVQMVLLNIDPVWDFNRPVTKNIVHINGIHHKPKKELTEDLKLYLDNSKYGVVYVSFGTNSKPSSLPPERIQILMNTFSQLKYDIILKWDTEELSNCPKNVRVGKWFPQSDLLSHPNIKAFVTQAGLQSTDEAIDAGVPLIGIPLLGEQWFNSEKYELHKIGIKLDIETLTEEIFRNAIEAVISDPR

SEQ ID NO: 6473 - protein, 501 aa, Tetraodon nigroviridis
MRGSVGILTLGLLAWIGCFGPQPVQAGKVLVLPVDGSHWLSMKILVKELIQRGHDVLVLVPETSLLIKSSENYRTEIYQVPYSKEDLGGSFQALKDGLFLKPPSMADLFVNVERLMNFTTMQVTGCESLLRNQPLMTRLREQGFEVVLTDPFLPCGPIVSHLFNIPAVYFLHGLPCELDSKANQCPAPPSYIPTSFSGNSDVMTFPQRVKNMLMYLVQSYLCKVMYREFDRLVTRHMSDIQSYRELISRGAFWLLKYDFTFQHPKPVMPNTAFIGGINCAKKAPLPADLEEFVNGSEDHGFIVFSLGSMVENMPVEKAKQFFDAFAQIPQRVLWRYNGAVPENAPKNVKVMKWLPQNDLLAHPKAKVFMTHGGIHGIYEGICNGVPMLMFPLFGDQIDNVPRMIHRGVAETLSIYDVTSQKLVAALKKMVQDKSYKENMVTLSQLNQDRPVAPLDLAVFWTEFVMRHQGAQHLRVPPHDLNWFQYHSLDIFCFLAVVLLTV

SEQ ID NO: 6474 - protein, 483 aa, Peromyscus maniculatus
MLSNVLLWSLQISLLGISLGGNVLIWPMEGSHWLNIKIIIDELIRKEHNVTVLVASGALFITPSKSPSLTFEIYPVPFDKGRVENLIKNFVLTWLENRPSPSTIWKFYNEMAKVIQDFHTVSRGICDGVLKNEKLMAKLEKGKFEVLLSDPVFPCGDIVALKLGIPFIYSLRFSPASTVEKHCGKVPFPPSYVPAILSELTDQMSFTDRVRNFISYRMQDYMFETLWKPWDAYYSKALGRPTTLCETMGKAEIWLMRTYWDFEFPRPYLPNFEFVGGLHCKPAKPLPKVLWRYKGKIPATLGSNTRLFDWIPQNDLLGHPKTRAFITHGGTNGIYEAIYHGIPMVGVPMFADQPDNIAHMKAKGAAVEVNMNTMTSEDLLSAVRTVINDPSYKENAMRLSRIHHDQPVKPLDRAVFWIEFVMRHKGAKHLRVAAHDLSWFQYHSLDVIGFLLACVASALFLLAKSCLFVFQKFAMTGKKKKRD

SEQ ID NO: 6475 - protein, 513 aa, Dendroctonus ponderosae
MLLRGLPLILITLELCGAANILAMFPLPGLSHFVMFRALLKELAQRGHNVDVFSHFPLEKPIKGYHDIDLRGSSPLLTNNMTFDVLRDEKGVEFAKLMSNEAGFKICEDSFKATQLKQLKTSRKKYDLLLTELFGSDCMLGWAWHFKVPTIVMTSSANLPWAADRFGLPDNPSYIPTYFMGSVSKQDFFGRMMNTWTLIRSKMLYRLHSTIPSNKLAKEFFGPEMPDLDVLAYNTSLQLVNSHFSVNNARPLVPNVVEVGGLHVGEPRPLSKHFDDVLAADKRGVICFTMGSVVVIESLPRGKLEALLNALAELPYTVIMKANVQKFPKDIAAPKNIVFEPWIPQLDILCDPRVKLFISHGGMMGTQEAVYCGIPVLGIPIFADQSLNIKYTEAMGFGIMVDYEKITKETLVIAAGKLLEDPKYRANAQRLSAYFKDRPMKPMDTAVYWVEYIVRHQGAPILQSAAKDLAWYQYYLIDVAAFLMFFSALLASIVAKVFVLLRNLGAKKKTKTS

SEQ ID NO: 6476 - protein, 542 aa, Trichoplusia ni
MRLCRPYITVGDRRVLHLHAVTRNKMKLLILFGLTLLCGVESLKVLVYYPLPVRSVSMLGNGVVRHLLDAGHEVTYVTVYPLKNMPPTLKQVDISGNEEMLAKDDSLSISHMLENNVQDNDVLHIQEFAKENTRQTFTNKNFTKFLQDTSQRFDLVFSDLFESEVCAGLSVVYDCPLVWFYSMGAHWNVLRLIDEGRNPAYDPDYLTTNVVPFSFLERVEQLWARIKYMALKTFITLPDEKKMYEEIFTPLVAQRGRTLPNYEDVIYNASIIFGNEHNAVKLRPSTPQNFKYIGGMHIPDPVTPLPKKLQDLMDNAKHGVIYFSMGSFFKSKHLPKSLVRGLVKTFGELKETVLWKFEEDLPDLPSNLHILQWAPQSSILAHKNLKFFITHGGLLSSIEAIHFGVPVIAIPVYFDQFTNVRKAVENGYAIRVPLSYDLPETLRPAIKSMLTDNTYKKRITELSTIYHDRLVPPGKEMVHWVEHVVRTRGALHLRSPALNVPLYQRLFLDLLAVILIILYIIKRIINNLTRKTSKKTDKKKKN

SEQ ID NO: 6477 - protein, 280 aa, Dasypus novemcinctus
MGKAEIWLMRTYWDFEFPRPYLPNFEFVGGLHCKPAKPLPKEMEEFVQSSGEDGIVVFSLGSMVKNLTEEKANLIALALSQIPQKVLWRYKGKEPATLGANTRLYDWIPQNDLLGHPKTKAFITHGGTNGIYEAIYHGVPMVGVPMFADQPDNIAHMKAKGAAVEVNMNTMTSADLFRALRTVINEPSYKENAMRLSRIHHDQPVKPLDRAVFWIEFVMRHKGAKHLRPAAHDLTWFQYHSLDVIGFLLACVATALFLVTKCCLFSYKTFGNNGKKRKRD

SEQ ID NO: 6478 - protein, 460 aa, Penaeus vannamei
MRVLLTLLLAAALAEGSRVLMVLPLGSASHKNILTPLAERLAQRGHQVTIASLHASAAPANGSALPFTDLVAADAWDVVRKVTGGFDVFRMREASGGKDVNSQVMKKVVRHLPEYCDAFLRDPALQAAWAERPDLVLLPAFMNECGLAFVHKFKAPFIYVTTSGLTPWTADLLGNPENPAYVPNQYLPYDTHMTLWQRTLNTLVRFISPHLRSQLVLSPWTAWSSGSWATPQCPCPSLGSAIRSEQLPASVRDTLVRAFARLPYRVLWKWEGAAVPGLPPNVLTRPWFPQQDVLGHERVRAFLTHGGLSSMQEAVYHGVPVVGLPLMSDQHLNVRQAVTLGLGRELTLETMTEDDLVEAITAVVEDDGFRTRVRARSLMLRDQETTPLARAVYWSEHGVQAVRRQGPASPVEPRQGGVAPPARGGTPISAAPHSPPSTLTDVTTHHCESPVNTVMAAIPS

SEQ ID NO: 6479 - protein, 499 aa, Aethina tumida
MLSLLLVFTTINQVFSARILGFFPTPSISHQVIFQPIWKELSLRGHNVTIISPNIIGDPTLINLTELDMGFTYDLLKKPENNIGKIMRKGNYPIYNIHYAFCVVELAMTMMFESPPVQKLLKDDSQQFDLILLEVLQPLANIFSAKYRVPTVGIQSLPGILSTHDMVGNPTNPATTTDLFLPFDDNKSFPERIKTVLHQMIFRLYWNWYLLPRIDTIARKYTSDNIPYIGDVEKNQDQNVPSIVEIGQMHIKPKKPLPKSLKAFLDKSKKGVIYFSLGSNVRCANESKDFIDNVKTALGSLPYDVIWKWEIDIMENKPDNILLQKWLPQQDLLGHPNVRVFVTQGGFQSIEESIVNGVPMVVLPIIADQHFNAQRMKHLGIAKVLDIETMTRDELKNAIIEVAQTKKYKDIVLKYQKLMLDQPNTGIEKAIWWIEYVIRHNGASHLRYSAMDTPFYKYYLLDVIGFFLVIFIIFLLLLLKLYKLVKYFPKAVIKNKKIN

SEQ ID NO: 6480 - protein, 527 aa, Drosophila simulans
MKPTAGQTGFLALLLFSLLSCVSAYNYLLVLHTAARSHYHVGSALAKGLAAAGHQVTIISPFELKKPIKNIKDVPAKSILTSMQGIGNLLQTSKEPIIKQIVDFHEMGIEITELLLKEPSVIELMKSNQTFDAVISEVFLNEAHFGFAEHFKAPLIGLGTFGAISWNTDLVGSPSPPSYVPSALLKFSDRMSLAERVGNQAFLTYEYIFLNYFYLPRQEVLYRKYFPNNKQDFYDMRKNTALVLLNQHVSLSFPRPYSPNMIEVGGMHINRKRQPLPKDILEFIEGAEHGVIYFSMGSNLKSKTLPLEKRQALIDTFAQLKQRVLWKFEDTDLPGKPANVFISDWFPQDDILAHDNVLAFITHGGLLSTTESIYHRKPFVGIPIFGDQFLNMARAEQNGYGVTVHYEELSAAKLLAAIQKIINDPEATQKVRDMSDRYRDQQQTPLERAVYWVEHVSRHKGAKYLRSASQDLNFIQYHNLDAMLVLYGGIIFVLYCIFLLIRLVWRFLQELFVKKESSKPKKKEKRN

SEQ ID NO: 6481 - protein, 518 aa, Heliothis virescens
MNNWTLFLLSSIFLSHVCAYKILVVFPYPGTSHSILGEGYVRHLLRAGHEVTYLTAIPYKKPHPNLKQVVVASVVDKFELFQQLNFDKFISKEIDMTDVRKFYEVMITIANRSLTHENIQKFLMESNERYDLVVAEWLYHVLYSGFAAIFNCPYIWSSSMEPHPVILSLIDEPGNPAYFPDHMSPVAAPMTFSERVNELWYLFYIYRVLWSVKGAEEKVYKEVFGPAAAKRGITLPELEDLKYNGSLVLGNSHISSGEPQRLPINHINIAGYHIQDVVPTLPENLQKIMDDADHGVIYFSMGSMMKSRTMPMKLKRDFLDVFGQLEQTVIWKLEEELTDLPKNVHIVQWAPQQSILGHPNCKLFVTHGGLLSTTETIHFGVPIIGIPLFADQFLNVVRSVRKGFALQVNLGLDTPAKLKVAIDEILSNPKYVQKVKELSFIYHHRETKPGHTLVHWIEHVIETNGALHLRSPALHMPFYQKMYLDLLALVLLVIIVLVKVVQVLLSSKKKSDIKLKRT

SEQ ID NO: 6482 - protein, 445 aa, Loxodonta africana
MSKKWISVLLIQLSCYISCGTCGKVLVWPTEYSHWINIKIILHELIQRGHEVTVLTSSASILIDPSTPSAIKFEVYPTSLTKDDFEIFFMKFTRKWTYDLPKDTFWTYFSQIQEMEWEYSDFIENLCKEAVFNKKLMMKLQKSRFDVVLADIIAPCGRPTTLYETMGKADIWLIRTYWDIEFPRPFLPHFDFVGGLHCKPASPLPKEMEEFVQSSGEYGVVVFTLGSIVSNITEERAQTIASALAQIPQKVLWRFDGKKPDNLGHNTRLYKWIPQNDLLGHPKTKAFITHGGTNGIYEAIYHGIPMVGIPLFADQPENIDRMKAKGAAVSLDMNTMTSTDLLNALKTVINDPSYKENAMRLSAIHHDQPVKPLDRAVFWIEFVMRHKGAKHLRPASLSLTWYQYHSLDVIGFLLACVAIVTFLVIKCCLFGYQKFFKTEKKKKRE

SEQ ID NO: 6483 - protein, 395 aa, Daphnia pulex
MSSTEQFDLLIIEALFNECVLPLVRKFDVPFVYMVSMTPSPWLLDAVGSSLALDHLPHAGSNYADEMDFWQRTYNTISGMMITYFHRFFVIPVVDRLASEILKLNNQPSYMSLIISNTHFSINYQFPASPALIQAGGLHCLPSKQLPKDLESFVDGSGDAGFIVVSFGSVLRGSDISDHVRQLFLSTFSRLPQRVIWKWEEKLDETDSIPSNVKLLPWMPQQDLLGHPKIRLLITHGGLNSKQEAVYHGVPFIALPVFADQPINAQKAHDDGYAIRLDWDNLTEEILFDAIQRILSNSSYVERMNQVSALMRDQTDRPLDRAVYWIEYVIRHQGASHLRSASRKLSLFQRCLIDVLLFTLFLLLFLLISVFLLCRFVHQKVLHETNLQTSTKKTD

SEQ ID NO: 6484 - protein, 529 aa, Oesophagostomum dentatum
MPFFPIFFALLLASSDAYKIVVFVPSMVKSQVVFNTRVAETLAKAGHDMTLVMIDPLGGAKSSTVMIPEQVKTYYLNTSTGLSAETFDESVEKLIFKDLTLWDIKHFLDFAIRIFIGSCRKMVENKEFIKWLEAEKFDLAFSYVADICPVGVIHHAKVPTWIWLNSAPLIDFVAYYMGVPIIPSYVPPLAMASSDHMNFIERTKSLIGYGMEIILWKWFIADKQTVIFREVLDPHFPDLVELGKKCPLVMVNSNELYDYPRPTLAKIVNIGGVGYQMKDAKPLEPEFSRVVDTASDVILFSFGSVVPSDRMPMAWKMAFIEAFKRFPNYQFIWRYVGSDIKDKLPSNVHIYKWLPQSDLLQHKKTRAFITHGGYNSLQEAISAGVPLVAVPMGGDQPRNAELAERHGFAVRLEKSHIKADAIAEALNKILSDQSYSRNVKRLSQMVKKKPVSVAHLLVSWTEFVAEFKTLDNLVPAGVKLNFFQYHSLDVIALLLFVAVIILFVALQIVKYVVRKLLSAFSRAEKPKTD

SEQ ID NO: 6485 - protein, 508 aa, Strigamia maritima
MVYLYFMSVLCAMTNAGNVLLLTPFGSPSHKNLFTPTAYGLAEKGHSVTLVSIYKPKESSPNVKEVVMENLIPTSKELVYWLCKEGIDGPTVEVLNGYISTAKKMCETFFMNDLVQSWVKRKEKFDIVIVDGVLHDCLFPVANLMGKKVGALNTAALFSWIADSIDSPYPYSIIPFYLFPFKARMNFWERMINAFSFSKYDHEMQSAYYPAMEEIVRKYYPQAITISESMKNLSLVLCNGEPLLGTIRPSVPTVKYMGGIHCRPGQAVEKVFEDFIQSGKDGFIIFSLGSIFNESLMSEERKEHIFTAFSKLKYKIIWKINADMGTGVPSNVKIVKWIPQQNLLSHPKCIAFITHSGLLSLQEAVYHSVPMIVIPLFADQPMNAALVEELGIAVRLDWTNFTSDDLVKAVKTVTSLEVQSNLKKYSAIFKDVPSTSLEEAVFWTEYVMRNEIADSILRVNTHGMNLIQYFSIDVIAFILIVAFTILIILYKCMRFNYFIVKNHKRKDE

SEQ ID NO: 6486 - protein, 521 aa, Caenorhabditis brenneri
MYLLILFCSIISTTYAYNILVYSPSFGGSHTNFMARIADTLTDAGHNVTFLVPVVDSARKFQLGVKTTKDVVMVDREKHDGSFVDKGAGKYWAAEINAGNIKEVFGEFTAAQTHTCHDFLQRKDIFEEMKSKNFDVGIYEPLTVCGLGFMHAIGIRKIITACSEVFYDTVLDVIGEPLDLSHVPTVLSKLEDPGKWSFWDKIQNYKLSMAYQKWTCEVFDAQTAIYKKYLGEEVPDWRELIAKSSLQFVNSIPYVDFPRTVGQKTISIGGIQVESQTEDLDKELDAVLSERPMNVLISFGSVVRSMDLPEVWRSNLLAAIKSQPNTTFIWKYESDDVSFAQEVPNIHFSKWVPQTSLLNDPRLTAFITHGGLGSTNELSYHGVPAIMVPVFVDQHRNSNMLARHGGVIVFKKQDLGEADKIKNALQAILYDEKYKKNSVKLAELLNNQPLKPREQVVRYVEFVARYGPFSGMDMEGRGLGLLEKNVLDIYFVLVAPYLLSLGLVIVVTFIMLLRVRSVKVQ

SEQ ID NO: 6487 - protein, 530 aa, Xenopus laevis
VVTDSSSSCCFFRRFFLLLVLGCADVGRLLVVPQDGSHWLSMRLLVDRLAQKGHHIVLAIPEANFLFKDIDNYTVKTYSSSYSKDVLENHMRRMSQELFVDRILTQKIKFLYESASNGTQLILTTCKDFLQNSTLIRELEKEGFDAMLTDSVFPCGAIVAEHLSIPSVSFMRGTIFGMDQIASLTPSPPSYVPRMFTVYTDNMSFGQRVNNFLIHSLEHIVCHIFYYPYAQLASDFLKKEVNALSLFSRTSIWLMRYDFVFEFPRPVMPNVIFIGGINCVNRKPLPQEFEKLINRSDEHGFVVFSFGSMVSEMPMNIAMDIAEALRYIPQQVFWRYTGKTPPNLGDNTHLVKWLPQNDLLAHPKARAFITHAGSHGIYEGICNAVPMVMLPLLGDQMDNAIRIESRGAGLTLSVLNLIPEDLSNAVMAVIENPSYKENIQRLSSLHLDRPINPLDLAVHWVEFVMRHKGAPHLRPAAHDLNWIQYHSLDVFGFLLTVLITTLFISLKCCICVCRCCCKRNSKQKRKTKSE

SEQ ID NO: 6488 - protein, 522 aa, Drosophila yakuba
MRWLPNSWLLILSALLGQSWGYSYLMISPTASKSHYTVVFALAKGLAAAGHEVTLISSFPLKKPIKNIIDVDTPSIITVMGVYKARILENAKKPVILRYPRISLMGLDLTETLLKEPSVQELLKQNRTFDGVICETFMNDAHYGFAEHFGAPLIALSSLGATGWTSDLVGTPSPPSYVPHNLLRFGDRMNFWERAQNLGFQIYEFIYENLINLPRHEALYRKYFPNNKKDFYRMRKDTSLVLLNNHVSISNPRPYSPNMIEVGGMHVNRKAPKPLPKNIRKFIEEAEHGVIYFSLGSNLNSKDLPKKKRKAIVETLRGLKYRVIWKYEEETFVDKPENVFISHWLPQDDILAHEKVIAFITHGGLLSTMESIYHGKPVVGIPFFGDQFMNMARAEQMGYGITVKYAQLTASLFRSAIDRITGDPGYTERVKVISNQYRDQLETPLERAVYWVEHVTRHKGAKYLRSASQDLNFIQYHNLDVLAAFVSVIGLTVIFIFLLVRFLVSSIRGRFLKSKTSRLKVN

SEQ ID NO: 6489 - protein, 533 aa, Anopheles gambiae
MKRKGNDIMTRLMVTFSMGLLATLLVIGHAESAKIVCVFPTASKSHVLGAQALLKELAHRGHEVTMVSAFPLKKPPKNYRDVYIPIEDAFSSIMSDFMQGGSRNMMKLLPKILRASHDASNATLNSAELLRLAREEQFDLALVGFFMNSFVIGVGQLFRCPTVLYWSAVGSGMINYVGNPAEVAAVPHMMLGQRNPMTFFDRVANTLINGVEKILLTYQRYKELPYYESNFPAEKGFRSYDEALRNVSLVLINTHFTQTVPRPYLPNMVEVGGIQINAKPDPMAQDLQQFLDGAGRDGAIFISFGSNLRSSNLRQDKLDAILGMIRGLKQRVIWKWDQDEMPNRPSNVFIGKWLPQDAILAHPNLKLFVTHGGLGSISEAMYHGVPIVGIPMFGDQDGNVAQVVKEGWGLSVSFDELTEPLLSGVVQEVLRDPKYREQVQGRALLYKDRPMGALETGVYWIEYVIRHHGAPHLHYQGADLNAFQLALLDVYAFIIGVLYIVYKAVVLIGRKVKRALFGGAKSDQKTKNKQKKA

SEQ ID NO: 6490 - protein, 599 aa, Toxocara canis
MNLASILSLLPWIIAASEAYNIALFVPAMAASQVIWNIRVGEELAKAGHKITLIHLRIANITLHETKVMDGIEQWRVDAFAVDYAEIESKHSKMIFRDYSFFEPEVRGMLSLMTNAFIDGCELILQNVQFMERLKAAKFDVAFAPMYEFCPIGLIHAANVPTWIWLNSGQLMDIVAEYIGVPSPPSYVPIILQNVQFMERLKAAKFDVAFAPMYEFCPIGLIHAANVPTWIWLNSGQLMDIVAEYIGVPSPPSYVPMMMADSSDEMTFIERLKSFIGRIITPIIADRMLISHQTKLFRKYIDPHFPDLVDLAKLCPLVMVNSNELYNLPRPTLHKIVYIGGLGMKNQDAKPLNGQFKEIADNAKRIAVMTFGSHANSSAMPQSWKKAFLESFRKFPDVDFIVRYTAKDLIGKTSNNVHLKSWIPQSDLLQHKKTVLLITHGGYNSLQEAINSGVPLLTIPLFGDQPGNAKLAVKRGFGYSLTKSDITTEKVTKALQAVLQNPSYMESAVRMQNMVRKKPSQPERLLVRWTEFIAEFKQLPNLVPYGTKLNFIQYHCIDVIAFLSFITAIVVFVVVKVVRFTCCFVYKKVKGDTRKRKAE

SEQ ID NO: 6491 - protein, 522 aa, Stomoxys calcitrans
MKIWNPLKWVVLILLHFSARESESAKILAIFPYPGPSQYLVVQPYLKALAARGHELTVISAFPQKKPLENYRDIEVPEVLKYVGDIFDYIDMEISKFQEIVGFSFYYISVVKDVLGNEQVQNLLKSPQEHFDLVIVETLQTDALFGFADHFQAPLIGFSSYGTDPYIDALVDNISPMAYSPLHTDPSTERMDFSQRLRNMWHNLLMMGHRVFMMNPMQDRLYREYFPKHTKTLEEMRQNISLILLNQHFSLSFARPYVANMIEVGGFHLQHKPQPLPQDVEEFIASSSQEVIYFSMGSNIKSENFPLPIRKLLLNVFSQLPYKILWKFENPSLLADKPSNVFISKWFPQGDILAHPKVKLFITHGGLLSFIESIYHGKPVLGIPIFFDQIMNVLRAEQYGFGLSLIYRQLNESSLLAAVTELMENPHYGERAQEISKRYRDQPIDPMEKAIYWTEYVIRHRGAGFLRSPAQYLNFWQKSSWDCAAVIGGAFVMGFVVFAYIFVQITKCVVRLISSKKKKFYC

SEQ ID NO: 6492 - protein, 526 aa, Cyprinus carpio
MVRALIVPTLGLLALLCLFSSEPVQAGKVLVLPVDGSHWLSMKILVEELSLRGHEMVVLVPETSVLIGKSGNYTTKSFRVPYTHADLKANLDNIEKNAFEKPPKLTDIFENLGNLIQFLNMHVTACEWLLYDESLMKSLRETGFDVLLTDPFLPCGAIIAESFSIPAVYFLRMIPCLLDVEATQCPSPPSFVPRFFTGYTDKMTFPQRIENTLMTVFDAFLCRKLFASTDELASRYLQKDTTYKELLSYGAVWLLRYDFTFEYPKPQMPNMVQIGGINCAKKGPLTKELEEFVNGSGEHGFVVFTLGSMVSQLPEAKARVFFEAFRQIPQRVLWRHTGPVPENAPKNVKLMKWLPQNDLLGHPKVKAFITHGGSHGIYEGIYHGVPLVMLPLFGDQGDNVQRLVSRGVAETLSIYDLTSEKLLVALRKVINDKSYKEKMTELSAIHRDRPIEPLDLAVFWTEFVMRHKGAVHLRPAAHELNWIQYHSLDVIGFLLLILVTVIFVTVKSCMFCFRKCFKKTQKKKKE

SEQ ID NO: 6493 - protein, 527 aa, Athalia rosae
MLWRFFAVAIFLFTGIVEHGDGARILGVFPIPSISHQVVFRGLAKALNKRGHELVVITTDPVRDPTLKNYTEIDLHVLYEGFKIFDHVMLRGAINWEDNLPLMHALFSQQTETILSHPEVKRLYSPGSGEKFDLVLIELLLSGALLPLAKRFDAPIIGITSMGLTLPTQYSLGIPILSLHPSSWELDNRDSSSYSLWPRLSNFIRMWKYIHFHRTTWIPDNERIAKKYFGNDVPSIAEMEKNISLIFVNQQVPLSFTKPTVPGVIPIGGFHISKKLEPLPESLRKILDEATQGFIYMSLGTNVKSFMLTDEMRAEFVAAFSQLPFKILWKFDDDEFPNKPDNVIVMKWFPQQAILAHPNLKVFVYQGGLQSTEEAISNGVPLIGIPVIGDQDMQVKKMVQLGVAKMIEIKTLKREELLEAIRTVTTDGSYKENMLNLKSLVSDRPNDPLENAIWWTEHVIRHRGTPYLRSSTADDPWYQKNDMDIVAFITATFTTVLFVTLFVLYKCIIYMNGSSTRRSLDEAKKLN

SEQ ID NO: 6494 - protein, 1254 aa, Trachymyrmex cornetzi
MTFMCDAFYKDDPTMVNIGLNKQEPASSLLQIMYDEIREGMTLIAEEEEDECIIGAAVNAGSCPWDPDKFVEFARCCECEPTRDVIEFEAYVTGKPNLWERYCVLKIFECSYLAVRPDFRNQGIARKLVLDSWYLARDCGYRLFRVDCNNRYIARIAKGFGWKRVCIIPFHEYARDGELVFKHIKEPHTEVQIYIDQVTFCKDYCPPYKTCDKIISAPNNLTCSERLLIITPTPSYSHQIVFRVICLALNKRGHEIVTLTPNVLNDTGITNYTEIDFGFIYEKIDDTDMSQTRWNLTQLAGLKTRLLTLGHNIAEDALSHPDLLKYYTNRTDMQFDAVIAEMIMTPAIYMLAHRFNAPLIGIMSMDLQNCHRFTLGSPVLPSHSSNWELENLTGLNLPFWRRLINFINTWWSIHSWFNNFAIKQQKIAEKYFGNNIPHITDVAKNMSLVLINQEPLLAYARPEIPNIVHFSGLHITKTPPSLPKNLKAFLDSATNGFVYMSLGSNTKSKLLPKKILQIFANTFASLSYKVLWKFENDSYHVPPNVFISKWIPQQGVLAHPNIKLFIYQGGLQSTEEAVHYAVPLIGIPFVFDQVYQVMKMVSLGVARYLDIVRLTGSELHDAIIEVIDDKGYKDRMLALRALTKDKPYDSLENVIWWIEFVMRHNGAPHLRFNGVDIAWYQQFDLDVIVFLTITLFLVLCAILAIIGWVSKKLYNTHYNNISNRYIKMKPVAEITFWIACFVYIATPIETARILAIITIPSYSHSIPYRPLWTALIRRGHEIVVLTTDPMNDPSLTNLTEINFKSHYNILSRLDFIKNIETYTWLSTVREQLWSVCNEMTENIYKHPEVRKMYELDSDTKFDLVIAETIKSPGLYALAHRFNAPLIGVSTFGLYNSAYYLLGAPVLPSHPSSWEMEDSADFNLSLWQRIKNFIRLWYHIYRTLNHFYSEQQAIAEKYLGKNIPDICDIERNISFVFQNQQEILSFVRPHTPNVLPFGNFHISKKLMVLPENLKKFITDAPNGFIYVSLGTNVRMSSLPKHVQSIFRDVFASLPYKILWKHDSELPNKPDNVYIAKWFPQQSILAHPNIKLFIYQGGLQSTEEAVYYTVPLLGLPVLADQYAQVKKMVSLGVAKRLNIMELSRENLNASIIDILYDEGYKKRMLKVKEVNEDKPYDLLEHVIWWIEFVIRHKGASHLRTSIAYDPWYQKHEMDVIAILSIIIFVTLICILIVIYKLLKIIFNLTKITVTTKEKIN

SEQ ID NO: 6495 - protein, 434 aa, Strongyloides ratti
MKKSLKILVFSSGHGYSHNLFNAKIADTLSKSGHNVTLMTLGFSSLSKSNLTKYANFIYVPIEKKLKNQIINGESLKDMWIKDDHILLKLLKFQSISNEYVDTCKYIFDQDKITENIRQINFDIMISEIFLLCPLVLNKNKGKTVDISNVFIKSSAIFINLMSFLDYSLPLTNKIYYIGGIALQKPKPLNKNINNILNIKKYNVLFSFGSIITLHYMSQYLIENIFKTFSKLQEVTFIINIPNFNLTLKIPNNVYVYKWIPQTDILHDNRINLFITHGGQNSINEAISAGKSMLVIPVFGDQDRNTGMILRLKIGDYFNKLNLNNSKLFKNKIWKMLQSKKYTKNVKELKNLYEKSPFKSNEIVVKVTEYADCLKSIMNKIWLFFILTIILIVATNIHCSEHERKKRQYGYVQYYPDDCYNIVYQPEYVPVIPC

SEQ ID NO: 6496 - protein, 527 aa, Wasmannia auropunctata
MWKIICKVFIVSSLWFLIASNITSADRILMLMPTSFYSHQIIFQSLCLALSKRGHELTIVTSISLKDLITKNYTEIYLADLKHQTNEYIDNSLEMKTSDLLKFAWKMSHRGSIETFNNSEFKEIYRHDSNKKFDAVILEVLCYPSLAVIAHRFNAPLIGLLPLGIHNYHRYLFGSPIFSSHPSNWELDVLVDENPSIWQRLWYFIDTWRLVYFWMNDYATVEQEIVEKYLGNDVPSIIDVMKNMSLLLVNENPVLAYPKPEQPNAIFFNGIHIQNPPPTLPKNLQQFLDDAMEGFIYVSFGTMATCRNLPKETLRNLVEVFSKLPYKIVWKFECDELPGKLDNAFISNWFLQQSVLAHPNIKLFIYQGGAQSTEEAVHYAVPILGIPTIFEQEKRVHRLVSFGVAECIQLNDLTKERLDSAIYQILDDKSYKEKMVYLSSLAKDQPYNNTENVIWWIEFVMRHKGIDHLRFSDSDKPWYQRYDMDIVALLALTLFIMECVIALIVIKIIRFILNKTVLYSQHQMLKS

SEQ ID NO: 6497 - protein, 396 aa, Frankia sp.
MGRILFVVPPLTGHVNPAVGIAGELAARGQQVALVGHTSVVGPLVPPEVPLIALPGEITAEQRGELEARSRSLRGPASLKFLWEEFILPLGDSMARDVTTIIDQWRPDVVVVDQQAVGAALAVRRSEARWVTLATTSAESDDPYAVLAGIGNWVAQRLHQFQVANGVPEPEATRTDLRFSEELTLVCSVPSLLRPGGHPSHHVFVGCAAGVRRASPDFPWTWLDSDRRTVLVSLGTVTREAGGRFLRAAAEALLGMSDRAQGIIVAPAGSLDDLAEKAPDDLLVRSFVPQVDLMPSLDAVVCHAGNNTVCEALSHGVPLVVAPVRDDQPIIAEQVVRAGAGLRVRFGRSTPATLATAVGAVLDEPSYRAAATRLRDEFTAAGGVVTAAHHIEKLLP

SEQ ID NO: 6498 - protein, 539 aa, Dendroctonus ponderosae
MLSRCFQIVTLVTLAVIHHCTCANVLMITMGGTKSHKIPFWELARGLIPRGHNITFINAFPSDFYLEGLEEITPSSYVVYVRNFTNWDLVGARIKGEEPVPFVDMIKFGYEACDVLLSDPETKEFLRSGLKFDLLVLDGAYPECAMGFVHFYGAPFIYINTVGMYMGSLSTAGNPTLYSVTPFLARPFSDTMNFIQRVLKTRTSNTFGFDIVQNFGFYMVANIMHSVMTRGKLQDIVRQYFGPDVPGIYDMSRNVSFILQNGHPVLTYPRPFLPNVAEIACLHCKPAKKLPEHLENFIEGAGDAGFIYFSMGSSVKASNFPDYFRALLMIVFRNLPQRVLWKYEGDDLIDLPSNVLLGKWLPQQDVLGHPKLKAFVTHGGLLSMFETVYHGVPVVSLPVFCDHDSNAAKAEADGYAIKLDLFTITPEGLLRAIKTVIRDPRYKTQVKHRQKLLLDQSEIPLEKAVYWTEYVLRHKGAVHLQSPSRHMGVIDYYSLDVVVFLALVLIGIYYTTKKLLRLMRILPKDEVSIDLPRKSIKVE

SEQ ID NO: 6499 - protein, 535 aa, Caenorhabditis remanei
MIGLKDILFYCFLLFLYPTGSESYKILVYTNLFGHSHVKVMATVADALTDAGHNVTVLMPIIEQQFINKTCLKSTKNVIFVEQDDKLKALMAIRSKRFETLWTSGFNNPFVVAKKSKLMSELFSEHCRKVMSEKKLIEQIKSENFDLAITEPFDTCAYAFFEAISIRAHVAVYSCSRLDHVSEVIGQPAAPSYVPGMTSLFGEQMNIWDRFLNFYLYKANSYSFSRIGDENYRVAKEFYPNIRSWREVVPEATFLFTNYIPYLDFPAPIFDKMIPIGGLTVKTDQKEVQLEEKWSKILDERKKNVLISFGSNARSEEMPIEYKNALLKVFQSMSDTTFIWKYENPEDPFTKHLENVYLSAWLPQNELLADPRLTLFITHGGLASVLELAMTAKPAIMIPVAADQTRNAQMMKRHGVVAVLKKFDLANPVKIQEVIEEVITDSSYRNNAKRLAEILHNQPTDPKEKLVKYVEFAARFGKLPSLDNYGRHQSFVEYFFLDIISIISFTVLVSSYIFYRLFGYLFRKCTGSSFKNKKE

SEQ ID NO: 6500 - protein, 566 aa, Lambdina fiscellaria
MFTQKLRKAITISTTIYCFSFWSPISSFLSCSSFLLLNNADAARILAVFPTPSYSHQSVFKVYVQALVRRGHTVVVIRPEARVKYDNDIVTGDESLIFVNNVQPNEIVYKNNDNNKTRAKGAIVVVDASASQSHFESLMQNASSFKKREGLVADSDSVTADNYMALVRMISDQFKLPAVKRFLDRRHALRFPFDLLVTEAYLDYPLVLSHLFGKLPVVQLSSGHGVAENFETQGAVARDALHYPNVWRSEYASTTTTALFFNNSASWTKILNAEKRLKTEFQQLAQRQNQLMQNQFGVDTPDVKQLRARVQLLLVNVHAVLDNNRPVPPSVQYLGGLHLVNKKRHPLALQVRTFLDAAVRGVVYVSFGSSLTAARMPVDFIQLLLDSFRVLPYAVAWKFENDVSQHQIPANVLVQQWFDQYELLHHKHVRVFVTQAGVQSTDEAIETTVPLVALPMMGDQVFNAQRYAQLGVGIALDTLTVTADLLRAAIERVATDQRYKTNMRQLRHLVRCQPGSAIRRAVWYTEYVAANKNNIFNQNLLKNTGAAAQSRLVPIQWLSVESDVQQ

SEQ ID NO: 6501 - protein, 536 aa, Caenorhabditis elegans
MLLNSLIFTLLFCSSSSLNILVYSPAYAASHSNFLGKLADTLTERGHNVTYLMPVMDPGKRDECIGVKLTKDLVIVEADEEMMSREEGVTLDEEIMELYWKSEMDSSNSRDMFSFFNNAMKAACRNFLKRRDIFEQMKSRNFDVAIVEPLSVCGLGFVKALGIEKTILASSCTFYDSIMDYIGEPLDFSYVPALFSVTGDVMTMSERYENWMVTKEINIGIHEKFDDEMKSYREFLGQDLPDWRELLSTASIFFINSNPFFDFPRPVLQKTVPIGGISVNLKWIKEQKLTKDWEEVLEMRKKTVLISFGSLVKSAYMPKKWRNGLLDVIKSMPDVTFIWKYETDDVSFADGVSNIHFSKWVPQTALLNDPRLSVFVTHGGLGSTMELAYSGKPAVVIPVFADQIRNANMIARHRGVIYLHKNSMENVKVTRKAFTDVLFDDSYQKNAEKLANILMNQPYSPKENVIKYTEFLGEHGPFPNMDPHGRHLNYFQKTFLDIYTLFALFYIFVSTIIIVTIRFVYKFTRKHFILVKSKEN

SEQ ID NO: 6502 - protein, 525 aa, Haemonchus contortus
MWQRAFLILGLLNTVTSFNYLVVSPLFGHSHSHFMGTIADILTEAGHNVTVLMPIMDPDMKDTGLRSTKNVIKVPPDNRTAAMFIQKAKFMKKLWNIEPSAYGMVELGLQLARSFTWQCERVFNDDAVMYTLRQTNFDVGIAEAFDLCGFGIFEVLDVKATIATTSCVHSEAVSKAIGIPSAASYVPGAMSTKSDVMNTFERLQNVVEITLGAKFFDTLFEMEIAAFRAKFGQNFKDYEELLAQVSYVFTNSNPYLDYPRPTIHKSIDIGGIAVSLDSSHNKLPKKLDEIIDLREKNVIISFGTVVKSCYMPDEYKKSLLKVFEMMPDTTFIWKYEIDDSEMIRNLSNVYMSPWLPQNALLADSRITAFVTHGGLGSTTEIAYMGKPAVMVPLFADQIRNANMLAKHGSAIVLQKYDLGNPDRLLSAIETVINDRRYTTNAKMLADMLLNQPISSKQLMLRHAEFAARFGRIPNLDPYGRHLTTIQYYLIDLFLIAIIAMASTIFVCYFALRTIYRVTLHKAKTD

SEQ ID NO: 6503 - protein, 539 aa, Drosophila willistoni
MTKILNYSLGGLLLLLALTFSGPPTIEGANILGVFTSHSPSHFIVHMSIMQTLAEQGHNITVVSSVPPKVTHKSIKHIVIPLSAEDEKSLNDGMSALAKQKPSFITTMKTMLSSLSLLLTKQVDVLEHPKFKELYLNKDNKFDLVFNGFFFNLYQVGLGARFNAPLIVSWSGPPAAMVNGIVGNPELPASVPNMNVAVQPGQIMDFKLRFTNYISGLSFGALTWYLESQFNGYYKRIFGDDPTLPSYEEAKKNVSLVFCNSHGISEGPIRPNVPGVVEIGGIQVKDKPDPLPTDIKEFLDKSKHGAILFSLGSNLKGDHISADVIGEIFKALSKLKQQVVWKWDDLKNLPGTSPNILYKKWLPQDDILAHPKIKLFITHAGKGGVSEAQYHGVPMLALPVFADQPGNADKLVDSGYGLKLDLLTIEEETLTAGIKEILNNPSYAAKLERFSKLYRDRPMTARESVIYWTEYVLRHHGAPHIQSPLVHMGFIASNNLDIYALLVVVLVIVILINKVVWTYLWRKCCGKSKKVTQKKVKKQ

SEQ ID NO: 6504 - protein, 432 aa, Lasius niger
MDSDYEQLSMHLINYTEIDFGFEYEKIDDTDLSQTRWNLTQLGGLKTRLLRLGHDIAEDVLSHPDLLKYYANGTNVQFDAVIAEMIMTPAIYMLAHKFHAPLIGIMSMDLQNCHRFNFGSPVLSSHPSNWELENYTGLNLPFWKRLTNYINTWWSIYSWFNTFAAKQQQIAEKYFGKDIPHVIDVAKNMSLILINQEPLLAYARPEIPNIIHFSGLHIKKTPPVLSKNLKDFLDSATNGFIYMSLGTNVKSKLLPKGMLEIFTNAFANLPYKVLWKFENDSFHVPSNVFISKWIQQQGVLAHPNIKLFIYQGGLQSTEEAVHYAVPLIGMPFVFDQVYQVKKMVSLGVAKHLDIVQLTTPELHDTILEIAGDKRYKDRMLTLRALTKDKPYDSLENAIWWIEFVMRHNGAPHLHFNGVDTACYYRMGIEGFV

SEQ ID NO: 6505 - protein, 529 aa, Danio rerio
VMLKKGWLWGLGSGLLLLWLSAGLGPVQGGRVLVMPVEGSHWLSMKVLATELARRGHDVLVLVPEKNILIQSSELFRTETFPVKISKEQLSKSLKGFQQGVFTRSPALMDVFVQLERLLNFTGSQVEGCESLLYNEPLMRKLKEQNFELMLTDPFLPCGPIIATALGVPAVYFLRGMPCGIDLLASQCPSPPSYVPRFHSGTSDKMNFVERIRNFFMSGFELVLCKVMYASFDELAARYLKKDVTYKEIIGRGALWLHRYDFTFEYPRPIMPNMVFIGGINCQKSAEISAEVEEFVNGSGEHGIVVFSLGSLVSSMPKEKADIFFKAFSMIPQRVLWRYTDEIPNNVPENVKLMKWLPQNDLLGHPKARAFITHGGTHGIYEGICHGVPMVMLPLFGDQADNVHRVATRGVGVILSIHDITVETLLDALNSVINNSSYKQKMQKLSAIHNDRPIQPLDLAVFWTEFVMRHKGADHLRPAAHELNWLQYHSLDVIGFMLLIVLIVTLAMLKCCSLCWRRCCRKTQKRKED

SEQ ID NO: 6506 - protein, 537 aa, Salmo salar
MAGGGVWLRGAAAGLVLSLCLVVSCRAGKLLVIPADGSHWTGMKPLVEELGRRGNQVVVVIPEVSGSLGPSEHTITLTYPVPYTRTQLQTIQRANLDTIMASDTSNDISRMWSYYQTLTVLRNYTRNNCDSLLSNQDMMQTLREQAFDAILTDPFEPLGVIVGALLSLPAIYIQNGLPCGTDLEASQCPSPPSYTPGRFTHFTDHMTLRQRSVNFLWALLRPLACRYLYLCTLMFARFDKLTSRYLEKDITYRELLGDGAIWLLRYDYSFEYPKPRMPNMVNIGGINCGKRAPLPPDLQEFVDESGEDGFVVFTLGSLVSQMPEERAKQFFDAFSRIPQRVVWRYTGVVPENAPANVRVMKWLPQNDLLGHPKVKAFITHGGTHGIYEGICNGVPMVMLPLFGDQDDNVHRMAVRGVGEVLSVFDVTSDKLVEALNKVINDKSYKEKMLKLSTVHKDRPIEPLDLAVFWTEFVMRHGGANHLRPAAHDLNWIQYHSLDVFALLLTIVLTVVMVTVKCCKVCFRKCCGMIWTMKMKSE

SEQ ID NO: 6507 - protein, 527 aa, Nothobranchius furzeri
MGSRVWFPTAGLLVWLCCLSLGTVHGGKVLVMPVDGSHWLSMKILVKELSRRGHEVTVLVPESRLLIQGSDSYKTKIYQVPYTQAELDSQFESLRERLFDTPPHFTDFFVNVDRLVAFTSVQALGCKALLNNEPLISQLRVEGFEMVLTDPFLPCGSILAKIFSVPAVYFLRGLPCGLDTQASQCPSPASYVPVSFSGNTNNMTFLQRVTNIMMSYVESYLCGIMYKHFDDLTSMQFGNGMTYKELISHGAIWLLRYDFTFEWPKPVMPNQVFIGGINCAKKAPLPADLQEFADGSGDDGFIVFTLGSLVASMPEEKAKQFFDAFRQIPQRVVWRYTGPLPKDVPKNVRVMKWLPQNDLLAHPKAKVFMTHGGTHGIYEGICNGVPMLMFPLFGDQGDNVHRMVARGVAEKISAFEVTTETVVAALKKMIQDKSYKERMEALSQIHLDRPIGPLDLAVFWSEFVMRHKGAPHLRVAAHDLNWFQYHSLDVIGFLVAVVLVVLWVTLKSCAFIFHKCCGKRIVKKKSE

SEQ ID NO: 6508 - protein, 564 aa, Athalia rosae
MGSRYHRGKLPRDHSIAVGRPERVQPFVSCNGMASSSLLILGAVGLLGFSAPLVSSLNILGIATLPSKSHHLWYTELMKGLARKGHQIYSVGIEPTEFGDSVVRENQTRSIVLEDMISCLNKDGNFDPVSWRELSPMQTTVELYSVCNILCDYATKTNGGKEALELVRNTKLDVIVMDITMGQCFYGLREEALGNPPLVGFTPFGSPGWVKDIVGGSNWPAFKGYENYQKAPPFNLWERTWNLIYYQVDDFWRKFYYLPREKEVAEAYIGRKLEKSLEDIEREMTTLLTNTHASFDVGTFLPPNVIEIGGLHVKDTKPLPQDIKKFIDEAEHGVVVLSLGTNVQSSTLGTEKLQAIVSALGQLKERVVWKFETDTLPNLPKNVMIKKWLPQSDILAHPKIRALWSHGGLLSTQEAVWRGIPVIAMPFFMDQYRNIDMLVSKGVGLRLDYDSLSTETVLKTLKQILTDPGITTRMKRLSASYRDRPMSPIDTAIWYIEHAVRHPEGPLSSPGRNMSWVQFHLVDVYAVLGLVFLLVVWILKLLLKTVYNLVFRRGKKVEPKLKRK

SEQ ID NO: 6509 - protein, 530 aa, Daphnia pulex
MVSYFCATPLGFVLLVVSFRISSIVAHNILVLSPITTNSHSNFIKPVAKALADRGHTVTYWNGLPPDKETLTNPKANLNLLYSPGLRPLNDNHQVGYDDRPFQLLLAIPDRMATYCTAIYRDPVFHQLMSSTEQFDLLIIEALFNECVLPLVRKFDVPFVYMVSMTPSPWLLDAVGSSLALDHLPHAGSNYADEMDFWQRTYNTISGMMITYFHRFFVIPVVDRLASEILKLNNQPSVFEIQSEYMSLIISNTHFSINYQFPASPALIQAGGLHCLPSKQLPKDLESFVDGSGDAGFIVVSFGSVLRGSDISDHVRQLFLSTFSRLPQRVIWKWEEKLDETDSIPSNVKLLPWMPQQDLLGHPKIRLLITHGGLNSKQEAVYHGVPFIALPVFADQPINAQKAHDDGYAIRLDWDNLTEEILFDAIQRILSNSSYVERMNQVSALMRDQTDRPLDRAVYWIEYVIRHQGASHLRSASRKLSLFQRCLIDVLLFTLFLLLFLLISVFLLCRFVHQKVLHETNLQTSTKKTD

SEQ ID NO: 6510 - protein, 529 aa, Neodiprion lecontei
MSRCSIFAALILVAGVLHQGRASRILCIFPMPSLSHQVVFRGLTMALRERGHELVVITTDPINDPTLKNYTEIDINFLYADFTKDVDWIATRHKVTWNELFQSVAPRFIPMSERVLKHPDVKKLYSPNSGEKFDLLIIEMLYWPSFLSFAKYFDVPVIGMTSFGLPLQMHYGIGNPIMPSDPAHWDTEIKALGKLSLWQRLQNFVYAWRFLYYYRTVYLRGHQEISRKYFGTELPDIADIERNVSLIFINQQAAISFVRPNIPKIIDIGGFHISKKIEPLSKNLQKTLDAATQGFVYMSLGTNVKSVMLSNETREEFLAAFSKLPYIVIWKFENEVLPGRPDNVIIMKWAPQQSILAHPNIKAFIYQGGLQSTEEAISHVVPVIGLPVFADQDTQVNKMVSLGVGKKLEILTLNRMDLVDAINTIVLDGSYKQRMLKLRDLMRDKPYDSLENAVWWTEHVIRHKGAPHLHSTTANDPWYQRQDMDLIFLISAAILTTLTISLIVLYKLLLYSIHVLKYKLLVSKKEKVC

SEQ ID NO: 6511 - protein, 530 aa, Loxodonta africana
MSVKWISVLLLIQLSCYFNSGTCGKVLVWPTEYSHWINIKTILDELIQRGHEVTVLTSSASILIDSNKTSAINFEIYPTSVTKDDFEFILIKLMKKLTNDLLKDRFWAYFSLLQENLWEFTDCIQRLCKDVVFNKKLMMKLQESSFDVVLADALGPCGELLAELLKIPFVYSVRFLPGYTFEKYSGGLLTPPSYVPIALSELQDRMTFLERVKNMMYVLYFDFWFQAFNEKKWDQFYSEVLGKHTTLSETMGKAEIWLIRTYWDFEFPRPLLPHFDFVGGLHCKPADPLPKEIEEFVRSSGTHGVVVFTLGSMISNITEERANTIASALAQIPQKVLWRYDGKKPDTLGPNTQLYKWIPQNDLLGHPKTKAFITHGGTNGIYEAIYHGIPMVGIPLFADQPDNIVRMKAKGAAVSLDMNTMTSTDLLNALKTVINDPSYKENAMRLSAIHHDQPVKPLDLAAFWIEFVMRHKGAKHLRPAALSLTWYQYHSLDVIGFLLACVVIVTFLVIKCCLFGYQKFFKTGKKKKTE

SEQ ID NO: 6512 - protein, 521 aa, Culex tarsalis
MKVVTLMMVLAVGLLPVESARILAIFPSPAKSHQIVFRALVEGLLDRGHQLTVMSPDPIETNNPNLTQIDWSYAYKLVDENGDVAVATQEKWSSLKVTQKLLAVTEMFLTAELNHPEVQDMIRNPVENFDVVIVEYFQMTPFFAFAELYNAPMIGITSIDSIALAHSIIGNVANAVAHPEMVHKVSRVLSFSKRLDYFITMLFTEYVLFPGEFEKYDRMIEQHFGPNMTKSVQLMNRLDFLMTNVEPALGFVRPTVPRAIQLGFLHVKPPKPLPEDLQQYLDSSKHGVIYFSLGTLIRTKSLNAKNIGIFIDTFRSLKYDVLWKCDGQIDRIEKPSNVRLMRWLPQQDVLAHPNVKLFVTQGGQQSMEEAVDRHVPMVVIPFNFDQFGNGDKVVERGIGKSIWMERLTTDGLRQAILEVIENKKYKRNIERLGKLIRDQPMRPVDKAVWWTEYVIRHQGASHYRYKPAKMPAWQYHYYDVVAFLFTVTVLLVVALAYVVRRFFRFLAGHRWLSTQVKQKSL

SEQ ID NO: 6513 - protein, 605 aa, Symbiodinium microadriaticum
MAPMSQPMDQQITAEGPTIAIFNVAMIGHVNPTFALVQELCKRGCKVSYFLPPVAPIRAAAIESGAVVEGYLPEDPSDFVMEKCGIDEPLCHAVPEIVEDDRAEYERAVWPLAQALLCGEYVIERCRQLGVSVVLYDPFLPIGLLAGTKLGIQCASLVTYPGMGSLSGLMSTLEAEGRLERAGAIRKPYGKAIQDKFGVDLRCNLLTRRQFYTKTNFVTTCEDLIAELPASGEQKWADELRTEFSFSAVGCLVSSSAPHVITARSDSFIPRVKSFGHSLPVAELSDQLAKGRKIIYAALGTMALSDRWSIDLGRISGYNLPHGTTGKAFCQHVWKALLAAMEELGDEFFCLLSVGKQPDALDFLGSSEAAIFELVPSNVLIRGFVPQVDMLNNYTSAFISHVGFNSLQESLMAGVPLVAIPQAVDQPANACKVEQRGWGQAFFKPMETVSSTALAESLRQVCDENSMYRQQVQCARSELAGGAPRLAERSSAMIRKERSECFIPSCGAAMQRAQFADGGRARVACPGSAPWGQVVTTQWALPAHAGPYIQAEQVILPERCAVGQGSCRPTAILAGKLAGGGRRASSGRTYGSCHGIPGPGPEALL

SEQ ID NO: 6514 - protein, 512 aa, Dictyocaulus viviparus
MLDFLLLTMLMRCVKLTWILLWMLFYLDITINAGKILVYSPSYSHSHLISNGRIADTLVNAGHDVVMFIPEYLSSTTKFSGSKLAKIIRMNNISSRYDEGLLGGETEMMRQKNLNFASRLAFEHIGYEMCAALLDRRNELDELRNYGFDVAFAEQIEFCGIGVIRYLGIKNLLWISTTPIMDAVSYDLGIPAPPSYVPTIEENDNGDVMTLWQRAYNFYMYIGAIYIHRKGTDMITKIFKKFDPNFPNVREIAANASLCFVNVDEMFDLPRPIIHKTIYIGGLGIKQPKKLDQKFSNLMEKGRKGVIIVSMGTIAPFHGFTDITKIAFANVFRSMPDYHFILKIAKDDVTTASFLEDVPNSDLVEWLPQSDILAHPRLKLFIMHGGINGVMEAMLRAVPVIVIPIFADQFRNGRNVEKRGAGKVILKLDLTEITIRNTIRDVIENESYKANAVRLSKLMSEKPFTAEERLVKWTDFAVRHGVLDVLHVQGSRMNFIQYHNLDVFTVAIVLLW

SEQ ID NO: 6515 - protein, 577 aa, Caenorhabditis remanei
MIGLKDLLFYCFILFLCSTSSESYKILVYTNLFGHSHVKVMATVADALTDAGHNVTVLMPIIEQQFINKTCLKSTKNVIFVEQDDKLKALMATRSKRFETLWTSGFNNPFVVAKKYFIQKSKLMSELFSEHCRKVMSEKKLIEQIKSENFDLAITEPFDTCAYGEMIRFFQLSMDTVLHKFTSCLVLRCFRDILRNYASPAFFEAISIRAHVAVYSCSRLDHVSEVIGQPAAPSYVPGMTSLFGEQMNIWDRFLNFYLYKANSYAFSRIGDENYRVAKEFYPNIRSWREVVPEATFLFTNYIPYLDFPAPIFDKMIPIGGLTVKTDQKEVQLEEKWSNILDGRKKNVLISFGSNARSEEMPIEYKNALLKVFQSMSDTTFIWKYENPEDPFTKHLENVYLSAWLPQNELLADPRLTLFITHGGLASVLELAMTAKPAIMIPVAADQTRNAQMMKRHGVAAVLKKFDLANPVKIQEVIKEVMKDSSYRDNAKRLAEILHNQPTDPKEKLVKYVEFAARFGKLPSLDNYGRHQSFVEYFFLDIISIISFTVLVSSYIFYRLFKFVFQKCTGSSVKNKKE

SEQ ID NO: 6516 - protein, 693 aa, Cavia porcellus
MLRNILLLSLQISLLGTTLAGNILIWPMEGSHWLNVKIIIDELIKREHNVTVLVASGALFITPSSQSSLTFEIYKVSFGKERMEGLIKDFVLTWLENRPSPSTIWRFYQEMAKVIKDFHTVSREICDGVLRNEKLMDKLKKSKFEVLVSDPVFPCGDIVALKLGIPFIYSLRFSPASNVEKHCGKVPYPPSYVPAILSELTDQMTFADRVRNFISYHLQDYMFETLWKPWDAYYTKELDGSHWLNLKTLLEELAKRGHEVTVLSTSNNLFIDYNRHSAFNFEVIPVPTDKNLAENRLNEFVELAVNVMPTVSLWESGRLLQQFFIDVTKDMGLACRSTVYNQSLMKKLQESKYDVLITDPVLPCGELVAEMLGIPFVNTLRFFTGYTVEKYCGQLPAPPSYVPVPLGGLTTRMTFMERVKNMMFSILFDFWIQQYDYKFWDQFYSEALGRPTTLCEIMGKAEIWLIRTYWDFEFPRPYLPNFEFVGGLHCKPAKPLPKVLWRYKGKEPATLGPNTRLFDWIPQNDLLGHPKTKAFITHGGTNGIYEAIYHGVPMVGVPMFADQPDNIAHMKAKGAAVEVNMNTMTSADLLGALRTVINDPSYKENAMRLSRIHHDQPVKPLDRAVFWIEFVMRHKGAKHLRVAAHDLSWFQYHSLDVIGFLLVCVASAILLVTKGCLFFYQKFINTGKKIKRE

SEQ ID NO: 6517 - protein, 436 aa, Cryptotermes secundus
MVSVRDAMAVTVLVLVLVFLTSLQECKGAKILGLFPVPSPSHAAVSFALVKELAQRGHQVTVLSPYPQEEPVPNYTDIALQKIELKDVLNITVVPNPYEMQSLNYFQRVPIVWAMGIFLCDRVLGEPSVQKLVHSDGDHFDIIIMAGFYVDCLLGFAHKFKAPVVQVCPFGGAEYIGDTVGNPNPYSYIPDVFQEFSDKMSFGERIINTLCQLFQQVGRRYFLIPRQEVIMRKHFNYTSSMPSIADLEKSTALVLVNQHFSISYPKPVMPNFVQVGGMHIKAPKSLPADIKKYVEEATEGVIFFSMGSNLKSSQLPDKKLRGILEAFSKVKQRVLWKWESESLPGKPSNVKVAKWLPQSDILAHPNVRLFITHGGLLSAQETIYHGVPIVGIPVFGDQRLNMAKAVSSGYGFQLDYTDVTAESLGSAIREVLDNPR

SEQ ID NO: 6518 - protein, 837 aa, Symbiodinium microadriaticum
MGPHVLPLHTPVLEGAEYRTRRELATYDATDPQLAFDFLGRYVKTLEVVLNGKAPRNSASSTRPDVKMKSFIQMCDSAFVIFVRRSRLILALSRHIAAGSLNAVRIRSHFQRQALSTEAQLYLPDGVHGPSLHRWHMQAQLPVPLSIKKVQTQYPKRWRAITLVLTPLFMTFLGAGIITFVYGAIGLHNFRDEFGMYCDENIMAWHLVCTQSILYMGTRSGIVGLSGMMDQVGYFVIFGVMLLNTIVALIVDSFQTQSVAQSAGIVDGFEYHETYKQNKWDYMAFVFHLREKHALDRGLPESQIRQFIDNSDALRLSSLVCWTRAPHRKLIPEQKLRCGVHATTTCAGPAAPHCWPGLQRLWLPTHRLPMGLIQASAKPPSEEVRKVAAFFCTEDAGHINPMLAFAESLTVRGWQVSFFVPKSKRMQVEGVGATWSHFGTESWDLYESAIRVCTELGLEVPMELDPQKIMPFAVVPATLEILPYLIPRMSELQPSFICFDAAAPFGYLLAEHMKIPAVCSMSALPMPMADREKESSRRSEQGRQVLDATSAALAEKYGLNFNHNYSYTCYSDYNIVWCSRYWHEDSSEFSPEQFHYWGPLTSQRKGIASGPGSDAVSTTLCNLPGRLVLCSLGTIATGDAFGKFGAAVVDFFQKLCRAAALLQKELPDVQLVLSAGKSTDLVEEGGRVTSLFGEQVPSNVVVARSLDQLALLEKASAFVTHCGQNSSSEAVLAGVPVVAAPFFGDQPLNAHRFISLGCGLLQSYVDVPAKTSDKQFRPDLDRVSSESLAAAIRRVLEEPQFGEAMRTLREKEEGEPVDEKLQSLYKFIAGHQAVQPS

SEQ ID NO: 6519 - protein, 669 aa, Bactrocera oleae
MHLLSVILMVTALLCTSNVQAYRFLGILHTGARSHHIVGSSLFKELARRGHQVTVISPFPLKKPLENYVDIETPRIKAVMESECYELKSLSIICRYLKIKIIMQSIKRYAYPQLEGKPDNVYISEWFPQDDILAHPNVKIFITHGGLLSTTESIYHGKPFIGIPIFGDQFLNMNRAEAGGYGISVDYTNFTKEKFKVAIERMLNDDSYAKRLAAISAIYRDQPINPLDLAAYWVEYVVRHKGAKHLHCAGQDLSFIQYHSIDSMLILFGGLALAILLTMLLIRLIWERLRDIPLSEHYNVPLIGLGTFGAHPWNTDMVGSPSPPSYVASAMLPFNDRMTLWQRVGNFAYNIFERLLLDLYYLPKQAAIYREFFPHNKRDMYEVRRNAALVLLNQHVSLSFPRPYVHNQIEVGGMHINRKRSPLPADLERFINESKHGVIYFSMGSYLRSKFLPLEKRKAILETFRGLKQRILWKFEDPQLEGKPDNVYISEWFPQDDILAHPNVKFFITHGGLLSTTESIYHGKPFIGIPIFADQFLNMNRAEAGGYGISMDYASFTRDKFKAAIERMLNDDSYAKRVAAVSAIYRDQPINPLDLAAYWVEYVVRHKGAKHLHCVGQDLSFIQYHSIDSMLILFGGLALAILLTILLIRLIWGWLQFALARKDIKEKTH

SEQ ID NO: 6520 - protein, 528 aa, Chrysochloris asiatica
MLNRIILLLSLQISLLGTTHGGNVLIWPVEGSHWLNVKIIIDELINKQHNVTVLVASGALFITPSSKSSLTFEIYKVPFGKERIEEVIKNFVLTWLENRPSPSTIWRFYQEMAIVIKDFHMVSRALCDSVLQNQQLMERLKKGKFEVLVSDPVFPCGDIIALKLGIPFIYSLRFSPASTVEKHCGKVPYPPSYVPAVLSELTDQMSFTDRIRNFISYHLQDYMFDTLWKSWDSYYSKALGKPTTLCETMGKAEIWLIRTYWDFEFPRPYLPNFEFVGGLHCKPAKPLPKEMEEFVQSSGEHGVVVFSLGSMVKNLTEEKANLIASALAQVPQKVLWRYKGVTPATLGANTRLYDWIPQNDLLGHPKTKAFITHGGTNGIYEAIYHGIPMVGVPMFADQPDNIAHMKAKGAAVDVNMNTMTSADLFNALNTVINDPSYKENAMRLSAIHHDQPVKPLDRAVFWIEFVMRHKGAKHLRPAAHDLTWFQYHSLDVIGFLLLCVATALLLVIKCCLFSYQKFGKTGKKKKRE

SEQ ID NO: 6521 - protein, 524 aa, Aedes albopictus
MAARSAVAAILLLAVTFSEGAKILGVLPTGGKSHFYIGAGYMKALAEAGHDVTVISPFPLKNAPKNYRDIELTGFLEQFEKDYEQNMFKYKSSGGVIAPLFMLFMMYEMFAEVMCKAVLEHPNVVELLNSGEKFDAVLVETFITEALYGFAQHFDAPLITYSTFGSSMWTNDLVGSPAPPSHVAHFLLSYTDKMTFWQRFHNTAMTIVDRLYYELRYLPSQKRIYEAGFPNAKMTFEQQMKNVSLVFLNQHFSISSPRPYPPNMIEAGGIQVEEGKPLPEDLQKYLDEANDGVIYFCMGSNIKSIHFPEEKRDAFLKVFSKLKQRVLWKFEDETMPNQPPNLMIKAWMPQNDILAHPNVKLFITHGGLLGTTEALYHGKPLVGIPIFGDQPMNIQKAVRSGYAVLLDYDDITEKNVEKALDAVLNDPSYARNAKLVSQRFRDKPMTPKKTAVFWTEYVIRHRGAPQLRSSALDLSLFQYQLMDVYAVMLAILLAVVTLNVCIAKRILRKVFKRKSSVDKKKKQS

SEQ ID NO: 6522 - protein, 526 aa, Apis dorsata
MIRNIARLSFFLYVLIIANKSDCYKILSVVPTPSYSHQIPYRRLWLELHARGHEIVVITTNPIPDISLPNFTQIDISHSYSCLKELDFIENRFEHVSWLRILENYIISLYTCFLTEVFNSSEVKKLYVPDNPVKFDVLLAEFFYGPAMCAFAHRFNVPLIGLSSLGMIALNEFILGGLVLPSHEYTWEMEANTGTNLPFFKRLNNFVTMWNFLYHINFDVFFFQQKLAEKYLGPLPPLMDIMKNTSLIFTNQIDILSPARPKLPNIISFNSFHVSNNPSPLSKDLEEFLDDAKEGFIYFSLGTNARSSCLPKEIIRMFCDIFAKLPYKIVWKYEQDLPEKSGNIYIKDWFPQQSILAHPKIKLFIYQGGQQSTEEAINFGVPIIAFPILGDQDYLVRRIEALGMGKYLDIRTIVPDQFENTIKEVITNKEYKERVLDIRTQIRETSQDVKKIAWWTEYVIRTKGALHLRSTLAWEPWYQRYDTDIIIFLTIVIFVNFLIVISIIVNILMYFYKKMDTSTHRKSKIH

SEQ ID NO: 6523 - protein, 469 aa, Aedes albopictus
MRIVSLWTLVTLSSLCSAADILMITMGGTKSHKIPFWELAKGLIPRGHNITFLSGFPADFSFNGLQEVTPSGLVEFIRNYTNWDLLGARMRGDLPLSLWDVFRYSWQACDATLEDKETMDLLGRKFDLLILDGAYPECVVSLAYRLGAPYMYINTVGFYTGTMAMAGNPGPYSVTPVFYRPLTDDMDFLQRVMNSIFHLTIQPVYVASMTLLQAIVRRHLGADIPHVWDLARNVSFILQNGHATVTYPRPLLPNIAEIACIHCKPAGPLPKDLEDFIGGAGESGFIYVSMGSSVKAANMPDHLRKLLIQTFSRLPYRVLWKYEANSSMLTDLPPNVRLGRWLPQQDILGHRKLRAFVTHGGLLSMFETVYHGVPVVTMPVFCDHDANAAKAETDGYALKLDLETLTTEKLVRGIHRVIHDPKFRNEAKRRQMLLKDTRTTPLETAVYWTEYVLRHNGAYHLQTPARNLS

SEQ ID NO: 6524 - protein, 513 aa, Mythimna unipuncta
MIRFGLLIASIALVRGARILCMFPTPAYSHQMVFRSYTQALIKRGHQLTVITPTPVDNKNVNLTEIDISSSHANYKRLLDNSKVFKKRGIISDVETVNHHNYLGLVRMVSDQFRNERLRRMLHEDLDRKRFDLIVIEAFIDFPLVLSHFFDAPVIQMSSGHGIAENFETMGAVSRHPIFYPNVWRDNFLNLNAWQMAVETYREMMLYKEFSLLAEEENKLIKLQFGAQVPDVQVLRKNVQMLLLNTHAMFDNNRPVSPSVQYLGGIHIKKPSKIMNTHLLNFLEKSTAGVVYVSFGSGLHALDMDDEFLHVFLSTFRSLPYNILWKVDSINDTLLPSNVLVQKWFPQQDVLNHRNVRVFVTHGGVQSTDEAIDAQVPLVGLPLMGDQYFNVAKYSELGIGRSLDAKTVDSAELIEAIVDANENPLYKKNLARVKQIISDQPMKPLDKAVWYTEHVIRHGGASHLKTKAANVAWHEYLMVGVIVPILVSTFVGCLGTYSKYTLGLLSNPIHYMF

SEQ ID NO: 6525 - protein, 554 aa, Ostrinia furnacalis
MRLFFICLLLASAVNLEAYKVLLCFPFPVRSMNSLGDGYARHLINAGHEVTFITAFPKKQNIPNLREIDVSDNYEIIANENFNNISFILENILDLSSDVEFLQRLTLDIALKTLENKDVKALMGNPKETFHVFIADLLETELYAGFAALYNCPLIWAYSMGAHWVAMRLIDDPTNPAYSSDYFTTPIAPFSFTDRFRVLWENVKWRYAKIFITQPKEEAAYISIFGPELKKRGMIMPDYDDLIYNASLVLSNDHHASGNTPKTPQNWKFVGGFHIEAPVKPLPEVSDLATGRVKTIHQIMWFHHHHFSHKTSTAEHRDLKTIMDNAVHGVIYFSMGSVWNSELIPMQIIDGLLETFGELKATVIWKYEGNLPDVPKNVHLIKWAPQQSILAHPNCKLFITHGGLLSSTEALHFGVPIIGVPISYDQFLNIEKAVTRGYALQVALSYKLPEKLRSAINVVFDNPKYREQVKKLSKIYHDRPIAPGKELVHWIEHVIRTQGAPHLRSPANLVPLYQKAYLDILMLAIAVIALVIYLKNLVFGESNKRQSKKKFKKN

SEQ ID NO: 6526 - protein, 491 aa, Zootermopsis nevadensis
MLCADTESVGAFPAQSSAEILRTEMDLIRASCLVVLLACAEFQGDGARILGIFPSPSFSHQLVFQTIMKALSARGHHVTVISTDPLKEPIGNYTDVDLSFMYDYVRGKLNFSDCQGITAFGTVLRFSLHVGIVCNMQLGSPAIQDFIRCHPSTNTSFDLVFMEMSRYQCYYGLIHHVGSPPVIGIRSVGTTSATLAAVGSPNNPAYFPDYYLPYTGHMTFFQRLHNTAIYVWNSVLWHALLMPMNEVAMRYHFGRGPPSVWEAEKNVSLVMVNSHWSQSYPLPLLPAVIQLGNIHIQEKPKQLPQDLQEFLDGAAKGAVYFSLGSNVRSETMSPEKRRVFLSAFADVPQRVLWKWEANDTSDVPDNVKLAKWLPQQDVLAHPNVRLFITQGGLQSFQEATYYAVPLIGIPFIADQQHNVRKMVDAGVGLQLDYATLSKDGLVTATRKVLHDPTRRFKDWNFDRRAETKSPFLKRSSEAPQPRPLLAASRAS

SEQ ID NO: 6527 - protein, 550 aa, Dendroctonus ponderosae
MLLRGLPLILMTLELCGAANILAMFPLPGLSHFVMFRALLKELAQRGHNVDVFSHFPLEKPIKGYHDIDLRGSSPLLTNNMTFDVLRDEKGVEFAKLMSNEAGFKICEDSFKATQLKQLKTSRKKYDLLLTELFGSDCMLGWAWHFKVPTIVMTSSANLPWAADRFGLPDNPSYIPTYFMGSVSKQDFFGRMMNTWTLIRSKMLYRLHSTIPSNKLAKEFFGPEMPDLDVLAYNTSLQLVNSHFSVNNARPLVPNVVEVGGLHVGEPRPLSKVVRKKAYRLHSTIPSNKLAKEFFGPEMPDLDVLAYNTSLQLVNSHFSVNNARPLVPNVVEVESLPRGKLEALLNALAELPYTVIMKANVQKFPKDIAAPKNIVFEPWIPQLDILCDPRVKLFISHGGMMGTQEAVYCGIPVLGIPIFADQSLNIKYTEAMGFGIMVDYEKITKETLVIAAGKLLEDPKYRANAQRLSAYFKDRPMKPMDTAVYWVEYIVRHQGAPILQSAAKDLAWYQYYLIDVAAFLMFFSALLASIVAKVFVLLRNLGAKKKTKTS

SEQ ID NO: 6528 - protein, 310 aa, Danaus plexippus
MYNDHVQYENEVLKRLFGSEIPDINELRKNIRMVFLNVHPIWDFNRPVPPNVIYLGQMHLQKERVKKLPEEIELFVNSSVHGFIYMSFGSNVKLSSLPQEKIQIFSKIFSEIPYEVLWKRDGEIPVNLSQNIKISEWFPQSTLLRHPKIKLFITQGGLQSTDEAIFAGVPLIVVPCLGDQWYNAEQYVRHGIGRKLELNNLNEKLLKESIEDVIHNKSYRENVKKLRQIITDQPQTSLEKAVWWTEYVLRHKGAKHLMSPAANLSWLEYYEINFVIFLLGILFLCIISIIFILRLLVTFLFVRDIKIKEN

SEQ ID NO: 6529 - protein, 485 aa, Culex quinquefasciatus
MGRIVEYLVAALAVLSSFAGGTNILCLMSVASYSHHIWNRVLMEALATKGYNLTIVSADVEKVQKVNMTYIHLEETYHAVHEGDSAIDLYEMAQEGLVKSMRTFYDYGIASCEGSLRSKGLGQILSYPDDFKFDLVLYDFTLGPCILGLFHKFGQPPLVGVTAFNIPPYTDDLIGGHKYPAYIPYYTLNYDSYMTFLQRLENAFIYAADYFYRTYVFLPATDKQIRQIPAFKNMPYVGSLQEKTMLVMVNSHHSVDFPEPIPQNMVMVGGLQIMEPKPLPEDIKKFIDSGRKGAVLFSLGTNVLSSDLGDERISMFLEAIRQFPEFNFLWKFEADLKNHRVPKNLMVKKFLPQNDILAQPKIKLFITHAGLLSTHEATWHGVPMVGIPFIADQYRNLEKSLQAGVAERLVIWTVSTEKIVATIRKVLEDDGYRVRMRVKSALFRDQPEKPLERALWWIDWCLRHPNAETIRSPTVRLGPWKSELA

SEQ ID NO: 6530 - protein, 506 aa, Strigamia maritima
MKLLITYFVILLFNIIHAYRILYLFPFTTKSHMFVFEPLIEELAKRNHHITIVSPYTFSLHQQQNIREIIINIEDDNSKNMSTGRFSSYGNHILFQFISFKYVVKPGCEAYLKNFEVKELLKQGKQFDVVIVSAIFNECALATAPLLGKNIILHCSSAFLPWFNFHDSQLQLPSVVPVVMTPFVSKMNFLQRLDNGILFLAVRLLMEYNFVAAIQAVITEHLLQNPSVSEGFESIDLVFTNADPVITSPRPAIPTIIDLGGMHCRKAKPLSKEFEDFVESSGDYGFILFSLGSISQSKDLPVETIKSLLDGFSRLEQRVIWKYEKDLENVPKNVKISKWLPQKDLLGHAKIRLFITHGGMLSLQESVYNGVPVVAVPLFSDQPGNVARVEEIGIGVKLALSNISGDSMYDAINKVLGDKRYAENLKRYSAIFHDFIENQVEKAAYWVEYVIRHKGTDHLRTGSKELNFFSIFTRCNCFYSLYLFIFAYVSMTILKLIVAKKIKNEH

SEQ ID NO: 6531 - protein, 536 aa, Drosophila virilis
MKTFAALLLLLLLFCHKWQQLNAASILCLIGTAQHYNPGWTKPFFEALAGRGHSLTVIGTQPDLGLPHIRQIFLPNEHDVVKKHYTNDMGHYRHHWDIKQLLIWYEALLGGCRSITEANFYKTFDMTALKYDLIIYDATFSMDCLLTTLPRYRSVPVLGLSGGKFTTDLIDLVQGEDTISAATIPHFIGRLPITMNYWQRIQNHVMYLAESFIHWAVVQPVLNGMLESGVSSIKAQVVLLNTHPVLDYVQNMPPNVIEVGGLHIRAESEPLPFSLQEFIERFSEGIVYINLPHIELMYGLGLKAVESMIKEFSQLGFLWNVNNLKDLQLSESLYNLRAISVFDNMQQNILAQSNVKAFLTHGDSFGIQEAIYNAVPIIVLPLLMDQMNNGERVQERYLGVCISAKNFSVDSFSAALKQIIRDEIYLEELRQAQLNFRTRPAKPVDLAIWYAEQLVSQPDIFKQSSVPESSQRSYFVRKSLDVLSLPLLFFLFFFANVVLAIMQSIVTDNQKKTAKQVKKLNGIGKEQSSDKEQKED

SEQ ID NO: 6532 - protein, 383 aa, Apis cerana
MPAMYAFAYRFNASLIGLSSLGLLSINDFVLGGAVLPSHEYLWENEGNTGINLPFYKRLHNFVKTWRLLLHLNFNIFPKEQKLAEQYFGPLPPLIDIMKNVSMIFINEADVLTPGRPILPNIVRFSSFHVSENPDPLPKNLQKFLDDAKEGFIYFSLGSNARSSTMPKEIKRIFCNVFAKLPYKVIWKYEEDLSEKPKNVYIGKWLPQQSILAHPKIKLFIYQGGVQSSEETIRFAVPVLGFPILADQDYQVRRMEALGIGKYLEITTFTEDQLKNAIYEIINNKKYKERILIIRDQIKDTPYDTVKHLAWWTEYVVRTKGAPHLRSTLALEPWYQRFDMDIVVFLAIVTCIIVSILFYIIIKLLVYLYKISQISTNKKQKIT

SEQ ID NO: 6533 - protein, 462 aa, Culex quinquefasciatus
MGSFINSKDFPVEKRDAIIKAFARIDQRVVWKFEDESIPDLPNNVLIQSWLPQNDILAHPNVKVFITHGGLLSGTEALYHGKPIVGIPIFGDQTMNVQRAVKAGYGVELQYKDITKSSIRNALDKVLRDPKYAETARSISRRYHDKPMSTKKTALYWLEYVIRYQGAPQLRSPAMALTLIEYCSIDVYSLVVTISYATGARILGILPMGAKSHNIIGAAYMKALAAAGHEVTVVSPYTLKTPPKNYRDIELTGMLEAMDDQEKNLFNYKGSGIGSFFIMMYVLYGKLPEVVGKLVLQHPNVVKLLNSNEKFDLVIVESFLTESLYGFAQHFDAPLVTYSTFGNSMWTNDLVGTPAPPSHVAHFLLSYADRMAFWERLVNTVVTILDRVVFEWYYLPKQREFYEVGFPNAKISFEDQMKNVSLVFLNQHFSVSSPRPYAPNMVEVGGIQVEKPKALPKMFTEF

SEQ ID NO: 6534 - protein, 523 aa, Rattus norvegicus
MFKMPRKWISALFLLQISYCFKSGHCGKVLVWPMDFSHWMNIKIILDELVQRGHEVTVLKPSAYFFLDPKKSSDLKFEIFPTSISKDELQNHFIKLLDVWTYELPRDTCLSYSPILQNLVYEFSYFYLSICKDAVSNKQLMTKLQESKFDVLFADPVASCGDLIAELLHIPFLYSLSFSPGHKLEKSIGKFILPPSYVPVILSGLAGKMTFIDRVKNMICMLYFDFWFERLRHKEWDTFYSEILGRPTTVDETMSKVEIWLIRSYWDLKFPHPTLPNVDYIGGLHCKPAKPLPKDMEEFVQSSGEHGVVVFSLGSMVSNMTEEKANAIAWALAQIPQKVLWKFDGKTPATLGPNTRVYKWLPQNDILGHPKTRAFITHGGTNGIYEAIYHGVPMVGIPMFGDQPYNVTHMEAKGAAVKVTISTMTSADLLSALRAVINEPSYKENAMQLSRLHNDQPVKPLDRAVFWIEFVMRHKGAKHLPVAAHDLSWFQYHSLDVIGFLLVCVVTLTFVITKCCLCVENFV

SEQ ID NO: 6535 - protein, 1005 aa, Laodelphax striatellus
MKLFLVLAFITTGILSIASCESYNILAIVPIRTRSHFMVIEAVLKGLADKGHNLTVVNVNPQKTPIKNYHDIDVSQHPKHIVSNTTVDFIISNMRPIHKGLLFIWDFGFEKMCKNVFKDQQFQNLINTTQKFDLVLTEIFAYDCFAPFAYKLNVPLVSIVTSTALQWMNPRVGNPDNPSYIVNYASAFSPQMTFLERLVNFYFLIFAKIGYHFLSDNRGYEIAKQYFGDDLPHLSEIYQNTSLILVNSHFSINQARPFVPNVKEIAGIHLKEPKPLPEDMQILLDNAHNGVIIISFGSIVRMSSFPENVKFAFIKAFSSLNQLVVWKYEEELLTIPPNVVLRKWIPQFDILGHKNVKLLITHGGQSSCIESVYHGVPVIGIPMFADQPGNVMNLVNRGMAIHIDYFNITAESILHAIQTILNDKSFEENARKVSEIFKDRERTPMETAIYWIEYVIRYKGAPHLQTSANQLSVFQLYLLDIFAFLILMLATIVLVCFGFLVCLTFSDAANILAMIPFKGKSHFIVIQPLLEGLTGRGHNVTVVGPYPRDVPLHNYHDIDLSTEMGPQLLNRLRIDEINSNFRSPTQGYHWIWDICRSMCEIAYNSSKVQNLVKSEEKYDLLITEIFASDCFIPFAHKLRVPLVSIATFYPVSWLNPRVSNPDNPSYIANYALPFTDKMTFFERILNSIAFVYARLGYYYLSDSPSYEMAKTYFGSDSDMPQISEIAKETSLILVNNHHSISQVRPLVPNVIEIGGIHLRAPHPLPLDLQKLLDGSEKGVIVFSFGSVVRTASLPPAIIDEFIKAFAKIKLTVLWKFEGTIENLPPNVVTREWIPQCDVVAHPNVKLLITHGGLASTIEAVSNGVPIIGIPMFGDQPGNIQRIVEKGAGLKIDYSEINTDKVYRSIQQLLLNPKYKTNAKKLSRIFKDRELPPLETAIYWTEYVLRHGGAHHLKSGAQHLSWIELHCLDVLAFILLGFATVLVVAIKLFASLVKLIKKNHNFFSSH

SEQ ID NO: 6536 - protein, 405 aa, Daphnia pulex
MSTGLDEKFHLILVDGFFNECTLLLAELFDVPFVYLNCFVPPPWLQNTMGTPFAFDHFPHSGLSLSDRMNFWQRSLNAVTGLALVAFYHLHVVPVIDAAAVKVLGLDNFTSIVDIEDRRLSLLLTNTHFSINYLMPTSPAVVQVGGMHCVPPKPLPTDLESFVDGSGDAGFIVLSFGSILKGVEIPGGVRNIFLSTFARLPQRVIWKWEDKGVLPDGLIPSNVKLVSWLPQQDLLGHPKARLFITHCGLLSKQEAVYHGVPFIALPVWSDQPINAQKAQEDGYAIKLDWNQLTEEVLYDAIQLVLNEPRYKRRMKEVSAVMRDQMESPLERAIYWIEYVIRHQGAPHLRSASRQLSIYQKCLLDVMAFLSAVCLLAIYFLFRLCRRSVCSGQRRQKSAGPRKKLN

SEQ ID NO: 6537 - protein, 540 aa, Bombyx mori
MWAGTRWPIIGLPILLVASVCGSDILMITMGGTKSHKIPFWSLAGGLTRRGHNITFISAFPPDFHIAGLEEIAPEGLVSYVKSYMSWDLVGARMRGEEPLPAFDILRYGYEACDALLKDYEMRSFLQSGRTYDLIIIDGTYPECALGITYKMKVPFMYINTVGFYSMPLSNAGNPAPYSVTPFFGRAFTDNMGIIERAMNSAWQIGAMALHGVSMTILQGVLRRHFGSQMPHVYDMSKNVSFILQNAHYTVSYPRPYLPNVAEIACIHCIEPKRLDPEIEEWISGAGDTGFVYVSMGSSVKTSKMPLTAHRMLINALGRLPQRVLWKQDAVQNMTDIPSNVKLLKWSPQQDLLGHPKIKAFITHGGLLSMFETVYHGVPIVTIPVFCDHDANAAKAEVDGYAKKLEFQYLTSDKLHEAIQEVINNPKYRREVKYRQNLLRDQKESPLDRAVYWTEYVIRHKGAYHLQSPAKDLTFIQYYLLDVAMLFVISALAFYALISFAIRSSFQRLAVFIQNRQMKMLFDNSTGLIGNSLMEQKKKL

SEQ ID NO: 6538 - protein, 908 aa, Blattella germanica
MIPVGKVNSWSSVFNKTAVLRLMIEPVMRLFTLAVCLFIAKESGIAFGARILGLFTIPSISHQIVYRSLMRELHARGHQLLVFTPDPIKDPTLKNYTEIDLSASYDVWRKRFDSLTKTRDKGISVPLMLIDFVHAGLDLCDVELNLPEVKEFMKGNDKEFDVVIAEWVMSPCFAVIPHKIGAPLMGISSVAPSLTVHSVVGNPVNPAYTPDILLGYTDHPTFLERIYSTLHTTMVKFVYHFWIIPAHDAVVRKIFPDIDMPFIQEVINNVSVILVNSHYSFYYPRPNVPTMVEIAGLHLSDPKPLPKDLQEFMDGAVEGVIYFSLGTNVRSDSMSDTKRQMFLDAFSELKHFRVLWKWEGDEIPGLPENVQIRKWLPQQDVLAHPKVKAFIYQGGLQSTEETIRVQVPVIGIPFFADQVLNVRKMVHAGAGVRLDFKDISKESLLNALNEVIYNPIKMESTISISVFAVIWLSTIESARILGVFPVPSISHQVVYRALFTELNSRGHEIVIVTTDPLNNSSLKNYREIDIRASYKVWGDKFNFLKNRVMGATRKDFMNGLLDISEGLCTGVFDNAEVKKLMRTNKERSFDLVMVEWLVTPCTYTFAYHFSAPLVGISPLVILYSGYESVGNPVHPIYFSEALCPALKNPTIWDKIERISYFIWYKWYWYTITLVQDEIARRYLGSSMPYLGDLEKNVSLVFTNVPTSNHFVVPKVPALVELGQMHFQEVKPLPKDLQDFLDEATEGVIYFSLGTNVRSDSMSQEQIQIFNDVFSQLVNFRVLWKFEGDILLGKPNNVKISKWFPQQDILAHTKIKAVIYQGGLQSTEEAIRMKVPVLGFPIFGDQDLNVQMVVDNGIGEMLYIDELTREKLLSTLKKLIYDPKYVGIHILDRCSRTSPPTRVKVVSGR

SEQ ID NO: 6539 - protein, 508 aa, Tribolium castaneum
MRTVLFILQTTVLFSATTCARILGVFPASGYSQFILAEALMKEIASRGHEVTIISPYRPKTAFFNYTTIQTSDVLHSDDGFDLFELDNKSLFKNILTTYEYGNLLTEFTLKDKGVQKLLHSNESFDLVIVEQFFTDALKGFATHFNALLVLFSSVGLTEWNKHYMGNPVLPSTNTIVYTGYTNQMNFFQRIRNLAGTIFDYCYRTWVFYPIQRKYAEKYFPKPVNFDGIINNASLMLLNSHFTTSENVLLPYNMIEIGGFLVTQNRLNNDTQKLLDEATDGAILFSLGTNLKSCDLAPNTLRTILKVFGRLKQKVLWKFEKDLPGKPKNVVISKWLEQADILAHPNVRLFITHGGILSVTEAIFNGVPMVGIPVFVDQKMNMARAKHARIANVISLKELTEERFFSMINETINNPTYSENVKKMSKLMKDRVVRPLDLAMYWIEYAIRHKGVRFETPVSKMYWFQVYMLDIFCFVIFNLLITYLLITGLCTYLGKEKSSVINDNKKKQ

SEQ ID NO: 6540 - protein, 549 aa, Salmo salar
MGWRKGVLVLRPGLRLGPGLGMRQGLRLGLLVLLCCLALCPAPLQGDKVLVMPVDGSHWLSMKLLVKELAARGHEMVVLVPDTSILIQGSDYYRTETFRVPYSKAQLDENVNKLKDAAFLKAPDIMDIFVNVQHLIHFTTMQVKGCEGLLYDKPLMQRLRGERFQMMLTDPFLPCGSIIAESFNIPAVYFSRGIPCGLDEKAAQCPTPPSYVPRLFSGNTDHMDFLGRVKNMLMYSLESYLCTVMFASFDELTSRYLDKDMTYRELLGHGAIWLLRYDYSFEYPKPRMPNMVNIGGINCGKRAPLPADLQEFVDESGEDGFVVFTLGSMISQMPEEKAKQFFDAFSRIPQRVVWRYTGVVPENAPDNVRLMKWLPQNDLLGHPKVKAFMTHGGTHGIYEGICNSVPMVMLPLFGDQSDNVHRMTVRGVGEVLTLFDITSDKLVEALNKVINDKSYKEKMLKLSAVHKDRPIEPLDLAVFWSEFVMRHGGAEHLRPAAHDLNWIQYHSLDVFTLLLTIVLIVVMVTVKCCKVCFRKCCGKKKTMKKKKSE

SEQ ID NO: 6541 - protein, 800 aa, Symbiodinium microadriaticum
MVTPARKFGFIFPMASGHINPSLPVARTLVEEGQEVHYLCREQMKDAIEDTGATFHSEIEALPEMYEGRNVDIFGCLSDLQKEYGLEEDPLFVAMFKIREIMQEMMLPGILRWLEKVGVDVVVICPLMNKEACWAAQILGIPCVGIMTTAGPGSLRSATLEWMEKMGYTTERCLKERRAYQPLLEAVDRLRAKYGLEIELDEEMAPVGMSVVAKQSALTLVTTVDFLADPLSPELEKIYEEAQTEFVFVGPLLDKAGAKRAAGHKFQKEAESAQGLAPLAETAPIDPVALIRKAREAGRKVIFASMGTVITGDSPEVGWANHMSVDGVFQGLTGKELCQAAWGGLFDAFGTDSADAGPLLLVSLGPQPDALENLVAPANAACLPVMPQVDILKEGVDLFLTHGGQNSFMESLSTGSPVVVCPGFADQPVNAQKAVQLGVGLQIERPMCDLSEASQVAAKYRCDVAAALQEVHGNPEFKTKANECSSKMQSAGALANSGCRPGLRRRLGPWLMAAALSPVVAQLAVAFSGSAIHAPPRRRLVSRPASSSELPALRSKASLKLIQAQVAAGHDMKELGVRMEQSEFKASALDGAATVTFDGMQNLRSVDISDDALAKAGSETALAEALLKALQEGHDSSVAGSEDDIWSLYQNNPDLIQAPLIQIGAGNTAQDLWANVTKTNETLKLAEELFLHFDQDKDGFWNFKETSAVQLATEGTEMGEEAFNSLIIAAAPNGGRHLTEEDMARGLSKDQVLDLYTNAQRQRQLGFVLDIMKDHQRVFSQESNAEETESKPAPVSVSVD

SEQ ID NO: 6542 - protein, 523 aa, Xenopus laevis
MAVGRKSLILSLLIQHFVLLHGAKILTVCFLGGSHYLWMDEISRILHNNGQEVTMFLQIADGLLPDYQMQESPYRLITWSLDKNYLKEFSEFFRDSKYNFKDCDELSSYLGLMTHFSRQCKMIFNQTSIMNLLKEEKYDLAVIDSFNPCTFLVSEKLGIPFIATHPFPVKSPWHSGIPNQLSYMPVYQSQLTDHMDFFERVKNVFMYIASAVLERKIYSLFDDVIEEHFPACSRPSFEELYKKTALWMYLTDFTIEFPHPFFPNVLYIGGVLAKPAKPVSEELEDFIAQSGEHGFIIVTFGSMVPSNPLTEFVKEMNDGFSKIPQKVIWRYRISEWPKVLQLAPNVKIMNWISQNDLLGHPKARLLVTHGGVNSIQEAIYHGVPMVAIPLFFDQFDNAVRIKAKHLGTFIPKDQLKAEKLANAIRDVIGGESYKNSAMHLSLIQRSQPFPKDQQIVRWVEHIVKVGGTDHLIPYSYQQPLYQQYLLDVFLFVCVCVIGACYLTVKLLKMFIQKLCSFRKLKQN

SEQ ID NO: 6543 - protein, 536 aa, Ceratotherium simum
MVSIKDITMPKKFVQLLVFNFTLTEIVLSGNVLIWPTDGSHWLNIKIILEELIQRNHDVTVLASSATLFIKSNPDSPVHFEVIPVSYKKSNIDSLIEHMIMLWIDHRPTPLTLWTFYKELGKLLDTFFRINIQICDGVLNNPKLMARLQKGGYDVLVADPVTICGDLVALKLGIPFMYTLRFSPASTVERHCGKIPAPASYVPAALSELTDQMTFGERVKNTISYSLQDYIFQSYWGEWNSYYSEVLGRPTTLCETMGKAEIWLIRTYWDFEFPRPYLPNFEFVGGLHCKPAKPLPKEMEEFVQSSGEDGVVVFSLGSMVKNLTEEKANLIASALAQIPQKVLWRYNGKKPATLGANTRLYDWLPQNDLLGHPKAKAFITHGGTNGIYEAIYHGVPLVGVPMFADQPDNIAHMKAKGTAVEVNINTMTSADLLNALRTVINDPSYKENAMRLSRIHHDQPVKPLDRAVFWIEFVMRHKGAKHLRPAAHDLTWFQYHSLDVIGFLLACAATVIFLVTKCFLFSFRKLGKTGNKKKSE

SEQ ID NO: 6544 - protein, 528 aa, Microcebus murinus
MLNKILLLSLQMSLLGSTLGGNILIWPMEGSHWLNVKMIIDELIKKEHNVTVLVASGALFITPTSKPSLSFEIYKVPFGKERIEGVIKNFVLTWLENRPSPSTIWRFYQEMAKVIKDFHMVSGEICDGVLKNQKLMEKLKSSKFEVLVSDPVFPCGDIVALKLGIPFIYSLRFSPASTVEKHCGKVPYPPSYVPAVLSELTDQMSFTDRIRNFISYHLQDYMFETLWKQWDSYYSKALEMGVSVCFPGWSSTPGLNSQQPQTPGLKQSSCLSLPSSWDYRLPVGRPTTLCETMGKAEIWLIRTYWDFEFPRPYLPNFEFVGGLHCKPAKPLPKVLWRYGGKKPATLGNNTRLYDWIPQNDLLGHPKTKAFITHGGTNGIYEAIYHGIPMVGVPMFADQPDNIAHMKAKGAAVEVNMNTMTSADLLNALRTVINEPSYKENAMRLSRIHHDQPMKPLDRAVFWIEFVMRHKGAKHLRPAAHNLTWIQYHSLDVIGFLLACVATCIILVMKCCLFSCQKFGKTKRKKKRD

SEQ ID NO: 6545 - protein, 519 aa, Plutella xylostella
MWKLLLVLCVCAAPLSAAYKILVVSPVPGKSHTILGDGFVRNLLNAGHEVTYITAFPVENPPARLHQVNVSDNIKYFPVDLVNIKKLIDDKGEQPSLSVFFGIIEQQARNTVSNENVQRLMRDPKQNFDAVIVEWFFSEVFTGFGSVFGCPMILFSSVEPHWMVLQWIDGLPNPAYTVDIQSTGTAPLGFLARAKELFNQVAGLLFKSLYFEAIENKIYEENFRPAAEARGRTLTPLNVQRYNISLMLGNSHVSLGEATRLPQSYKPIGGYHIDPDLKPLSKELKNIIESSKDGVIYFSMGSNLKSKDWPVEIKQDLLKMFSGLKQTVLWKFEEDLPNLPKNVHILKWAPQPTILAHPNTKLFITHGGLLSTTETIHFGVPIIGIPAFADQFVNVDRAVGKGFAKRVDLSYDIAQELKGAIEELLTNPSYTERVKELSLIYHDRPAPPARELVHWVEHVVKTRGAPHLRSPALLVPWYQKVYLDLAVVVFSVLAAIYIGLKRLCCSKKGEKTSAKQKKN

SEQ ID NO: 6546 - protein, 525 aa, Ceratitis capitata
MTKITFTILALALIVLTPNYLESAKILSIFPFTGPSQYLLVQPYLKALAARGHEITSVSVFPQKTPLKNFRDIAIKNTDADHNDYIKYAMENFAGSKLNELRFVKGYVLPATLAVLKNEEFQQLLWSNEEFDLIIIEVFSQEALYALGHHFKAPMIGVSTFGRDVVVDQLVDNVSPVSYVSAPSGRQLHEMNFWQRLDNLYINTMEWLYDKLVLLPAQQRFYEQYFPNATLDLSEVRRNFSLLLLNQHYAFSWARPLVPNAIEIAGMHVEHIPKKLPADMEAFINASPKGAIYFSLGSNIKSTYLPREKLSAIMDAFASLPVNVLWKFEKTDLPGKPKNVFINKWFPQQDILAHPKVKLFITHGGMHSSIEVVHHGKPIVGLPVFYDQHLNVERAVNNGLGVGLDFRNFTSEEFRDAILEVLNNPTYAERAREVSAGFHDRPMKPLDAAIYWTEYVLRHKGAPQLRVAARHLNFLQRHSVDTMAVLFGIPILLAISVIYCIFKLSLVVYGSKSISQCDVKKRKAE

SEQ ID NO: 6547 - protein, 473 aa, Haemonchus contortus
MDPHANLVGHTKPIFQIPYYSKYLNNSGFDDYDMGSPAFWTSPMVEGRSISIEDIKRYHENALLMCKALIEDHELLDRLRNSRFDVALHELYELSAVAFLELIGVKKAIVVSAAGMTLHMKEITGMPPNPSFVPGIFTTYNDEMTFWERLDNFKCEIELNYRFLQWEEKLRQLFNKASPGFPDLRKLLKQKIGVILVNANEFTETPRPRGNIVRYIGGMAIPEPKPLNQELSAVLDKRSTNVLFSMGSLAKSSTMPLHLKKDILNAFAAFPNTTFVFKYDGKDDLELFKPYPNVHVMKWVPQVDLLGDKRLSLFVTHAGLNSITEATYFGKPMITIPLFADQFINAKNLRRIGLAVLIERNNLNKDTLITALCEVLSPDAKYAHKASTVARYLRGLPSAARAEVTRWVELVAEEGQMEHLMMKARDLSFIQYYCLDIIGYLLAQIVIVLCVMFLLMRYLSRRITLVFQKKKIE

SEQ ID NO: 6548 - protein, 537 aa, Daphnia pulex
MSSLFVSCVLTLMMVLFFSAAADAYNILVLTPITSPSHTNVFKPLVTALAERGHFVTHWDGLKPPSHSSSSNNRTSNSNVRVLYSPVMAEINREHNVNFSDRDHPLRLLFRVPKTVANYCRAIHEDPVFRQLMSTGLDEKFHLILVDGFFNECTLLLAELFDVPFVYLNCFVPPPWLQNTMGTPFAFDHFPHSGLSLSDRMNFWQRSLNAVTGLALVAFYHLHVVPVIDAAAVKVLGLDNFTSIVDIEDRRLSLLLTNTHFSINYLMPTSPAVVQVGGMHCVPPKPLPTDLESFVDGSGDAGFIVLSFGSILKGVEIPGGVRNIFLSTFARLPQRVIWKWEDKGVLPDGLIPSNVKLVSWLPQQDLLGHPKARLFITHCGLLSKQEAVYHGVPFIALPVWSDQPINAQKAQEDGYAIKLDWNQLTEEVLYDAIQLVLNEPRYKRRMKEVSAVMRDQMESPLERAIYWIEYVIRHQGAPHLRSASRQLSIYQKCLLDVMAFLSAVCLLAIYFLFRLCRRSVCSGQRRQKSAGPRKKLN

SEQ ID NO: 6549 - protein, 784 aa, Trichuris suis
MHTSFHMPVHFLLLLLRLCSSQSKTIGLFMNTGPYSHDAMMQHIADDLYDKRYKVFLLQIRVFNFNMTLPKSKYVHPTLRYDYSGPETLAVMQEAQAQIWHGPVPLGGGTVNLKGVYAFQKLYEVQSAACQAALKSESYLSKIKAAHLDFIVIDYVLNECALGISAILKIPRVYLSNYPLIEVYSNTFGVPSNPSYVPAVLSPTSSRMTFVQRLQNVLIHTATIFIRASLIWRSQKLLHSVGHDAELRGEERKAIFYGTPLEFLLDGPRPLSNSVKYLGCLRCSRRDEIRTSQSQSWLPDKNMIIASFGTCASATRLPKQVLNSFITAFSQLKQYKVLLQMPGIEIHNSTWPSNVVAVQWIPLLDLLRSPSVKLLISHGGMSTTVEAVNNAVPMLGIPLQGDQMYNVGRLVEKGVADVLPISGLTAELLSKKLRRMLPITANDQTLNLKQKRAIKNYSIGVVVTMIREQVLNSFITAFSQLKQYKVLLQMPGIEIHNSTWPSNVVAVQWIPLLDLLRSPSVKLLISHGGMSTTVEAVNNAVPMLGIPLQGDQMYNVGRLVEKGVADVLPISGLTAELLSKKLRRMLPITANDQTLNLKQKRAIKNYRGVVNYEEDLECESLEVFLRFKNEPFQKQDNRHPDLVLLPEYRQALSTFIAKIPKILVQQMTPGLIKCPAGLPQNSRVKRTLNGLNLWACLALLWMCVRLDIFFQNKAVSSQLKRCSGRDPFSSVTFLNCSGNVDRANTSTIAASPVLFKFFLLEYVFGQHVTQAVDKRFNSRVNMER

SEQ ID NO: 6550 - protein, 531 aa, Salmo salar
MVSVRLLLSMALLILCGCQGTHSGNVLVFPGEYSHWLNMRVILEELVVRNHSVTVLVCSASPTVNYTKPEGFSFKVYNVPFERHDLESLQEDFLNFWIYEAQNASMWQVGLKIREVLGSMTALQLSMCDAIFHNKELMDTLRQWEFDAVLSDPMMPCGDLMADALDVPLIVSLRFTFGMAMERHCGQIPAPPSFVPAPPLTYTDQMSFLERVHNFVTYMIHSSFFSIHCLQNMDKYYSGIKGRPTTLCEIMGKADIWLIRTNWDFEYPRPFLPNFKFVGGLHCKPAKPLSKAMEEFVQSSGDDGIVVFSLGSMIKNLTKERGNTIATALGQIPQKVLWRYSGEKPETLAPNTRVYEWIPQNDLLGHPKTKAFVTHGGTNGLYESIYHGVPMVGIPLFADQPDNIMHMKNKGAAVMVDFNKMTSKDLVDGLNSVINDPSYKASMMRLSRIHHDQPMKPLDTAVFWIEFVMRNKGAKHLRVEAHNLSWYQYHCLDVAAALLTIVALVIVVSIKTCIFCFRKCCKKTKSRQKTE

SEQ ID NO: 6551 - protein, 262 aa, Aedes albopictus
MIEAGGIQIEDAKPLPADLQKYLDEAKDGVIYFCMGSNIKSIHFPEEKRNAFLKVFSKLKQRVLWKFEDEKMPNQPPNLMIKSWMPQNDILAHPNVKLFITHGGLLGMTEALYHGKPLVGIPIFGDQPMNVQKAVRSGYGVLLDYDDINEQTVETALRTVLNDPSFTRNVKEVSDRFRDKPMTPKETAVFWTEYVIRHRGAPHLRSPALDLSLFQYQLLDVYAVMLVLLIGIVAVDVYIAKKILRKICRKMCSGGNKKKKQN

SEQ ID NO: 6552 - protein, 1142 aa, Culex quinquefasciatus
MGRIVEYLVLALTVFSPSEGTNILCLMSVASYSHHIWNRVLMEALAAKGYNLTIVSADVEKVQKVNLTYIHLEETYQAVHEGDSAIDLFEMAQEGLVKSMLTFYDYGMASCGGSLRSKGLKQILSYPNDFKFDLVLYDFTFGPCILGLFHKFGQPPLVGVSAFNNPPYTDDLIGGHKYPAYIPYYTLNYGSDMTFLQRLENAFIYAADYFYRTFVYLPALDNQIRQIPAFNKIPYIGSLQEKTMLVMVNSHHSVDFPEPIPQNMVMVGGLQIMEPKPLPEHIKKFIDSGCKGAILFSLGTNNDILAQPKIKLFISHSGLLSTHEASWHGVPMVGIPFFADQYRNLEKSLQAGVAERLVIWTVSTDKIVATIRKVLEDDGYRVRMKARSALFRDQPERPLERALWWIDWCLRHSNAETIRSPTVRLGPWKSELYDVKLLVVLVALLVSSKENKAAADQNSNISQQLEEINAKLAKLDSLEKLNKDLLTKLLKLSQRVDAVTVESRKCPSNIWKPSPRFASWLASRNPRTLVFKQNKRTDAVLVKFWRVQDKQRFIGCVRALKRPVTPAELNIRSQNKFVLVQDHLTPEKVELHRQTWELCMLGLQRPWIYNGSTWTTHPETNKRFQQTGRKDPAHSTEIVSVAFGANILCLFGVASPSHHIWNRAIVDALAAKGHNLTIVSPDVEKNTVENIHYIELEETYPELYSGPHNVDLMEMANENVFKSVISFYRDFVITECQGILKSKGLALIKNYPDDYKFDLVLYDMTCGGCMHGLLHKFKYPPLVSVTPFNNPPYVTEVIGGHKFYAYTPFFSLGYGSDMTFFERVHNTLLYTVDFIYRNYYSNPVLDKMVREYFQYDDLPYVPDLDRLSRVLLVNAHYSIDFPEPAPPNLIPVGGLQIKEAKPVPDDLEKFINAGRKGAVLFSLGTNIRSDELGKERQILLIEAMRQLTDYNFLWKFESDLDLKLPKNVMIRKWMPQNDILAHPKVKGFITHAGLLSMHEASWHGVPMIGIPFIADQHRNIQKCIRMGVAERVVFQTLSMEQVRDTVRKVLETPSYRKNMDRISVLFRDQPEKPLARAVWWVEWALRHPDVESMQSPVLKLGFLRSNLVDVIAFLVLLPCVLIFVVRKLVCKGRRVDRSKKNN

SEQ ID NO: 6553 - protein, 440 aa, Dendroctonus ponderosae
MHLTGKVWLQLVIIVNVVVAMDAAKILFLSCTPARSHQKPFQVVWRALSQRGHDVHVLTPNPLNDPTLNNLTEYDLSDFYEDLKAMKNDDIQYFLHRPTFFSSFVKDVVATKMFSRLYNKTINHQETRRLLRENDRFDAVIVEWIFPTLASIGAYYKAPIIGITSLGAPLVALDSLGNPSHPLVAPEMNLPLKRDLSIKERLLSVLYAFYVRLYYWVVVLPREDENVKKHLSSELPYIGDIAKSLSLLLMNRNPVFHRVVPLNPNTIDLGGISVLSPATSLDSSTEEAIAAHKPIIGIPFHSDQTTNVDTCAMYGMGKLLDMEDITIETLRSYILEIVNNPRYAENAKKLDELMKDQPQDGLDKAIWWIEYVIRHKGAKHLRSIAVDLPWWQYFLLDVFGFIFTVLLIFLLSVRFTLKLVFRLISYIRKPKEKSMKKKKQ

SEQ ID NO: 6554 - protein, 521 aa, Aedes aegypti
MAARSTVALALLLLVAFSEGAKILGVIPTAGKSHFNIGSGFMKALAEAGHDVTVISPFALKNAPKNYRTIEVPEVLAESNFDQNMFNFKSSGGAIAPLFLLFLMYESFAKVICKCILDNANVVKLLNSDEKFDVVFVETFISEPLYGFAQHFDAPLITYSTFGNSMWTNDLVGTPAPPSHVAHFMLSYTDKMSFWQRFHNTAMTIVDRLYYELRYLPNQKRLYDAAFPNAKMSFDQQMKNVSLVFLNQHFSLNSPRPYPPNMIEAGGVQIDDAKPLPEDLQKYLDEAKDGVIYFCMGSTIKSTHFPEEKRNAFLKTFSKLKQRVLWKFEDENMPNQPSNLMIKAWMPQNDILAHPNVKLFITHGGLLGMTEALYHGKPMVGIPIFGDQPMNIEKAVRSGFAVFLDYDDINEDTVDKAINEVLNNPSYAKNVKQVSDRFRDKPMTPKETAVFWTEYVIRHRGAPHLRSTALDLSLFQYQLLDVYAVMLVMLVAIVAIDVYIAKKVLKKVLRKMCSASKKKKQ

SEQ ID NO: 6555 - protein, 246 aa, Asbolus verrucosus
MDLIAESELNSTQFKKLIADQSKEFDLILIECFHPVMYALAGRFKAPVIGVSSLGVLTAGYDVIGNPVHPVLFPDVILGMNTGQLTIWQKIKSVLFNIWSRYYHHNVLVPRSDKLARKYFGNDIPYVGDLERNMSMLFLNVNPLIYPPRANVPMIVEMGQMHIKPVKPLPIVAHPNIKAFVTQGGLQSTEEAISRGVPLVGMPFMGDQPMNVQKLVEIGIAVGVDPVSVTKDELKKAIIEVAENCK

SEQ ID NO: 6556 - protein, 520 aa, Aedes aegypti
MKLCWLLLLSSLCIISVQNVQSAKILGVFPTSSKSHYIVGSALMKALARKGHEVTVISPFPQQKPMKNYRDITTTKVWKAVEPIVTNLLDIAKKNPIESIQSTYDFGHRITNSTLTDPPVVDLIASNETFDLIVLEIFMNDAMIGFCHHFKAPCIGMSTFGASKWTADLVGTPSPPSYVPNAFLGFSDRMSFKERLFNTLMSAMEILVDATIDYPVQNKIYQDAFPGPKPPLAELKKKAISLVLLNNHFSLNYPRPYVTGMIEVGGMHINRVPKPLPDNIQSFMDNATDGVIYFSMGSNIKSKDLPIEKRDAFLKVFSKLKQKVLWKWEDDNLPGKPDNVFVQSWWPQDDILAHPNVKLFITHGGLLSTTESLYHGVPVIGIPVFGDQYLNMAKAERGGYGLSVAYAEISETKLSNAIEAILNDPQFKVNALAISQRYRDQPLTPLELATFWVEYVIRQKGAPHIRTAAMDLSFVQYHNLDVLGLLIGLPIVILHLLVRRVCRKKSSKPSNKNNERKKRN

SEQ ID NO: 6557 - protein, 310 aa, Daphnia pulex
MPVVDRMAQKMLGKNLPAIEEIERHYMSLLIVNTHSSINYQLPLSPAIIQAGGLHCVPPKPLPKDLESFVDGSGDAGFIIVSFGSVLKGVDMPNNFRRIFLSAFARLPQRVLWKWEDQPGENDSIPSNVKLLPWMPQQDLLGHPKIRLFITHGGLFSNQEAVYHGVPFIVMPIFADQPINAQKAHDDGYAIRVDMDSMSEEILFDAIQRILTDPKYAEKMNQVSALARDQMESPLDRAVYWIEYVIRHQGAPHLRIASRKLSLFQRYLYDVLLFVLFSALSFLFLVFYLCRHIICSNGRVKINGQKKKKN

SEQ ID NO: 6558 - protein, 520 aa, Bos taurus
MSKMSMKRLSLLLLLQLTCYFSGGSCGKVLVWPVEFSPWLNIKTILEELVTRGHEVTVLISSASTIPNSSKPSTMKFETFPVSLTKSDYENFMERILEELTYVAKDSFWSYLSTVKNVFWEFFDIALHMCEDAVSNKKLMTKLQESRFDILIADAVGPCGELLAELLKIPFVYSHYTSPGHIIEKKSGRLPFPPSYVPVMFSELSDRMTFLERIKNMLYALYFDLFFMTYKEKKWNQFYSEVLGRPTTLSETMGKAEMWLIRTYWDFSFPRPRLPNVEFVGGLHCKPAKPLPKEMEEFVQSSGENGIVVFSLGSMVSNVSEDRAKVLWRYDGKKPDTLGPNTRLYKWLPQNDLLGHPKTKAFITHGGSNGVYEAIYHGIPMVGTPLFADQADNIARMKSKGTAVRLDLETMSTRDLLNALKEVINNPSYKENVMRLSAIQHDQPMKPLDRAVFWIEFVMRHKGAKHLRPAIHDLTWFQYHSLDVIGFLLACVATAIFVITKCCLFCCLKFAKLGKKEKRD

SEQ ID NO: 6559 - protein, 429 aa, Cryptotermes secundus
MGQKWTYSLLALLLCTGFQSDGAKILGIFPTPSLSHQLVFQAIMKALVARGHEVTVLSTDPLKERLQNYTDVDLSFMYDYVRQRYNFTDYQDVTAFGATLRFTLHTGIACNMHLGSPQIQDFLRVHQGSNRSFDLVFMEMSRYQCYYGLVHHVGSPPVIGIRSVGVTAVTLAAVGNPNNPAYVPDYYLPFSSSMGLLERIHNTAYYVWNRFLFHTVQMPASELVMRYYFGRGPPSVWEAENNVSLVMVNNHWSQSYVLPLLPSVVQLGSIHMQEKPRPLPEDLKKFLDGGTKGVIYFSLGSNVRSETMTEEKKQAFMSTFAELPQRVLWKWETNAMSEVPKNVKLVKWLPQQEVLAHPNVKLFITQGGLQSFQEATHHAVPVIGIPFICDQQHNVRKMVDAGIGVKLDYSTITKDKLVKAITKVLHDPT

SEQ ID NO: 6560 - protein, 238 aa, Notothenia coriiceps
MAARPSVHCRHGRPATRVAGWDAGAGGLEDKYNYFTLNCFKVLWKYSGEKPATLGANTRIYDWIPQNDLLGHPKTRAFITHGGANGIYEAIYHGVPMVGIPLFGDQPHNMVNMKTKGAALSVEFNSMKTEDLRDAVNTVINEKSYKENAMRLSSIFHDRPMSPRDEAVFWIEFTMRNKGAKHLRVQAHELTWYQYHSLDVLALLLAIALFLILLFIKTCSFCFRRCYGRKGKTKRKAE

SEQ ID NO: 6561 - protein, 404 aa, Branchiostoma floridae
PVVDSHWMALAKIGRALVDKGHTVAVVISEDIVEKRHTEWPDFQFEAFQDQGTRARLIELQDRDFSTAGKLSFFEKGKAFVAWAGELAKHCGLLLGDGKLEHRLRASQYSVVIFHPLFPCGAILSARLHIRVPHIAVMRKDNYCIDEKGTGVPTPPSYVPSLLADFTDDMTFGQRVQNSALSTLLPILLRHFGGRAFDGLVRTYVGEEETIQSVTSRTDLWLYQTDNVLDFPRPSMPNMVQVGGLNVRVAAPLTENMDAFVQSSGDDGVIVVSFGSMIKTMSAERQEVFAAAFARLRQKVVWRYVGEKPTGLGNNTRLLAWLPQNDLLAHPKIRAFITHAGSNGLYEALHHGVPMVCLPLVSDQPGNAARVVARGLGVRLDFSTVTSDQLYQAILHVVTNTRYS

SEQ ID NO: 6562 - protein, 522 aa, Drosophila mojavensis
MLGIRYLLIVTFTCQALAADILMATMGGTKSHKIPFWELAKGLISRGHNITFLSGFPADFHIDGLHEVTPASLVEYIQNYTNWDLLGARMNGEMPIKPWDGLRYAFESCDAMLGDAETKDLANRTFDLAILDGAYPECLQGLTHLYKIPFMYINTVGFYTGSLSLAGNPASYAITPNFYSSFTDQMSLYERALNTGMQIGQNILHSYVMRRTHRIMRDHLGAHIPHPYDMSRNVSFILQNGHAVVSYPRALNPNVAEVACIHCKPARPLPKDLDDFISASGASGFIYVSMGSSVKAANMPESLRRMLVKTFARLPYNVLWKYEGSAADMQDLTPNVKLSRWLPQQDILGHSQLRAFITHGGLLSMFETVYHGVPVVTMPVFCDHDVNSAKAEVDGYAIKLDLETLSTNQLYKSIMKVIHDPRYRNAARYRQNLLLDQRSTALDTAIYWTEYVLRHNGAYHLQTPARNMSWWQYYLLDVVGLYLLALCALILILRRLDIRSEKVRNPHYPNLIPPTKKKSKKL

SEQ ID NO: 6563 - protein, 839 aa, Caenorhabditis brenneri
MSSLFSSHCRNVMSKRKLIKELKNEMFDLAITEPFDACAYALFEAISIRAHVAVYSCIRLDHVSEIIGQPVPLSYVPGMQSSFGEKMNIWERYMNYFQFKGSSFIFQTIGDKGYEAAKEFYPNIRSWREVVPEASFIFTNSIPYLDFPSPTFDKMIPIGGFTVKTDKKSLVLEEKWSKILNQRRTNVLISFGTNARSVEMPEEYKKSLLEVFKSMPNTTFIWKYENPEDPFIKDIENVYLSSWLPQNELLADPRLTVFITHGGLASVMELAMMGKPAVMTYGILKTDNSKVFSYKKNAERLAEILHNQPTKPLETLVKYVEFAARMDKLVLFTILLLFPIKSESFKILVYTNLFGHSHVKALGKVADALTDAGHNVTVLMPIMERRFINETCLKSTKNVIFIEQDDHSKQLIEKWSNRSSVWTSGGITPLNVFKKATVISNLFGAHCKNVMSQTKLIEELKTEYFDLAITEPFDTCAYAFLEAISIRAHVAVYSCSRLDHVSEIIGQPVPPSYVSGMYSPYGERMNIWERLENYFVFKARSYMFQAIGDRNYEEARKFYPGIRSWREVLPEASFIFTNSIPYLDFPSPTFDKIIPIGGYTVKIEKKFLKLDEKWNEILDKRKTNVLISFGTNAKSDEMPEKYKKSLLEVFKSMPNTTFIWKYENPEDPFIKDIENVYLSSWLPQNELLADHRLTAFITHGGLASVMELAMMGKPAITIPVAADQTRNAEMLRRHGGSIHLRKFDLANSDLVKGAIEKVVNDKRRVFFSLKQFPRHEFFQALPCHTNNYKKNAERLAEILENQPTKPLETLVKHVEFAARSVGITDNRLKCFDSDSENYR

SEQ ID NO: 6564 - protein, 694 aa, Echinops telfairi
MLNKIFLLLFLQLSILGTTHGGKILIWPVEGSHWLNIQIIIDELIKKEHNVTVLVASGALFITPTSKSSLTFEIYKVPFGKDRIEEVIKNFVLTWLTHRPSPATIWRFYQEMAVVIQDFHTVCREICDSVLQNPKLMERLKKGNFEVLISDPVFPCGDIIALKLGIPFMYSLRFSPASTVEKHCGKVPYPPSYVPAVLSELTDQMSFADRIRNFISYHLQDYMFDTLWSSWDSYYSKALDGSHWLNIKIILEELIKRNHSVTVLASSATLFINSKMDSPVNFEVIPVSFKKRHIDALIEHMIMLWIDHRPTPLTLWAFYKELGKLLDTFFQINIQICEGVLNNPKLMTKLQKGGFDVLVADPVTICGDLVALKLGIPFMYTLRFSPASTVERHCGKIPAPTSYVPAALSELTDQMTFGERVKNTLSYPLQDYIFQSYWGEWNSYYSKVLGKPTTLCETMGKAEIWLIRTYWDFEFPRPYLPNFEFVGGLHCKPAKPLPKVLWRYKGQKPATLGANTRLYDWIPQNDLLGHPKTKAFITHGGTNGLYEAIYHGIPMVGVPMFADQPDNIAHMKAKGAAVDVNMNTMTSADLLNALKAVINDPSYKENAMRLSAIHHDQPVKPLDRAVFWIEFVMRHKGAKHLRPAAHDLTWLQYHSLDVIGFLLVCVATALFLVTKCCLFSCKKLGKRGKKKKRE

SEQ ID NO: 6565 - protein, 240 aa, Otolemur garnettii
MGPKELLTKIPEVVVGWSKCRGAADAVIQKGHKGLRILKVLWRYTGTRPSNLAKNTILVKWLPQNDLLGHPKTRAFITHAGSHGIYEGICNAVPMVMMPLLSDQMDNAKRMETKGAGVTLNVLDMTSADLENALKAVINDKSYKENIMRLSSLHKDRPMEPLDLAVFWVEFVMRHKGAPHLRPAAHDLTWYQYHSLDVIGFLLATVLTVAFIAFKCCAYGCRKCFGKKGRVKKAHKSKVH

SEQ ID NO: 6566 - protein, 496 aa, Saccoglossus kowalevskii
MARSQMTSHELLLLTLMCVLVGSVSCYKILILPGLPFGSHFLYFAKLGEHLKSKGHDVTMLLGENNNVLNKIPHIVDSLYFEKYTTAMDNKLMTKLDKVRTKSLNGDFNPMDMMILNNALVEDCVLLLENQELFQRLQRKKFDIILIDNFASCTILMSQKLDLPFVIVSTNRPIIMMDAYYLNMPSPIAYAPSMMSELSDNMNFGQRLSNLIYRIIGHSMYGLLFLAPYDELKLKYDIKPEMDMMTSSGKSEITLFAVDWALEFSRPIMPNTIFLGGLLASPSSPLTNEWAEFMESARHGVVIFSFGSMVDLALCPEKAELVCAELSRLPQKVIMKYNGPPPTTLGNNTKLTKWMPQNDLLGHPNTKAFVTHGGMNGVYEAIYHAVPMVGFPLYGDHYETFSRVSSKGMAVILNISTLTSDELYDAVIKVINTPSYKENAKKISAIHKDKPMSASDTVVFWIEYVIKHGGQHLRTEAFNLSFVEYFLIDIAVFLIL

SEQ ID NO: 6567 - protein, 246 aa, Saccoglossus kowalevskii
EWTEFVESAVEGIVVFTLGSQANIGEDLEKATKFVKAFARLPQKVIMKYEGNPPNGLGENTKLSSWIPQNDLLAHPNTKAFISHGGINGVNEAIYHAVPFIGMALFAEQLENVERLVNKGMAISLDSKSFTEDDVYNAVKKAIEDPRYKDNAARLSSIQRDTPMPPGDTAVYWVEHILKFGGDHLKPSSLELNLVQYLLLDIAVFLLIVVAIVIIIAKLVMKQIFKICCKLTDVKLNRKKNSDKIN

SEQ ID NO: 6568 - protein, 524 aa, Bombyx mori
MKSIALYFLLSIFGVESARILGVFPMPSISHQVVFRALSMELARRGHELVIITTDPALPKNRPKDNITEIDISRSYQLLRKFDEYAEKTQPIQKRGVISGVEIMISEHAAGAMFMLMAEVFNSEEVNQLLQDKNQKFDLIISEAIMSFHLIIGKIFNAPVILFSSLYGLPETFETVGAVTRHPILYPHLFRNKFTDLTLFEKIREVYYEARLTLLYWGLQNAENNYLKSRFGENAPTVQQLRENVCMVFLNSFPLFDNNRPVPPNVVYLGALHLQPVKELPEDLKTYLDNSKRGVVYASLGTNVRASAMSKEFLETFIKAFEALPYDILWKIDGDDIKAFPKNVRVQKWFPQRDLLVHPNIVAFVTQGGLQSTDEAIDAGVPLVGIPLIADQWYNVNKYKELGIGISLDSFTVNAEELAQAVKTVATDKSFKNNIAKIKTLMHDQPLKPLERAVWWTEHVLRNGGSKHLRSPAANMNYSEYLMLDVVLALLFLFFTVISILALIAYKLFGILKKMTFSGKLKSS

SEQ ID NO: 6569 - protein, 540 aa, Drosophila simulans
MFPPGRWLLPMFWLISNAICGIRSYRILVIAPFESHSQCMLVTPYIQALKDRGHQLTVIHAYKHCMHKIEDVTFIRVWYNNNAYADFEESVAIDSVASKWEEISTISKVMVNATLNVLNNAEVRALMRSGITFDAVVLEAGYSDVLYGMAAHFSAQLIGICTCVADWNINNLVGFSTSTLTEPIMPFGVKSVKNVWDRIYNWFYTTEEWLLMNLVFLPKQRLIHDHFFGHLEKSFQEIRQDFALMLLNQHFSLFRARPNVPGMVEVAGLHIPKEDPQLPSDLQVFIDEAEHGVILFSLGLEQDSKDLPRKTQEILVETFKSVPQRVIWKFDGEPTMSLGSDIYHSKLLPQQAILAHPNVKLFISHCGMISVIEAAYYAKPVLGLPSFFDQFRNLEIMKEEGAALQLNINSLTVKELKDAVHSMINEPEYRESALAISQRFRDQPMHPLDTAIYWTEYIIRYKGANHMKVSQSQLKLFDYYSLDNFIMVVSRLSLVVALVFLALSKSRRWLNHFSTSAKPFLPDDIQHNRKEYLSNFSANI

SEQ ID NO: 6570 - protein, 509 aa, Zygaena filipendulae
MNLIVLTALFCLHSVAAYRILSVLPTVTKSHYAPQGKLIRGLLERGHEVVSISPYEEKDVTANYTWVHVEIGSLVEAVPDLHKTSMVKLSFFDRQKIVWDSLWKYVNHIVKLPKLKNFIENDQSHFDIVIAEEFFQPIFFVFSHKYNAPLIIMSSFGSGHFINQYMGDALELSYVPHEFTNIFGYLNLYERARNVINTVYDIIGREIYVVRKQNAIVRDVFKDVQDVPYLGDLERNASLMFLNSHYSLSTVKPSLPNIVEIGGIHMDKVKPLSKEIQNVLDGATDGAILFSFGSVMELSKQSSEMVAKIMETLGKFKQRVLLKWNGENDIPNKPKNVYPFSWLPQNDILAHPKVVLFVTHGGLLSAMETVYHGVPVVCLPFYGDQHRNCDRGVKMGYGLLVELEKIDTDLHKSMERVLSDPSFRSNIKSLSERFRDRQNPVLDTAVYWVEYCARHRGMPFMSSPKRRLYWFQYYFIDVIVFTLTTLWLAVKICAKIVARLKGLVKVKTS

SEQ ID NO: 6571 - protein, 522 aa, Musca domestica
MNRSGYLISIVFVLSAIVVIPNESARILSVFPSPSLSHLFIHLSVAETLARDGHNVTVIATTPNPYKNLDIEYIYLKEPMFDAEFARKMVNKSSPIYVKLAHHFNLVLDMTNNTLNNPLMQKFLSEHKAGDFDLLVLGYAMNDYILGLGAHFQCPVVLSFMVQTVFTTNALVGNPSEASYVPSLFVGLKQPMDFGTRVKSFLASIYENFVFKSFLSWKGQRYYRYNFPADRYPPLEEVYKNVSLVLTNHHFSQGPIRPNVPALIEIGGIQIKEKPDPLPKEIADIMDSAENGVIYFSLGTNVQGSNLSPEKAKMIFNVLSQLPYTVLMKWGDKAFPGQAKNIIYKSWLPQDDILAHPKVKLFITHGGQGSVVESQYHGVPMVGIPFFGDQHSNMANVRSSGFGLSLKYATLTEEELRSTVLEVLNNPKYRENVQTFSKLYRDRPMTPRQLVRYWVDYVIRHNGAKHMQSPAVHMTWWQIQSLDVIGFLLVVVLGVVGVFVGLCKFLCCKGKKKSVNLKKKNK

SEQ ID NO: 6572 - protein, 527 aa, Stomoxys calcitrans
MLFIHKPCLLLWLCVIQLLFVVDAARILVVVPAPSKSHLMIHASVAETLAADGHNVTMIAVFPDVLKNTHFSKYIHIEGKPFDQSFTAEMVNKPQPFYKKMAPMMTLIFDHAHETINSPKMQEFLQTHGPGDFDLLILGYFMNDFMLGLGAHFQCPVVISFMIQPVGPINDMVRNPFEVAYVPSLAMDVRPPMNFGGRLKNFLAIGFERIVMGGLMSYKNKQFYSYNFPADRYPPLEEVYKNVSLILTNHHFSQGPIRPNVPALIEIGGIQIKEQPDPLPAELAKILDNAKEGVIYFSFGSNVQGSHLSKEKAKIMFDVLSKLPHTVLMKWGDSHFPGQAPNIIYKSWLPQDDILAHPNVKLFITHGGQGSVVESQYHGVPMVGIPFFGDQPANMAAVEKAGFGLALQYTQLTEVDFRNTILEVLNNPQYRENVQRFSKLYRDRPMTPRQMVRFWVDYVIRHKGAYHMQSPAVHMTWWQLHSLDVIAFLMAVTFGVFGLLVGLCRCLCCRGGKKATAKTVNKSKKNK

SEQ ID NO: 6573 - protein, 488 aa, Ceratosolen solmsi
MDISKYIILLLVCSFHIQNSYGKFKILAIMPFNGKSHFFVSDVLFEALAQRGNDVTVLSHFPKKTPVKNYHDISMSMEDDAGIHKINMEHVTSTFPFFTLKEMFNTDCFLGFVHKFQASLIFIRTSTLPIWLSERTGNPENPSYIPGTTSGNPSRMSFLQRLDNIIYYINYKLLYWFYNKRCEAVAREHFGDDMPNLLDIARNASFYLINSYFVHQYPKPLLPNTKEIAGMHVKEPKKLPQDLENWISGATHGLIYFNLGSMLRISTMAEDKRLAFLESFAQLPHRVLMKWEEKENTADIPDNVKLTTWSPQNDVLHHPNVKLFITHGGMLGTVEAVHAGVPMIAIPFYGDQLTNVVLLEERGLGIALRYKDISFETINRTLHKVLYDPGYARRAKDMSAAFRDRPISPLDEAIHWVEYVARHKGTAAESLLQSPAHELAFYQYLLLDVLAVLLLGLLIIFFSVCLVGRFLTRVMAVRCRGTSEKKTK

SEQ ID NO: 6574 - protein, 399 aa, Drosophila grimshawi
MGLSLTQSLLKEHSVQSLLSQNRTFDAVICEVFMNEAHFGFAEHFNAPLITFSTLGASSWTTDLVGSPSPPSYVPHFLLQFGDHMNFFERAHNLLFILYQGAYEQYVYLPKQEQLYKKYFPNNKQNFYDMRKNTALVLLNNHVSLGFPRPYAPNMIEVGGMHINRKCQQLPRDIVDFIQGAQHGVIYFSLGSYIKSSSLPLEMREALVETLRNLKQRVLWKFEELNLPGKPDNVFISDWFPQDDILAHEKVILFITHGGLLSTTESIYHGKPVLGIPFFGDQFMNMARAQQSGYGLTLRFTELTAETFKNSINKLLSDPSYTQKVHDMSVRFRDQHETPLERAVYWVEHVTRQKGARYLRSASQDLNFIQYYNLDVLIMIIGGLGFIIVGFLKRKKVMH

SEQ ID NO: 6575 - protein, 520 aa, Bombyx mori
MMPLWILVVLLTFSYSGAHKILVVFPLPEQSHGILGARFVRHLLNYGHEVTYITPFIEKYTHPNQQQVDVSRNLKLIPENPVNLSSLISKEVSAPGFTETMNFMNLVAVQTLENENVQKLLKNPNLEFDLVILEWNFSELLAGIAAVFDVPYIWVSNLEPHWLIARLAGESFNPIFNSNILSPYIPPLNLYQRVEELWTQITFHFHMYWYNDRIQRNDYERFFGDIIRMKGRESPLFEELKRNGSFVLGNSHLALGHEMRFPNNYKNVGGYHVDEEVKPLSPKLEKLMNNAADGVIYFSMGSKLKSEDLPVDIKKGLMKMFGELKQTVLWKLDDKSIDPPSNVHIFKRVPQQSLLAHSKCVLFITHGGILSTIEAVHYGVPIIGIPAYGDQFLNIERLVRKDQAKRVDLSHSLVADLKYAIDELLNTKRYNDTAKNNSFIFTHRTVNAGAEIVHWVEHVILTKGAKYLRTENLDLHWYQKLYLDLGLLLISAFLFLTYTCKLFLIFISKTRKVDVKKKKK

SEQ ID NO: 6576 - protein, 496 aa, Branchiostoma floridae
PCGVSHWFTLAKIGQALVRRGHAITVVVPEDIAEKRQTERPDFKFETFRDQGTHALVQEIDGNLHSNQDSETSVYQYANHGINLSKVITKHCDLLLGDVDLMSRLKAAQYSLVIFDPCIPIGAILAAHMGNRVHSIATLRVDHYFLETKATGIPLPLSYVPFWPFDFTDNMTFSQRVQNVVFATLLPMLGRWVASNTYDGLVRKYVSDKDTVQSVVSNTDLWLYQTDHVLDFPGPSMPNMVQIGGLHVDEVSPLPKELEAIVQSAGDDGVIVVSLGTIVKTMSSEKTQIFATAFARLRQKVVWRYTGEKPVGLGNNTMLMEWLPQNDLLGHPKTRAFITHAGINGVYEALHHGVPMVCLPLFFDQPGNAARVVARGLGVKLDLSAITTDQLYEAVTHVLTNNSYRETAARLSRLHRDQPQSPMERAVWWIEHVIKHGGLTHLRARAVELPRYQYYLLDVAAFLLAVCTGVLATVWCSCSLVCRKISCKTEGKLKSQ

SEQ ID NO: 6577 - protein, 414 aa, Drosophila melanogaster
KMAGALKDDRVRDLYLNRDNKFDLVLSGYFMNVYQLGFAKKVKAPVIVVATMPPNQLLNPLIGNPLEIAYVPSISDSVEKGKGMSFRQRLAGYSSSFFFGIFDFVTQRRSKRLYKELFGDDPNMPEYSELVKNTSLIFFASHAPSEGPIRPNVPAAIEIGGIQVKDTPDPLPQNMAEFLGNATDGAILLSLGSNVKGSHINPDTVVKMFNVLSKLKQRVIWKWEDLEKTPGKSDNIFYSKWLPQDDILAHPNIKLFINHAGKGGITEAQYHGKPMLSLPVFGDQPGNADVMVKQGFGLTQSLLSLEEQPFKEAILEILSNPQYFDKVASFSSLYRDRPMSARESVIYWTEYVIRHHGAAHLQSPLVHMSFIAANNIDIYALIAVVLVILVLLLKLLLQFIYRKIFAKPKKEKKH

SEQ ID NO: 6578 - protein, 520 aa, Culex quinquefasciatus
MCITANIVVVLLSVLVGPTLGANILCLTPVPSPSHHIWNRAWMEALTARGHNLTIVSADVEQAANPNMTYIHLEQAYSFLAEALDLDEMANANAFGGARSVYAWGFGMCKGVLSSRGMDQIMSYPDSFRVDLVVADVTLGPCMFGLLRKFGNPPVVGVTAYNNPSFTTDFVGGHKHPSYVPYVMLNYDHDMSFFERMYNYIVYSYDHYYRHNVYLPKIDEMMHQYYKSENMESAFDLEKRIMLLLANYHFSVDFPESVPPNHVPVGGLQVRTKPKQLPVDLKTFIEAGQKGSVLFSLGTNVQSSGLGKSTIRMFLDVFRQFPQYNFLWKFETEIECDLPNNVMLKKFLPQNDILAQSNIRAFITHGGMLSTHEATWHGVPMVGIPFIADQYRNLYKSVRAGVAIKLDHSALTAEKVRTALVDILENPSYRQNMKQRSALFRDQPELPLNRAVWWIEWALRHPNCKSIQSPSKWMSSWTSDLYDVKCTLLFGFIVVVWVLKSALMKILSTKTRKLSDKKRQ

SEQ ID NO: 6579 - protein, 483 aa, Ictidomys tridecemlineatus
MFNKILLLSLQISLLGTTLGGNILIWPMEGSHWLNIKIIIDELITKQHNVTVLVASGALFITPSVSPSLKFERYKVPFSKETVEGVIKNFVLTWLEHRPSPSTLWRFYQEMTKVIEDFHMVSRDICDGVLKNEKLMEKLKRGNFEVLVSDPVFPCGDIVALKLGIPFIYSLRFSPASTVEKHCGKVPYPPSYVPAILSELSDRMSFADRVRNFISYHLQDYMFETLWKSWDSYYSNALGRPTTLCETMGKAEIWLIRTYWDFEFPRPYLPNFEFVGGLHCKPAKPLPKVLWRYQGKKPATLGANTRIFDWLPQNDLLGHPKTKAFITHGGTNGIYEAIYHGIPMVGIPMFADQPDNIAHMRAKGAAVEVNFNTMTSADLLSALRTVINDPSYKENAMRLSRIHHDQPIKPLDRAVFWIEFVMRHKGAKHLRPASHDLTWFQYHSLDVIGFLLACATTVIFMVTKCCMFSFKKIGKTGKKKKRE

SEQ ID NO: 6580 - protein, 519 aa, Aedes aegypti
MSRCVFLLLTVICSFTHAANILYIDGVASPSHFIWHKALINGLAAKGHNVTALSVDVEENAPMNVSYIKMEGVYESLFEEDGMESDFFEIGQMNPFSVLAMFNEYATIGCKLTLKTAGLRQLLEYPREFKFDLIISDYLNGPCISAVAQHKFGRPPYIAATAFHGLTTTNMMSGAFSYSASVPNHEFNTPQSMGYCQRFMNFLYNHWEELLKIYNMYPKVDKIVRKEFPDIPYVGDLDRDTRIILLNSNPVIQYSEASMPNVISVGGMQIVKPKELPEDLKKLVDNAKNGAILFSLGTNVRSDMLGDKRIIEILNAMSQFPEYQFLWKFESDAMPIEVPKNVYIRKWMPQNDLLAHPNLKLFITHSGLLSTQEAIYNGVPIIGFPVFADQHQNINYCMEQGVGKRLSIKNVKSSELVNAIRELMTDDSYRENMSRLSKIFRDQKEPPLERAIWWVEWVLRHPTSKILQSNAVRLDWFVKYSFDVIVPLVLAGLIVLSIPIKIMRYVMCRKQGQVKTKRE

SEQ ID NO: 6581 - protein, 544 aa, Papilio polytes
MGSRWPVFWLPILLAASVCGSDILMITMGGTKSHKMPFWELARGMIRRGHNITLISAFPPDFHIPGLEEIAPEGLASYVRGYMTFDLVGARMRGEEPLPLYDILRYGYEACEAFLDDFETRSFLRSGRTYDLIILDGAYPECALGVVYRLKVPFMYINTVGFYSGPASMSGSPAPFSVTPFFGRAFTDNMGFVDRALNSAWLVGSLFAHGFSMTILQGVLRRHFGQQIPHVYDMAKNVSFVLQNGHFSVSYPRPYLPNVAEVACIHCKEPKKLNADIEDWIAGAGEAGFVYVSMGSSVRTNKMPLAAHHMIVKALGRLPQRVLWKQDAEQNLTDIPSNVRLYKWLPQQDLLGHPRIKAFVTHGGLLSMFETVYHGVPIVSIPVFCDHEANAAKAEVDGYAKILDLQYLTSDKLYRAIKEVIVEPKYKIEVKKRQILLRDQKETPLERAIYWTEYVIRHKGAYHLLSPAKDLNFFQYYLLDVAFAFFILLITISVLIAFVIRRSFNWLVDYLQSRRMDKLLDNSSDLLKSSKQLIDSNTIVKKNL

SEQ ID NO: 6582 - protein, 522 aa, Camelus bactrianus
MGEQRVLLLVGFLLPGLLLSEAAKILTVSLLDGSHYFLLERVSQILQDHGHNVTMLVNTGPILDPDLKKKGKSFQVISWFLSEDDVNELRKRFHFFVTEALHGREALVNLVRIIEHLGTRCSYLLRSDIMDSLKNENFDLMVVEAFDFCSFLIAEKLEKRFVSVLPTPFGSADIGLPSAVSYVPVHFSYLTSPLDFWGRVQNFLLSFHFSMRQWQMHSAFDKTIKEHFPEGSRPVLSHLLKKAELWFVNSDFAFEYARPLLPNTVYIGGLLAKPIKPVPQELENFITKFGDSGFVLVALGSMVNDCQPDEVLKEMNAAFACLPQGVIWNYKASHWPKDIKLAANVKLMDWLPQNDLLGHPRICLFVTHGGMNSVMEAIQHGVPMVGIPILEDQHENMLRVEARNFGVSIQLKQLKAETLVLKMKQVMEDKRYKPPVVAASIIRRSHPLTPAQRLVGWIDHILQTGGAAHLKPHALQQPWYEQYLLDVLLFLLVATLGTAWLCGKLLGLVARWLCGSRKLKKA

SEQ ID NO: 6583 - protein, 352 aa, Trichoplax adhaerens
DLLLVDITSVCSGIVDGILNISKVIAYSPAGFIDPSLSRLFHIPASPSYVPTVIVDYSNKMTFFQRLHNSLTYVAMVILRSAFDPSVQAMYEKLVNSSFKSYGQLRPSMLIVSTDFAIDYPRPITPATKVVGALLPHAPLKLPQELSDFAELLHNDSQDFAIVSFGTLVSKAMDNIIDFQAIGRVLSRLPMKVIWKYHHQIDDLGDNVKVVSWFPQNDLLAHRNCKLFVTHCGLNSMYESAYHGVPMVAVPLFADQPSNAQRIKSAGIGEIVLFKELNEQSLNDAILKVYKNPEMATKCSTISNIMRDRPGNRTPVEEVGDWIEFAIRHDGGRHLNLAASQLRWYELYMIDV

SEQ ID NO: 6584 - protein, 228 aa, Zootermopsis nevadensis
MGSNLQSSELPESIRKAFLEAFSKFKQRVLWKWETDSLPGQPKNVRLGKWLPQSDILAHPNVRLFITHGGLLSMQEAIYRGVPLLGVPIFGDQGLNMGRAVSAGYGLKIDFVNVTTESLTWAIREIIETPTYRENAQRLSRIYRDQPLTPLDQAVFWTEYVIRHKGAPHMRSASLDLAWYQYFLIAVLTLAAVSSVIGVFLILRSIVRKICSGRRQDTDDLLRQKKRS

SEQ ID NO: 6585 - protein, 523 aa, Drosophila yakuba
MLQKIALYLIIWSCNTLAADILMATQGGTKSHKIPFWELAKGLISRGHNITFLSGFPADFNIEGLHEVAPAGLVEYIHNYTNWDLLGSRMAGEMPIKPWDGLRYAFESCDAMFRDSKTMELTTKSFDLAILDGAFPECFLGLIYDLRIPFMYINTVGFYTGSISTAGNPVSYAITPNFYSRFTDTMNLYERAINTAMQIGQTIMHMYVMRRTHLVMREHLGAQIPHPYEMSRNVSFILQNGHAVLSYPRALNPNVAEVACIHCRPARKLPRHLEDFIGASGSSGFIYVSMGSSVKAANMPEALRHMLVKTFARLPYHVLWKYEGSSDIKDITSNVKLSQWLPQQDILGHPKIRAFVTHGGLLSMFETVFHGVPVVTMPVFCDHDVNSAKAEIDGYAIKLDLQTLSANQLYKAIMKVIHDPHYKNSARYRQKLFLDQRSTALDTAIYWTEYVLRHNGAYHLQSPSRNMTWWQYYLLDVVAVYFILFYGLILALKRMDFRSEKVRNLHFLMAPLFTIAKSKSKKI

SEQ ID NO: 6586 - protein, 462 aa, Asbolus verrucosus
MKLVLFIVINLLFLHIKCAKILGVFPAPGYSQFILAEVLMKELANRGHQVTVISPYSPKNATENYRTIEVTDVLSSGDQFDLFELERKNLFTNIMTTYKFGNFMTEVTLSSKKVQDLLHSHETFDLVIIEQFFNDAMKGFAIHFNAPLVLFSSMGITEWNNYVMGSPFIPAINAISYTSYTNFMNFSQRFRNLYGTVFNYFYRNLFAYPLQKEYLQKYFPTFMDFDQIVCNASLMLLNSHITTSENSLLPYNMIEIGGFHIVQNPLSKEVQEYLDSAHDGAILFSLGSNLKSSDLSEETLNGIFKVFSKLKQKILWKFERDFPNKPENIFIFKWLKQSDILAHPNTQLFITHGGLLSTTEAIFYGIPMVGIPIFADQKMNMARASRSGIAKMLPFQELSEETLSAAINETINDTRYQENVRRMSNIMRDRVVRPLDLAMYWIEYKQILEELRSEFFNILMQI

SEQ ID NO: 6587 - protein, 529 aa, Branchiostoma floridae
MDVGSKSSTVLLFFLGLLVRHIISGENVLLVPTPCAESHWFTLVNIGQALVRRGHVVTVVVPEDIAEKRRAGRPEFKFETFREQGTFVSLKEAEDNHHSNTKSGTSILQYAQGFINVTNVITKHCDLLLGDIDLMSRLKAAQHRLVVYDSCIPVGAILAAHKDVQVPSIAMLRGDHYFLDIKATGVPLPLSYVPFVGFDFTDHMTFVQRIQNVVFYTLLPMLGRWLASNTYDGLVSKYVGKNETIQSVVSNTDLWLYQTDHVLDFPGPSMPNMVRIGGLHVGAATPLPKELEVFVHSAGEEGVIVVSLGSIIKTMSSEKRQVFAAAFARLRQKVVWRYTGEKPAGLGNNTKLVAWLPQNDLLGHPRTRAFITHAGIRGVYEALHHGVPMVCLPLFSDQPGNAARVVARGLGVKLNLRTVTTDQLYKAIIHILTNSSYRETAARLSRLYRDQPQSPMERAVWWIEHVIKHGKLPHLRARAVELPWYQYYLLDVTAFLLAVCAAVLGTVWYGCSFVCGKITCKTGVKLKHQ

SEQ ID NO: 6588 - protein, 527 aa, Osmia bicornis
MKLNVAVVLCVVCAVCVLEETRGARILAVVPTPSYSHQIPYRKLWTELHKRGHDVVLVTANPIANMTSKNFTQIDISSGYKDLQALNFLKLRFEGVSWITFAESYLFDLSYTFAESVLNNTEVRRLCAPGSKEKFDVVLTELLYMHSVPALAYRFDAPLIGLSSLGLVAIQEHDLGGFILPSHEYTWEMEANTGPNLSFWRRLWNYVSLWRITYSMYRDIPRHQEMAEHYLGMRLPPLTDITRNASLLFVNQADALTPARPKLPNMITFTSFHVNENPAPLPKDLQSFLAEAKDGFIYFSLGSNARSADIPMAVQQVFFDVFAKLPYKVVWKYENDLPVKLDNVYASKWLPQQSILAHPNIKLFIYQGGLQSTEEAVNFAVPLLGFPILADQDYQVARIDTLRVGKRMEILTVTREELDGAIREIITNKEYKERMLHLRDLIRDNPYDLIDNLVWWTEYVIRHKGAPHLRSTLAGQPWYQRYDIDVVMFLTIVVFVIASKLVNIVATLAVHLYKRFLSSAVQKQKKS

SEQ ID NO: 6589 - protein, 1061 aa, Caenorhabditis remanei
MKPTTISSLIFLFLLEAVTSYKVLVFNPAFGASHSNFLGKISDILIDAGHEVTMLIPISMESKKDLIGSKKVKKVIRIDQEPRSRKMQEEAKTEDMIKKQIWKLDADITIFVSMIKNFSLASGYQCEHIFQQTAILEELKNEHFDLGITESLFICGFPLLDHIGVKTVINADSVLYLDVVKYALGEPASTSFYPGVFSRNIDKMSFSERTRNLFGMAFSWYFSWTRFQGELEAIKPYYKKSLTWEEHINGAAFYLINSNRYLDYASPTLPKTVFIGGMQVNTKKNGKVQLDREWDDLLNIRKQNVLVSFGSNAFSCNMPDEFKKSFLEVFASMPDVTFIWKYEEENATLADHLPNVKLTTWMPQNDLLADDRLTLFVTHGGLGSSIELAYQGKPAVVIPLMADQPRNAHMLTRHGGAFQLDKSQLDKPEVIRNAIQTVMNDDNYKRNSEKLAEILSSQPYQPKDVVLKHCDFAVKFGDLKTLNSEGRNLNVFQYYSIDIAVAAISLILTVLVVIVLVFSCIFRKCSRSFFNGKIFDLSSAYKVLVFNPAFGASHSNFLGKISDILINAGHEVTMLIPISMQSKKHLVGSKKVKKIIRIDQDPRSVELYKESGAEDVLRNKIWKIDSDMMVFFQMASNFSKNCGYQSSDVFQQTEILEKLKNEKFDLGITESLFICGYPLFDHLGIKTVINADSVLFMDIVKNILGEPASSTFYPALISPMTDKMSLMERIKNMIQMLVPMYFSKMRFDEELKMIKPYYNGTNTWREHLEGVAFNMVNSNRYLDYASPTLPKTVFIGGMQVNTKKNGKVQLDKEWDNLLNIRKQNVLVSFGSNAFSCDMPDEFKKSFLEAALTDWFASMPDVTFIWKYEEENATLADHLPNVKLTTWMPQNDLLADDRLTLFVTHGGLGSSIELAYQGKPAVVIPLMADQPRNAHMLTRHGGAVQLDKNNLANSDLIRNAIKLILENTSYKKNSEKLAKILEEQPYSPAEVVLKHCDFAVKFGALETLQSEGRNLNLLQFYSYDIFVVFCLCLVFVLTFMILIVKSTVKFCRKSGNIKLKNE

SEQ ID NO: 6590 - protein, 517 aa, Papilio polytes
MSFIKVFIIIAVITSCFAYNILLVSPLPSGSHGILGDAFIRIFTNAGHKVTFISSMTKLTSSPNVTVINVAANIKTFPDDLLNIKAIMDQQSDMRDDDLFFPVMDNLSLVTMQMKEVQELLNDETQSFDVVIAEWMYNEIYAGLSTLYNCPLIWFSSLEPHWLFLRVIDEAPNPAYNSDSMSANVIPYTFSQRVEELWLQISRSFYREIWTYKDTEDVFNEIYTPLLTKRGRPVPKYNEVRYNGALTLGNSHAILGQATRLPQNYKPIGGFHIEENVKPLPEKLKQIMDDAKHGVIYFSMGSNLRSTDWPLEIKKKLLKVFGELKQTVIWKFEETLSDLPSNVYIVKWAPQQSILAHPNCVLFITHCGLLSTTEAIYFGVPTVGIPVFVDQFVNAERAVRKGFGKKVSLSYSLVDDLKVALKDVLSNSRYRDKAKELSAIYHDRILKPHEEIVHWVEHVIRSNGATYLRSPALMLPWYQKLYLDLLAIIFSITITAAVIMKCLVTMIQRKFSKTKTD

SEQ ID NO: 6591 - protein, 520 aa, Daphnia pulex
MKFQSLNTLVLLLSAIVVENCMAAKIVVLYPVGSKSHFYAVMPVIEELGERGHNVTVFSPFKGITKNATNVHEIIMTSVAKELDTMEIDWFAMQKEGATQILTMMQTMIALSTLGCEDLLSNTEFRRIVEKRDVDLFIVDAFGNEFTYPIIDKLAVPFVIHGSSSAFPSTLNAMGAPADYASVPLMLAEYDEQMTFTQRLINTFSGEFMKYFRHFYIFTKLDAIVQREFPGVKSIVELEGDASLYITNTHPVTNWPRSLPPTILSIGALHARPAKQLPPALKTFADEAKDGFIVFTLGSFVSVSTMPKETVDTFIRVFSKLPQRVVWKWEADIPQGVPSNIMMVDWLPQQDLLGHPNARLFITHGGMLGTQETIYHGVPLLGLPFGNDQRANVAKAVKGGWGLKLDWDKIDDNNLYEALTYLINDPSVRKSAKKLSQLMQEEIMPGKDVAAYWIEYVIRHGGTKHLQLASKGMPFCQRHLLDVALLSFVIAIVFLSVSYKLTCALCRCCFKAKSDKIKTN

SEQ ID NO: 6592 - protein, 443 aa, Bradyrhizobium sp.
MKALLVSSPMMGHLHPVLGVGRILIADGWEVMGLTSSYLRNRVEAIGATFRSFVPAADIDTRNAAELFPEIRRAAPGAQQLRLILEQGFADFMLPQYESIETVMREFPPDIIIGDHLMLGVLPMLLGPRAQRPPVALLGTTYLLSRRDDGAPNDAGIPPARNDQQQREYAALFQTYEQSVFGPAGRCVNEYLAQIGSRPLRLNLYDAMVELPDIYLQLTVPRFELSRRRLPGSVHFVGPLPITPNQAPVPSWAYELDGSRKVVLVTQGTLTNNDFSELVLPTVQALANEPDVLVMVTTGGRSIDALSGTLPGNVRVAQYLPFEWALSKADAFVTNGGYGSVNQALSYGVPIVVAGTGGDRGDVSVRIAWSGVGINLATSAPTAEQLRPAVRSVLDDPKYRERAASLADDIRKIDTAAEIRRILREPIATSSQDRPRAKKAARR

SEQ ID NO: 6593 - protein, 514 aa, Bombyx mandarina
MIKWILFLCVTLLLCTCDAYKVLVVFSMPGKSHSILGYGIVKHLLKRGHEVTYITPFPVDNTDPKLKQIDVSSNIDILPKTSLNLNVILEGKVPKVDHGGIHLVMNAVEMNTYNNENVSRLINDPKQKFDIVIAEWMFTEICASYAAIFNAPLIWVSSFQTHGMVTRLIDEALHPAYNTDVVGRNIPPLNFFQRVQNLWILLRTLYQVKNSGQEDFYNKAIVPVIEKRGLVAQKFEDVQFNGSLVLSNSHLSYAPAVRLPQNYKTVGGFHVEEKVEPLPEDLKKVLDSASTGVIYFSMGSNLKSKEMPDRLRKSLIKLFSGLKYTVIWKFEEEFSGLPKNIHVVKWAPQQSILAHPNCVLFITHGGLLSTIESVHFGVPIITIPVFADQFMNAERSARVGFGKIVYLSYTMADDLKVAIEEIFSNPRYKEIAKETSLVYHDRPVSPGAELVHWVEHVVKTRGALHLRSPALQMPLYQKLYLDLLTVVLVSLIVIYKIVRCLFSRISVTSNKKTN

SEQ ID NO: 6594 - protein, 525 aa, Haemonchus contortus
MSPIVTAVLLFLAINSVDALNILVWTSTIGRSHTNFVGSIADTLKEDGHNVTLLLVEFDSEFISETGTKHVEHIIRYSSPYHNPADWFTLTFKKEQVFNVVLGLNVLDFAKMQLFAYNVCKGILDDSLLIRKLRESRYDIGIFEMFHSCPAGVMELAGIPKTMLVSAIGMGYHHYRLLGMEKQSSFVPATFTIYGGRMTFLGRLCNEVFNALGWLFANICEYSEQNLFNSMFPGFPRLHNLIQDKTDYFLMNTNEFTESTRPTLLSIHHVGGCAISPPRPLSEEFERIVSKGSKGVILFSLGSLVKSSDMPVNVRRAFTKAFQSFPDYVVLWKEDRKFNSTNSNIFYYDWVPQVDLLADGRVKLFITHAGMNSIQEALLFGVPMVTVPLFADQYTNAAVAEERGFSVTLNKLSLSSEDIIKAINTVLGDNGESAYTMRVRQAARLLKGSPEEMRRKVKRLVRISGSEPPLSHLKLDIDHLNHVQYYNIDVYIFFGALFCFSILVFYYLTVWTVQSILFPLKYKSD

SEQ ID NO: 6595 - protein, 1074 aa, Drosophila mojavensis
MATLRLSVVGLCLLLIALPARGANILGLFSSHSQSHLILHMSMIKALAESGHNVTVVTMMKPTIMHEDIHLIVVPLTDEQEHILEGQMKEMAGQKNSLLSTMIRLMSGMSVMIESQFQLLSDPRFQRIYETKFDLMFMGYFINDFQLGVAAKLKVPVIISWMQAPASIINTYVGNPTEISYVPNIQTALGQGEQMGFAKRLENLSKELLVRAMMLILDRRLDRFYETQFGEEPNFPTLAEMKRNVSMLFTNSHLISEGAIRPLVPAIVEIGGIQLKEQPDPLPEDIAKFLEASQHGAILLCLGSNIKSTAVKPELIQAMFKVLSSLRQNVIWKWEDLDNTPGKSANILYKKWLPQPDILAHPKIKLFITHAGKGGITEARYHGVPMVALPIFGDQPANADSMEKSGYGLSQDLLMLNEENFRAKIEEVIGNEKYARAIKSFSKLYRDRPLTAKQSVVYWTDYVLRYNGAVHLQSPAVHMSTLAYFNIDVYAAVLAALTLVVLLTWLALRFTYRKLCRKSQKVKRHALFIQLRSSPQANMSRTKLQLAAYAIILLVLSCRPTDGANILGLFSTFSPSHLVVHMAMMRTLADRGHNVTIVSAMKPKLAPHENITLIMAPFSEETLAEVNQFMESSTKDKVSMIATIYRMLMKTAVMLDSQYKFLLHPNVRAIYERPQTKFDLLFLGFIFNDYQLGVAAKLGIPAVISWVGVPFMHIDDEVGNIYDPAYVPNFNVCVDSSQRAMNFGQRLKNYFTWVILKSSAIILDRRMVNYYNRAFGADLQMPSYWEVRRNISLLFYNYHSHSEGPIRPTVPQSIEVGGVQNKEQPDPLPSELAEFLDNAKDGAIFFSLGTNVKSGYFPPHVMETFFKVLSSLPLRVIWKWDDLQHTPGNASNIYYHNWLPQDDILAHPNTKLFITHAGKGGIAEAQYHGVPMVAMPIFGDQPSNADNMVSAGFGLSVDWTTLTEASLAQTLNEVLQNSSYREKVRSFSALYRDRPLTARQSVVYWTEYVLRHKGAHHLQNPALHLDFVARHNLDLYACLLILLAVSVTILKLLLRCIWQTLRPLAPSKDKVKTQ

SEQ ID NO: 6596 - protein, 437 aa, Haplochromis burtoni
MDLRLSACILLVLCATSCANGGNILVWYTDGSHWINMKPVLETLVDRGHQVTVLVPSSSMYMKTNEPARFHYEPFNASFSLETIEDFLEELLQFVLYELDYMNYWEIFTRSVKYVNTHIQISFQYLDGVVKSEVIMKKLKEGNYDLLLADPVKAGSDLVADILGIPLVLSFRSSPVNNWERHCGQMPAPPSFVPGAMSKLTDKMDFSERVWNFLFYALHDILLHPNRKLVVEDSNECQNKVLWRYKGEKPETLSANTRIYDWIPQNDLLGHPKTRAFITHGGTNGIYEAIYHGVPMVGIPVFSDQPDNMIHMKEKGTAVILNLNFMTAEDLRDAVNTVINDKSYKENAMRLASIHHDRPMSPLEEAVFWIEFTLRNKGAKHLRVQAHELTWYQYLSLDVLGFFFTIVLLLIFIFIKTCSFCLHICCVRRGKTKRKAE

SEQ ID NO: 6597 - protein, 1488 aa, Ooceraea biroi
MRTGISAICIIVILRLLANAERILILTGAPFFSHQVVHRAFNLALHKRGHELVVLTASPLRDPTLKNYTEIDVSDVFLIGVTKDYNDRRWKSSQMESCRQAFMTATEITAKFFDNPEFKKIYRRDNGEKFDAVIVEAISDLSLFAVAHRFKAPLIGIMSLGIHNYQRYIFGSPMLPSHPSTWEINTLVEGNPSFWQRLQNFIDVWSYLYYWTHNNAITEQKRAEEYFGSDTPNVVDIVKNMSILLVNENPALTYARPEQPNVIFFTGFHIQKTPPLLPEDLRQFLDDATEGFIYVSLGTTVSCDNLPTEIVGNFIQVFSKLPYKIVWKYECDELPGKLDNAFISKWFPQQGVLGKIKTHHNIRLFIYQGGLQSTEEAIHYAVPLLGIPIMFEQASRIQRLASLGAAIFLKLNELSKERLNTAIHQILNDKSYKERMAYLSELSKDQPYDSLENAIWWVEYVMRHKGISHLRFSESDKPWYQRYDMDIIGFLAVMTFVAFLISFYTIFRILRFIYHYYQIPCHNFQYSNAKSKIQFLHKRGHELVIVTTAPLKDPTLKNYTKIDVSYGFSIITEYNDAKWKISQMESCRQVFTITTEFMGTIWDNLEFKKIYRRNSGEKFDAIMMEPICDLSLYSMAHRFNAPLIGLTPMGFHNFQRYIFASPMLPSHPSNWEVNTLVEGYPSFWQKLQTFIDVWGYLYAWSHHVVTARKRVEKYFGSDTPDPMDIAKNMSIVLVNENPLFAYVRPEQPNVIYFSGFQIQKTPPTLPKVFWKYECDEFPGKLDNIFISKWFPHQGILAHHNIRLFIYQGGVHSTEEAIHYAVPLLGIPIMFEQASRIQRLASLGAAIFLKLNELSKERLNTAIHQILNDKSYKERMAYLSELSKDQPYDSLENAIWWVEYVMRHKGISHLRFSESDKPWYQRYDMDIIGIVMPNQRYNDICVSQSVYLCDRNNLRSGSFLKHKMRTVISALYVILFQLPLPASAARILILTGAPFFSHQVVHRSFSLALLKRGHELVVVTPSPLKDPTLKNYTEIDMSHIFSRITDYNDARWKISQMESCRQMFMITNEIVANFFTVPEFKKICRKDNNEKFDAVIIEAMSDLSLYVLAHRFNAPLIGILSLGIHNYHRYIFGSPILPSHPSNWEVNTLVEGNLSFWQRLQNFIDVWSYLYYWTHHNAVRNGIEENFESDTPNVIDIVKNMSIFLVNENPLFAYARPEQPNVIFFTGFHIQKTPPLLPEDLRQFLDDATEGFLYVSLGTTVSCRNVPKEIVGNFIQVFSKLRYKIVWKYECDELPGKLDNALMSQWFPQQGILAHPNIRLFIYQGGQQSTEEAVHYAVPLLGIPIIFEQASRIQRLASLGAAILLKLNELNKERLNTAIHQILNDKSYKERMVYLSELSKDQPYDSLENAIWWVEYVMRHKGISHLRFSESDKPWYQRYDMDIIGFLAVVAFVMSLISLYTLFRILRFCCGYYQLYKNIHYPNIKFKMQ

SEQ ID NO: 6598 - protein, 873 aa, Plutella xylostella
MYVGLAYKRSNKMTRVYFVLLILSGSAVFHSVHAARMLCIYPVPFHSHQAVFHVMTEALAAEGHELVVLTPLPHEKPIPNVTEIDVHDISYKLWEDKYGEYQKTHEFTADPVTFWEDAVTPIIHSVVDAQMSSPGMQALINDQNQHFDVILAEAPAPLSIMIAARFDAPIILVSSFFGSDDNFLTIGAPIHPIYFPEYNMQKVGNMSFWERAKQIYTTLRLRWMERVLKEKENAMIRKHFGNDAPTITELKKRVEMLFVNVHPIWDNNRPVPPSVVYMGALHLRDPKPIPEELQSYLDASRNGVVYMSLGSKIRFSDLPAGTMQVFLNVFASLPYDVLIKWNGGELMNKPANVRLEKWLPQNDMLHHPKIKVFLMQGGLQSTDEAIAANVPLIGFPVYVDQFYNAQMFIKLDIGRQLDIQTINEQDLSVHAARMLCIYPVPFHSHQAVFQALSEALARAGHPMSMTFHINSGNTGYGEYQKTHEFTADPVTFWEEAVTPIMHGIVDAQMSSPGMQVLIKDQNQHFDVILVEPVVPLSIMIAARFDAPVILVSSFFGGDDSFLTIGAPIHPIYFPEFNMQRIGNMTFWERVKQIYTTLRLRWMERSFRDKENAMIRKHFGKDAPTMTELMKRVEMLFLNVHPIWDNNRPVPPSVVYMGALHLRDPKPIPKDLQSYLDASKNGVVYMSLGSKIRFSDLPAGTMQVFLNVFASLPYDVLIKWNGGELKNKPANVRLEKWLPQNDMLHHPKIKVFLMQGGLQSTDEAIAANVPLIGFPVFGDQFYNAQMFMKLDIGRQLDIQTINEQDLRQAILDVAENERYRRNIASLSLVLQEQRAGGLQRVVRGAARVAARATRSLRSPLADASLAYKASTVSD

SEQ ID NO: 6599 - protein, 529 aa, Drosophila willistoni
MRLKFRPVFLAVLSLVAVLATPSEGANILGLFSSHSQSHLIIHMSVAKALAKAGHNVTVVSMLEPKVKSKDIHVIVIPVTDEQEAILEDQMKEMASQKNTVFATMNRLLSGMTVMIESQYELLSHPKFQQIYDTKFDLMIMGWFINDFQLGVAAKLKVPVIVDWMNAPMAIIDGYVANPSELSYVPSMFTGVPKGEVMGFRHRLQNYVTDWILTYLFHVFDLRLTGYYNEQFGKETNFPTLAELRRNVSLVFVNCHLISEGPIRPLVPATIQIGGIQIKDTPDPLPKDIEEFLSKSEHGAILLSMGSNIKSSAVKPELNKNMFNVLSKLKQNVIWKWENLDDLPGKSANIFYTKWLPQDDILAHPKTKLFITHAGKGGITEAQYHGVPMVALPIFGDQPGNAEKMQNSGYGLSLDLLTLTEENFGAALREVLENGKYAQEIGQFSVLYRDRPLTARQEVVYWAEYILRHKGAPHLQSPRVHMSTIAAYNLDVYALLITVLIISLLLTTLAFKFVLRKVFGKGSLHESKD

SEQ ID NO: 6600 - protein, 534 aa, Cyphomyrmex costatus
MRLIIGISPIITILWILVTSNLTCSKRLLIITPTPSYSHQIVFRVICLALNKRGHEIVTLTPNILNDTSISNYTEIDFGFIYEKIDDTDMSQTRWNLTQLAGLKTRLLTLGHNIAEDALSHPDLMKYYANRTDMQFDAVIAEMIMTPAIYMLAHRFNAPLIGIMSMDLQNCHRFTLGSPVLPSHSSNWELENLTGLNLTFWRRLLNFINTWWSIHSWFNNFAIKQQKIAEKYFGNNIPHITDVAKNMSLVLINQEPLLAYARPEIPNIVHFSGLHIKKTPPSLPKNLKTFLDSATNGFVYMSLGSNTKSKLLPKKILEIFMNTFANLPYKVLWKFENDSFHVPPNVFISKWTPQQGVLAHPNIKLFIYQGGLQSTEEAVHYAVPLIGIPFVFDQVYQVMKMVSLGVARYLDIVRLTRSELHDAIIEVLDDKGYKDRMLALRDLTKDKPYDSLENVIWWIEFVMRYNGAPHLRFNGVDIAWYQQFDLDVIVFLTITLFLFLCAVLAIVGWASKQLSTHYDIINLYMWFKNKTKLE

SEQ ID NO: 6601 - protein, 445 aa, Loxodonta africana
MSMKRISLLLIQLSCCFNCGTCGKVLVWPTDYSHWINMKTILDELIQRGHEVTVLTSSASILIDPNTPSAIKFEVYPTVLTKDDLEILFVEWIRKLTYDLPKDTFWTYFSQIQEIEREYSDCIQRLCKDVVFNKKLMMKLQQSRFDIVLADTLVPCGRPTTLYETMGKAEIWLIRTYWDFEFPRPFLPHFDFVGGLHCKPANPLPKEIEEFVQSSGKHGVVVFTLGSMVSNVTEERAHTIASALAQIPQKVVWRFDGKKPDNLGPNTRLYKWIPQNDLLGHSKTKAFITHGGTNGIYEAIYHGIPMVGIPLFADQPDNIVRMKAKGAAVSLDLNTMTSTDLLNALKTVINDPSYKENAMRLSAIHHDQPVKALDRAVFWIEFVMRHKGAKHLRPAALSLTWYQYHSLDVIGFLLACVAIVSFLVLKCCLFGYQKYFKTEKKKKRE

SEQ ID NO: 6602 - protein, 543 aa, Tetraodon nigroviridis
MRSATLFTVLLLSLQVKGGVRTENSAGKGNQRPEETETPANDSDAPFLGNLLVVPMDGSHWVDLKALAQELGRRGHRVTVVIPEFSIRMGPGKYYDTVTYPVPYTQADIDSIIAANKDVLEKSTLSFTDKISKRFNQFRKIASFLHSTAESLLFNASVISQLEQQKFDAMLTDPMVPTGSLIARKLGIPVVNLLRGIPCLMDMKAAGCPSPPSYVPRFMTGYTDKMTFRERTINTLIALLEPLMCKLFFWHFDNISHQFLGEKVGIAEVLAESDVWLLRIDMTLELPRPLMPNTILVGGINCNVRDALPEDLLPWVSGEHGFIVFTLGSMVSEMPEEITSVFIEAFRQIPQKVIWRFTGEIGGSIPENVKIMKWVPQNDLLAHPGARAFITHAGSHGLYEGLCHAVPMVMVPVSAEQPDNAEKMASRGAGIVLNILTVTSENIVQALNAVINDTRYKENVKKLSELHKDRPVDPLELSVYWTEFVMRHKGAKHLKPAVHELNWIQYYCLDVLAFLFTILLLVVVLTVKCLKLCFGKLGRKRKQ

SEQ ID NO: 6603 - protein, 505 aa, Caenorhabditis brenneri
MKLVIIFILLILIELTFSYKVLVFNPAFGASHSNFLGKISDILLDAGHDVTMLIPVFMSSKKDLVGSKKITKIIRIDQDRRSKQMHEEANLEEMMKKQIWKLDADNSAFFFMIKNFSLACGYECEPLFDHIGVKTVINADSVLHLDIVKYALGEPASTSFYPGPFSKFIDKMSFFERTRNLLGYAFLWYFSWTRFQAELEAIKPYYNKSLSWEDHINGAAFYLINSNQYLDFASPTLPKTVFIGGMQVNTKKDGKMELEKEWDDLLSLRKENVLVSFGSNAFSSDMPAEFKKAFLEVFASMPDTTFIWKYEEANATLADHLPNVKLTTWMPQNDLLADDRLTLFITHGGLGSSIELAYQGKPSLVIPLTSDQPRNALMLTRHGGALELDKTNLDKPNKILHAIKTILDDPNYRKNAEKLASILSSQPHQPKDVVLKHCDFAVKFGDLKTLNSEGRNLNLLQFYSIDIALAALAVTVSVLLIVASLIRCLFRKIVSLFLNVKIKTE

SEQ ID NO: 6604 - protein, 531 aa, Neodiprion lecontei
MSRQSVWQSVSLILFVTVWEFGNASRILAVFPSASVSHQVVFRGLTLALRERGHELVVVTPNPVRDPNLKNYTEIDVSYIYDPNIKLDLIELRRKMNWAEWICTVADGFHVVSEQIFDHSEFKKIYELGSGERFDLLLMETLYFPAFLSLAKRFDVPIIGMTSLSPALNLQYSIGNPILSTHQSIWDLQRNEMSDPPTFFERLRNFINVWKYIYYFNTEFMPAQHAIAEKYLGIEIPDLGEIERNLSLIFINQQAPISYPRPNVPTVVEIGNFHVSKKSEPISKDLQKTLDESKQGFIYMSLGSNVKSTMLDKKSRSEFIAAFSKLPYTVIWKFEDEFLPGKPDNVIIIKWAPQQAILAHPNLKAFVYQGGLQSTEEAISHGVPVIGFPVMADQDMNVNKMVSLGVGKKLEITDVKRDDLIEAIQSVATDGSYKQKMLNLRELLNDRPHDLLENAIWWTEHVIRHRGASHLHSSTADEPWYQRQDMDIIFVVTAVSLIASTLSLIIAYHLLSYSINAFSHHQLPVKKKKKM

SEQ ID NO: 6605 - protein, 507 aa, Zootermopsis nevadensis
LLVAFLFLSTSFDEAYCANILAVFSVPAPSHMALKSALLTELAAKGHHVTVISSFPEKVSVPNYTDIPVLSQEFVKIGMNDRKVYDFVHQNALMMQIRFWQIAGDMCSEILSDKRVQELIDSTDLHFDVIILEAFFSDCFLPFGYKFKAPIIKFCTFGGTNWMGYWVGNPNPYSYVPDGLLGFSDRMNLWERIINSLCGVFFTLGRQFYFLPRQDKIVKPFFKDVEGLPHLAELDATSTALLLVNSHFSISSPKPLMPNIVQVGGLHIKPPKPLPDDLQVFLDDAPHGVVYFSMGSIWRSCDLPDSTRQTLLVAFSKLKQRVLWKWETDSLPGQPSNVKLGKWMPQSDILAHPNVRLFVTHGGLLSSQEAINRGVPIVGIPIISEQRHNVVRAVLLGFGIKLDFFNISAESVSWALREGLENPRYRENAQRLSRIYRDQPLTPLDQAVFWTEYVIRHKGAPHMRSAALDLAWYQYFLLDIIVALTLALSLLLIVAFFAFRAVARNVF

SEQ ID NO: 6606 - protein, 218 aa, Oryctes borbonicus
MGSSVRAANMPEYLRRMLLCVFKQLPQRVLWKWEADHMPDVPPNVKLSRWLPQQDILGHPKIRAFVTHGGLLSMFETIYHGVPIVTIPVFCDHDSNAAKAHLDGYAIQLDLATLTADNLLRAIRNVIHTSKYKANVKRMQYLLKDQKETPLERAVYWTEYVLKHKGAEHLMSPARNLNIFQYYLLDVIALCLACLILSHYLLKLSITLVYKYLSGNIG

SEQ ID NO: 6607 - protein, 520 aa, Danio rerio
MACLWLLGSLLLLGSAEAGKLLVIPTDGSHWLGLKPIVEELGRRGNQVVVVIPEASLSMGPSEKTTTLTYPVNYTKVELEAVLASELNALLSIDVSTDLAKFQSFFFTLNVLQTFILRNAEGLLFNKDLMKKLQDYNFDAILTDPFEPVGAIAGEYLSIPAIYMQINHPCGVDTLASQCPAPPSYVPQTFTHFTDRMNLWQRSINFVRALLQPKACKLIFARADEIASHLLQRKTSMVEIFSRAALWFLRFNFALEFPRPVMPNMVMIGATVNQKPKPLTHELEEFVNGSGEHGFVVFTLGSMVSQLPEAKAREFFEAFRQIPQRVLWRYTGPVPENAPKNVKLMKWLPQNDLLGHPKVRAFVTHGGSHGIYEGICNGVPMVMLPLFGDQGDNAQRLVSRGVAESLTIYDVTSEKLLVALKKVINDKSYKEKMMKLSAIHRDRPIEPLDLAVFWTEFVMRHKGAEHLRPAAHDLNWIQYHSLDVIGFLLLILLTVIFVTVKSCMFCFRKCFKKSQKKKKA

SEQ ID NO: 6608 - protein, 1069 aa, Lucilia cuprina
MGPKKVTFLSILLTVCVTWQIGQVDSANILGLFTSHSPSHLIVHMSVVKALAERGHNITVVASQVPKVKHDKIHFIIIPPTEEQEQILNKEVSGMALKKNNIFTTVSNFFGSLKLLIDMQADVLKHPRFTALYENPDTKFDLVIVGYFMNSFEYGVAAKFKVPLVISWSASSMLLSDIMVGNPSEVSYVPGMNMAVKLGEKMTFLERIQNFFSNLFFHLVKELLDIRMRSFYHDLFPTDGSFPSLSEMEKNISLVFCNGHFSEGPIRPNVPAVVEIGGIQVKDTPDPLPEDIAKFLDSANETGAILFSLGSNLQGSSIKPETATYIFNVLSNLKQKVIWKWEDLKNTPGKSNNILYKKWMPQDDILAHPNIKLFITHAGKGGVAEAQYHGVPMVALPVFADQHGNAMKMVANGYGKYLELLTLTEDPFREAILDVLNNPQYRENVQRFSQLYRDRPLTARETVVFWTEYVLRHYGAAHMQSPLVHMNFIESHNLDVYLFIMIILYVAGTNFSSFSKIVRTSTRAMTRKSLAAAFGILLTICFLTWQVPQVNGANILGIFTSHSTSHLIIHMSVAKVLAERGHNVTIVASQEPKVKHDKINMIIIPPSSEVEELIGKAMKGMATQKTTFFTTVGNFFGSLKPMIDMQADMLKDPRFTALYENPDTKFDLIIMGYFMNSFVLGMGARFKAPLVISWMGPPMILSDIFVGNPSEVSYVPDMNMSVKVGEKMTFLQRLQNLFMNMFFRLFKQILDIRMRHFYSELYPTDGSFPSLSDMEKNVSLIFCNSHFTEGPIRPNVPAVVEIGGIQVKDKPEPLPEDIAKFLDSANKTGAILFSLGSNLRGSSIKPETTTHIFNVLSKLKQKVIWKWEDLNKTPGKSPNILYKKWMPQDDILAHPNVKLFITHAGKGGVAEAQYHGVPMVALPVFADQHGNAKKLVDAGYGKDLELLKLTEESLYAAIVEVLNNPEYTKNVQTFSKLYRDRPLTARENVAFWAEYVIRHHGAAHMQSPLVHMTTIESLNLDIYLLLSMIIYIIYRLLKLLVLCVVCKLCRNSSKTITKKAKKSKKVKAQ

SEQ ID NO: 6609 - protein, 463 aa, Trichoplax adhaerens
MKTLSRVCVFFMLIISTPCILALKVGVLPLVAGSHTLSMDAITRQILQRGHQAITIISNEDRYLKRLMPSALALYEVDEPLTEMDSQKMLTSKIRLQILRNFYEIQSRYCDATLSNKTLLQSIQDVDIIITDNLYVCSILLPELLNKPSIIMSFSAGIAGMHTFLGEYEPTTYIPIHGSMISSQKMTFKQRAINVIQGKIMYAAMNYISASAINKLRLKHNISMHLTLDQLRRKFSLHLSSIDFSIEYARPLPPYIHVVGPVTPRPPSSLPPIFENIIQNLKNQTIIVLSFGSELQLSNEKLPEMVTALRQLPYTIIWKTKQNIQNIPSNVKIMEWIPQNDLLGCNKTIALITHCGCNSLYEAAYHGVPMIGMPAMIEQMGNAARMVHAGIGIHVDFHSFEAADMINAVTELVENSRYKENVAKVAKIIKSNGRSPADAIVDWIEMLYHCCLGEGLTFLPRID

SEQ ID NO: 6610 - protein, 419 aa, Agrilus planipennis
MSGFQKEITASTFGPELTRKVVTHPSFKTLIHSNETFDLIIFERFMNEALFGLSHRFNAPYIVLSTIGYSRWTIEMAGNPGYTAYIPDLYLHYASSMTLWQRFHNTFFDCFVKLYRHFVVLPKHRSILRETFPNAPSLEDLYYNASLIFMNTHVSIKYAVPSVPNMIEIGGFHVSPPKPLSKGLKEYMDDASDGVIYFSLGSICQSKDMAPETRDIILRVFSKLKQKVVWKWEDQNSTFTLPPNVRFEKWVPQQDILAHPNLKLFITHGGLLSIIEAIYHGVPLLVIPIFAEQFMNAADVESLGYGLKLYYTHITEENFSYLINELLINTRYKENVKLRSKLFHDQETKPIDRALWWIEYVIRYKGAPHLKSVTLNLKWYQYFLLDVLALAIILILFIVVLIVVCLKQFCKNRGKSKID

SEQ ID NO: 6611 - protein, 1066 aa, Pseudomyrmex gracilis
MWLVTCATCISLLLCSLSTNNVATAKRILVITIAPFYSHQTVIESVCSELNKRGHELVVITPHSMRNTSQNYTEIIVSEVKLLIDSVLLNMNIWELSTIQTPITMTQISSKISITIFNNPEVKKLYRHDSNEKFDAVIVEAVSSPSLFALAHRFNASIIGLSSLHMHNYHRYVFGSPIYPSHASNWEIIYEFDVPTENSSIWERLRNFIVTWRYVYYWMNTFVDFEQETIKKYLGNDMPPVTDILKNINLFLTNENPVHVYPRPEHPNLVHFSGFHIKKTPPPLPKDLIQFLNGDEFIYVSFGSTIPNEMFPREWLKILVQVFSKLPYKVVWKFAREELPEELGNNVFISKWFPQQGILAHPKIKLFIYQGGCQSTEEAIHYAVPVVGIPFIYEQVGRLHRLASLGVALYINSRTLTAEKLRSVINQTTSNNRYKEKMEHISAVFKDQPYDSMENAIWWIEFVMRHKEQLQFKIDEPWYQLYSIDIIALLITILFTAAFIITLIIFHIIRYFFRVTIRQFVKKSERMWAKNFLIFPMLCLIVRYNAIHAKRILFVVQLPSYSHQITYRNLCLELHKRGHEIVSITTDPIGNSSLTNYTEINLNYFYKGFLEAKEVSSYESVTQISLNNPFFQEERILWRIINVFNRKTFENEEIKKLLSDSNEHFDAVIVEQASTLSMNALAYRFNAPLIGIQSQDVYNHLRFMSGSIILPSHASNWQSNMIFDRDLSFWERVVNFCQVWGQIYHIMNEHISAEDALVKKYLGQDMPHIIDITKNMSIYLVNRHPAFSLHRLEQSNVIFYHSFHVAKVPPALPENIKTFIDEADEGFIYVSFGTMVTWEHLPSTTLKAFVEAFCALPYRIVWKFPNNDQLPKCKNILAANWLPQQGILAHPNIKLFVYQGGVHSTEEAIYYGVPVVGYPVAWDQKYQVQNIEKLGVGVRLPLHETSKENIIAAIQKVINDKGYKERMERLSIRLKDSPYNSLQHAAQWIEYVIRQNGTLFLRSSLCDEPWYRRYDWDVIGFLAIVGFIASLISLWILLQILRCHLRMLFYLNGSVVARSITLNQRF

SEQ ID NO: 6612 - protein, 404 aa, Armadillidium vulgare
MLTISRLLWVLFFTVNICWAYKGLYIMNHGTRSHLSFHKAILETLSESGHKITFVTPYNTKFNIKNVTEILLKENWTDKLLGNPFNNSNDLSLVWKFLEYGPKSCTGPLGDPAMQKALEEDYDYVLLSIFLSECFLTVPYVKKCSCFGIPGKTDVAQCRLCWRNSHKRTSAPSTGVGGLARWVRGRRLHLFLFGNSYQSRTFKAGVSKHKIHSVLTSLINLRTLPWEIERHISSILKVFGSLKQRILWKWNSEIENLPSNIKISSWLPQQDILAHPKIRLFISHGGLFGSQEAMYFEVPVLGMPVFLDQHMNIDEIVSQGWGKSISWDNLTEENFAEAIQDILSNSSIREKAHERSVLMRDWPRTPKEEVFWWLVVVRPMEQNTFKNLSPIYMVRKFYFLFLNL

SEQ ID NO: 6613 - protein, 529 aa, Drosophila busckii
RNSVLIALLVSLSISCLPSDGANILGVFTSHSPSHLIVHMSVMKALAEEGHNVTVVSSLEPKVTHKSIKHIVIPMSKEDEKTLNKNMGDMTREKQSLFSTIKNLFGSFSMLIYKQLDVLEDKRFTELYTNKDNKFDAVVVGFFFNRYQVGLGSLFKCPIILSWTSGPMDHINELMGNPVLISTVPNMNMPSDGKPMNFKQRMTNFASTMVFPLFIYIFIYKFFFCSRMWGKIPHMLSFEEAKKNVSLLFCNSHALSEGPLRPNVPAVVEIGGIQIKQKPDPLPQDIKEFLDGAKDGAILFSLGSNLKGDHIKPEIISNIFKTLSSLKQRIIWKWEDVKHTPGKAANILYKDWLPQDDILAHPKIKLFITHAGKGGMAEAQYHAVPMLALPVFADQPANAEKLAEAGYGLALDLTNLEADALKEAIKELLVNPKYTAKLKQFSQLYRDRPMTARDSVVYWTDYVVRYKGAVHMQSTLVHMNWLTSSNLDVYLILAVILVIVLKITKIVLKFFWRKCCGGKGKAEQSKQKS

SEQ ID NO: 6614 - protein, 523 aa, Zeugodacus cucurbitae
MRTSSAILALAFAFAFNSFSCGESARILAIFPFPGRSQFICVEPYLKAIALRGHELTVISMYPQTKPLANWRDIEVTEMRKHYDAVMAGIYKERYTYWSALNAFKPLISISLKQVLDSPAVQELLHSDEHFDLLILEPLRNEPLFGFAEHFKAPIIGISTYGMDPHLDEYVGNISPLSFTPLYTVPLTDHMNFWQRLLNLWWTTVERVHLHTIMLPYYEEVYKHYFPNSSTELKQLRKNMSLLLLNQHFSLSYPRPYVPNVIEVGGIFLPDKANPLPADMEHFISSSPLDVIYFSLGTNVRSKNLPKEKLEALLNVFGSLNVNVLWKFEDTELPGKPNNVYISKWFPQFDLLAHPKVKLFIMHGGLLGTIEAIHNAKPLIGMPVFFDQFLNVAQAVQSGFGLHVDIKTFTADNMKRAILEVLNNPKYTEKAKELSRQFHDQPMKPLDTAIYWTEYVLRHKGAPHMRATSKDLNFIQLNSLDTGLVLFGGLAGVLVLTLYIWCKLCAKLYAKLGNSNTKKRKRD

SEQ ID NO: 6615 - protein, 489 aa, Strigamia maritima
MLISKLFIIVFVSLTSLSQASNILVMMPIGGQSHKITFNSIITQLANRGHNITVFSPFIFKQNVKNIILKTATSEDTVKSILQFINTNPIILFSTFKNLITSCCKSSLENSEFKEIIVSNQQFDAVIITSFFNECTLMLSSLLSKVIIQVAGGPMFPWMFLPVTQPPSFVPNPLWPVTDKMTFLERTYNAINSISVKMMSHYHLLGDIESTVWQHYPKAPSIAEAEKRVAFVLQNSDPVLSGPNPSLPHIIDIGGLHCEDAKPIPRDLNDFIETSGDHGFILFSLGSNVKSKFLPDDKKQSFLKALARLNQTVIWKYEDDLKETPKNVLVRKWLPQQDLLGDNRARLFISHGGLLSLQEAVYHRVPIVGIPVFTDQPGNIARVVQLHIGVQLLYNDITEENVFNAITKILNDESYTRNVKKYSSIFRDQPEKPSEKAAFRVEYAIRHSGENLLLKANNSFNLFIFYSVDVILFFITIIVISCVIIKKLY

SEQ ID NO: 6616 - protein, 543 aa, Drosophila ananassae
MTPNRSTWFGCSLGGLLVAFLALQSMPQGSDGANILGVFTSHSPSHLIVHMSVMKALAEKGHNITVVSSLPPKVTHKSIKHIVVPLDPQSEKILNEGMADMAKQKPSIWNTFSNIFNSLSLLIDKQVDVLEDPRFQELYLNKGNKFDVVFVGFFFNSYQVALGARFNCPVIISWSGPPMLMVNSFLGNPELSSVPQMSISLAPGATMNFQQRLKNFVSTIGFNGLGLVLDHKYKKFYKRLWGNDKTMPSFEEAQKNVSLAFCNGHGISEGPIRPNVPGIIEVGGIQVKSKPDPLPEDIKEFLDKAKNGAILFSLGSNLKGDFIKPEVVKTIFKGLSKLKQQVIWKWDDLDNVPGKSANILYKKWLPQDDILAHPKLKLFITHAGKGGVSEAQYHGVPMLALPVFADQPANADKVEESGYGLKLELNTLEVEEFKATIKELIENPKYAQKLKAFSQLYRDRPMTAQESVVYWTEYVIRHHGAPHMQSPLVKMTFISSNNLDIYVLTGLILYIIFVVSKLFWKFVWRKLFGKSNKTTQKKKVKKQ

SEQ ID NO: 6617 - protein, 308 aa, Drosophila sechellia
MKKPIKKIIDVETPNIITVMGVYKVRILENAKKPVLLRYPKLSLMGLDLTESLLKEPKVQELLKQNRTFDGVICETFMNDAHYGFAEHFGAPLITLGSLGATGWTSDLVGTPSPPSMRKDTSLVLLNNHVSISNPRPYSPNMIEVGGMHVNRKAPKPLPQNILKFIEEAEHGVIYFLLGSNLNSKDLPEIKRKAIVETLRGLKYRVIWKYEAETFDDKPDNVFISNWLPQDDILAHEKVIAFITHGGLLSTMESIYHGKPVVGIPFFGDQFMNMARAEQMGYGITVKYAQLTASLFRSAIERVTSDPS

SEQ ID NO: 6618 - protein, 517 aa, Trichoplusia ni
MKLLILFGLTLLCGVESLKILVYFPLPVRSVGMLGQGIVRHLLDAGHEVTFVTVYPMKDVRPSLKQVDISSNKELVAKDESLMLSFMLENNVQDTDVLYIQTFFKENSRQTFTNENFTKFLQDTSQRFDLVLADLMESEVSAGLSVVYDCPYVWYYSMGAHWHVLRLIDEGKNPAYDPDYLTTTIAPFSFLQRVEQLWARIKYKALKTFITLPEEKKIYEEIFTPLLAQRGRTLPNYENVIYNASLVFGNEHNAVKHRPSTPQNFKYVGGIHIPDPVTPLPKKLQDLMDNAKHGVIYFSMGSFFKSKHLPQSLVRGLVKTFGELKETVLWKFEEDLTDLPSNLHILQWAPQASILAHPNLKFFITHGGLLSSIEAIHFGVPVITIPVYFDQFTNAEKAVKNGYAIRVPLSYDLPETLRPAIKSMLSDDIYKKKVTELSIIYHDRLVPPGKELVHWVEHVVKTRGALHLRSPALNVPLYQRLFLDLLAVILVILYIIRRIIKNLTTKTPKKTEKKKKN

SEQ ID NO: 6619 - protein, 541 aa, Vollenhovia emeryi
MRLITGISPIITILWILITTNLACGKRLLIITPTPSYSHQIVFRAICLALSKRGHEIVTLTPNVLNDPSVTNYTEIDFGFAYEKIDDSDISQSRWNLTQLAGLKTRLLTLGHIMAEDVLSHPDLAKYHANGTDVQFDAVIAEMIMTPAIYMLAHRFNAPLIGIMSMDLQNCHRFTLGSPVLPSHPSNWELESSTGLYVPFWSRLVNFVNTWWSIYSWFNNFASKQQQIAEKYFGNDIPHVIDVAKNMSLVLINQEPLLAYARPEIPNVVHFSGLHIAKTPPSLSKNLQAFLDDATNGFVYVSLGSNTKSKLLPQETLQIFADAFASLPYKVLWKFENDSFSVPPNVFISKWTPQQGVLAHPNIKLFIYQGGLQSTEEAVHYAVPLVGIPFVFDQVYQVMKMVSLGVARYLDIVQLTTSELRDAILEVADDKGYKDRMLALRALTKDKPYDSLENVIWWIEFIMRHNGAPHLRFNGVDTAWYQQFDLDVIVFLAITSFLVLCAILGAVGWVSTQLYIYFDLSNRCILRRYIRRIMNEKTKSA

SEQ ID NO: 6620 - protein, 516 aa, Zeugodacus cucurbitae
MNYSFNANSYWCKMFIRLLYLTLFGLSVFEQTHAANILAIFPFPGPSQYICVQAYLKALAARGHEVTVISAFPQKKPLGNFRDISIEEVLNGYEETIVNAIREEHNKWQELNLYYNFFTGVTLSVLKSPKVQELLRSNAHFDLLIVEALQMDAIYALAHHYNASLIGVSTYGADPTIDELVGNTSPTSYVPLPLSELSDRMSFWQRLQNVWHYLLHQLHMHLFYLPNQAAIYKQYFPNSTLDIYAVRKNFSLLLLNQHFAISFPRPYVPNAIEVAGMHISDRPNKLPTVIENFIKDAKQGAIYFSLGSNVKSKNLSKEKLATLMRVFASLPYNILWKFEATDLPNKPPNVYINKWFPQSDILAHPNVKLFISHVGLLSTTEAIHHAKPLVGMPVFFDQFLNMARIRHAGIGVAINYRSFTYDELRSAIVEVMDNAKYTQKIQQMSRRYHDQPMKPLDKAIFWTEYVLRHEGAPHMRVAAQEMNFIQYHSLDTLTVLVAGAILALILPVWFIYRNVQ

SEQ ID NO: 6621 - protein, 579 aa, Drosophila navojoa
MSRDKVQLAACAIILLVLPCRPIDGANILGLFSTFSPSHLVVHMAMMRALADRGHNVTIVSAIKPRLVPHENITLILAPMSEATLAEVNQFMESSTKEKPSMNGIFYRMLIKAAVMLDCQYEFLLHPNVRAIYERPQTKFDLLFLGFMFNDYQLGVAAKLGIPAVISWVGVPFTFIDDEVGNIYDPAYVPNLKVGVASSQRAMDFGQRLKNYCTWVFLKTIAFILDRRMENYYNGAFGADLQMPSYWDARRNISLLFYNYHSHSEGPVRPTVPQSIEVGGVQIKEQPDPLPSELAEFLDNAKAGAIFFSLGTNVKSGYFTPNVMEAFFKVLSSQPLRVIWKWDDLQHTPGNASNIYYHNWLPQDDILAHPNTKLFITHAGKGGIAEAQYHGVPMVAMPIFGDQHGNADNMVYAGFGLSVDWTTLTEASLAQTLNEVLQNASYRERVRSFSALYRDRPLTARQSVVYWTEYVLRHKGAYHLQNPALHLAFVARHNLDVYACLLILLAVSLTLLKLLLRCIWQQLRTLAPSKDKCKFFPINCVTRICSSDSRTALSVAVAIETSKTNANLRDFHSERTAKQ

SEQ ID NO: 6622 - protein, 811 aa, Amazona aestiva
  MOD_RES (19)..(19): Any amino acid
  MOD_RES (114)..(114): Any amino acid
  MOD_RES (128)..(128): Any amino acid
  MOD_RES (140)..(140): Any amino acid
MLVAVLLLFLCCLSPAAAXKLLVIPVEGSHWLSMKEVLAELNKKGHEIVVIAPESRLLIDSSEIYEMKSYPAPFKKEEMQEVLHSMSENAFSDDPFLTRFMNTWYHFKQSSSTXQALCRSLLYNKEMXKYIEESKFDAIXTDPLTPCGQIIALKFSIPTVFFLRSLPCAIDVHAAQAPDPPSYVPRLFSVNTDHMTFSQRVKNFLITLSETFTCNMVYSGFETLASDFLQKPITITQLLSHGSVWLKRLDFVFEYPMPIMPNMIFIGGINCGQKKPLSQACSAWRFCSARESHAMLCLIPARVSAGKLLVMPMDGSHWLSMRSLLAALSQKQHHIVTLAPEVTLNVKASEHYTLKTYPVPSTRAELGARMHAFAKDLFERRPFLQGITALYEKAQVISEFYVSSCSSLLHNKDLMQYLEGSKFDAVLTDPVVPCGQILALHLSIPSVFFLRGLPCSFDLQATQCPNPPSYVPRTFTDNSDHMTFIQRVENLLLKASESFLCNSAYLPFELLASDVLHRPVTMKELLSHGSIWLKRMDFVFEYPMPVMPNIVFIGGINCGKKKPLSQEFEAIVNASGEHGIIVFSLGSMVSEIPMNKAKVIADALGTVPQTVLWRYTGKVPPNMPKNIKLVKWLPQNDLLAHPKTRAFITHGGSHGIYEGICNAVPMVIMPLFGDQMDNAKRIESRGAGLTLNVLEMTTEDLSAAVQAVINDKKYKENIKRLSDLHLDRPIHPMDLAVHWVEFVMRHKGAPHLRPAAHDLNWIQYHSLDVVAFLIVVVLLSLFISLKCCLFCCRRCCCKKGRTRKPTKSKTH

SEQ ID NO: 6623 - protein, 492 aa, Homo sapiens
MVSIRDFTMPKKFVQMLVFNLTLTEVVLSGNVLIWPTDGSHWLNIKIILEELIQRNHNVTVLASSATLFINSNPDSPVNFEVIPVSYKKSNIDSLIEHMIMLWIDHRPTPLTIWAFYKELGKLLDTFFQINIQLCDGVLKNPKLMARLQKGGFDVLVADPVTICGDLVALKLGIPFMYTLRFSPASTVERHCGKIPAPVSYVPAALSELTDQMTFGERIKNTISYSLQDYIFQSYWGEWNSYYSKILGRPTTLCETMGKAEIWLIRTYWDFEFPRPYLPNFEFVGGLHCKPAKPLPKVLWRYKGKKPATLGNNTQLFDWIPQNDLLGHPKTKAFITHGGTNGIYEAIYHGVPMVGVPMFADQPDNIAHMKAKGAAVEVNLNTMTSVDLLSALRTVINEPSYKENAMRLSRIHHDQPVKPLDRAVFWIEFVMRHKGAKHLRVAAHDLTWFQYHSLDVIGFLLVCVTTAIFLVIQCCLFSCQKFGKIGKKKKRE

SEQ ID NO: 6624 - protein, 406 aa, Danaus plexippus
MDVVQKFIKDRSVKFDVVIVDWLYTELGVGFSSVFNCPLIWFSSMDVHTTVLALIDDYLNPAYARHHMSTEYSSSFLNRVKELWTISRTWLYHWWHLDEKERMFREIFGPASEERGIKLPHFNDVRYNASLMLGNSHIVVGEAIALPQNYWHIGGYHIKKTVEPLPKDLQKIMDTAKDGVIYFSLGSLLKGRKIPSAVKKRFLNIFSELKQEIIWKFDEQMTDLPKNVHIVTWAPQQSILAHPNCILFITHGGLLSTLETIKYGVPIIGIPFFADQFLNVNKVVAKGFGRRVDISENTPEELRIAIREVLGNTSYRTRVKELSSLFNADSDPGQRLVQGVELVVRTNGAPHLRSVALRVPFYQKLYLDVLLLVIGIVFGIIILISYACKYLRTFISRSNQGKKKLN

SEQ ID NO: 6625 - protein, 280 aa, Callorhinchus milii
MADDLANHAKYVLHTTLPKHAFFPHLLEPSVCYDLVLFLQEMEEFVQSSGEHGIVVFTLGSMIKNLTAERADVIAAALGQIPQKVLWRYAGEKPKTLAPNTKLYDWLPQNDLLGHPKTRAFITHGGTNGIYEAIYHAVPLIGIPIFADQPDNMSHMKEKGMAVVLNFNTMTTLDLVDALNTVINDPRYKENAIRLSSIQHDQPMTPLDTAVFWIEFVMRHKGAKHLRPASHSLTWYQYHSLDVIAFLCFCLAVALYIPIKCCMYCFRRCRSKLKRKGKKD

SEQ ID NO: 6626 - protein, 519 aa, Plutella xylostella
MWAFLCILGLVFSASDVDSSRILGIFPMASVSHQVVFRALTYELAKRGHELVVITPDPGLPKDRPNDNITEIDISHAYEGFKTLMAKGNPKRGVVITPHDMLKLNKFKVILNCAEEVMKNEELNKILNDDTKKFDLVIGEALYNFPMIYAKRFDTPMIWFRNFQPLGAASGHPFLYPVYFRDRYLNLTLIEKIQQLYIDVVLRLGAVAMSYYEHGLMKQYFGDETPSLDELRDRIDLMFINTNQVFETARPVPPNVIYLGGLHMKPVQPLPKDLKQYLDSSERGVVYVSLGTNVRIAEMDGTLLKEFVKAFDKMPYDVLWKYDGIELPWLPKNIKHSKWFPQRDLLHHPNIKAFVTQGGLQSTDEAIDAGVPLVGLPALADQWYNVERYVKHGIGKQLDLVTMRAEDLVAAVVDVVEDESYRENIQKLSKLVKDQPETPLERAVWWTEYVIRNKGAKHLRSPSFNISWSEFLMLDVVLALCGISLLVFVIFVTIVLFLVRKCKLCKTDVKKDTKKVKKN

SEQ ID NO: 6627 - protein, 591 aa, Caenorhabditis remanei
MKSLYIVANFYPNNSIFLVVIRSLLISFFVICLVTNMKIIYVILLFIGFIGSAESYKVLVFNPAYGASHSNFLGKLSDILIDGGHEVTMLIPVYLANKKNQIGSKKVKNIVEIGQDSRTKAIFEAGNIEHVVKSKIWTMDPEMMSHFSLIRSMNSAISHECEFIFQQTEILQKLRNESFDLAITESLFACPFGMFITHSIVSMTVFFAAVFDHIGIKTVINAESNLFKDAVKYAHGEPAAISYFPGLFSPINDKMSFFARIQNLIRMIFTHYLTVSRYQGELEAIKPYYNKTKSWTELISGVAFYFINSNQYLDYASPNLPKTVFIGGMQVVTNKKSTKLNKHWDSLLSVRKQNVLISFGSNAHSCDMPEEYKQSFLEVFASMPETTFIWKYEDENATLADHLSNVELTKWMPQNDLLADSRLTLFVTHGGLGSTMELAYQGKPALIIPLLADQPRNAHMLTRHGGSLQFDKTKLSNSEDLRRAIKEVLNDKKYTESARKLANILNSQPFSPKDVVLNHCNFAVEHGTLETLSSEGKNLNFFQFYSFDIFLGFIALVVIIFSVTLISLVILMRLLIRVVERIVLYQKKKIE

SEQ ID NO: 6628 - protein, 527 aa, Nomascus leucogenys
MLNNLLLFSLQISLIGTTLGGNVLIWPMEGSHWLNVKIIIDELIKKDHNVTVLVASGALFITPTSNSSLTFEIYKVPFGKERIEGVIKDFVLTWLENRPSPSTIWRFYQEVAKVIKDFHVVSQEICDGVLKNQQLMEKLKKSKFEVLVSDPVFPCGDIVALKLGIPFMYSLRFSPASTVEKHCGKVPYPPSYVPAVLSELSDQMSFTDRVRNFISYHLQDYMFETLWKSWDSYYSKALDGLLLCCPGWSAVVDLGSLQPLLPGFKQFSCLSLQCSWDYRQPPGRPTTLCETMGKAEIWLIRTYWDFEFPRPYLPNFEFVGGLHCKPAKPLPKVLWRYKGKKPATLGNNTQLYDWIPQNDLLGHPKTKAFITHGGTNGIYEAIYHGVPMVGVPMFADQPDNIAHMKAKGAAVEVNLNTMTSVDLLSALRTVINEPSYKENAMRLSRIHHDQPVKPLDRAVFWIEFVMRHKGAKHLRPAAHDLTWFQYHSLDVIGFLLVCVTTAIFLVIRCCLFSCQKLGKIGKKKKRE

SEQ ID NO: 6629 - protein, 203 aa, Ancylostoma ceylanicum
MATIPHASRFHFLSTDLISGNVHLFKWLPQTDLLYHPKARAFITHAGYNSVQEAIHAGIPMVCLALFGDQPKNAKVTEKLGISRNLKKTELTAEAIEAAIRDVLENERYNKNAKKLARMVQRKPVSPSDLLVRWTEFLAEFKTLDNLKPAGNKLNWIQYHSIDVLLFLASLVSLVIFIFIKILKFVAMKFCRCLKHKEKQKQI

SEQ ID NO: 6630 - protein, 549 aa, Bactrocera latifrons
MNNNFGHTIHIKMIYQKFFLPIIILRSLSWNLAVVDGAKILGLFAHPSESHFAVMRSLMLELTKREHNVTVYSSHRLNERLERLREIIVEPEFPFWKQFLEITGSQEGGLLKASKLTERTIQQSLATTGANAVNYFLSNEAVKKLLNLPVNEFDYDLIIVDLFYTEALLAVGHFFDKPTIGILNTNFESYMDRVLEQMVPAACSPISYETYKPEVGYWNRLGVIRNCMSRRKQFIKDNWGAQESVMRKHFSQFKGVNELNIGTLQAELTILLLNSHVPLLRPRPLLLNTVAAGGMHIRPPRELPWPLRRFLDESRAGVIYMNLGNEQLCTDVPKHIMQILLNTLGKRKERVVWTCHDHTALKNLHTNIMVQHAVPQADILAHPHVHIFLMNGDLLSTQEGIMRHVPMISVPIFRNEVRNAELTVQLGVGIHLNHNNLTETALNWALQTIKEDSTYQLTIRQVAATFRDRPLGAVETCMYWMDYVLRHKGGADLKTFGGNIPFSQLHLFDLFIYYFAVALLSVGVLAAIIYGIIIIMRKREIGKMYSKLS

SEQ ID NO: 6631 - protein, 532 aa, Trichogramma pretiosum
MEARRGAAATFWLLLLMSASLQQIQGLRILMATMGGTKSHTVPFAALGKQLQLRGHNVTLASGFRGTVPPNSTLRELVSVRLEEYITNYTATWDLVGSRIRNEWPLSPWDAMRYGWESCDSLLGDEYSVGLLQNPEGDPRLAWDVALVDGAFPECLLGVLHRGADADPPVPTIMLNTVALYTGSLSRQGNPTPWSLRTYFGKAFTQDMNFFDKLRNAFYMGSLEFMHWIMTTKYIQPILRKHLGNQVPDVRELVSEVPLTLQNSHYAVADAQPFLPNVVNVACIHCVQPAPVNEALDKFLEAGFVFVSMGSSVKESGMPRELIDAFVHVLSSLPYNVVWKWDGGFIPNLPPSVRVGPWWPQQDLLGHRGLRAFVSHGGLLSLHEAAYHGAPTLVLPVFCDHDGNAAQAAKLGYALVMEFETFTAAEFRENLLKVASPDPSNPYRLAAKKRSELLKDVPMSAVNMSVWWVEHVARHRGADHLKSSARHIGLLQYYCFDVLGFYLTVLCASYWSVKRFIGKFRSRRRKLKLKES

SEQ ID NO: 6632 - protein, 1124 aa, Cimex lectularius
MSPVLIIVMFINFSSGANILGFFYFPVPSHHNVFRPILNELANRGHNVTYVSPFPYKPASANMRHIMIENHRDEFSGVINIRNWASYSAIEMSFFLARFTKDLNDKMFSSSGVQEIIHSDEKFDVVLSSSMLFQEPVAALVHKFKSIGIDIHPVGDVVDVNELSGLPSNSEYMLDYKANFGKPIWEFTYRDRLYNMFILIATTLSQYYRLFFMQKQVDKYFNYTGWEDRPPIGKLVANKSLVLINSHHSVGYSYPKAPHVKEIGGVNVLPVKPLPKDLEDFMNEAKHGVIYFSLGTNFNSSTETSSDEQQIIFKVLSGLKQKVLWKWDGVQRPGIHENIKFSKWFPQGDILAHKNTKLFITQGGILSLFEAVCHAVPLIVVPVLGDQPKNSDVVVAGGFGIRLNFNNLTETSLRWAIDKVLNDETYTINAKRRSELFHDRPRAPLEEAVYWIEFVIRNGNVLQPKSALLPFYQLHNLDIIFTMVVIITVLIYIVKLSRSLFLKGKKSPQVFKKKKRCPENRCQYVKISFHAMTTWGLTKVVTTIFELMLAVSLQLTVRRLKLIVMIDRFRRPPPTRFTISRFSASWEFSDVVVVIKVDAQFGTAMRLIIILFLTTCLEYALAARILALFPFPAKSHHNVFRPILVELAKKGHHVMFVGPIPVEQPPANLKQLLLPNYLKDLTEQMNLIDFGKLSSPVIPFWLNEMGLFLTEKVLQSEELQGLIHSDEKYDVIMTESLFFQEPLAAFMHKFNAIGIDVNPHGESAWINELAGLPDNPAYMIDYKSEFTDNMNYLERLHNAYITYSTLLVCYLGQWRFQWLTDKYFNYTGSESRPPLRKFMSDKALILLNSHYSVGYPYPKSPHVKEIGGINIQPNKPLPKDIENFMNGAKHGVIYFSFGSNIEISTLLNSDLVDTFMNVFRKLNQRVLWKWESDNLPAAPKNVKLSKWFPQQDILAHKNTKLFITHGGLLSVMEAVHNAVPLISVPFFGDQVKNAIQAENAGYGIRMNFENLTEHNLLLAINEILNNPSYVTEVKRRSQLFRDRPNSPLEEAVFWIEFVIKHKNALQPHSARLPFYQLHNLDTLLPFFLIVMFILVVILKLLKRLILCICHKMKKKPIEAKKKKH

SEQ ID NO: 6633 - protein, 502 aa, Drosophila willistoni
MATMGGTKSHKIPFWELAKGLIVRGHNITFLSGFPADFHLDGLHEVTPAGLVEFIHNYTNWDLLGSRMAGEMPIKPWDGLRYAFESCDAMLGDAETKELTNRSFDLAILDGAYPECLLGMVHQYKIPFMYINTVGFYTGSLSVAGNPISYAITPNFYSRFTDNMSLYERAINTGMQIGQNILHSYVMRRTYRIVRDHLGENIPHPYEMSRNVSFILQNGHAVVSYPRAFNPNVAEVACIHCKPARALPKDLEEFINASGASGFIYVSMGSSVKAANMPESLRRMLVKTFARLPYQVLWKYEGSAADMQDLTPNVKLSRWLPQQDILGHKQLRAFVTHGGLLSMFETVYHGVPVVTMPVFCDHDVNSAKAEVDGYAIKLDLETLSTNQLYKAIMKVIHDPRYRNAARYRQNLLLDQRSTAMETAIYWTEYVLRHKGAYHLQAQARNLSWWQYYLLDVVALYLLSLYVLVLLLKRLDFRTEKVRSLHVTGPSSPTATKKKAKKL

SEQ ID NO: 6634 - protein, 527 aa, Monomorium pharaonis
MKPIAEVTFWITCFLYIATPIETAKILAIIPIPSYSHQIPYRPLWITLSRRGHEVVLLTTDPINDHSLTNLTEINLQENYKYIRKLNFVKNIKIHTWLSTARTQIWPMIYKTAETIYEHPEVRKLYVSNSNEKFDVVIAETFTSPCFYALAHRFNAPLIGVATLGLNNNNYYLFGAPVLPSHPSAWEMEGDTGFNLPVWQRIKNFIRQWYHIYCVLNYFYPEQQAIAEKYLGKNIPDISDIERNMSIVFHNQQEMLSFVRPTTPNIFTFGNFHISKKSAALPKNLKEFITDAPNGFIYVSLGTNVPVSALPEHVQIIFRDVFASLSYKVLWKHDSDLPNKTDNIHIAKWFPQQSILAHPNIKLFIYQGGLQSTEEAVYYTVPLLGLPVLADQTTQVNKMVSLGVAKSLNIIDLTKEKLNESITEILSNKRYKQRMLEVKMLNEDKPYNLLEHVIWWIEYVIRHKGASHLRTSIVHDPWYQKQEMDVIAILSIVIFVTLLWTLVIIYKLLKLIFNLTKMSVVVKKKIN

SEQ ID NO: 6635 - protein, 522 aa, Caenorhabditis brenneri
MNNMHVLFFLLLVGPTFSLNYLVFCPLYAHSHHKFLAKIADTLSDAGHNVTFFAPIILRKYENVKYLDSTKDIVYLQPSKKLESLGYSADYSKFWSEDATAIQFVPAIKAFTRMFQQLYEDLKEDLSVLNELKTRNFDALVFEFLCPTAFPIAEYLGVKALLPSLSMTHHPLMSRLIGEPSSPAILPSMISSFGDDMSFSERLQNTIGDIFFTLFVHYPPMTSFGDHSKLIDFEDMTVRSPFMFMNANPYLDYPRPLLTKSVLIGGISVNATHMKQEKLSDKYNEILKKKEKNVLISFGSMIFSKDMPLAYKETIVKVIESFPDVNFIWKYEEEDVSFAKNLSNLHFSKWVPQTALLADSRLSAFITHAGLGSVTELSYMGKPAVLVPIFADQLRNSKTLARHNGSITLSKYDLSDFDKLKNAVYSILTEKRFKDSAELLAQQLSDQPISPQTLLVKHAEFAAKYGELPNLDPCSRQMSFISFYMIDIIVFISAIVIVTLGVLLIVVRWTSRFFVHLKYKSE

SEQ ID NO: 6636 - protein, 518 aa, Culex quinquefasciatus
MTSARILLVVAVLALAGTAQSAKILGVIPSGGKSHHFVGAAYTKALAEAGHDVTVIAAFREKNAPKNYREIVMDDLYKTLLKFMENPFEFPEIPPLMHLYMMYTEFGKFSSEFTLNHPEVKELMESGETFDLVIVETFLTEAIYGMAQHFNASLVTYSTLGNILWTRELTRSPAPTSHVANFILNYVDSMTFWERVWNTIVDWSDRLMYNTLHLPVQKQLYEQAFPNAKISFEGQMKNVSLVLLNSHFSLSSPRPYPPNVIEAGGIQIEKVKPLPEDLKKFLDGAKDGAIYFSMGSYLKSEQFPIEKRDAFIKVFSRMKQRIVWKFEDESIPNLPKNVLIKPWMPQNDILAHPNVKVFITHGGLLGGTEALFHGKPVVGIPIFGDQTMNVQRAVKTGYGVELLYKDITEKNVENALNKVLGDPKYAKTAQLISQRYHDKPMSAKETALFWIEYVLRHRGAPQLRSPALELSFFQYLALDVYGVLATITLAVSLILYWAVKSFLRNVCGTKPKKSKKVD

SEQ ID NO: 6637 - protein, 483 aa, Homo sapiens
MLNNLLLFSLQISLIGTTLGGNVLIWPMEGSHWLNVKIIIDELIKKEHNVTVLVASGALFITPTSNPSLTFEIYKVPFGKERIEGVIKDFVLTWLENRPSPSTIWRFYQEMAKVIKDFHMVSQEICDGVLKNQQLMAKLKKSKFEVLVSDPVFPCGDIVALKLGIPFMYSLRFSPASTVEKHCGKVPYPPSYVPAVLSELTDQMSFTDRIRNFISYHLQDYMFETLWKSWDSYYSKALGRPTTLCETMGKAEIWLIRTYWDFEFPRPYLPNFEFVGGLHCKPAKPLPKVLWRYKGKKPATLGNNTQLFDWIPQNDLLGHPKTKAFITHGGTNGIYEAIYHGVPMVGVPMFADQPDNIAHMKAKGAAVEVNLNTMTSVDLLSALRTVINEPSYKENAMRLSRIHHDQPVKPLDRAVFWIEFVMRHKGAKHLRVAAHDLTWFQYHSLDVIGFLLVCVTTAIFLVIQCCLFSCQKFGKIGKKKKRE

SEQ ID NO: 6638 - protein, 531 aa, Xenopus tropicalis
MGATGSSPSCCFFRRFFILLALGCADGGRLLVVPQDGSHWLSMRVLVDRLAQRGHYIVVAIPEVNMLFKDLDNYKVKTFSSPYSKDVLENRMRRMNQEIFVDRILTEKITFWYESMSNATQWVVSACQHFLQNSTLIRELEKEHFDAMLTDSVFPCGEIVAEHLSIPSVSFMRGTIFGMDQIASQTPSPPSYVPRMFTVYTDNMSFSQRVKNFLIHSLEHIVCHIFYYPYAQMASDFLKKEVTAMSLFSRTSIWLMRYDFVFEFPRPIMPNVILIGGINCAKQKALPQEFEKLVKSSGEHGFVVFSFGSMVSEIPMNIAMDIAEALRYIPQKVFWRYTGKAPPNLGDNTHLVKWLPQNDLLAHPKARAFITHAGSHGVYEGICNAVPMVMLPLIGDQMDNAKRIESRGAGLILNVQNLIPDDLSNAVMAVIDNPSYKENIQRLSSLHRDRPVQPLDLAVHWVEFVMKHKGAPHLRPAAHDLNWIQYQSLDVMAFLLAVLLTTLFISLKCSTFACRCCCKRNTKPKRKTKSE

SEQ ID NO: 6639 - protein, 693 aa, Orycteropus afer
MLNKYILLLFLQINLLGTAHGGNILIWPMEGSHWLNVKIIIDELIKKEHNVTVLVASGALFITPISKSSLTFEIYEVSFGKERIEGVIKNFVLTWLENRPSPSTIWKFYQEMAKVIKDFHTVSREICDGVLQNQKLMQRLMKAKFDVLVSDPVFPCGDIVALKLGIPFIYSLRFSPASTVEKHCGKVPYPPSYVPAVLSELTDQMSFTDRVRNFISYHLQDYMFDTLWKPWDSYYSKALGSHWLNIKIILEELIKRNHSVTVLASSATLFINSSPDSSINFELIPVSFKKSNIDALIEHIIMLWIDHRPTPLTLWSFYKELGNLLKNFFVINLQICEGVLNNSKLMSRLQKGGFDVLVADPVTICGDLVALKLGIPFIYTLRFSPASTVERHCGKIPAPASYVPAALSELTDQMTFGERVKNTLSYPLQDYIFQSYWGEWNSYYSKVLGKPTTLCETMGKAEIWLIRTYWDFEFPRPYLPNFEFVGGLHCKPAKPLPKVLWRYKGIKPTTLGANTRLYDWIPQNDLLGHPKTKAFITHGGTNGIYEAIYHGVPMVGVPMFADQPDNIAHMKAKGAAVDVNMNTMTSADLLNALRTVINDPSYKESAMRLSRIHHDQPVKPLDRAVFWIEFVMRHKGAKHLRPAAHDLTWFQYHSLDVIGFLLACVAIAIFLVAKCCLFSCQKFGKTGKKKKRE

SEQ ID NO: 6640 - protein, 514 aa, Bicyclus anynana
MYHLLKIFCIISVIGTSKPARILAVYPLPSISHQVVFRPLMLELAKRGHEVVVVTPDPAYPKGQSPQNLTEIDIHDLSYKMWNDLLETGMGQTRMTFVELKIVLDTITKIFEKQMNSQDVQKLIQDESKSFDLLFTESCVRPALSFGYRYNVPIIEFSSLGSIFGSIYGTGAPTNYLVYPSPSRNRVYDLSLWEKVSAVYNEYKIDKVLEEHEEVENKMVRGIFGSNVPDLSELKKNVQLIFLNVNPIWDFNRPVPPNIIYLGGIHQNPNKELPKDIKTYLDSSVNGVIYMSFGTNARPSLLSAEKLKIFTNVFSQLPYDILCKWDKEELPNRPENVRISKWLPQSDLLKHPNVKLFITQGGLQSTDEALNAGVPLVAIPFLGDQWFNAEQYVKLNIGIYLDLETITEDNLKNAINSTIHDKAYRENVVKLHNIMRDQPQTPLERAVWWTEYVLRHGGATHLRAAGAHMHWTEYYAVDVVIFLLTVALAIVIGVIFAVRYAMSLKDIKIKIKRN

SEQ ID NO: 6641 - protein, 519 aa, Anopheles gambiae
MILGLVILLLFQQCRWQLSAGANILCLTPVPSPSHHIWNRVWIEALAARGHNLTVLSADVDERTAPPNITYIHLEHAYSDLHTELDLFQMASHSALTGIKDLYVWGTAMCRGVLRSKGLQVIQAYPDDFRFDLIIADITCGPCLFPLIHKFHHPPLIGVTAYNNPQFTADFVGGHKHYAYVPFFTLNYDSDMTFYQRFYNWVLHNVDHFYRHHVFLPRIEQMVRNHFRYPGMPSLEQMEHNTVLLLANFHYSVDFAESIGPNHIPVGGLQVRPANHLPDDLATFIAAGREGSVLFSLGTNVRSADLEMERIHMFLEAFRQLPEYNFLWKFEELPSFEVPANVLIRAFLPQNDVLAQPNVKAFITHGGMLSTHEATWHGVPMVGIPFICDQYRNLHKSVTAGVALRLAHDSLSVEQIAAALREILTNTSYRDAMKRRSALLRDQPEHPLDRAVWWIEWVLRHPDGKAIQSPTKHMRFWQYELYDIKLALILLTVLAVCCCKRICTRSDRRSYRNVNKKSN

SEQ ID NO: 6642 - protein, 521 aa, Papilio polytes
MMNFSFKCIITYVLILFGIKCGGYKILAVFPIPAGSHRILGNGVVNHLLKAGHEVTYITPFPENKTVPNLRYISVIDNINHLNVTLINLKNLMTRDIEMDQDNIFNMLMNLTRNTLKSENVSELLNDPTENFDLVLAQWTFNEVFSGFAAAFNCPYIWFFPYEASFTALSLIDEATNPAYTANIEMRDIPPFTFWQRFKLLKFQITKTWRNYFYQRYIENEVFDNAFKPILTKKNRTLPDYEVLRLNASLIFGNYHVSMGQAIRLPQNYIPIGGQHIDEVVPVLPKELKNIMDEATNGVIYFSMGSNLKSKDLPDSIKQGLIKIFSGLNQTVLWKFEEPVPNLPKNVHILQWAPQLSILSHPNCILLISHGGLLSMNEAIHFGVPHISIPVFYDHLYNADKSVSRGIGVKVDLTDNLAEDLKEAIHEMLNNSMYRERMKEASFIYHHRLAPPGKVLVHWVEHVIATKGALHLRSPALLMPWYQKIYLDLVLLLVLGIILTLWILRRLYYIKMQYKVKAKML

SEQ ID NO: 6643 - protein, 527 aa, Stomoxys calcitrans
MRLIYLPGILLGLCAMQCVFLVDAARILAVFPSPSKSHLIVHTSVAEALAAEGHNVTVISAFPNVLKNTHFSKYITIAGKPLDQSFTTEMVNKPQPFYKKMRQMLTFVFDHANETMNHPQLQEFLQTHGPGDFDLVIVGYFMNDFMLGLGAHFQCPVVISFMIQPIGPINEIAGNPFEVSYVPSLLMDVRPPMTFAARVKNFIAIGFERIIMGGFMCYKNKQFYGYNFPADRYPPLEEVYKNVSLILTNHHFSQGPIRPNVPALIEIGGIQIKEQPDPLPAELAKILDNAKEGVIYFSFGSNVQGSHLSKEKAKIMFDVLSKLPHTVLMKWGDSHFPGQAPNIIYKSWLPQDDILAHPNVKLFITHGGQGSVVESQYHGVPMVGIPFFGDQPANMAAVEKAGFGLALQYTQLTEVDFRNTILEVLNNPQYRENVQRFSKLYRDRPMTPRQMVRFWVDYVIRHKGAYHMQSPAVHMTWWQLHSLDVIAFLMAVTFGVFGLLVGLCRCLCCRGGKKATAKTVNKSKKNK

SEQ ID NO: 6644 - protein, 530 aa, Octodon degus
MSRMLRALLLLLLQLCCYFNTAKCGKVLVWQMDFSHWVNAKVILFELVQRGHEVTVLRPSSSVFIDQNHPSGIKFETFPTSVTAEGLKIFFRQLVDNIIFKVPKDIYSQDFSLLQKFFWEGSDICQSICKDAVLNKKLLTKLQESKFDIFLADPIFAGGELLDELLKIPFVYTFRFYPGYTYEKYCAGLLFPPSYVPIIMSRLSGQMTFMERVKNMIYLLYFDFWFQTFNEKKWDQFYSEVLDKPTTLRQTMAKAEMWLIRSYWDLEFPRPTLPNTDFVGGLHSKPAKPLPKEMEDFVQSSGKHGIVVFSLGSMVYNMTEDRVNVIASALAQFPQKVIWKFIGKKPDNIAPNIQLYEWIPQNDLLVHPKTKAFVTHGGANGLYDAINHGVPMVGMPLFGEQHDNIAHMKVKGAAVPLDYLTMSTTDLVKALKAVINNPSYKENVMRLSTIHHDQPVKPLDRAAFWIEYVMRHKGAKHLRPLAHNLTWYQYHSLDVIGFLLACVLTITFLVIKCCLFCYQKFVKIEKKKKE

SEQ ID NO: 6645 - protein, 584 aa, Bactrocera dorsalis
MSMLDNNTPHTAFLLLTACCLPALISSANILGFFPTFSTSTLFYHCRIAELIAENGHNVTVIGTIANARPKAPYRYIQIETPREKLEKLRPFEWRNRTAYWDFLNMLSNRLLLSDMTLSQPLMKDWIKNAKESDFDLLIFGYFLNDFQMGLASLYKCPIIISITTGPAFWINRLVGNPAEGSYVPSALTPFTQPMNFFESWFNFWIVLWERTYFSRVLNEENEGYFCLHFNCQNIRMDDVRRNISLVFTNNHFSQGPIRPNVPTMVEIGGVQIPERRIPLPQHIADHINKAVHGVIYINLGKGANCTNLPRELLDSLHDVLVESQRYVLWRWADCGKPREDSKILYTRWMPQNDILAQKKVKLFITHGSMSSLGEGQYHAVPMLGVTYSSELVGNVKFLAQFKLAERIDAYKTNKDEIRSKLFNMLNDQSYQERAALYSLLYRDRQLTPRETVLYWVNYVLRYGGTPHMRSPAAEMTQLQMLGLDLIVFTFSTIFLMWKFRGFLWNCLTGRMFGNIRKFLRRYLFGKDYEVVIEKYSNIRYDEAVVDAARECQIRPQTVKDPDAPRVVPVKTARQRKFAGRRKR

SEQ ID NO: 6646 - protein, 514 aa, Ostrinia furnacalis
MRTPMLSALLLLLFASQAWSYNVLCIFPTPSKSHNHLGKGIVDALLDAGHQVTWGTPFPSKTSNKNLRMIDLSSTVALSADIDMTQPRFRNAGPDFLKSFARNISISALSSQELRDALTKQQFDAVVTEWFFSDYDCGYAAVQQAPWILLSGMTMHPHLEMLVDEVRSIQTHPLLFNDFPVPMTLWQRMINSFIFGMMTISNWRDQPDNDAYYQSAFGPLAKARGLSLPAYQDALHNVSILFVNTDPAVDRPRSVPANVISIAGYHIDANPGPLPKDLQTILDSSSKGVIYFSMGSVLKSSAFPEHLIADLLKLFGELPYTVLWKFEKELAGAPKNVHVRAWFPQASILAHPNVKLFITHGGLLSTLEAANAGVPILAVPMFGDQPSNAARSVRAGVARKVDFSHHMADELRKELNEMLSNDSYLKTAQSVSRLFRKRPVAPSKLISHYVEVAIESKGAYHLRSPSKLYAWYERYMLDQLAIVGAILYLIVKLIMTAVNVIKRKVSGGKKQKRS

SEQ ID NO: 6647 - protein, 251 aa, Myotis brandtii
MVGLTDRMTFLERVKNTMLSVFFDLWIRDYDIHFWDQFYSEALGRPTTLCETLGKAEIWLIRTYWDFEFPRPYLPNFEFVGGLHCKPAKPLPKVLWRYTGKKPATLGANTQLYDWLPQNDLLGHPKTKAFITHGGINGIYEGIYHGIPMVGIPMFADQHDNIAHMKAKGAAVEVNMHTMTSADLLKALRTVINDPSYKENVMRLSRIHHDQPVKPLDRAVFWIEFVMRHKGAKHLRPASTTSPGSSTTLWM

SEQ ID NO: 6648 - protein, 531 aa, Lingula anatina
MMSPVRTPVVSLLVLLSLWTLSHVAPCSCARFLAMPGIGKSVTLVFHNLAKELHKRGHQVYVIVGSNFPIPDSTKDGSVNYLTFKTDKEYILGSEEFQRNDVKDMIQSDGDMVTNFRLVRTASEFFTSQCAEMLEDQELFAKLSSLKFDVAVIGAYPFLANCQILPYKLDLPVISITSFTSLLGQAGLPLLPSVIPSLFTTFTEHMDFMERVQNFVITLVSNFIFTPSIPAELVHRHVPHKPFKTFNEFLRDSILWLVISVNPALEPIPTLPNVILLGGMGVKQPAALPDHLEAFVQKFKSQGVLVVSFGSVVKYLPTEISKRFLGVFSKLKYGVVWRYSGEDLGEIPPNIKLMSWLPQSDLLAHESVKVFLSHCGNAGSYEALFNGVPVLAMPIAGDQPHNAERLVKRGLAIKMSVATFSPGELLENINILASNSTYQSNTKRYARILRDYPMSLVDQAVYWIEHVVRFGGSHLQSPGAQLPWYIFYSLDVIGFLLSVVVLGVYCIKILCRACRRKCDQNPATGGDKKKQ

SEQ ID NO: 6649 - protein, 1184 aa, Atta colombica
DQPVYKTRLALPADYDNVMTFMCDAFYKDDPTMVNIGLSKQEPASSLLQIMYNEVREGMTLIVEEEEDECIIGAVVNAGSCPWDPDKFVEFARCECGPARDVIEFDAYVTGKPNLWERYCVLKIFECSYLAVRPDFRNQGIARKLVLDSWYLARDCGYRLFRVDCDNRYLARIAEGFGWKRVCVIPFHEYVRDGELVFKYIKEPHTEVEIYIDQVSRCKDYCQPYKTCDKITSSPNNLTCSERLLIITPTPSYSHQIVFRVISLALNKRGHEIVTLTPNILNDTGITNYTEIDFGFIYEKIDDTDMSQIRWNLTQLAGLKTRLLTLGHNIAEDALSHPDLVKYYTNRTDMQFDAVIAEMIMTPAIYMLAHRFNAPLIGIMSMDLQNCHRFTLGSPVLPSHSSNWELENLTGLNLSFWRRLINFINTWWSIHSWFNNFAIKQQKIAEKYFGNNIPHITDVAKNMSLVLINQEPLLAYARPEIPNIVHFSGLHITKAPPSLPKNLKAFLDSATNGFIYMSLGSNTKSKLLPKKILEIFANTFANLSYKVLWKFENDSYHVPPNVFISKWTPQQGVLAHPNIKLFIYQGGLQSTEEAVHYAVPLIGIPFVFDQVYQVMKMVSLGVARYLDIVQLTGSELYDAIIEVIDDKGYKDRMLALRALTKDKPYDSLENVIWWIEFVMRHNGAPHLRFNGVDIAWYQQFDLDVIVFLTITLFLVLCAILAIVGWVSKKLYNTYYNDISNHYVCRTNRPLAVVRCVSHVAYGIGCFVYIATPIETARILAIISIPSYSHQIPFRLLWTTLSQRGHEIVVLTTDPINDPNLTNLTEINFKSHYNLITKLNFIKNIGTYTWINILNKQLWPLCNEITENIYKHPKVRKMYELDSDTKFDVVIVETIKSPGLYALAYRFNAPLIGVTSTGLYNNNHYLFGAPVLPSHPSTWEMQDTIIDFNLSLWQRIKNFIRLWYHIYCTLNHFYPEQQAIAEKYLGKNIPDISDMERNISFVFQNQQEILSFVRPQTSNVLSFGNFHISKKLAALPENLKEFITDAPNGFIYMSLGTNVQISSLSKHVQSIFQDVFASLPYKILLKYDSELPNKPDNIYIAKWFPQQSILAHPNIKLFIYQGGLQSTEEAVYYAVPLLGLPILADQYTQIKKMVSLGVAKCLNIMELSRENLNASIIDILYDEGY

SEQ ID NO: 6650 - protein, 642 aa, Trichinella nativa
MAYLKMTNPLIIVRFAAHSAHEKQRKTGLCHRVSQANQRAEMFTFNHTFKADTFWILILNALLIYFVQSLKIIIFTPDSPNAGREALNKLAQELAFRNHDVFTFRTLLLPEQPYLVVQRPHKVTEFKLQIDLPTEWILHLRAFGNASIWTTEYGDQKYLHSLWKAQVEACSTTLNSDFLDRLRQITPDVCIIPSDDPCALGIVHALKLPFIYYDSDGLQDETILSVRPQLFLQGLPPSSRSTLPGRMSLFQTILNLFLFSSAHIRDTYIPLLHCCLASEKFKLLEWPILQLFKNNSQLGVEFAKLWSMKQIRAEALAVFVNTDWLLEDAHGLYPPKIIPIGGFHMDLPRPLFRPYNESIDKASDGVIVVSFGNRVNSSAVPLSVARIFLQTFQKLPGCRIFWRIDSSTIDGISPEQVPSNVNLTQYLPQVDLLGARKTRMLISHGGAQSIMEAVHAGVPVLGIPLISPTYQTLRKLEARGMALILDKSNLTAQNLLTAILAVLRNKKEEFFRYTLAAKQISKMFKDRPISPIDNTIHWIEFVGRYKRGSFFIYEKDILFSITSLTHAMFFSVVIAAFSLAYYYWMFGRKQCTIAFEDSNSKATSTDSEIDSSERKEDISDETIPARRETRSTKVSTNLRKKN

SEQ ID NO: 6651 - protein, 542 aa, Drosophila ananassae
MTQSRSTWLGCSLGSLLAVLVLVLQTMNQEAEGANILGVFPGHGPSHLIVHMSVMKALAEKGHNVTTISTIVPKVTHKNIKQIVVPLITPEEEKLLNSGISGMAKEKGSIWTTMKVMVGSMSMMVEKQVELLEHPRFQELHQNKDNKFDVVFAGFFVNSYLVGLGARFNAPVIICWSGAPMLWVNKFLGNPELSTVPQMQIGVAQGEVMTFQQRIQNFVSTLSFDALDAYLEIKYKHFYNRVWGSDKSMPSYEEAKQNVSLVFCNSHAISEGPIRANVPAVVEVGGIQIKNKPDPLPQDIKEFLDKAKNGAVLFSLGSNLKGEHIKPDVVSTIFKALSSIKQQVIWKWEDLEKTPGKASNILYKKWLPQDDILAHPNIKLFITHAGKGGVSEAQYHGVPMLALPVFGDQPGNADKLALSGYGLSLDLNSMQVEEFKEAIKEITENPKYAQKLKAFSQLYRDRPMSAQESVVYWTEYVIRHHGAPHMQSPLVKMGFMASNNYDIYILAILVLYILVKINKIFWLFIWRKFVAKNTQKTKLKQN

SEQ ID NO: 6652 - protein, 531 aa, Dinoponera quadriceps
MKLITGIPPIIVALWFLIMSDLAHSKRLLIITPAPSYSHQIVFRALCLALHKRGHEIVVLTPNILNDPTLANYTEIDFGFEYEKIDDTDFSQIRWNLTQLGGLKTRLLRLGHDIAEDVLSHPDLVKHYANGTGAQFDAVIAEMIMTPAIYMLAHRFNVPLIGIMSMDLQNCHRFNLGSPVMPSHPSNWEIENLTGLHLPFWRRLINFVKTWWNIYSWFNNFANKQQEIAEKYFGKDIPHIVDLAKNMSLILIDQEPLLAYARPEIPNVVHFSGLHIMKSPPVLSKDLKNFLDGATNGFVYMSLGTNVKSNLLPKGMLQTFTNAFASLPYRVLWKFEDDNLETPPNVFISKWIPQQGVLAHPNIKVFIYQGGLQSTEEAVHYAVPLIGIPFVFDQVYQVIKMVSLGVAKHLDIIELTTSELRDTVLEIASDKRYKDKMLALRALTKDKPYDSLENVIWWIEYVMRHNGAPHLRFNGVDTAWYRQFDFDIIVFLAIASFLSLCALLGVLMQVSRLLYKYHDRISFAKKKMKLM

SEQ ID NO: 6653 - protein, 329 aa, Anopheles sinensis
MTFMERVKNTLYWGFDMLYRQQVFMPNENQRMKRVFPGANLTHVKLLERRSELVLVNSDPAIDFYQLLPPNVVQVGGLHIKRAEEMPAMMKQFIARASRGIIVFSFGTNVQSEMLGTEVNRQLLELFRSMPEYGFIWKHANAEKLLMPPNVLMTSWVPQSALLADGRTKLLVSHGGLLSLQEAAWNGVPVIGVPFFADQFSNVRRIEVAGIGIGIPSTKLNAETLKEAMDKLLSDPSYRARAKELSGRFRTQPETPLDRAIFWIEKVIAGKGLRYLRSPTRDMAPYQVYGLDMVAVVLLIALGYYLIFKRHSKPAQAPDSPDGAKAKTE

SEQ ID NO: 6654 - protein, 530 aa, Monodelphis domestica
MMSNKRISALLLLQLWLFSCGSCGKVLVWPMEYSHWLNMKTILDELIVKGHEVTVLTPSASVLMDPNDSSALNFEVFPVQTTQEDIAFLAEKWITFWIYELPNLSLIEYVDSLQENFFQFSSFVKQNCESAVLNKELVKRLKEARYEVILGDAVCPCAELIAEILEIPLIYSIRLTFGNTYEKYCGGLPSPPSYVPLPLTELTDKMTFIERLKNMFFTLYFDFWFQSFDLKEWNQFYSDVLGRPTTLCETMGKAEMWLIRTYWDFEFPRPYLPNFEFVGGLHCKPAKPLPEEMEKFVQSSGDHGIVVFSLGSMVKNLTDEKSNVIAAALAQIPQKVLWRYKGKKPATLGPNTKTYDWIPQNDLLGHPKTKAFITHGGTNGIYEAIYHGIPMVGVPMFADQPDNIAHMKAKGAAVEVNFNKMTTADLLNALKTVINDPSYKENAMRLSRIHHDQPVKPLDRAVFWIEFVMRHKGAKHLRPAAHDLTWYQYHSLDVIGFLLACVATVVFIVAKSCLFCCRKFGKTGKKQKRA

SEQ ID NO: 6655 - protein, 426 aa, Daphnia pulex
MQATIERYCRAIYEDPVFHQLMNSKERYDLIILDGFSNDCTLLLAEVFDVPFIYLNCFPPSPWLLYAIGSPLALDHFPNPAGTRDKMDLWQRTFNVVTSVFAVYFHRWLVLPEIDRVASKVLRKNNLTSVAAIENRYLSLILSNTHFSINFQLPTSPAVVEVGGLHLGEARNEIPKDLVSFLDGSGDAGFIIVSFGSMLRGDGLPKDFRRLFLSVFARLPQRIVWKWEDQSKLGESEELIPSNVKTISWLPQKELLSHRNARLFISHGGLLSKQETVFHGVPAIFLPVWADQPINAQKAEDDGYAIRLCWDELTEEILYDAIQAILTNPRYAKRMQQVSALMHDQIDKPMDRAIYWIEYVIRHQGAPHLRNASRDLMLPQRALLDVMCIIFIFTFSMIYVIYRLCLFCSTLYRWKDMMIGLHKKDD

SEQ ID NO: 6656 - protein, 531 aa, Ancylostoma ceylanicum
MNGLGQTFLILLLCTQWVVAYKMALFVLDMSNSQLLFNKRVAETLRDAGNDVTLVLISPIEDRDISHVKIKSGVKVHTVPIPVGLSKAKMEENQENYVFKEESGAGASQTMSVKAAKFVQICEETLKNKGFLKWLETEKFDLAFAHMFDVCTVGLVHAARIPSWIWLNSGSIMDWVAYTVGVPIIPSYVPPMMMDVAGEMTFWERTKSLIGHGLMKFFWRRWIADPETELFRRLIRPDFPHLIELSSKCPLVMANTNDLYDMTRPLLAKVVNIGGVGMELADAKPLPKNFEAIMSKGDGAVLFSFGSVTAAHKMPIEWKKALLESFRLLPKYQFLLRYEKDDLNENLPPNVHLFKWLPQSDILRHPKTKAFITHGGYNSVQEAILTGTPLIAIPLFGDQPKNARLIERHGIGMILQKGEISVHTVTKALAKVTGNSRYSANAKRLSRMVDRKPVSPSHLLVKWSEFVAEFQTLENLEPAGNKLNFFQYHSLDVIAFLISITAIVLFILFKVVKFAGCRIFSFCKQKKQKAE

SEQ ID NO: 6657 - protein, 515 aa, Pieris rapae
MGNLILFFVVITAWNFTESARILGVFPTPSISHQVVFRPIMHALAKRGHDVVVITPDPAFPKGKAPPNLTEIDVHNESYIHIDKLLSVHRGRKNDFIEQFTKILEGMPIIFESQLQVPEVQKILKDEADSFDLVFIESCVRAALAISHVIKAPVIQISSLGISAPQYALAGAPIQPFVYPTPIQQRIYNLTLLEKLQELLSFQKIIRHIYATDYLDYNVAKKYFGDIPKFEELFTNTKMLFINEHPLWADNRPVPPNILYIGGVHEVPEKPLPNPLKKYLDSSKNGVIFISFGTNVRANMLSPEKIKVMVDVLSKLQYDVLWKWDNETLINKSENIVISKWLPQSDLLRHPKVKLFITQGGLQSTDEAINAAVPLIGVPMLADQWYNVEKYVRHGIGVQIDFETLTHEIFKNAIDSVINDSSYKENIIRLRSMMRDHPMKPLDQAIYWTEHILKHGGDHLQPPNFGVYGMYEYYELPLVLTISFCLLTLVCLFVWIFVILLKFLRKLTFGKVKTS

SEQ ID NO: 6658 - protein, 536 aa, Chinchilla lanigera
MASIVDITMAKKFVQLLVFNLTLTEIVLSGNVLIWPTDGSHWLNIKVILEELTQRNHSVTVLTSSTTLFISSSPDLLVDFEEIPVSVNKSYLESLIEHMIIMWMDHKPTPLTLWAFYKELGKLLEAFFLINVQLCDRVINNLTLMARLQRGGFDVLVADPVTLCSELLALKLGIPFVYTLRFSPASTVERHCGKIPAPVSYVPAALSELTDRMTFGERVKNIFSYFLQDYIFHSHWREWDSYYSKTLGRPTTLCETMSKAEIWLIRTYWDFEFPRPYLPNFEFVGGLHCKPAKPLPPEMEEFVQSSGEDGIVVFSLGSMVKNLTEEKANLIASALAQIPQKVLWRYKGKEPATLGPNTRLLDWIPQNDLLGHPKTKAFITHGGTNGIYEAIYHGVPMVGVPMFADQPDNIAHMKAKGAAVEVNMNTMTSADLLGALRAVINDPSYKENAMRLSRIHHDQPVKPLDRAVFWIEFVMRHKGAKHLRVAAHDLSWFQYHSLDVIGFLLACLATAMLLVTKCCLFSYHTFMKAGRKMKRE

SEQ ID NO: 6659 - protein, 399 aa, Drosophila obscura
LSCVSAYNYLVVLHTAARSHYHVGSALAKGLAAAGHQVTIVSPFELKKPIKNIKDVSVPGILAAMQGNIANLLTSSKEPIVKQIVNFHHMGLNITDYLLSQPAVVELINSKQTFDAVITEVFLNEAHFGFAEHFNAPLIGLGTFGAISWNTDLVGTPSPPSYVPHALLKFSDHMSLVERVANLAFVTYEYLFLNFYYLPHQEAIYRKHFPNNKQDFYQMRKDTALVLLNQHVSLSFPRPYSPNMIEVGGMHINRKRQPLPKDIEEFIVGAKQGVIYFSMGSNLKSNFLPLEKRQALLDTFSQLKQRVLWKFEDTELPGKPKNVFISDWFPQDDILAHDNVIAFITHGGLLSTTESIYHRKPFVGIPIFGDQFLNMARAEQNGYGVTVNYEELTAPRLLA

SEQ ID NO: 6660 - protein, 530 aa, Neodiprion lecontei
MPLHLIVLVLTLIASDLHCGNGARILGVFPMPSISHQVIFRKLTLELNKRGHELVVLTPDPVNDTTLKNYKEIDLHFLYDSLDLGSHIDIRGKIDFVDIFKYYEALSCFHTNEVFNHPEFRKLYAPNSGENFDLILLETFVYPAFLSLAERFKAPIIGIASAGLQLSVQYDIGNPILPSHPSNWNKDMRDFGAWVPWERLDNFIKAWRHIYYYRTEFLPKHQAIAEKHMGIEIPHLGDIHKNISLIFVNQQGPISFARPNLPNIIEIGGFHVSESIKPLSMDLQKILDNATQGFIYMSLGSNVKSNMLKEETRNEFIAAFSELPYKVIWKFEDEVLPKKPDNVIAMKWVPQQAILAHPNLKVFIYQGGLQSTEEAVSHAVPLIGLPVFGDQDMNVDKMVSLGVAKKLEITAVKRDDLLEAIRTIALDKGYKQRMLTLRSLLNEKLRDSLENAIWWTEHVIRHRGAPHLHSSTSDEPWYQRQDMDIVAFISAIFVITLISSLVILYKSLMYCLNALTRNFTRSVGKDKKGN

SEQ ID NO: 6661 - protein, 694 aa, Blattella germanica
MMVLQEFLDGATEGAIYFSLGTNVRSDAMTREKIQIFNDVFSQLSEFRVLWKYEDDNLPEMPSNVMICKWFPQQDILGGLQSTEETIRTQVPVLGFPFFGDQDLNMQMKYSEISQDHPQTSKERAVWWTEYVIRHKGARHLRSGIIDISWFEYFMLDVLTFILISSILIFWAINRVVQLLVNGGHNYYIYDTVHSALILGVFPIPSISHQVVYHGLLRELNSRGHEIVIITPNPLNNSSLKNYREIDVSNLYIGWRERFNFLKSREMGATRKDFAGEMMDTGKDLCTGIFENSEFKTFMETNKGLVFDLVIMEWLVTPCTCGLAYHFAAPIVGISSLGILYPGYESIGNPVHPIYYSDSLYPALKNPSIWEKFHRMFYYLWFKWQWTAVLQEQDKIARRFINSSLPYLGDLERNVSLVFTNVATSNHFVVPKVPTLIELGQMHFQEIKPLPKDLQEYLDAATKGAIYFSLGTNVRTECMSQEHLQIFNDVFSQLSHIRVLWKYDGDYLPGKPSNVKISKWFPQQDIFAHPNLKAIVFQGGLQSAEEAIRAQVPVLGFPILADQDLNMQMIVDNGIGEMLYFEELTREKLLSTLKKIIYDPKYKLNMQKFSKITQDHPQTSKERAVWWTEYVIRHKGASHLRAGTMDVSWFEYFMLDAVAVIFISIILILWGIYRVITIIMRILNSSKKMSVKGD

SEQ ID NO: 6662 - protein, 517 aa, Strigamia maritima
MKLPRTLSLMLVLFVQLTEAYKILCLLPLASQSHKNLFDPLINELAGRGHEVTVVAPYKLAQPIANINEIQIENIITSESTQLISNWVKYSNYHPLFTASYYKPFTIIGCKAYFENAQVKQLLKSGKQFDVVIVNALLNDCALATAPLLGKYIIMHSPTCLIPWNPVFVPQPPSYVPNIFLPYTSRMNFFQRVNNVVTNIGFNFMYNYHLLPAVQDEITKHVAENPLVHQAHQAVSLTLTNSDPVLISARPSMPNIVNVGGLHCTSANPLPSELEDFVKKSGNDGFIYFSLGSNILIKDLENEIKDHLLNAFSKLKQKVIFKCEEELNNLPPNVKLVKWAPQQDLLGHPKIKAFITHGGLLSLQESVYHEVPVVAIPLMGDQPSNVARVVELEIGLKLDFHSISTDSLLEAVDKILSNSYKDNVKKYSRVFRDHYQHPVQRAAFWVEYVVRHDGAKHLRSPGEDLNLFQYLLLDILALLLLCFVSVLWVMLSVGKCVLARILPCGKKTKKLTVKKKQ

SEQ ID NO: 6663 - protein, 526 aa, Agrotis ipsilon
MNGRVVPILLLALFLLGRAAPARILAVFPTPAYSHHSVFKVYIRALVERGHEVVVIKSTNRISYTDELPLYSNEDDDRDLRRNITEIDASLSQDYFKRLMKQAGVFRKRGLVADSGTVTAHNYVSLVRMISDQFDLPDVKSFLDKRQHLKFDVLITEAFIDYALVFSHLFGDIPVIQISSGYAVAENFETMGAVSRHPVYYPNLWRDKFSGLNVWDMINEIYVELRLQNEFSKLADEQNRLLKRQFGADTPTVQELRNRVQLLFVNTHAVFDNNRPVPPSVQYLGAMHLVDKRPKPLFGMVRELLDNATEGAVYVSFGSGISTDEMESEFIEMLLRTFRALPYTILWKYDGFLTNLPPNVFIQSWFDQYNLLHHKNVRAFVTQGGVQSTDEAIDALVPLVGMPMMGDQAFNTNKYIELGIGRVVDTVHVDAFQLTEAITDVAQNPTFRKRLNELRHFIRHQAVSPIHKAIWYTEHVINTSNGGGTMLKTKAANVNYSDYIMSYIFVPLITFTVMNHLRQLLRINVM

SEQ ID NO: 6664 - protein, 545 aa, Symbiodinium microadriaticum
MAQPHRHYGLRKTFGNAPCFLDSSHFFAVRNMETQTQSSRSFAFIFPLAAGHINPSLAIARFLVQQGHGVHYLCREQMREAIEDTGAVFHSDIETQPELYAGRAPSMWGALGSLQEEHGMKGESLSQARLKLRELAVELMLPGTLRWLEKIKAQAVLCDPLINLEAPLAARVAGIPCVSLLTVAGPGGQEVAWGGVLQALGTSAEKVLQERREFQGLQDCIERLKKTYGIHLAVEDGVKPLGVFRSCLMSTLTLVTTAEFLADPMSPEVSKAYTGHDFVYLGPMLDKPGAKRAGGHKLDAAMHSGADTDATALNLARDARAEGRPLVLVSLGTIITGDHADYGWGARFVVDGQQVGISGRELCQAAWQAAFDVFGQWDPSSTQSPLILAALGPQADALEGLKVPPNAFCSPTLPQVDLLRLGVDVFLTHGGQNSFTEALSMGVPLVVCPGFADQPVNAAKAESLQIGLKVDRPMRPLEHAQADRAAYRKTAADALTKVAQDPSFKEHAMNCARALSACGGVSLASRILLDLATSKLPLQLAQAGA

SEQ ID NO: 6665 - protein, 531 aa, Drosophila simulans
MVLPAEKILLLAIAIGALMGSSQGANILGLFTSISPSHLIIQMSAVKVLAENGHNVTVVTVLKPVVNHKNITVIQVPLSREEAQIMSDKIGVMSKNDNSNMALSLLRMSEQMDFMIRKTAETLMNDRVRDLYLNRGNKFDLVLSGYFMNDYQLGFAKKVNAPVIVVATMPPNQLLNPLIGNPLEVAYVPSISDSVEKGKGMSFRQRLAGYSSSLFFEIFNFVTQRRSKKLYKKVYGNDPNMPEYSEMLKNTSLVFFSSHAASEGPIRPNVPSAIEIGGIQIKDKPDPLPQTIAEFLGNATNGAILLSLGSNVQGKHLNPETVVKMFNVLSKLKERVIWKWEDQENTPGKSANILYSKWLPQDDILAHPNIKLFINHAGKGGITESQYHGKPMLSLPVFGDQPRNANAMVKSGFGLTLSLLTLEEQPFQEAILEILSNPQYAERVKSFSTLYRDRPMTARQSFLYWTEYVIRHHGAAHLQSPLLHMNFIAANNIDIYFLIFVILISVLVLIKFLVKFIYRRFISKPKKVKTN

SEQ ID NO: 6666 - protein, 425 aa, Drosophila serrata
MEAQFVSDYFYNCSKFVLEDPGVQELIRNTSAQYSMVVLEASHTDALYGFSQIFNAPLVGIAAYGSAWNIDFLAGNSAPSVYEPMSALGYSPGLSLLEKWHNLIFITEERLVERFIYLPRQIDLYKQHFPTISTSLHDLRRRFSLILINQHFSMGRVRSNVPNLVEVAGMHLHSPPEPLDRELQQFLDEAEHGVVYFSMGLQMMDRWLPSEMLTTMLTAFKKLKQRVVWKTNDPRMGNKSTNVYAKGYLPQRAILKHPNVKVFITHAGLLSTIEATHYAVPLLCIPIFFDQFQNSDRMEKMGVARSLDVGRFTPEMMVEAIEDMSLNPIYKQKALELSDRFHDQPMTPIETAIWWTEYVLRHKGADYMRIAEQEMSLMQYYNVDVVSVLFGRIGLSAMILIFLGWKLVSLATRNLEYRFNVPMVR

SEQ ID NO: 6667 - protein, 519 aa, Drosophila virilis
MHSICAWKLLLLFSLFSVNSSTHALKILGLFPHPALSHFQFFQPLMRRLAEAGHNVDVVSPFRDLNPPTGYKDYALPSANLNDKIGFDMFEDVAMPYLMPFTEFFILHGYGKAACNSTLNSAALAQILRHPVGYYDVIVLEQFNTDCMMGVAHQLQSPVVAMSSCALMPWHYERMGAPIIPSYMPALFLGESQHMQFAGRLANWLTTHALNWLYGWYSVPAADALLRQRFGAGMPSTGELVKNTSLMLVNQHYSLSGAKPLPPNVIEVGGLHVSQAKPLHDALQQLLDKAKHGVIIISWGSQLKANTLSGAKREGLLRALARLPQQIIWKWENVTLPEQPPNVHIMKWLPQRDLLAHPNVRLFFTHGGLMGLTEAVASGVPILGMPVYGDQHLNVAALVERGMAVRLDFERLREQTAFEALSQALDAKYKRQAQKIAAAYNERPQLALETALWWVQHVAETGGAPLLQSGAVRLNRFVYYSLDVYVALACALLLFLAIATEIWRRCCKRKQPVQKPKRS

SEQ ID NO: 6668 - protein, 508 aa, Tribolium castaneum
MCLVLVLVLLSPLVAHSANILGVFMFPSISHQIVYQPIWRELSLRGHNVTVVTPDPLNDPTLTNLTEISVRFTYDFLKENRLQDVMSKDANPFQTFKTIFKLMDKILEAELESPPMAQLLKSEQKFDLILFECFHPALYGLSGRFKAPIIGVSSLGLLTAGYDAVGNPTHPVLYPDVMLNFHSKELGIWEKIQTVFFNLWSRYYYHQVITPRAHELATKYFGEVPYVGDLERNVSLFFLNVNPFMYAPRPNVPAIVEMGQMHIKPPKPLPEDLKKILDSAPQGAVYFSLGSNVKSVNIPEKLRKTIMGALAQLPYLVLWKFEADHLPGKPPNVVIRKWLPQQDVLAHPNIRAFVTQGGLQSTEEAISRKVPLVGMPFMGDQPMNVQKIVDLGIGVGVDPATLTEDQLKKSIIEVAENKKYKRKMEEVNEILFDKPMSGLEKAVYWSEYVIRHGGTRHLRSPTADISWFEYLLVDVVGVLVAILAAILYASYKLAQLSMEFRRQKIKVN

SEQ ID NO: 6669 - protein, 591 aa, Bicyclus anynana
MILDKNIEFYREEAAGKMFKKMLWLVSILFTLSEINAYKYLVVNPLPVKSHSILGDALVDHLVDAGHEVTYIAVFAPQKISPRVTHIDISDNLKFSPEKELNLKSIMDGKVMTNSLFTYVPVMLEIGKATLGNPNVQKLMADKNQRFDAVIAEWNYHDVYVGFAALFNCPLIWFSSVEPHWMVLQLIDEIPNPAYSTDMLTTDYTPPLTFNQRVVELYTQFFTRFIQIFYLSGLEHDVYNEYFAPFIRDRYNTVPPFEELRYNASLMLSNSHISMNIPIRLPANVITIGGYHIKPNIKPLPENLQKVMDKAKDGVIYFSMGTNLRSNHFPDQVKQDLLKMFGKLKQTVIWKFEEDLPNRPNNVHIVQWAPQQSILAHPNCLLFITHGGLLSTTETVHFGVPIIGIPVFADQYVNVGRAVKKGFAQRVDLSYSLAVDLEKAIRNVLFDSSYTTRIKELSAIYHDRTVPPAKELVHWAEQVVKTKGARHLRSPAFMMPWYQKMYLDLILVSLVVLLKFLIRFNYSTIATLDFYDLPKMLSYPTNIRFVHTATDQASQNQYKQDSCVVYYRRRLAARRGPSKFRLLVLVLGNLI

SEQ ID NO: 6670 - protein, 558 aa, Camponotus floridanus
MRLITATSSIIMILWILTMSNLTCSKRLLIITPAPSYSHQIVFRALCLALNKRGHEIVTLTPNILNDSSLINYKEIDFGFVYEKIDDTDLSQTRWNLTQLGGLKTRLLKLGHDIAEDVLSHPDLLKYYANETNVQFDAVIAEMIMTPAIYMLAHRFHVPLIGIMSMDLQNCHRFNFGSPVLPSHPSNWELENDTGLNIPFWKRLKNFIKTWWLIQSWFNTFAFKQQQIAEKYFGKDIPNIIDVAKNMSLILINQEPVLAYARPEIPNIVYFSGLHIKKTPPLLPKNLKDFLDGAVNGFIYMSLGTNVKSKLLPKGMLEVFTNAFANLPYKVLWKFESDDFHVPSNVFISKWIPQQGVLAHPNIKLFIYQGGLQSTEEAVHYAVPLIGIPFVFDQVYQVMKMVSLGVAKHLDIVQLTTPELRDTILEIAGDKRYKNKMLELRALTKDKPYESLENAIWWIEFVMRHNGAPHLRFNGVDTAWYQQFDLDIILSHGMGETNFPIQFPDGSHKDLFMKRSSRVKAGSSRDSRKTTEEDESSSSDSDNAIYARITAVKRYQNN

SEQ ID NO: 6671 - protein, 530 aa, Galeopterus variegatus
MVSEKWASAFLLLQLCCAGCGLCGKALVWPSDMSHWLNIKNILDELADRGHEVTVMSPSYTILIDHRKPSALNFEVFHVPFDRKNTEDKSDELLNLILNVLPSLPFWQSAIKLNDFFIGLTGNFKLLCESVVYNKTLMKKLLEANYDIMIIDPVTPCGELVAELLAVPFVITLRVSVGGNMERCCGKLPAPPSYVPVPMVGLTDRMTFLERVKNTMLLVFFNFWMQDYDFHFWKQFYSEALGRPTTICEILGKAEIWLIRTYWDFEFPRPYLPNFEFVGGLHCKPAKPLPEEMEEFVQSSGEDGVVVFSLGSLVQNLTEEKSDLIASALAQIPQKVLWRYKGKKPATLGANTRLYDWIPQNDLLGHPKTKAFITHGGMNGVYEAIYHGVPMVGIPMFGDQPDNIAHMKAKGAAVEISFNTMTHADLLRALRTVINDPSYKENAMRLSKIHHDQPVKPLDRAIFWIEYVMRHKGAKHLRPAIHDLTWVQYHSLDVIGFLMACVAISIFLVTKCCLFTCQKLGKTRIKTKRE

SEQ ID NO: 6672 - protein, 444 aa, Bradyrhizobium elkanii
MKALLVSSPMMGHLHPVLGVGRILIADGWKVMGLTSSYLRDRVEKIGAQFRSFVPAADIDTRDAAKLFPEIMTAAPGAQQLRLILEQGFANFMLAQYESIKIVMQEFPPDIIIGDHLMLGVLPMLLGPRAQRPSVALLGTTYLLSRRDDGAPNDAGIRPARNDQQLREYASLFQTYEQSVFGPAGRCVNEYLAQIGSRPLRLNLYDAMVELPDIYLQLTVPRFELPRRRLPSSVHFVGPLPITPNQAPVPSWAYELDGSRKVVLVTQGTLTNNDFSELTLPTLEALANERDVLVMVTTGGRPIDALGGRLPQNVRVAQYLPFEWALSKADAFVTNGGYGSVNQALSYGVPIVAAGTAADRGDVGVRVAWSGVGVNLATNAPTAEQLRPAVRSVLDDPRYRQRAASLAEDIREIDTPSEIRWLLRQQISLHSQDGLRPKAGAAKA

SEQ ID NO: 6673 - protein, 514 aa, Temnothorax curvispinosus
MWKVIYKMFIVLSLWFLLANDITNAERILVITPAPFYSHHVVFRALCLALNKRGHELTVITPQPIKDSTLKNYTEIGLDLHEINKYYYLVSQLPMIEFLKFFWKLSHQVSIKIFEDLKFKELYRHDSNEKFDAVILESLGCMSLSTMAYRFNAPLIGIISVNIHNYHRYIFGSSIYPSHPSNWEFNILPEENPSIWQRLWNFIDTWCLIHYWINNYITVEQEIVKKYLGNDIPYIVDIMKNMSVMLVNENPILAYPRPEQPNAIFFNGIHIQKTPPSLPKDLGQFLDDAMEGFIYVSFGTITTCHDLPKETLKNIVEVFSKLPYKIVWKFDCELPEKLDNAFISEWFLQQGVLAHPNIKLFIYQGGAQSTEEAVHYAVPILGIPTMSEQENRVRRLVSLGAAIYIKFNELTKERLDSAIYQILNDKSYKEKMMYLSSLFKNQPYNSTENLIWWVEFVMRHKGVNHLRFSDSDKPWYQRYDIDIIALLATALFIIECVIALTIIQIIRFTLNNIV

SEQ ID NO: 6674 - protein, 313 aa, Cryptotermes secundus
MCVSLVSEDLEQFVSGADMGFIYVSMGSSVLTAKMPDMLRHMFIRAFEQLPYRVLWKWEAGEGSIADLPDNVRLGRWLPQQDILGHHKIRAFVTHGGLLSMFETVYHAVPVVTMPVFCDHDANSAKAVIDGYALKLELQELTADKLVWAINQVIHDSRYRDEVRKRSKLLRDQPEHPLNRAIYWTEYVLRHKGAYHLQSPAKEYCFVQYYLIDVALFCLIAGYICAKLFIKLNSVMIRLIVSHITNQQSSNEDGVTKMKSEANGFSSGSAEITLRRNGNIVSNSNSVSVERTISNGESHKIGACLTNGIKQRR

SEQ ID NO: 6675 - protein, 523 aa, Bactrocera oleae
MKCLSQLKIVFLLCTQLCYFESLHGAKILAIFPYSGRSQYICVENYLKALAARGHEVTTISAFPQKKPVQNFRDVPIIYEKTLFEDFAVDSIMPTISKWEELNWGIEFLTMPTRKVLEHPEVQKWLENGVKFDLLIVEVLQQDALYALSHHFNASLIGVSSFGTDMRIDELVGNTSPLSYVPSILSTYSDHMSFFQRLDSLYTHVVEWVHNHFVIIPLQYEIYKEYVSNPTADFMAVRNNFSLLLLNQHFSLSIPRPYVSNAIEVAGWHIDHKSSVLPADMEAFINANPNGAIFFSLGSNLHSKNLSKEKLAIILNVFASLPYNILWKFEVPELQGKPKNVYINKWFPQADILSHPNVKVFITHGGLLSTIEAIHYAKPIVGIPIFYDQHINVARAEAKGFGLGVDLKNLNTNVLKDTILEVLNNPKYSQRAHELSHRYHDQPLKPLEKAIYWTEYVLRHKGASHMRVAAQDLNFIEYHNLDAIAVLFGLPLLALVFMLWTSCRLLNLITEKLIGQKRKVKHD

SEQ ID NO: 6676 - protein, 226 aa, Equus asinus
MELAFYTAEHTWPAGPLARTLQQALRMAPGKVLWRYTGKKPDTLGPNTRLYDWIPQNDLLGHPKTRAFITHCGTNGIYEAIYHGVPMVGIPVFSDQFGNIARVKAKGAAVEVDLHAMTTSDLLNALKAVVNNPSYKENAMKLSRIHHDQPMKPLDRAVFWIEFVMRHKGAKHLRPASYDLTWYQYHSLDVIGFLLACVATIMFLVTKCCLFCYWKFGKTGKKKKRE

SEQ ID NO: 6677 - protein, 539 aa, Daphnia pulex
MKPIENFLWLMIVLCHFFTACYGGRILVLLPLGSKSHKLAVMPVLEALAQRGHNLTIVSGFESPEKMTNIHEIQITSIDVILEKVVNWYDTERGDDETQLKTMMTALPYTSTFIYDEMMSNPEFQSIMLKRSVDLVIVDGIVSELTFPIIEHLRVPFVFHCSSFGPWTTAAMEAMGTDSDYASIPFPQTGLDDKMTFAQRLTNIRKAQSFHSLRQAHIFDTIDAYVKKDFPKARPSGDFMKEASLVLINSDITTDWPRSLPPTVIPIGAVHARPARELTLPLQTFADEAEAGFIVLTFGSIIKMTAMPHDSLQTFLKVFSRIPQRVVLKWEGEIPEDVPSNVMMVNWLPQQDLLGHPNAKIFITHGGMLGTQEAIYHAVPLIGLPFGNDQHTNLAMATKQGFGLKIDWEHLCEKLLYDSIVKIINEPTFKANASRLSGLMRDRLVPGTELAVYWIEHVLRHGDTKHLQVSSKYVPLYQKYLVDVVLFLAVILVVMLTSSYYTVRFLISKCRQRNNPVKSKTKNKSCVFSCVQYTKNLFA

SEQ ID NO: 6678 - protein, 529 aa, Ceratotherium simum
MSMKWISVLLLLQLSCYFSPGNGGKVLVWPTEYSHWINMKIILDELVQRGHEVIVLTSSASILVDPNKASAIKFEIYPTSLTKDDFEVLFRKLIDKWSYLPKDTFWTHFSLLQEIIWEYSDCIEKLCKEVVFNKKLLTKLQESRFDLIFADAVGPCSELLAELLKIPLMYSIRFSPGHRIEKYSGGLPFPPSYVPLVMSELSDQMTFMERVKNMIYVLYFDFWFQTFNEKRWDQFYTEVLGRPTTLSELMRKAEMWLIRTYWDFEFPRPFLPHFEYIGGYHCKPAKPLPKEMEEFAQSSGENGIVVFTLGSMISNMTEERAHVIASALAQIPQKVIWRFDGRKPDTLGPNTRLYKWIPQNDLLGHSKTKAFITHGGANGIYEAIYHGIPMVGVPLFADQPDNIARMKTRGAAVRLDFNTMSSTDLLNALKTVINDPSYKENAVKLSRIQHDQPMKPLDRAVFRIEYVMRHKGAKHLRPASHDLAWFQYHSLDVLGFLLACVATAIGIITKCCLFCCQKIAKMRRKEKRD

SEQ ID NO: 6679 - protein, 513 aa, Aedes albopictus
MLHSTGKYLIALVLVSLPSTIHCDNILFLQTTPSRSHHIWNKQIFNRLYDNGHNLTILTFEQEQSIPGKSFFYVPKLYARIMAEFAAEDSAGSAMGPVGNIINMYSFYEKASRILAQEPAIQHLLNYPELFKFDLIIHDFTMGQFLLGFVQRFGNPPLVSVSAFNLPSYTMHLADIPIRFTTLPNYACEYEQHMSFMERIANTFYWLLDSYHRQFRFMASEDGRARELFGSNTTSVKNIEKRSSVVLVNSDFSMDYHQALPPNVIPVGGLHITRPEKIPQIIADFMDIPSKGVILLSFGTNVQSEGLGKNVNEAILKTFTNLPDYNFIWKHGDPESLEPVPPNVLVQKWVPQGAILSDPRTKLLIGHGGLLGLQEATWYGIPTIGIPFFADQLQNVDKLVRGGGGLRLFLDELNENSLKRAIDSVLSDKRYHQNMEARSRLFRNQPQPPLERAVFWIEKVLENKGLPHLMSPGQDIPFYQLYGIDLICATLLIIAGVHILCKMALSFSFNKQS

SEQ ID NO: 6680 - protein, 514 aa, Priapulus caudatus
MNIVAMATAACVLATLLAVLRTTDAGNILMVPVGAGRPSSHRFVMEKAATVLAENGHSITWLLGNEHPPVAFGASVTYASRPATHVDADALIAEGNVGVGYILNMLNQFVDACAMLLNDRRTFDELRRRKFDLMFLDAADLCGFAMADGIGVPYAAIVSTGTAGVLFSEAPAMLSFSPSLVLPYTNRMTFAQRFKNTLVHVFFKVVGHVTFVRRLEGVARRAGFLADSSIEAVARRTNMHFVVGDFSFDYPIPVMPNTKHIGVITAGKPLPLAAPLQEFVQRSAARGVVVISFGSAVNSAGGDVVRKIAAAIADLPYFFVWRLRAADAPPLGDNVKIVDWIPQNDLLGHAKVVLFVTHAGPNSVWESVYHGVPMLALPIVADEYGNAARVVHHGVGKQLDFYGFTADEFRSGVIELITNRTYAERAAFKSRQLRANTGASSEGFLWWTNHLLETKGATYLRPASVELNFFQFYLLDVFTFLAVIGAIFVLCVWKLGASLYRRRIENRNAKTKLQ

SEQ ID NO: 6681 - protein, 519 aa, Bicyclus anynana
MHYMLQCILIALATLFGTINTYKLLVISPLPGKSHAILGEAMTEHLSNAGHEVTYVTVYLPEKPIPRVTVVDLSDNMKLFNSGAMSLQAVMDKTHTGNSFFVFVPMLMNMSRDTIAHPNVQKLINDKNQQFDAVIAEWMFNEVYAGFAGVFNCPFIWFSTVEPHWMVLRLVDEVTNPAYSVDILSDSVPPLTFTQRVKELGLLTAGRLIQALWVSRLENNLYDEYFVPVIEKRHNTVPSFETLRFNASLLLSNSHVSMGVPARLPANVITIGGFHIKPNVKPLPEDLQKLMDNAKHGVIYFSMGSNLRSKHFPEIVRQDLLKMFSKFKQTVIWKFEEDLPNTPSNVHIVQWAPQQSILAHKNCILFITHGGLLSTTETMHFGVPTIGIPVFADQFVNVARAVKKGYAQKVDLSYSMAADIELAINKLLDNPSYTTRVKELSQIYHDRPVPPARELVHWVEHVVKTRGAPHLRSPASMVAWYQKLYLDLVLVVVAVVLVLKRVFIYLKSILIAKRKEKTN

SEQ ID NO: 6682 - protein, 313 aa, Eumeta japonica
MAIRSYVGLLPTKTPWPSYRSFVMGSRYLNLTAKEKVYGNRFLASRAREWMMSFPKSTALGHNLRGRPSAALPKQRMSPVCFERCLRGVRSNFSTRPMAAFWRFGIGVLQCSYASRVSVYGGCSLCCVPCPFAVPIPDELPQRFGKQRQPLPFHDQSSAKLSDLQKLMDNAKDGVIYFSMGSNLKSKFMPEKMKREFLETFSKFKQTVLWKFEDVLPDLPSNVHIIKWGPQQSILAHPNCILFVTHGGMLSTTEAVHFGVPIIGIPVIGDQHNNVKKAVRKGFAMKVDLSYDTPKELKSAIEEVLSNPRSVDF

SEQ ID NO: 6683 - protein, 504 aa, Myzus persicae
MLPCVVFCLVLCITTNVTRAANILVFMPLPIKSHVRGFQPLFEELSNRGHNVTVVSSFPLDRPVANYTDIGPFVDKTRGRNVMDLVSMNFVTSVQLKWRISIQLSEMVMSHRKMKQFVQSSSNSFDLIMVETFGQEYAVAMGHKFNAPVINLAPAMIWASISKWLHVPSTFSYIPDACTQSTSDMGFIERLKNSITGFMQLYVENYLYLPKTKEVMDTYLKYRGWESRPPLEHMLNNISLTLVNSHNAIGISRAYLPGIIEVGGMHIKDPKPLPKNLQTFLDTANEGVIFFSFGTLVNLNDLPKAKLKVFISVLGRLKQKVIIKWIPDDNNVKLSQNIMTGSWFPQRDILAHPNVILFITHGGLHSLEETVCNAKPIVGIPFFAEQNFNMKIVEEKGYGKLVNFFEITEESFGNAIEEVLSNVTFKEKAIIQSLVYKDQPMKPLDRAVYWVEYVIRYGGAGHLKSDSIGLNDLQYFLFDISLIVLLSFGLIAWLCYFLFVKIMS

SEQ ID NO: 6684 - protein, 524 aa, Ceratitis capitata
MKKYTPLTSLLLLLVINASFFESLNGAKILAIFPFSGRSQYICAENYLKALAARGHNVTVISAFPQAKPLQNFNDVPIVFESHDWSDIILDGNFPSISTWEALDLGIDFLTSSTRKVLEHPEVQKWLTNGDTFDLLIVEALEQDALYALAHHFKALLVGVSSFGTDIRIDELVDNVSPLSYIPAVTSHFTDHMNFYQRLESLYISVLDMLHYHYKILPLQYDLYREYVKNPTTDFMEIRKNFSLLLLNQHFSIGLPRPYVPNAIEVAGFHISHKPKSLPTDMEEFINASANGAIYFSLGSNINSKNLSKEKISILMKVFAALPYNILWKFEAPELPGKPKNVYISKWFPQADILAHPKVKLFITHGGLLSTIETIHYGKPIVGMAIMYDQFINMVRAEAKGFALSINFGEFTAAGLKSAILEVLQNPKYAQRAAEISRLYHDQPMKPLERAIYWTEYTLRHHGAPHMRVAARDLNFFEYHSIDTITVLFGVPLCLLVFTLWLMYKLMKIIARSWNVQNKKEKVN

SEQ ID NO: 6685 - protein, 484 aa, Loxodonta africana
MLNKIILLLSLQISLLGTTHGGNVLIWPMEGSHWLNIKIIIDELIKREHNVTVLVASGALFITPTSETSLTFERYKVPFDSERIQKVITSFVLTWLEHRPSPSTIWTFYQEMAKIIKDFHMVSRAICDSVLQNQKLMEKLNKSKFEVLVSDPVFPCGDIVALKLGIPFIFSLRFSPASTVEKHCGKVPYPPSYVPAILSELTDQMSFTDRIRNFISYHLQDYIFDTLWKSWDSYYSKALGKPTTLCETMGKAEIWLIRTYWDFEFPRPYLPNFEFVGGLHCKPAKPLPKVLWRYKGVKPATLGANTQLYDWIPQNDLLGHPKTKAFITHGGTNGIYEAIYHGVPMVGLPMFADQPDNIIHMKAKGAAVDMNMNTMTSADFLNALRTVINDPSYKENVMRLSKIHHDQPLKPLDRAVFWIEFVMRHKGAKHLRPAAHDLTWYQYHSLDVIGFLLACVATVIFLVTKCCLFSFQKFRKAGKKKKRE

SEQ ID NO: 6686 - protein, 220 aa, Amyelois transitella
MEAYIMMPIMISSFVDVFAELPYNVLWKWHTEDVPRLPKNVKISKWLPQRDLLMHPNVKLFITQGGLQSTDEAIEAAVPLIGIPMLGDQWYNVEKYVHHGIGVRLDIETIDADKFKDAIDTVINDKSYHDNIRKLKSLMYDQPQTPLEKAVWWTEYVLRHGGRHLRSPAANLPWTVYYEIELLFYLLLFVIGARFLLVYLLFKLYKFVRGWLSKRKLKTN

SEQ ID NO: 6687 - protein, 788 aa, Plutella xylostella
MTKENKINWKCDVCVSKKVPVCTTSSTPQTSTASSSKTNILTKTPADYHVTTRKKQNESNTQNETSFVTESNLRAILKQEITAAIKSSIKELVMAELQNINQQIGSFHESMTFFNQHFEDLKANLEEKSTHIKVLQEENLNLKSTVNDLTSRLCLVEQQMRESNIEINGIPEKNSENLSTIVNKIAKSVDCQLKDDDVLHVTRVAKLNKENPRPRTVVAKLRSTRHRDALIAAVSSYNRKNPGNKLSTHHLGYDGASSPVYVAEHLTPTYKALHAEVRKKAKELSYKFIWLIMLVFVIFPGKSLSILGESFVRHLLNAGHEVTYVTPSPMKNKPKNNFHEVDVSEGVDKLFVEICNITFLLENTHFESDEEEIMHLGLEVAEMTLTNPNMLKLLNDKTQKFDVVVGDYLASELVAGIAYYYDCPMIWSYSMGVDSAILKLVHEPTNPSYIPDYISLNIPPMSFTQRVGELWTLIRNTWVKRHSVMPRELAFYKKFYKPLLAMKGKPLPAYEDVMYNASLVLVNSHQASGGLAAIPQSVKLIGGHHINGPVAPLTDDLKEIMDSSTNGVIYFSMGSIWKSASMPITLRDNLVRMFGSLKQTVLWKFEEDIPNLPKNIHTLKWAPQHSILAHENCMLFITHGGLGSSTEALHFGVPILGVPISFDQFLNINRAVSKGYALSVKLSYNLHNDLKVAIDTIATDPSFKSNAKALSEIYHDRPVKPAVEIPHWVRHVVRTRGAPHLRSPALMVPWYQKTYLDLVALFLLVVLSLFLLAKKLMFTVKSAKVKSN

SEQ ID NO: 6688 - protein, 511 aa, Tribolium castaneum
MKPVLFVFGTNLLFSIAQCARILGVFPAPGYSQFILAEVLMKEIANRGHEVTVISPYKPHNAPPNYKTIETSDVIENSDGLDLYELDNESLFKNILTTYEFGNIITEFTLKNKEVQKLLHSDVSFDLVIVEQFFNDAMKGFARHFNAPLVLFSSMGLTEWNKEYMGIPALPSINAISYTSYTNRMNFFERIRNLIGTIFDYCYRKWVFYPIQREYLSRYFPNSIDFDEIINNASLMLLNSHFTTSENVLLPFNMIEIGGFHVSQNPLSKDIQKILDEATDGAILFSLGSNLQSSDLTPKILNTILSVFGKLKQKVLWKFEKDLSEKPSNVFISKWLKQADILAHPNIQLFITHGGMLSTTEAIFNGVPILGIPVFADQKMNTARAKRAGFANVMSLKDLTEGKFLSLINETINEPKYSENARKMSNLMRDRVVRPLDLAMYWVEYAIRNEGVRFETPVLKMYWFQVYMLDILCFVIFNLLVIYLSVKYLCSFMLPKKCKTNSKVNDRKKRQ

SEQ ID NO: 6689 - protein, 524 aa, Neodiprion lecontei
MKYLCKLLLIVFCLLSSTRHVNSARILAVFPLDTTSHFIMFDVVVKSLADAGHQVDVYSHFAQKRAYPNYTHTSIGDISQTTAKLGLTYDVIDSYRGTKDALIELAGNMGCQLLGHPEMQKLIKNPPTNPPYDLVITESFYGSCWYAFGRHLKVPLVALSSRSLLTFYNAPIGNPQNTAFVSEITDGSILYMNFWQRFKNTFSALWRNHEFNCHTEVQSDIVKKYFGPHMPGVRELEKDVALILVNSHHVLTGIRPLTPAVVDIGGIHVSDDDTALPTDLGKWLDDSRHGFIYFTFGSMIRIESFPKAMLAELYAGFAKIAPVRVLMRIFAPEDLPPNMPDNVLTMRWVPQIKVLKHKNIRAFVTQGGVLSLQEALTFAVPIIGIPIIADQPVNVKNCVERKIAVMLDYKNLTAEKFVEAVNATIYDPRYKQNVVAASEKFLDRPLNARDTAVYWIEYILRHGGDSLRSPALKLTWWQVALLDVYGCIFIAVLTVLYLARLILSTLLRQIIYVAKKIPTSKKTN

SEQ ID NO: 6690 - protein, 1037 aa, Pieris rapae
MAWLIWFTGLAVLCAVQPYKILVPVLLPGKSHGILGEGLVRHLLNGGHEVTYITPYPPKPQKNLTVIDVSENIKGITGVCNVKKMMDGETELQSLYILMDIMVEIDRLTYKSDVMQKFLSDHTQKFDLIIAEWLFIDLNAGISAVYDCPLIWLSSLEPHWMALRLIDEMPNPAYVSHLSSNNAPPLSFWQRLEELGNQIYGSWLHYFYMAPRENKLYEQYIVPHVKSRNKPVPSLNELRYNASLMFGNSHVSLGEATRLPQNYIPVGGYHIETDVKPLPEDLKKLMDNAEHGVIYFSLGSHLRSEDLPEAVTRELLQMFGELKQTVIWKFETDLPNKPKNVHVVHWAPQQSILAHPKTLFFISHGGLLSTTESVHFGVPMITIPVMVDQFANAERVVRKGIAIKVNLSYTMVKDIRNAIKTMLADPTYTKTAKSLSFIYHHRPISPGEEIRHWVDHVVKTNGAMHLRSPALHVPWYQKLYIDLLAVILVPLVVLIYLAKKYTAVDKNNSKTNKKYNLYFQTMELWTVCLLAAILTITNIEAYKILVVITLPGKSHGILGDGLTRHLLKAGHEVTFITPYPPKPQNNLTVIDVSDNSKVLTGGVLNIHNMMKKDVDLQSAYMLMDISIDIGKATLMNPAVQKLLSDPSQKFDLIITEWLYQELYAGFAAVFDCPYIWFSSFEPHWMVLRLIDEMPNPAYVSDSSSNNAPPLSFKERIEELISQLHGLWLFYLYIAPRENQYYETYLVPHIRNKSKEVPSLNELKLNASIMLGNSHVSLGSATRLPQNYIPIGGYHIENDVKPLPQNLQMLMDSAGHGVIYFSMGSNLRSEDFPESVTKGILKVFGGLKQTVIWKFEKDLPNRPKNVHIIHWAPQQSILAHPNILFFISHGGLLSTTEAVHFAVPMICIPAMVDQFANVNRAVRKGFAIKVDLSFTMDKDLEIAIHTMLSNPKYTVKAKELSFVYHHRPLLPGDDILHWVDHVVKTNGAIHLRSPALHMPWYKKLYLDLLAVVLVFFSAIIFITKKVLSLNKNKKTKTN

SEQ ID NO: 6691 - protein, 518 aa, Ostrinia furnacalis
MVKLTNLSLLLMLSFSSAYKILVVFPYPGKSHTILGEGFVKHLVKAGHEITYITPIPIKNPPKGLRQIDVSSNKEIFEVMSHVLSFEMVLKKEIDLTDMRSLVRIVYDIANQTLWNDNVQKLMHDPNEEFDLVIAEWLYTELYCGFAAVFNCPFIWSSSMDPHGLVLELIDEHPNPAYTTNHVSSFEAPFTFLQRVEELWGIIYMKYVKWAYLNDHENQIFREGYGPAVTKRGRKLPSLYEVSHNASLMFGNSHFSSGRPVRLPQNYIPIAGYHIDDEVKPLPKDIQDIMDSAQHGVIYFSMGSMIKSSSMPDGIKQGFLKMFGSLKQTVIWKFEEVLPNLPKNVHILKWAPQQGILAHPNCKLFISHGGLLSTSEALHYGVPIIGIPMFADQFMNVDRAIKKGFALRVNIAEDMTDHLKAAIEEILGNPKYRERMKELSFIYYHRTAKPGQEILHWVDHVVKTRGALHLRSPALGVPFYQKIYLDLLALIIVATTLLYLIVKRLISKSVMTKKVKKN

SEQ ID NO: 6692 - protein, 484 aa, Miniopterus natalensis
MLEKIILVLSLQISLLGITLGGNVLIWPMEGSHWLNIKIIIDELIKKQHNVTVIVYSGALFIDPTYNPSLTFEIYKVPFGKERMEEMIRNFILTWMGNRPSPSTIWRFYQEIGIVLQDFHALCREICDGVLKNQKLMEKLKKSKFEVLVSDPVFPCGDIVALKLGIPFMFSLRFSPASTVEKHCGKTPYPPSYVPAILSELNDQMSFTDRIRNFISYHLQDYIFHTLWKSWDSYYSEALGRPTTLCETMGKAEIWLMRTYWDFEFPRPYLPNFEFVGGLHCKPAKPLPKVLWRYKGKKPATLGANTRLYDWIPQNDLLGHPKAKAFITHGGTNGIYEGIYHGVPMVGVPMFADQHDNIAHMKAKGAAVEVNINTMTSADLHDALKTVINEPSYKENAMRLSRIHHDQPIKPLDRAVFWIEFVMRHKGAKHLRPAAHNLTWFQYHSLDVIGFLLACAASAIILVTNCCLFSCRKFGKTGKKKKRE

SEQ ID NO: 6693 - protein, 531 aa, Cavia porcellus
MAPGKLASAVLLLLLCCAGSAFCGKVLVWPCEMSHWLNLKTLLEELAKRGHEVTVLSTSNNLFIDYNRHSAFNFEVIPVPTDKNLAENRLNEFVELAVNVMPTVSLWESGRLLQQFFIDVTKDMGLACRSTVYNQSLMKKLQESKYDVLITDPVLPCGELVAEMLGIPFVNTLRFFTGYTVEKYCGQLPAPPSYVPVPLGGLTTRMTFMERVKNMMFSILFDFWIQQYDYKFWDQFYSEALGRPTTLCEIMGKAEIWLIRTYWDFEFPRPYLPNFEFVGGLHCKPAKPLPKEMEEFVQSSGEDGVVVFSLGSISKNCQNLKSFNIAEKIKSQIPFKVLWRYKGKEPATLGPNTRLFDWIPQNDLLGHPKTKAFITHGGTNGIYEAIYHGVPMVGVPMFADQPDNIAHMKAKGAAVEVNMNTMTSADLLGALRTVINDPSYKENAMRLSRIHHDQPVKPLDRAVFWIEFVMRHKGAKHLRVAAHDLSWFQYHSLDVIGFLLVCVASAILLVTKGCLFFYQKFINTGKKIKRE

SEQ ID NO: 6694 - protein, 542 aa, Salmo salar
MGWGKSVPVVKQGLRLGPGHRLGLLVLLCCLALCPGPIQGDKVLVMPVEGSHWLSMKLLVKELAARGHEMVVLVPETSILIKSSDYHRTEIFKVPFNKAQLDKNINKLKDDMFRNTPKVTDIFMNVQGLIDFTDMQVKGCEGLLYDKPLMQRLRGEGFKMMLTDPFLPCGSIIAESFNIPAVYFLKGIPCGMEDRAAQCPNPPSYVPRFFSGNTDHMDFLGRVKNMLMYSLESYLCTVMFASFDELTSRYLEKDMTYRELLGHGAIWLLRYDYSFEYPKPTMPNMVHIGGINCGKRDPLPEDLQEFVDESGEDGFVVFTLGSMVSQMPEEKAKQFFDAFSRIPQRVVWRYTGVVPKNAPANVRLMKWLPQNELLGHPKVKAFITHGGTHGTYEGICNGVPMVMLPLFAEQGDNVHRMVVRGVGEMLNLFDITSEKLVEALNKVINDKSYKEKMMKLSAVHKDRPIEPLDLAVFWSEFVMRHGGAEHLRPAAHDLNWIQYHSLDVFTLLLTIVLIVVMVTVKCCKVCFRKCCGTKRTMKKKSA

SEQ ID NO: 6695 - protein, 519 aa, Aethina tumida
MKLVLFVVILVVTPFKPCDSARILGVVSFPSYSHQVVFQPVWRELSLRGHQVTTIITDSINDTSLTNLTEIVIKEAYTSLKKHNLLDADATHGFIKMIDTMINMAEDLLNVQYSHPQVQRLIHNRSELFDLVIFEALSPTVVYAWRFDCPAIGLSSLDAGDLLHNVMGNPTNPIANPDPRLKIQDDDNLTFKERLYSVVTSWFSLVVGVFKITPMVDKIQQKYFGESVPPFFKLIDKVEMIMIATNPIFHATRPLNPNTITIGSGIHILPPKPLPNDVKAFLDGAKEGVVYFSLGSNVKGNLMLEDTKKAIYKAFSELPYKFLIKVDWVNLTVPENVKVGRWLPQQDILRHPNIKLFITQGGLQSLQEAVTNAVPLVSIPFFGDQQMNLKKIVKRGFAVKLERTNITTESMKWAIQEVITNPKYKLKAIEMQDLMYDEPMTSLERAVWWIEYVIRHKGAPHFKSNAAKLPLYQYFLLDVIGVVLVSLIVVNYILYKIIQLTIRVAFRLVKGKLLKKKKE

SEQ ID NO: 6696 - protein, 1745 aa, Tribolium castaneum
MKLTLSLLVFVLISTVNSAKILGVFPVPGRSHYILASSLMRALAEKGHDVTVISCFGEKIPPKNGTYRDIVATGVFDEMQKEMNSKNMSMFEIGGASPLLNAFFMAVLLPEMTEKALKHENVQKFINSDEKFDVVIVEQFANDAQKALSTHFGAPLITFSTLGANYWVNPLVGNPSPPSYIPDLMSDYSVPMTFVERLENSLVYVMNELLYNFYIFPKQNELMKKYIPRAPAHINDVLYNSSIILMNAHPSINQPVPYVPNMVDIGGFHVKPPKKLPQDLQEFLDGAKDGVIYFSMGSNLKSADLPNDKRDAILKTFAKLKQKILWKWEDENLPGKPPNVKTAKWLPQQDILAHPNVKLFITHGGLLSTTETIYHGVPILAVPIFGDQKLNARSAVKGGYGVHLPYEELNEETLTNSINEVLSNKKYKENVQKRSKLFHDRLVSPIDTLTYWVEYVVRHRGAPHLRVAALDLPCYGVNSAKILGVMPVTGRSHYILVSTLMRALAEKGHDVTVISCWGEKNPPKNGTYRDIVVTGAFEEMQKLMSGADMNLFDMDSQNPLVGAIFMATMFPAMTEITLKHENVQKLINSGEKFDVVIVEQFANDAQKGLSTHFGAPLVSLSGVGANYWANALVGNPSPPSYIPDIMLDYSVPMAFCERVVNSFVYVFNELLHKFYIFRKHNEIMKKYIPNAPAHISDVLYNNSIILMNSHPSINQPVPYVPSMVDIGGFHVKPPKKLPQDLQEFLDGAKDGVIYFSMGSNLKSAELPNDKRDAILKTFAKLKQKVLWKWEEEDLPGKSPNVKTAKWLPQQDILVPFDLAPKMLVKMKTTFLLLVLVLISCYEANSAKILAVLPVAGRSHYILASTLMRALAERGHDVTVISCFGEKNPPKNGTYRDIVVTGAMEELEKQMSSDDVNMFEMEGINLFINALFMAFMLPTMNEATLKHENVQKFINSGEKFDVVIVEQFGNDAAKALSTHFGAPLISLSAVGASYWTNPLVGNPSPPSYIPDLMSDYSVPMTFCERLVNSLVINQPVPHVPNMIEIGGFHIKPPKKLPQDLQEFLDGAKDGIIYFSMGSNLKSADLPNDKRDAILKTFAKLKQKILWKWEEDDLPGKPPNVKTAKWLPQQELLVLISYYGVKSAKILAVLPVAGKSHYILASTLMRALAERGHDVTVISCWGEKNPPKNGTYRDIVMTGAMEELQRHLSSKDSNMFTRKGVNVFVDVFFATMIIYRFNELTMKHENVQKFIRSGEKFDVVIVEQFANDALKALSTHFGAPLISLSAMGASYWTNPLVGNPSPPSYIPHFSAKILGVFPVPGRSHYILGSSLMKALAEKGHDVTVISCFEEQNPPKNGTYRDIVITGAVDEMTKQMAKMNMFDRESTNPFAGAVFMSFRLPAMTETTLKHENVQKLINSNEKFDAVIVEFASEAFATRASHWINPLVGNPSPPSYIPDIMLDFSVLMTLYERLVNSLVYVFNELLLNFVVYPKHNELMKKYIPNAPSHISEVLYNHSIVLVNSHPSVNRPVPYVPSMVDIGGFHIKPPKKLPQDLQEFLDSAKHGVIYFSLGSNLKSAQLPLEKRNALLQTFAKLKQKILWKWEDEDLPGKPPNVKVAKWLPQQDILAHPNVKLFITHGGQSSTTETIYHGVPILGIPIFGDQKINAKSVARDGCGLYVAYSEITEEKLTESINEILHNQKYKENVQRRSKLFHDRIVSPLDTAIYWVEYVIRHRGAPHLRVAALDLP

SEQ ID NO: 6697 - protein, 501 aa, Eurytemora affinis
MMNVASASNILLFHNLGTKSHLHMIFPIIDQLLENGHSVTGVFYASAGVEHNNYTELVIPDLYGAMIDRVSDLYTGNQNKGRTFLDPSHLITMFSEWENIITGGTRMFQTPAFKSLASSNFDLVLTFNPWGFYFGDLFDCPVIVFSPPGAFPSHTQLLGNPFNPSYQPVLTNDFSDPTSFLQRAKNFAMYHVMDLIFRRFADSVVTSSMRKQIGYQGPTMFEIAERRLALILSNSHFITHTPQPLLPNVVDVGGIHINSKQKPLPKDLKKFLDLAVNGAVYVSFGSAIRTSLMSAEKITILMDSFKYLNVPVILKWDENLTDVTDNIFVRQWLPQQEILSHPNVKVFVTHGGLLSVMEALHTETVMVGIPLATDQFANLGRASKHNIAKQLNWDDLTTESLVAAISNAMKNNSMKSSMRKLGRLFRDEKESPLERAVWWIEFVLRNKGASFFKPESLNLFWYQYYLLDVLLVLFLTPFLSILVLVKLILLYSSNTQKEKVD

SEQ ID NO: 6698 - protein, 563 aa, Zeugodacus cucurbitae
MVISRIRDREPLICPNYEITTKIFIKMIFRVFFLSIIILYSVSWNLVVIDGAKILGLFAHPSESHFAVMRSLMMELAKREHNVTVYSSHRLNERVENLREIIVEPEFPFWKQLLEVTGSQAGGLLKARELTEWTMQKSLAHTGATAVNYFLSNASLKKLLNLPINEFDYDLIIVDLFYTEALLAVGHFYGKPTIGLLSTNFENYMDRVLEQMVPTTCSPICYENYQPDAGFWKRLGVIRNCLSRRNQFTKDNWGAQESVIRKHFAHFKGVSDLNIATLQTELSVLLLNSHVPLLTPRPLLLNTITAGGMHIRPPRQLPWLLRRFLDESRAGVVYMNLGNEQLCADIPTHIMQLLLNSLGKRKERVVWTCHDHSALKDLPANIMVQHAVAQADILAHPHVNAFLMNGDLLSMQEGIMRHVPMIGVPIFRNEVRNMELAVRLGVGVHLNYDNLTETSLSWALQTIKEDSKYQLTIRQVATTFRDRPLGAVETCMYWMDYVLRHQGGADLKTLGVGIPSSQLHLFDLFIYYFAIALLSISVLAAAFYGIMILMRKREIGKMYSKLS

SEQ ID NO: 6699 - protein, 279 aa, Ursus maritimus
MGKAEIWLIRTYWDFEFPRPYLPNFEFVGGLHCKPAKPLPKEMEEFVQSSGEDGVVVFSLGSMVKNLTDEKANLIASALAQIPQKVLWRYKGKKPATLGANTRLYDWIPQNDLGHPKTKAFITHGGTNGIYEAIYHGVPMVGVPMFADQPDNIAHMKAKGAAVEVNINTMTSEDLLTALRTVINEPSYKENATRLSRIHHDQPVKPLDRAVFWIEFVMRHKGAKHLRPAAHNLTWFQYHSLDVIGFLLACVATAIFLVTKCCLFSCRKFGKTGKKKKRE

SEQ ID NO: 6700 - protein, 516 aa, Anopheles sinensis
MGPGVILKGALLLLCGSLVIADGYKILFLVPFPGPSHWLMLKHFIRELTERQHEVTCITAFKFGEPLPNYEEIYIDPPYPIRETFPVEGLFASSQTSDFDKLFMYWELGLNTSRHGLETENVRRFIARRDLHFDLIIAEQFFQESWLMFAHKFNAPIVTISTYGYSDFFDRMMGLQTPWSFVPHMVLSYEDDMSYAERTYNALLSLFDYFYRTIVYLPDTNRLAQKAFAELAAERGPLPSVEELQQSVSVILVNSHPILNAPRPTIRGLVDIAGAHIRAPKPLPDELRQFMDEAPHGVIYFSLGAYMQSSVMPVEKRDTILKVFGTLQQRVVWKFEDDTKIGNVPPNVMIRKWAPQNDILAHNNTILFISHGGQFGTFEAMHHGVPTLFMPFFGDQNRNADRAIRMGFARKMLFVDIAEESFGGNIAAMLADKRYYSRAKEISRLFTDRIVEPMDESIYWIEYVARHGGAAHLKSKAVELYWFQYYMLDVFLLPPLLIWLVFRSSKGRRYGGRRRR

SEQ ID NO: 6701 - protein, 538 aa, Drosophila ananassae
MKFILLLLLLGVECPGIRAANILGVFGAHSPSHTIVNMAVMKALADRGHNITVVLTAMPKMKAHENITIILAPRTPKRIQDIKDHVAKASQRKQSLWKSMVLTILQSEFQIEGQYEFLMHPNLRNLYEKPQTKFDLVILGMLANDFQLGIGAKLNCPVILTWVRIPMLFADFVVGNIADPAYVPTMTVGLEPGQKTMGFGLRLTNFLKYTFSSIFNEVMAYKMNQYYVRAFGNESDPDFPTYSEMKRRISLLFYNYHAPSEGPIRPVVPQSIEIGGIQVKEQPDPLPKDIAEFLDNARDGAIFFSLGSNVDTNTFSPQVIEIIHKVLSKLTQRVIWKWHDLDDTPGNASNIYFGKWLPQDDILAHPNTKLFITHAGKGSVAEAQFYGVPMVALPLFGDQPSNSEILAKSGFGRWLDVHTLTEEDFEKTVLDVMENPTYRKAIGKFSSLYRDRPLTARQSVVYWTEYVLRHQGAYHLQSPLIQMDFVARNNIDVYGIILFLGVVASLTILAIFKWVFRKVSRVFHGKNNQQKVDKLKHN

SEQ ID NO: 6702 - protein, 462 aa, Fibrisoma limi
MQTVLFIMVPIPSHYNANYGLANWLQQHNYRIVYAGTPSLKQHVEEQGFDFKELTYLIEYFPAGIRTKLHHLWRSLRDSSHLRTRYRDYRTTLQSLQALCDQVRPDYILIDEHLSYYYYLLHDKAPNVFFIHSKPPTQPLPAIPPLEYAVPLQNNLLGRLRAWAMWQPYLLRRHIGRLQRRAIFLGKNDMYFVERHARRNGLDPSTIAMRNNALYDLVKGVQRLHIVPRCLEYPWYKPAPNEHFFRRPYERHDARFASTNWQSIEPILDKRAREGHRLLYVSLGTLSKKHADLCVHFLNQVIEAVRPLHGVQVIMVTNKLDIHPTENTPPHVHLMPSVPQQRLLLYCDLMLTHGGMNSVTECLVAGVPMLVYPLNLTSDQPGNAARVRFHGLGLAGTLRRASSMRLRQQIEALLGDPAYHERVELLGQQFAAEIREQERSILPVFGYQPTPSLTSPHPVTAD

SEQ ID NO: 6703 - protein, 528 aa, Papilio polytes
MVMFTLSICHLTMTPIVLYFIFLLFPYIESARILAVFPFPSISHQVVFRPLTHELARRGHDVTVITTDPAFPKGQAPKTLTEIDIHDLSYSRWNKLLSNIGDGVIDFTKLQDMMKTFIFSVYEEQVKTESVQKLLTDKNEHFDLLLVEASLRCTLGFSHVFKAPVIQISSFGAFVDNHHIMGTPIHPLLYPSIFRDRFYNLTLWEKIIQLKKEWDLWRLVANHDMDDELYKRLFGPDIPSLDELYNNVQMLFLNMHPIWENNRPVPPGVIYMGGLHQNPEKELPKDLKSYLDSSKNGVIYFSLGTNVKPSNLPSRKLEAILNVFTRLPYDELWKWDNNDLPGRPRNIKISKWLPQSDLLRHPKIKLFITQGGLQSTDEAITAGVPLIGIPMLGDQWYNVEKYIHHKIGAKLDMDDLTEDKLEAAIVNVINDKSYRENILRLRSIMRDQPQSPLERAVWWTEHVLRHGGARHLRSPAANISLTQYLELELVFTLAIILIILLFVICVILKSIWRFLRFKLHPENKSKKC

SEQ ID NO: 6704 - protein, 568 aa, Stegastes partitus
MQPELPVELKHTHARAHIKPPPDNRHHLLSQQVSLQHREEAMSSGVWFPTLGLVAWLCCLSLGSVQGGKVLVMPVDGSHWLSMKLLVKELTRRNHEVVVLVPESSLLIQGSEGYKTEIYKVPYTKAQLDENFNELRDGVFLKPPEFADVFVNVQRLVNFTSLQVTGCESLLTDEPLMSQLRAQKFDVVLTDPFLPCGSMLSHMFSIPVVYFLRGLPCELDIKANQCPSPPSYVPKFFSGFTDSMTFPQRVGNLAMTVMENYVCKMIYGHFDVLVDKYFGGGLTYKGLLSHGAIWLLRYDFILEWPRPLMPNMALIGGINCAKKAPLPADLEKFVNGSGDAGFIVFTLGSMVATMPEEKAKQFFDAFRQIPQRVVWRYTGALPKDVPDNVKVMKWLPQNDLLAHPKAKVFITHGGTHGIYEGICNAVPMLMFPLFGDQRDNVHRMVVRGVAEQLTIYDVTSEKLVTTLKKMTQDQSYKKRMVELSERHLDRPVEPLELSVFWTEFVMRHKGAAHLRVGAHDLNWFQYHSLDVICFLVLIVVTVQWLSLKCCLFCTRKCCRIGTTKRKSE

SEQ ID NO: 6705 - protein, 527 aa, Monodelphis domestica
MSKKWVSILLLQLCFFSYGSCGTVLVWPMDFSHWINLKTILEKLTEKGHGVTVLVPNVRYIIDSADSSGLNFEVFSVPFGKEEADEFLRNVLFKMIYELPNLSYWEAAWGFYETIVYFSKNVKLTCEAVVFNQTLIQKLRKAGYDVLVSDSGLPCGDLIAEMLQIPLVHSLRFTMGNVYEKYCGALPCPLSYVPVTLSQLTDKMTFMERVKNSLMSFLFDFCWYSFDKNWEQLYSEALGRPTTLCETMGKAEMWLIRTYWDFEFPRPYLPNFEFVGGLHCKPAKPLPEEMEKFVQSSGDHGIVVFSLGSMVKNLTDEKSNVIAAALAQIPQKVLWRYKGKKPATLGPNTKTYDWIPQNDLLGHPKTKAFITHGGTNGIYEAIYHGIPMVGVPMFADQPDNIAHMKAKGAAVEVNFNKMTTADLLNALKTVINDPSYKENAMRLSRIHHDQPVKPLDRAVFWIEFVMRHKGAKHLRPAAHDLTWYQYHSLDVIGFLLACVATVVFIVAKSCLFCCRKFGKTGKKQKRA

SEQ ID NO: 6706 - protein, 543 aa, Drosophila pseudoobscura
MTEQRGTLLGCSLGGLLLAFLALQSLPQSTEGSNILGVFTSHSTSHFIVHMSIMKTLAEKGHNVTVVSSVPPKVTHKSIKHIVIPLSEEEEKLIHGGMVDMVKQKPSIWTTMKSIFTSLAGLINKQVDTLEDKRFTDLYNNKDNKFDVVFVGFFFNTYQVGLSAKFNCPLIVSWMSQPMLMVNEIIGNPELSSVPQMSISVPAGKAMNFQQRLTNFLSSTGFRLLGKFLHFKYQGFYKRLWGDDKSMPSLEQAMKNVSLVFCNSHGISEGPIRPNVPAVIEIGGIQVKSKPDPLPEDIKQFMDNSKNGVILFSLGSNLKGDHFKPEVVTTIFKTLSSLKQQVIWKWDDLQTTPGKSANILYKKWLPQDDILAHPKLKLFITHAGKGGVAEAQYHGVPMLTLPVFADQPGNADKVVENGYGLRLELNSLEAKEFKETIKEIISNPKYAQKLETFSKLYRDRPQTAQELVVYWTEYVIRHHGAPHMQSPLVHMGTVASNNLDIYALVILALYLIFLVNKIVWKFLWKKCTGKSKKTAQNKKAKKQ

SEQ ID NO: 6707 - protein, 378 aa, Saccoglossus kowalevskii
ETKAFIQDTNILERLNAANFDLILANAFNPGFALIVDTWRVPFISVSTMRALPMIDDLLHGLPSNPAYVPAVKTGYSDEMTFPQRLGNTFAYLASAAMFEFLLLKPFKSIQQRHNIRPELSYRSLCRNSELVLFCSDFAFDYPRPMMPHAIYIGSLTARTPDPLSQEWTEFVESAVEGIVVFTLGSQANIGEDLEKATKFVKAFARLPQKVIMKYEGNPPNGLGENTKLSSWIPQNDLLGHPNTKAFISHGGINGVNEAIYHAVPFIGMALSAEQSENVERLVNKEMAISLDSKSFTEDDVYNAVKKAIEDPRYKDNAARLSSIQRDTPMPPGDTAVYWVEHILKFGGDHLKPASLELNLVQYLLLDIAVFLLIVAAI

SEQ ID NO: 6708 - protein, 530 aa, Echinops telfairi
MCMKWISVLLLIQLSCCFNCGTCGKVLVWPTEYSHWLNIKTILDELIQRGHEVTVLVSSSSILIDSNKPSSIKFEVYPTALTKDEMELLFMTWIKKWTYEAPKDSFFAYFSVIQESIWGYSDIILRLCKDVVLNKKLMVKLQESKFDVLFADAVSPCGELLAELLNIPFLYTVRFTTGYSYEKYSGGLLTPPSYVPVILSELQDRMTFMERVKNMIYVLYFDFWFQQVNEKKWDQFYSEVLGRPTTLSETMRKAEMWLIRTYWDFEYPRPFLPHFDFVGGLHCKPAQPLPKEMEEFVQSSGKHGIVVFSLGSMIKNITEETAHIIASALAQIPQKVLWRYDGKKPSALGSNTRLYKWLPQNDLLGHPKTKAFITHGGTNGLYEAIYHGTPMVGMPLFADQADNIAHMKAKGAAVSLDIDTVTSTDLLNALKTVISDPSYKENAMRLSAIHHDQPVKPLDRAVFWIEFVMRHRGAKHLRPASLDLTWFQYHSLDVIGFLLACVAIFTFLVVKCCLFGCQRFFKSGKKKKSE

SEQ ID NO: 6709 - protein, 560 aa, Helobdella robusta
MISVTFTFSFIVPHLLALLNFTEASGILLIPIPVNSHVGSLNVIGWALAKRGHHVHMLLDVSFKAPPGWPNFGVTYHRYGGKSSEVMNIEKFNQDMTMNFMDHDPKMSYVLEQSQIVNSVLHRELLTDNDELIDKLKSLKLDIAVVDCLPMINYFYLIPHKLGIPWITYTDALDPSMVPTPWLPSFYTPILAGKSLNASVFVNRLYNVALMVWQMITSPFDMPISDKLLDEYRKFKDFRNLNELVRKSAMFFTTHNLAMDKIMPHTANVAHVGGLTIEIISSSSSSPSSSSSSPSTMSKYESFLSAEGSDGAVLVSFGSLVSSFPDRYTKLFLDVFSQFPKLRFIWKTNGTEPHSKLPPNVLISDWLPQNQLLSRKEVVLFITHGGNNGQFEALYHGVPMLTIPLFGDQPKNAQRIVEKHFGEMLDFRKLSVEEMTKKIRMIIEDPTYKSNITKASEIFRSQPQSASERAAYWTEHVIKYGCDHLQPPGKELFTFQYLLLDVILLISFVIFFVLYILYGVWRILVDCWKGRNSTLGRGEVDDDGGHSHCASCRGIYKKVE

SEQ ID NO: 6710 - protein, 524 aa, Chrysodeixis includens
MYHIAIFCLTIVIALAYYIEAARILAVFPTPAYSHQSVFRVYIRALAERGHEIYVIKPSTRIAYTDPVADIELRGNITEIDASMSEEYFGKLIKASSVFRKRGVISDASTVTAHNYLNLVRMISDQFELRDVKQFIDHRKEYRFDVLVTEAFIDYPLVFSHLFHNLPVIQISSGYGVAENFETMGAVSRHPIYYPNMWRDKFRDLNVWETINEIYMELSLQNEFSKLADEQDKMLKDQFGADTPSVHELRNRVELLFLNTHAVFDNNRPVPPSVQYLGGLHLVKQNHLQANYATLNGFVKEFLDNSTQGVVYVSFGSGIVTTDMDVEFRDMFLQVFASLPYNVLWKYDDIIPISKLPTNVFTQAWFDQFEVLKHPNVKAFVTQGGVQSTDEAIEALVPVIGLPMMGDQAFNANKYTELGIGRALNTHTVNAKQLIEAIVDVAESSNYRKKLLQLRHFIRHQAISPLQKAIWYTEHVITNKGKTMLKTKAANVSYSDYVMLNLCIPFVTVFVMNHLRQLLRINLF

SEQ ID NO: 6711 - protein, 543 aa, Drosophila yakuba
MIEYGKIGFLIIFLLGTQTPSGDGANILGVFSTPSPSHVIVHMAVMKALADRGHNITVVTQMKPRLAAHENITVIIVPPTEERLKLMEEHLAEKSNAKLSFWANIAKGIVQSSYQMDGHYEFMTHPDFKEIYENPKTKFDLVFLGLMANYFELGIAAKLNCPVIVSWVGIPLPFLDSLVGNVHDPSYVPTVNVALKAGQNTMDFGLRLVNYFKHTFLIALNTFLDFKMKQFYERAFESELEFPNYYETKRRISLMFFNYHSPSEGPIRPTVPQSIEIGGIQVKEQADPLPMELAKFLDTADEGAIFFSLGTNVNTNTFRPVTVDILYNVLSKLPQKVIWKWKDLKNKPGNASNIFFSNWLPQDDILAHPKTKLFITHAGKGGVAEAQYHGVPMVALPIFGDQQGNAEIMAKFGFGRWLDILTMTKEELEETIHDVLESPTYRNTIGKFSSLYRDRPLTARQSVIYWTEYVLRHQGAYHLQSPLIHMDFVARNNLDVYGVLILVILSISVLLVVTAKVLFRKILNVTNGYSNHRKAVSIKLKNN

SEQ ID NO: 6712 - protein, 693 aa, Microtus ochrogaster
MLSNVLLWSLQISLLGVSLGGNVLIWPMEGSHWLNIKIIIDELIRKEHNVTVLVASGALFITPSTSPSLTFEIYPVSFRKEKIENVIKDFVLTWLENRPSPSTMWTFYKKMARVIEDFHMVSRGICDGVLKNEKLMAKLAKGKFEVLLSDPVFPCGDIVALKLGIPFIYSLRFSPASTVEKHCGKVPFPSSYVPAILSELTDQMSFIDRVRNFISYRMQDYMFETLWKPWDSYYSKALDGSHWLNIKILLEELIQRNHSVTVLATSETLFINSSPDDFMHFEEIPVSYKKSNIDEIIEHMIALWLDHRPTPFTMWTFYKELGKLLETFYQVNIQICDGVLNNPTLMSRLQNRGFDVLIADPVTICGDLVALKLGIPFVYTLRFSPAFTVERHCGKIPAPISYVPAALSELTDQMSFGERVKNTISYPLQDYIFQSYWGRWDSYYSRVLGRPTTLCETMGKAEIWLMRTYWDFEFPRPYLPNFEFVGGLHCKPAKPLPKVLWRYKGKIPATLGSNTRLFDWIPQNDLLGHPKTRAFITHGGTNGIYEAIYHGIPMVGVPMFADQPDNIAHMKAKGSAVEVNMNTMSSADFLNAVRTVINDPSYKENAMRLSRIHHDQPVKPLDRAVFWIEFVMRHKGAKHLRVAAHDLSWFQYHSLDVIAFLLACVASAIFLVAKCCLFVFQKFAKTRKKTKRD

SEQ ID NO: 6713 - protein, 519 aa, Anopheles darlingi
MIASGVAWLLVSLSLTVDGANILCLMGVASPSHHIWNRSIMDALAQAGHNLTILSADVEKNQPDNVHYIHLEEIYPTLYTGPESLDLLVMANENQFVSVISFYRDFVVHECAGTLKSKGLQAVLNYPDDFQFDLVLHDFTCGPCLLGLLHKFNYPPLVSVTAFNNPPYSTEVIGGHKYYSYIPFYSLSYDTDMNFLQRVHNTLLGLTDMVYRNFISNPRIDRMMREYFPYPDLPYAPELHQRSKLMLVNAHYSIDFPETTPPNLIPVGGLQIKDPSPLPQDLEQFMNASRKGAVLFSLGTNVRSDQLGPERQRIIIEALRQLPDYHFLWKFETELDIPLPKNVIIRPWLPQNDILAHRTTKAFITHAGLLSTHEATWYGVPFVGIPFIADQHRNLERCVRKGIARRVPFQTLTTAGLKQALVDVLEDPEYRTRMAAQSALFRDQPEKPLSRAIWWIEWVLRHPHETQLDSPVLKLGFFKTNLIDVIFFLGSLPIAILLVCLRICRRPNPVKVKGDKKRN

SEQ ID NO: 6714 - protein, 513 aa, Plutella xylostella
MIILYLFASVAVNLVFPTNSARILGVFPTPSVSHQVVFRPLTQALAKRGHDLVILTTDPAFKPGETPANIREIDLHDESYRIWRTEVLNTVDGKTDDPITLIELAIKINAKLIEKQIETKEVQELIKSKAKFDLILVEACARPALIMSHVFKAPVIQVSSFMAVPPNYQVFGSPAHPILYPEWTRNKIYNLTVWEKLSGAYDDLRIHYIWRKNEHFENEMIKRQFGPEAPTVAELADNVDMLFLNVHPIWEGNRAVPPNVIHMGGLPQKPHKELPEDLKQLLDSSKHGVIYMSFGTNVIPSQLPPERIQVFCKVFSRLPYDVIWKWDQDELPGRPGNVRIYKWVPQSDVLRHPNVKLFITQGGLQSTDEAISAAVPLIAFPMLGDQWYNAEKYVHHGIGMKLELESITEEVLEDSVKTVIGDESYHANLVRLRSLMLDQPQPPLSRAVWWAEYTLRHGGAKHLRSPAANISWAEFLMLDVLGVISGCVLVLLAKVVVVVRLVVAWKRSKVKQS

SEQ ID NO: 6715 - protein, 530 aa, Oryctolagus cuniculus
MVSVKWASSVLLLQLCCAGCGFCGKVLVWPCDMSHWLTIKVILEELAERGHEVTVLTHPHTLLIDHWNPSALNFEVVDVPFVKENTKKNHAAMQKLPLNVSPLLLPWQSIIKLSDLLRGMNKSFKLFCESVIYNQTLMKKLQETNYDVMLIDPLKPCGELVAELLAVPFVITLKFSVGGNMERNCGKLPSPPSYVPVTMVGLPDKMTFLERVKNAMLLVFSNLWIQGGDFQIWNQFYSEALGRPTTLCETLAKAEIWLIQTYWDFEFPRPYLPNIEFVGGLHCKPAKPLPKEMEEFVQSSGEDGIVVFSLGSVIDNLPEEKADLIASALAQIPQKVLWKFKGKKPATLGANTRIYDWIPQNDLLGHPKTKAFITHGGMNGIYEAIYHGVPMVGVPLVNDQHDNIAHMKAKGVAVEVNLHTMTSADLLSALRTVINDPSYKENAMKLSRIHHDQPMKPLDRAVFWVEFVMRHKGAKHLRPAVHDLSWFQAHSLDVIGFLLACVAAVIIFVTKCLLFYCQQFGNTGKKKKKE

SEQ ID NO: 6716 - protein, 523 aa, Spodoptera litura
MNKWTLIILGLVFLSNVCAYKILVAFPYPGKSHSILGEGYVRHLLEAGHEVTYITAHPYKKPHPNLKQVVIASVIEKFEFAQSLDFKKMLSNEVDFKDMFGIYELMVVIANRSLTHENVQKFMMDPNEKFDLVIAEWLYHHLYAGFATIFNCPYIWSSSLEPHPVVLDLIDEVGNPAYFPDHMSPITPPFTFMERISELWNLIYLYRVLWSVRDTEEKAFRDSFGPAAAKRGITLPALYDLKYNSSMMLANSHYSLGDPQRLPANYAAIGGYHIEDEIPPLPKDLQKIMDSATDGVIYFSMGSMVRSETLPMELKRQLFYVFSKLKQTVIWKFDGDLENVPKNVHMVKWAPQPSILAHPNAKIFVTHGGLLSTTETIHYGVPIIGIPLFSDQFLNVKRAIRKGFALEVPLGYDTPAKLEIAIREILSNPKYREKVKELSFIYHHRETKPGKTLVHWIEHVIETKGAPHLRSPALHVPLYQKLYLDLLALIILGLVIIKCIVKSLFSSKSDNKKKSEDKKKKRS

SEQ ID NO: 6717 - protein, 521 aa, Condylura cristata
MGEQRAVLIIGFLLPGLLLSEASRILTQSNLGGSHYLLMDRVAQILQDHGHNVTMLHHEGSFISDYSKRKVSYHEVSWTTTETFEKEFRKNIGSILTENFRGRETFESHMRIIGLHGAQCDYLLKRKDLIDYLKNENFDLVFVDGFDFCSFLMAEKLGKPFVALNACSFNILNAGLPSPISYVPAMNSLLTDHMDFWGRVKNFLMFFDSQIKRSKIYSTFDNTIKKNFPEGSRPVLSHLLQKAELWFINSDFALEFSRPLHPNTVYIGGLLASSEKPVPQEFENFIAKFKDHGFVLVAFGSVVDKFLTQEFLMEMNSAMASLPQGIIWKCKDCHWPKDNKLAANVKIVDWLPQNDLLAHPHIRLFVTHGGMNSVMEAIEHGVPMVGVPAGGDQPDNMLRVQAKKLGLYIHVDQLTAETLVLKMKQVIGDQRYKSAAVAASVIRRSHPLTPAQRLLGWTNHILQTGGAAHLKPHVFEQRWYEQYLLDVSLFLLVVTLGAVGVCVKLVGLVVRLLRGGKLKKM

SEQ ID NO: 6718 - protein, 533 aa, Harpegnathos saltator
MRPISDIAPIIVALWLLTVSDLAQSKKLLIITPAPSYSHQIVFRALNLALLKRGHEIVALTPNVLNDPTLANYTEIDFGFEYEKIDDTDFSQTRWNLTQLGGLKTRLLRLGHDIAEDVLSHPDLVKYYANGTDTRFDAVIAEMIMTPAIYMLAHRFKAPLIGIMSMDLQNCHRFNLGSPVMPSHPSNWEVENLAGLHLPFWKRMVNFVNAWWRIYTWFSSFANQQQKIAEKYFGKDIPHIVDVAKNMSLVLIDQEPLLAYARPEIPNIVHFSGLHISKIPPPLSKDLKDFLDGATNGFVYMSLGSNVKSKLLPKGMLQVFVSAFASLPYRVLWKFEDSNFNVPSNVFISKWIPQQSVLAHPNIKCFIYQGGLQSTEEAVHYAVPLIGIPFVFDQVYQVLKMVSLDVAKQLDITKLTTSELRKTVLEVAGDKRYKDKMLELSALTKDKPYDSLENVIWWIEYVMRHNGAPHLRFNGADSAWYQQFDLDIIICLSIALFLALCVFLVVLVQGSRLLYKYHDRIPRFAITKKVKLT

SEQ ID NO: 6719 - protein, 477 aa, Aedes albopictus
MKALANKGHEVTVISPFPQQKPLKNYRDVTTTQVWKAVEPIVANLLDIAKKGVIESIKNTYDFGHRITNSTLTDPTVIDLLASNETFDLIVLEIFMNDAMIGFCHHFNAPCIGVSTFGASKWTTDLVGTPSPPSYVPNAFLGFSDRMSFKERLLNTLMSATEIVVDTFVDRPAQIEMYQKAFPGQKPPFAELKKKAISLVLLNNHFSLSYPRPYVTGMVEVGGMHVNRVPKPLPDNIQSFLDTATDGVIYFSMGSNIKSKDLPLEKRDAFLKVFSKLKQKVMWKWEDDNLPGKPDNVFVQSWWPQDDILAHPNVKLFITHGGLLSTTESLYHGVPVIGIPVFGDQHLNMAKAERGGYGLSVAYAEISEAKLSNAINTILNDPQFKANALAISQRYRDQPLKPIELAVFWAEYVIRHKGAPHIRSAAMDLSLVQYHNLDVLGLLIGLPIFILHLLVKLVCRKKSPKPSNKKDERKKRN

SEQ ID NO: 6720 - protein, 483 aa, Myotis davidii
MDRVSQILQDHGHDVSFLQQSDLHFPPGFKKENTYQTVHWSPPEDFQQEFKKNLDFFTKEALLGRNPLSNLLNIMKLFATQCSDLLRTDLMGSLKNESFDLVVVDGLDLCAFLIAEKLARPFVAVLGTTFGVTNFGLPEPVSYVPDFHSSLTDRMDFWGRVTNSLMFFISSLRQWYIHAQFDSTIRENFPEGSRPVLFHLQQKAELWFVNSDFAFDFARPLLPNTVYVGGLMAKPVEPIPQELEDFIAQFGEAGFVLVALGSIVNVAQSQQALEQMHRAFAQLPQGVIWKCSPSHWPKHVQLAANVKIMDWLPQTDLLAHPSIRLFVTHGGMNSVMESIQHGVPMVGIPLFVDQPGNLVRVEAKHLGVAIPIEQLEAETLALKMKQVIGDKSYKSAAVAASIIRRSHPLTPAQRLVGWIDHILQTRGAAHLKPHAFQQPWYEQYLLDIFLFLLGVTLGTVWLCGKLLGLVARGLCGAGKMKKA

SEQ ID NO: 6721 - protein, 514 aa, Chilo suppressalis
MYKHISVILLILSFSCAYKILLVFPFPGKSHSMLGEGYVRNLLKAGHEVTYITPILMKSESKQLRQIDVSSNLQLALENLLNIESLLKGEVDLGDTSMAMAMSDDIANHTLWNPAVQRLMMDPKEQFDVVVAEWLFTELYCGFAAVFDCPLIWSSSMDPHELVMTLIDEIQNPSYTATHKSGMEAPFTFFQRVKGLWEIFYVKYLKWSASGVANKIFNEGYGPALTMRGRLLPSLQEVSHNASLMLGNSHVSTGRPVRLPQNYIPIAGYHIEEEVKPLPEDIKKIMDEAKHGVIYFSMGSMLKSATMPDKLKKGFLKMFGELKQTIIWKFEEELPDLPKNVHMLKWAPQASILGHSKCVLFITHGGLLSTTEATKSGVPIIGIPMFADQFINIDRAVRRGFAKKVTLDYNCPNNLKTAIEDIVGDNRYRQKARELSFIFHHRPTSPAAELVHWIEHVVKTNGAPHLRSPALDVPFYQKFYLDLAAVIFMILVVLNKLISAVFRKKSEQKKQKTK

SEQ ID NO: 6722 - protein, 542 aa, Stomoxys calcitrans
MKRTGKFLSTFLFIACLAWHITPSNGANILGLFTSHSPSHLIVHMSLVKVLAERGHNVTVLVSQKPKVTHKDIKVILIPPTDEVEQLLNQEVSAMSQRKNSMFTTMKNMFGSLGILINMQADMLKDPRFTVLYDNPDTKFDLIIAGVFMNDYQLGVAAKLKVPIVLSWMGPPTVMTDGMVGNPPEISYVPNMNMAVKVGEKMTFMQRISNFFMNGFFKVIMTLLDIRMNNFYKNLFPTDGSFPSLSDMKKNVSLVFCNSHFSEGPVRPNVPAVVEIGGIQVKDKPDPLPKDIANFLNGANDTGAVLFSLGSNLKGSSIKPETATYIFNVLSKLKQKVIWKWEDLEHTPGKSPNILYQKWMPQDDILAHPNMKLFITHAGKGGVVEAQYHGVPMLALPVFADQHGNADKLTQAGYGLQLELLSLTEDSLRQNVLEILNNPEYRRNVQQFSRLYRDRPMSARESVAFWVEYILRHHGAAHMQSPLVHMNFIESMNLDVYVFLLAVTYVLYRVFRLAFCFLCTKVCKKFSCSKTKPKKTPKVKKQ

SEQ ID NO: 6723 - protein, 535 aa, Caenorhabditis brenneri
MKLTIIFIFSILIELTCCYKVLVFNPAFGASHSNFLGKISDILIDAGHDVTMLIPVSMPSKKDLVGSKKVTKIIRIDQDPRSKQMQEEFKTEEMIKKQIWKLDADITVFFSMIKNFSLASGYQCEHIFQQTAILDELKNEKFDLGITESLFICGFPLFDHIGVKTVINADSVLYLDVVKYALGEPASTSFYPGLFSKFIDKMNFFERTRNLLGYAFSWYFSWTRFQGELEAIKPYYNKSLSWEDHINGAAFYLINSNQYLDFASPTLPKTVFIGGMQVNTKKHGKVELEKEWDNLLSIRKQNVLVSFGSNAFSSDMPSEFKKAFLEVFKSMPDTTFIWKYEEENATLADHLPNVKLTTWMPQNDLLADDRLTLFITHGGLGSSVELAYQGKPALVIPLMADQPRNALMLTRHGGALELDKFHLDKPSQIRHAIKTVLNDPNYKKNAEKLASILSSQPHQPKDVVLKHCDFAVKFGDLKTLNSEGRNLNLLQFYSIDIALAALAVTILLLLLLSLIISCVIKKMYSLSSNVKSKID

SEQ ID NO: 6724 - protein, 521 aa, Plutella xylostella
MILRVCFVALAILATSVNSARILAIYPVASVSHQVVFRALTLELAKRGHELVVFTPNPALPKDRPKDNVTEIDMSESYQLFFKLFMHTFEPVRGVIFPAKQMSEYESLKMMIAFVEEVYKMEEFKKIISDKTQKFDLIMAEALFVSPLMLSKIFDAPTIWFSSFYGSPNAYETVGAPGHPMLYPNYFRGKFVNLSLWEKIYETYLEFQFWYNTRRVLSYEESLVKKYFGEEAPSIDELKNNVDLLFVNANPIFEGNRPVPPNVIYLGALHMQPLKELPNDLKTFLDNSKRGVVYVSLGTNVRFETMEPSLIDVFVKAFEAMPFDVLWKFDGQNIPNAPKNVKIQKWFPQRDLLTHPNIKAFVTQGGLQSTDEAIEAGVPFVGLPALGDQYFNSDQYVRLGIGIRLNFETLKPEELVNGVNTVVNDKSYRENVKKLGVLMRDQPQTPLERAVWWTEYVLRNKGAKHLRSPAANISWSEYLMLDVVAALATAVLLFLAAVGIVWRTVCKIFRKKVKVNKNKKE

SEQ ID NO: 6725 - protein, 521 aa, Galleria mellonella
MGKWLGLFFAVAAFSNICDAYKILVVFPLPGKSHNILGVNIVNHLLKAGHEVTYVTPFPVKNPHPKLQQLDVSDNFDLMDEKMLNVKALLNKEISFSNPIKMFTFTIELFEKTVQNPNVVKVFNDTNQKFDAVISEWMYNDAYSGIATLFDCPFIWLSTIEPHWIILSLIDESTNPAYVPDSLSSNIPPFNFKERVSGLFFQLLSSAFKTFYLNGVIEREFERLLGPYLTKRGKAIPSFSDVNYNVSLVLGNSHVSLGQAIRLPQNYIPIGGYHIDPDVKPLPEDLKKLLDNAKNGLIYFSMGSNLKSKDLPDELKRGFLNIFSNLKQTVLWKFEEAIPDLPKNVHIVQWAPQPSILAHPNCILFITHGGLLSTTETVHFGKPIIGIPVFGDQFTNIERAVNKGFAIKVTLSYTMLDEFKVAIDEALNNPKYSNKAKELSAIYHDRPVSPGKELVHWVEHVVRTRGAPHLRSPALHVPFYQKFYLDLLGIIAAILSVIVIVLKRVLKLKCKKKENLKKKKN

SEQ ID NO: 6726 - protein, 669 aa, Leptinotarsa decemlineata
MSTLWLYVLLCFRYADSAKILGFFSFPSVSHQIIFQSIWKELSLRGHEVTVITPNPLSDTSLKNLKEIDVRSAYEVLSKKNFSGIMGTSTSPLFKVFFIHDMLISITEAEIQQKSVLELMALDENHFDVILVQSLHPLMYFTGAKFRAPIIVSKHCNTHSLSSRVMMSTTWLYFLLCFWFGDSAKILGFFPYPAISHQSPFQALSRELSLRGHEVTAITPNPLNDPTLKNLTEIDVRFVYDILARRNMTVQMGKGFSTYFKVMFLHETILALVDAELQQKNVAKLLTYDESHFDVLLAPAIHPLTYLFAAKFRAPVVGVSSFDIFLEFHDAVGNPTHPIISPEIVYNGFDKELSFVERVKSVLFHIWYRAIYYWHILPEADKVTRKYLGEDVPYLGDVIKNTSMFLVNVNCILHKVRANVPNVIPMSQMHIRKKKPLPKVSNWFGKFCSGYYFCQFDFAGHPNIKVFITQGGVQSLEEAIANEVPVIGLPFISDQSANVKRMMDRGAGLGLDPNTLTKDDLRNAILEVATNSQDLAPGKSTVQKCLAKFKRDKMSTEDDARSAPKRLLPTKLSKKYKKQIKKAKSILLDEPLVGVEKAVWWIEYVLRHKGAPHLRSEAADMSFFEYFMVDVLAFLSICVLLASFIFIYSMRVLVKLGLSISESPKQKSA

SEQ ID NO: 6727 - protein, 522 aa, Papilio machaon
MRLIIIVLVTTILCTLNLSEAYKLLVVFPIPGKSHSILGNAFVRHLLNAGHQVTYITPIPMKDVNPSLRQINVESNKNCFAAEEVLDIQKLMRKEVDMKDIPTVFTMMFNIANATIQHENVQQLITDPTENFDAVIAEWMYSELYSGFSAVFNCPLIFFLSVSPHNMALSLIDQIPNPAYTADHIKSNTIPPFPFWTRVQELLTLLNWKIHRWWVNDRNVNSYDKAFKLAVMRRGRTLPPLEEMKYNASLIFGNSHISTADGTPLPRNLIEIGGYHIDSKVEPLPEDLKKILDDAKEGFIFFSMGSMLQSSKMPKTIKSGLLKIFGQLKQKVIWKFELSVPDKPNNIFMLDWAPQQSILAHPKCVLFITHGGLLSTTEALHYRVPIIGIPMFADQFININRAAAKGIGRRVDLNYDTPKNLKLAIEEILGNSSYRDRVNELSYVYHDRAISPGAEITRWIHHVIKTKGAPHLRSPALLVPWYQKLYLDLIFLIIIINAIFSMTIIRLIGYMKHDINLSKKQS

SEQ ID NO: 6728 - protein, 533 aa, Caenorhabditis remanei
MRCLFPTLFLVLLTSQPILSYNYLVFCPLFAHSHHKFLAKIADTLTLAGHNVTFLVPVIVREYENIKYLEHTTDVVYIQPDEELEKIGEDADYSMFWKADFGIFSFVPAVQRFNKMFEQFSDNLRKDLSVLDKLKDRKFDAMIFEALAFCAHQNRVNFSQFPAIHDYLGIKAIFPSWSMTHMTELSKSIGEPASPSFVPTTVSPFGDQMTFQERLLNTIGDLSGFLLAPPAMRSYKYPHQVLDIEEIKSKAPFVFVNSNPFLDFPRPTLSKTIAIGGISVNVTQMREEKLSEEFDDILKKREKSVLISFGSILRSSEMPDEYKYTIVRVIKSLPDVTFIWKYETKDIKFAKNLPNLHFSKWVPQTALLADSRLTAFITHAGLGSVNELSYLGKPAILIPIFADQFRNAMMLARHNGSITLVRKDLGDFEKLKKSVDAILNDESYQINAKTLSHQLESQPFSPHDLLVKYAEYGARFGEIPSLDPYHRKMSFVSFFMIDIILFLSVILIGFVALLVFVVRLILRTILIRKLKIN

SEQ ID NO: 6729 - protein, 523 aa, Apis cerana
MRNKVQSQFILRTMICNIAKLFFLLHVLIIANKSECYKILSIIPTPSYSHQIPYQRLWLELHARGHEIVVITTNPIPNISLPNFTQIDISHSYNCLKEVDFIENRFEHVSWLKIMENYAMPLYTCFLNEVFNSSEVKKLYVPDNAVKFDVLLAEFFYGPAMCAFAHRFNVPLIGLVLPSHEYTWEMEANTGTNLPFFKRLNNFVTMWSFLYRINYEVFFFQQKLAEKYLGPLPLLTDIMKNISLIFTNQIDILSPARPKLPNMISFNFFHVSDNPPPLPKDLEEFLDDAEEGFIYFSLGTNVRSSRLPKEIVHMFCNIFAKLPYKVVWKYEQDLPEKYGDIYIKNWLPQQSILAHPKIKLFIYQGGQQSTEEAINFGVPLIGFPILADQDYLAKRIEALGMGKYFDIRTITSDQFENAIKEIITNEKYKNRVLDIRTQIRETSQDVKKIAWWTEYVIRTKGALHLRSTLAWEPWYQRYDTDIIIFLTIVIFIIFLIVISIIVNILMYFYKKMDTSIHRKDKIH

SEQ ID NO: 6730 - protein, 520 aa, Drosophila ananassae
MLTEESIFSATSNVLRSIRSEALHFVRMRILTLLLGIILSLGYSNGYHFLMVLNSPGRSHFNVGQALAKGLVNAGHEITVVSVFPQKKNIPGYHDINVPNIIAAMKGDIAALWDSINKPLTQKLIDHYQMGFRLTRGLFVDPNFQDLIKSNRSFDAIICKTFYNDAHYGLAEHFNAPLIGLSTGGGLTFITDMVGSPAPASFVPHIMLPFNDHMSLYERFMNVAFLAFERLLLDYYYLPGQEKLYKEFFPENKHNFYEMRRNASLVLINQHVSLLPEKIERFLNESDHGAIYFSMGSNLKSKDLPPSKVEEILTAFRGLKQRVLWKFELDDLPNKPENLYISDWFPQTDILAHPKVLAFVTHGGMLSTTESIYHGKPVIGLPIFSDQFFNMAHAEQAGYGIMLDFKNLKAKDFGAAIESIVSDSTYTEVVRGMSFRYRDQQQTPLENAIYWVEHVTRHQGAAYLKSAAQRLNWWQYHNVDVFAIMFAIFIVLLILPFFILRLTKRVFCVNGKKVQKFKQN

SEQ ID NO: 6731 - protein, 526 aa, Neodiprion lecontei
MSRHLITVILVVIICQQGFASRILGVFPATSISHQFVYRQLTLALRERGHELVVITPDPINDPTLKNYTEIDVHFLYEDANKIVNCVSPPNKTTWLEKVQDLAEKFMLMSQRILSHSVVKKVYAPNSGEKFDLLIIEMLFWQALLPLAKRFDVPVIGVSSFGLSLHLQHRIGNPVMPSHPVHWDAEIKVLGKLSLWQRLWNLVYAWRLVHFIETDCLPRQQMIARKYFGNDIPDIADMEKNISLVFVNQQAPISFVSPNVPKIINIGGFHVSKHIETLSQDLQKTLDEATHGFIYMSLGSNFKSTMLSNKTRGEFLAAFSQLPYIVIWKFEDILPGRPDNVITMKWAPQQTILAHPNIKAFIYQGGLQSTEEAVSYAVPVIGLPILGDQYTHVNKMVSLGVGKKLGILTFNRMDLVEAIRSVTTDVNYKERMLKLRDLMEDKPYDSLKNAVWWTEHVIRHKGAPHLHSTTADDPWYQRQDMDLIFIISTVIWIAFSITLFVLYKLLVYSINCSKDNRQLMSKKKRA

SEQ ID NO: 6732 - protein, 486 aa, Chinchilla lanigera
MGPGKWACAVLLLQLCCAGCGSCGKVLVWPCEMSHWLNIKTLLEELVKRGHEVTVLTPSHSFFIDYRKPSAFHFEVIPIPTDKNVSENVINEFIELAVNVMPTLSFWQSGRLLQKFFLQVTEDLRLLCTSTVYNQSLMQKLQESKYDVMITDPVEPCGDLVAEMLGIPFVNTLRFFTGYTLEKYCGQLPAPPSYVPVPMGGLTSRMTFMERVKNLVLSFLFDFWFQQYDFEFLDQFYSEALGRPTTLCETMGKAEIWLIRTYWDIEFPRPYLPNFEFVGGLHCKPAKPLPPVLWRYKGKEPATLGPNTRLLDWIPQNDLLGHPKTKAFITHGGTNGIYEAIYHGVPMVGVPLFGDQYDNVAHMKAKGAAVEVNMYTMTSADLLGALRAVINDPSYKENAMRLSRIHHEQPMKPLDRAVFWIEFVMRHKGAKHLRPLAQNLTWYQYHSLDVIGFLLALVAIIIFLVLKCCLFCFQKFAKVGKKKKRE

SEQ ID NO: 6733 - protein, 280 aa, Cavia porcellus
MPAPGQLSSLFSWPTSDLSVTAHPVSQAVEPWTAQQILSSQELEDFVQSSGEHGIVIFSLGSMVMNMTEDKADVIASALAQIPQKVVWRFDGKKPATLGPNTQLYKWIPQNDLLGHPKTKAFITHGGTNGIYEAIYHGVPMVGIPLFWDQGDNIAHIKAKGAAVRVDFNRMSSTDLVNAMKTVINDLSYKQNALRLSRIHHDQPVKPLDRAVFWVEFVMRHKGAKHLRVAAHDLSWLQYHSLDVIGFLLASVATVIFIISKCCLFCCHKFAKVERKEKKE

SEQ ID NO: 6734 - protein, 533 aa, Anopheles sinensis
MWCRRVNIVALLLALTMPILAHGARILAIFPSPARSHQIVYQAFMRGLIDRGHQLTVMTTDPFATDHPNVTVIDWSYSYRIVNENFDVVDMKQRNMNFYQIATQLRTLTKLFLEAQLAHPDVQALIHSRDEHFDAVIVEYYQFTPMYAFAELFNAPMIGITSIDSMGTCHEAMGNVMNVVAHPEMNHKFTRDLTFLQRVEAVVSNLVIKYHIMPTDFVAFDRMIEQNFGSNMSRSADLIRRIDFLLVNAEPSIGYIRPILPNSVQIGFMHIQPPKALPADLKAYLDRSEHGVVYFSLGTLIRSDSLNQRNLNLFLAVFKSLKYDVLWKHDADLDLNGTTNIRMERWLPQQDLLAHPNVKVFVMQGGQQSMEEAIDRHVPLVVIPFNFDQFGNADKVVERGIGRSVWMERLTEESLREAILEVARNKRYKRNIARLGRLVRDQPMRPVEKAVWWTEYVIRHGGVDHFHYPAAQMPFLQYHYYDVVGAGLLLLAVLLGALYFVLKRIVRFLLSQLGSAIAFGQGRLEKALKLKAL

SEQ ID NO: 6735 - protein, 527 aa, Cyprinodon variegatus
MRSRVWFPPAGLLALLCCLGLGPVQGGKVLVMPVDGSHWLSMKILVKELGRRGHDVTVLVPESSLLIQGSESYKTEVYKVPYTKEELDENFNKLREGLFDQKPGLADLFVNVERLVTFTSLQSLGCEALLDNEPLMNQLRKEGFDILLTDPFLPCGSVLAHIFSIPAVYFLRGLPCELDIKANKCPSPVSYVPKAFSGNTDRMTFPERVKNMMMSFLESHICTVMYRHFDELVSKRIKDGMSYKELISHGAIWLLRYDFVFDWPKPLMPNMVLIGGINCAKTAPLPEDLKEFVDGSGDDGFIVFTLGSMVSDMPETKAKVFFDAFRQLPQRVLWRYTGKVPKDMPKNVKLLKWLPQNDLLAHPKAKLFMTHGGSHGIYEGVCNAVPMLMLPLFGDQGDNVHRMVSRGVAEKYDIFDLKTETLVPALKKVINDKGYKERMVKLSQIHLDRPVEPLDLAVFWSEFVMRHKGAPHLRVAAHDLNWFQYHSLDVIGFLLLVFVTVLWVTLKSCLFCTRKCCGKRGGKKKSE

SEQ ID NO: 6736 - protein, 1005 aa, Anopheles darlingi
MADRKPSLNVVLCTVALLAWTGGFSTPRYAEGANILCLFAVPSPSHHIWNRVLVDALAAKGHNLTIVSPDVEKKVKPNITYIHLEKTYDAIHEGATAIDFYEMAQSGVLESMFIFYDYAISMCTGILNSEGYRTISNYPDDYKFDLVVYDYTCGPCLMALYVKFGQPPLVGVTAFNIPPYTTDLIGGHKYYAYVPYYTLDYDSKMSFFERVNNAIIHWIDDYYRNYVFLPRTDRMVREHLTNSTFPYLGDLDQKMMLMLVNSHHSVDFPEPIPKNMVEVGGLQIIPPKPLPNDLEAFIKAGKKGSVLFSLGTNVLSKDLGEDRIRSLLQAFRQMPAYNFIWKFETDLPFELPANVLIKKFVPQNDILAHPHIKAFMTHGGLLSTHEATWHGVPMIGIPLIADQYRNLGKSVRAGVAEKIDLWDLSTEKIRNTVLKVLETPKYRHAMKERSSLFQDQETPPLERALWWIEWALRHPNAKTIQSPTLQLGPWRSELYDVKLGIVARVQAANILCLTPVPSPSHHIWNRVWIEALAARGHNLTVVSADVEHKPIPNITYIHLEHAYSDLHEELDLLQMANRGALFGIRDLYTWGVAMCKGVLRSNGLRTIRSYPEDFQFDLVIADITCGPCLFPLIHRFGYPPLIAVTAYNNPQFTTDFIGGHKHYAYVPFFTVNYDSDMDIGQRFYNWLLHNIDHLYRHYVFLPKIERMVRNHFRYDGMRQLAEMERNTTLLLANFHYSVDFAESIPPNHIPVGGLQILPVKPLTAELKDFIASGPEGTILFSLGTNVRSADLGEGRIRMFLQAFEQLPQFHFVWKFEERPSFHIPDNVLIRKFLPQNDILAHPNVKAFITHGGMLSTHEATWHSVPMIGIPFICDQYRNLHKSVTAGVALRLDRDSLSSEKIRQTVLQLTGNASYGDKMRQRSAMLRDQPEHPLARAVWWIEWTLRHPNPAAIQSPTKHMSVWQAELYDVKLLLLLTFGLIAYQAKRIFARYTRNRTVREVGKKFN

SEQ ID NO: 6737 - protein, 528 aa, Tupaia chinensis
MGSEKWVMILLLLCCAGCGFCGKVLVWPCDMSHWLNLKIILEELIARSHEVTVIIPSHTFLIDYRKSSALNFEVFHVPQGKEFTDDISKKFMDLAVNVLPNLPSWQSAIKLNNFFAGYNQQFKLLCESVVYNQTLMKKLQETNYDVMIIDPVVPCGELLAELLAVPFVITLKSSIGGNIEKYCGKLPSPPSYVPVHMVGLTDRMTFLERVKNTLSFVFFNLWIQYYDFHFWKQFYSTVLGRPTTLCETLGKAEIWLMRTYWDSEFPHPYFPNFQFVGGLHCKPAKPLPKEMEEFVHSSGEDGILVFSLGSFIYNLTDEKANLIASALAQVPQKVLWRYSGKKPATLAANTRIYDWIPQNDLLGHPKTKAFITHGGINGIYEAIYHGVPMVGIPLFSDQPDNIANMKAKGAAVEVNWNTMTSADLLRALRTITNDPSYKENAMRLSRIHHDQPMKPLDRAVFWIEFVMRHKGAKHLRSAAHDLTWFQYHSLDVIGFLLGCAAIAIFLVAKCFLFFCHKFGNIRIKKKRD

SEQ ID NO: 6738 - protein, 509 aa, Cryptophlebia peltastica
MHFHILFLCAISAVNGARILAVLPTPAYSHQSVFKVYIQALAERGHEIVVIKPTTKVNYATRNVTEVDATLAENYFKNLVKQSSVFRKRGIISDSTTVTAHNYMGLVRMIRDQFDLPAVKRLINNRKNEHFDLLICEAFMDYSLIFSHLFGDLPVIQISSGYGLAENFETMGAVSRHPKYYPNMWRDRFRDLTVWETINEIYMELTLQNEFSKLVDEQNKLIRSQFGRKSPSIKELRNRVQMLFVNTHSVFDNNRPVPPSVQYLGGIHLHRNEPVPLDDFMKRYLDGATQGAVYVSFGSSINTKDTDADFKYMLLQTFKALPYKILFKFETDDEELNSQLPYNVLVQTWFNQPEVLKHKNVVAFVTQGGVQSTDEAIDAGVPMVGLPMMGDQSFNTDKYVELGIGLALDTATVDSNQLTEAIKTVINDPLYRKNILELRHNIRHQPITPIRKAVWYTDYVINLKNSKNIFKTKAANVDYNEYYMTNMIIEFVTYTIMNQFKNLLKMIYA

SEQ ID NO: 6739 - protein, 519 aa, Eumeta japonica
MTARVWASLAVACLLVCTNESSKILVVFFFPEISHNILGNGYVRHLLHAGHEVTYITTRSFQKPSPMLHQIHVQYPEYSSERIHFKLEAILKHEVLFKDYLSIFNGIHDMSKYFLNQRDVQKLINDPEQTFDLVIVEWMYTEVHCGFSALFRCPLIWATLTEPHWMLLRLVDEMPNPAYVPDFNSYNSLPLSLLERADELWTQIKILYEKSVVEPKNDLLYEEVFSAAGKKRGIILPPLREVKFNASFVLSNSHVSLGDAVRLPQNFIPIAGYHMDPKPEPLTEDLKKIMDTAEDGVIYFSMGSNLKCKFMPDKMKKEFLETFSQLKQTVIWKIEETLPDLPKNVHLMQWAPQQSILAHPKCVLSITHGGLPPVTETVHYAVPIIGIPVFADQFNNVNRAVSKGFALKVDLSYDTPKKLGTAIQEILNNPGYRERVKHFSLVYHDRPVPPGKELVHWVEHAIKTRGAPHLRSRALSTPWYQKTYLDLAALIMAIICCLCFTVKYFLGTRKSSIDTKKTK

SEQ ID NO: 6740 - protein, 513 aa, Leptinotarsa decemlineata
MKLLVIISTLVGLCESARILGVVPTPSFSHQVAFRPLWRELAKRGHDLVVITTDPENDPTLNLTEIDISSAYELWEEAEIVRLLEELKYQPLKLSNHIKWVSFQVCDHELGNPKIQALLKNESEYFDLVIVEFLHPIMLAFAERFHCPHIGVASMELPTFLHNIIGNPVHPIAHPDVMLPFEGELTFFQRVMSCVFNFMMYINSFIPMEEDQIVERHFGKNMPPIRDMMLKFSMMFINVDPAFNLRPLGPAFVSIGGGTHLGSAKPLPKNLQEYMDGAEYGVIYFSLGTNVKSSLVPPEMQKLFLDTFKELPYRILWKFDEHNPQDVPANVKIMNWVPQQDILRHSKVKAFITQGGLQSLEEAMFSHVPVIGIPFIYDQEKNVHKMMTRGLGIELDKNKLTKESFKAAILEVINNPRYKEKAVELAKLSRDQPMTGLEKAVWWTEYVLRHRGAPNFRNPVLDMPFYQYYLIDVIGFLIGLIIIFWFTCVKIVSSFRYIFVSCLHFSTVKRKIQ

SEQ ID NO: 6741 - protein, 486 aa, Myotis brandtii
MPMKWISVLLLLQLSGHFSPGSCGKVLVWPTEYSHWINMKTILDALVQRGHEVTVLTSSASILVDPNKPSAIQFEIFPTSLTKDDMVYFFMRLINKWTYDLPKDTFWTHISLMQEMFWEGSDLIEKLCKDVVLNKKLMTKLQESRFDVVLADAIGPCGELLAELLKIPFVYSLRFSPGYKIEKYSGGLPFPPSYVPVVFSELSDQMTFMERVKNMVYVLYFDFCLQTYNQKKWGQFLNEVLGKPITLFELMGKAEMWLIRTYWDFEFPRPLLPHFEFVGGLHCKPAKPLPKVIWRYDGKKPDTLGPNTRLYKWIPQNDLLGHPKTKAFITHGGANGIYEAIYHGIPMVGLPMFADQPDNIVRMKTKGAAIRLDFNTISSTDLLNALKTVINDPSYKENAMKLSRIHHDQPMKPLDRAVFWIEFVMRHKGAKHLRPASYDLTWVQYHSLDVIGFLLACVASATFVITKCCLLCYQKFAKPGKKKKRE

SEQ ID NO: 6742 - protein, 526 aa, Cephus cinctus
MARIVIVLMVSLIFLLNRIDSARILGIFPHPSHSHQIFFHSLTSELSRRGHELVIFTPKVTNDTSLVNFTEISLVEAYAAGWKEIVNYSSYRELWVFFDACYRAGVLFSESILSHPEMEKILNPQSDKKFDLILIQIFYVDALHALSSILNVPMIGLTSLAPIGIHHHTMGNPPLLSYIPDVMGGQPVNMNFWQRIINIYCYGRQIFEFNFIHLKKQERVLKKYFGNNAPDIRDVSKNISLLLASTQYPIYHPRPDMPSVKLIGGLRFYKSTPREKMSPRLQNILDNAKEGFIYFSLGSNVKLSQLSEENRNVFVHVLAELPYKVIWKCDLDDLPIKAKNIFLEKWVPQQDILAHSNILLFLYQGGQQSTEEAINNGVPLVGFPVFSDQRSNVNNVVSLGIGQKIELSSMTKESMKKTVLEVIQNPRYKKNVIELRNYINDRMNHPMEEAIWWTEYVIRHKGAPALRNRYQDVPWYQMEGLDILIFFIILLYALLYSMYLVTRCIISKIFLRARSSRNLDRNWKSD

SEQ ID NO: 6743 - protein, 449 aa, Spodoptera litura
MEKIKMFWLAVCLMLACAEASKILVVFPLPSRSHGNLGDGLVKHLLNAGHEVTYITPFPYKNAPPTLRTIDVSKNFDIMPMDIMSIKSIMDSPMFLHSIGFMLYMMIDLNRHTIQLEEVNKLLTDPKEEFDLVIAEWMFTDIPAGFASVFDCPLIWLSSVEVHWMILQLVDQPTNPAYTVDIMSTYTPPLNFWQRANELWTQVKINFLQYVLQELKKIMDNAKHGVVYFSMGSNLKSKDMPEELKKSLLQMFGTLKQTVLWKFEEKMDNLPSNVHILDWAPQQAILSHPNLAVFITHGGLLSTTESVHFGVPIIGIPVFADQFLNVVKAVNKGFAQRVDLSYTMADKLREAIIEVTSNKRYAEKAKELSFIHHDRPVKPGVELVHWVNHVINTRGAPHLRSPALHVPFYQKIYLDLAVFLVILLLVGRLLVKKAYRAVLSKSKAKTKTH

SEQ ID NO: 6744 - protein, 523 aa, Spodoptera exigua
MERAKVFCFLISIILTCGDAAKILVVFPMPSRSHGNLGDGVVRHLLNAGHEVTYITPFVYKNPPPNLRSIDVSATFDIMPIDMTIKNIMDRTINIENVGSLVYMMTEMLKKTVETESVQKLLSDPKEEFDLVVAEWMFSDVPAGFAAIYNCPLIWLSSVEPHWMILQLIDQPTNPAYTVDIMSIYTPPLNFFQRVNELWTQLKVKFLNFVWLDGVQEKAYNQLLAPFIAKRGRQPPSFDEVRHNASMILSNAYVSTSVAQSLPQSHKFIGGYHIEDKETALPEDLKKIMDNAKNGVVYFSMGSNLKSKDMPEEIKRDLLKMFGTLKQTVLWKFEEKPEKLPSNVHILQWAPQPAILSHPNLAVFVTHGGLLSTTEAVHFGVPIIGIPVFADQFMNVAKSVNRGFALRVDLSYSLAAELKDAINEVTSNPRFAEKAKELSYIHHDRPVKPGVELVHWVNHVIKTRGAPHLRSPALHVTFYQKMYLDLAVVLVLLFLAGRVLLKKICAAVCSKKECSAGGRKKNN

SEQ ID NO: 6745 - protein, 810 aa, Bicyclus anynana
MALSLCPGCFYVQKVPCGSSIHRWVSRLENSLYDEFFVTAIKKRHNTAPSFEALRFNASLLLTNSHVSMGVPAVLPANVIPIGGYHIKPNVKPLPEDLQKLMDNAKHGVIYFSMGSNLRSNQLPEVVKQELLKMFGKLKQTVIWKFEEDLPNRPSNVHIVQWAPQQSILAHKNCILFITHGGLLSTTETMHFGVPIIGIPVFADQFVNVAKAVKKGYAQKVDLSYSMAADIELAIIKLLDDSSYTKRVKELSQIYHDRPVPPARELVHWVEHVVKTRGAPHLRSPAFMVAWYQKLYLDLVLVLKMFKKTQWLTLVLFTLCEINAYKYLVVSPIPGKSHSILGDAIVEHLAKAGHEVTYITAFTPEKVSPRVTIIDTDNYKNFPPDVGFNLNSFMNGTVTTNNFMTFAPFMLSVSRATLGNSNVRKLLADKNQQFDAVIAEWMFNEVYAGFSAVFNCPLIWFSSLEPHWMVMQLIDEIPNPAYSTDMLTTDGIPPLTFRQRVVELYTQIVGRLIQTFWLSGLEHDIYNEYFVPFIRDRYNTVPPFEELRYNASLMLSNSHISMNTPIRLPANVITIGGYHIKPNIKPLPEDLQKLMDNAKDGVIYFSMGSTLSSKHFPDEIKQDLLKMFGKLKQTVIWKFEEDLPNRPNNVHIVQWAPQQSILAHKNCIVFITHGGLLSTTETVHFGVPIIGVPVFADQFVNVGRTVKKGFAQTVDLNYALAASLEKAIRNVLDNPSYTTRVKELSAIYHDRTVPPATELVHWAEQVVKTKGARHLRSPAFMMPWYQKIYLDLILVLLVVLLVLKYVFIFI

SEQ ID NO: 6746 - protein, 1064 aa, Pogonomyrmex barbatus
MWKMCVFSIMTVLCVMMQYNAIYAKRILFISNFPSYSHQITYRGLLLELNRRGHEIVSVTTNPIKNSSLTNYTEIDLNYFYNGLPEFKKLPYPTITAANIAFPILAVERILWTAGHFMNREVFKNPEFKKLYMPGSNEHFDAVIVAQGTTFSLNALAYRFNAPLIGISSLDMYNNLRYTFGSLILPSHISNWQTNTPVEHNMSFWRRLVNFYEVWMQMYAWVNKFVPVEDALAKKYLGEDLPHISDIARNMSIYLVNRHPAFLHGKPEQPNVIYFHGLHIAKTPDPLPENIKQFLDDAKKGFIYMSLGTNVKWKELPNYKRILEVFVDTFCALPYKVIWKYDSDLLPWKCKNILSSNWFPQQSILAHPNIKLFIYQGGLQSTEEAFYYGIPLIGIPILWDQRYHVRNVVKLGIGVRLEYNNVSKEIIETTIHEVINNRRYKDRMEHTSKLYKDGPYDSLQNAVQWIEYVMRQNGTSFLRNSLCDEPWYQRYDWDIIGFFAIILFIASCISMWALYQILQFHARIISNSLYKYTKSKTHYLERQNGKMREVTCTMFVVLFLCILLTSNTASAKRIFVIMVAPFESHLIVHRSLCLALHKRGHELVVLTTHPIKDSTLQNYTEIAISQHVAINERFKRISQMPLIEFLKDIARLANKYVRLLFKNPDFIKFYNSNEKFDAIIIEQISCYVINVLAHKFNAPLIGILTLGLHNYHRYIFGGPILSSHPSNWEFDVLSEEQPSIWQRLWNFIDTWRTIYFYINEAIGDGDEIAKEYFGNDIPKIADIMKNMSLMLVNEHPIYTYPRPEQPNVMFFSGIHIQKTPPSLPNDLGQFLDNATEGFIYVSFGTTCITCHFLPKEMLENFVQVFSKLPYKIVWKFECELPRKLDNVFISKWFLQQGVLAHPNIKLFITQGGLQSTEEAFHYAVPLLGIPIISEQGNRIRRLVSLGVAKQIKLHEITQENLNSTIHEIINNKSYKERMMYLSFLFKDRPYDSLENVIWWIEYVMRHKGINHLQFSESDKPWYERYDMDVIAFLSIILFIMNCAIALIIIQIIHFILRKTILPSR

SEQ ID NO: 6747 - protein, 525 aa, Anopheles darlingi
MRCTNVWIVAVLACVGVSQAANILFMSGVPSPSHYIWLRPLINEMGRRGHNVTVLSADIEKHPPANVTYVHLENFYSHMYNTSMKQKLDFFNMANESPATMLRFFDEFGLDLCEAALKSEGMHSVLDYPKDFKFHLFVSDFMIGPCITSIILHRFKGLPYIPSSPYNAPSTAAAVLGAYAYSGLVPNHVYDAPEEMSFLQRVKNLYYDLYEMILHETFLHPEADRILRKLYPDAPSTTSFYRNVRLSLINVNPVIQYKEPMMPNMISVGGLQIQKPKPLPADLRQVVEGATNGFILFSLGSNARSDLLGPERIINIMTAMERLPQYRFLWKFESDESKLPMAVPKNVYIRAWMPQNDLLAHPNIKLFITHSGLLSTQEAIWNGVPIIGFPVFADQFRNINYCVDAGIGKRLSIQNFQAAQLVAAIKEVLGEPKYAKRMAHVSHLFRDQPESPLERAAWWCEWVLRNPDSDLLQSRAVHMSWFRKYSYDVILFVLAVVLLLAIAIWKVAAIVSKLQVGRSAKSKGD

SEQ ID NO: 6748 - protein, 536 aa, Athalia rosae
MLRFFFIATVILFLISTLRVGNGARILGIFPVTSISHQVVFRGLTLALNKRGHELVVVTPNPVRDPTLKNYKEIDLSYLYDNRKNLDSLQFKTNTNWLDIFWNDLENLFYVYTHKILRTPELKELYSPDNDETFDLVLIESLFFPSLLALATRFDAPIIGITSLGLSANIHYSIGNPVLTSHPSNWEINLDAHGSPTLWERIKNFVTVWKHIYYYRTYHMRKQQEIAEEYFGKDIPDIRDIEKNISLVFVNQQTPISFVRAHVPKHIEIGNFHVSREIVKLPKGLQKILDEATQGFVYMSLGSNVKSNLLTNRTRDEFITAFSKLPYKVLWKFEDDDLPGKPENVVTMKWIPQQGVLAHPNLKVFIYQGGLQSTEEATSHAVPLIGLPVYADQYMQVGKMVSLGVAKKLDIGNVRSEDLVVAIRAITSDNGYKQRMLNLRSLLKDKPKDPLENAIWWTEHVIRNRGAPQLHCSTADEPWYSRYDMDVIAILSAGSVIATFLMLAMFYKFLVYGISLAGINSNGSKESSLIEKKKRN

SEQ ID NO: 6749 - protein, 521 aa, Helicoverpa armigera
MEKMKICWVLFSIMLAIGDASKILVVYPFPSRSHANLGDGIVRNMLKAGHEVTYITPFEFKNAPPSLRQIDVSNLIDLMPKGLLTIKALMDGNNISLNIAFMTYMVTEIFKGMILNENVQKILTDPNEKFDLVIAEWMMSEIPAGIGAVYDCPFIWISSVEIHWILLRFIDQAPNPAFTVDIMTTYTPPLNFVQRAIELWNQVKLTVLNYVILDRIQDNVYSTYLAPIVEKRGRKAPTLDELRYNVSMIFSNAYVDTSSALSLPQSHKYIGGYHIDEKVKPLPEDLQKLMDGAKNGVIYFSMGSNLKSADMPDELKATLVEMFASLPYTVLWKFEEVFPNLPSNIHILKWAPQQSILAHPNLRVFITHGGLLSTTETVHFGVPIIGIPVFADQFINVHRAEIRGFAKRVDLSYTMAGELKKAILEVVSDKRYAEKAKELSFIHHDRPVKPGDELIHWVNHVIRTRGARHLRSPALGVPFYQKMFLDLAVVLTIVLALSYILLKRAWRYFRSGKSKSSKKNN

SEQ ID NO: 6750 - protein, 522 aa, Bactrocera latifrons
MLTQFFFRLLLSAYISLNALQQTNAANILAIFPFPGPSQYICVQAYLKALAARGHEVTVISAFPQKKPLQNFRDISIAEVLDGYEETIVDVIKEERNKWQELNLYYDFFTSGTLSVLKSPKVQELLHSNEHFDLIIVEAIQLDAIYALAQHYNALLIGVSTYGTDPTIDELVGNTSPISYVPLPLSQLSDRMNFWQRLQNLWHHLLHQIHMHIFYLPNQAAIYKQYFPNSTADIYAVRKNFSLVLLNQHFSISFPRPYVPNAIEVAGMHISQRAGKLPTDIANFIRDAKQGAIYFSLGSNVKSKNLSKEKLEILMRVFASLPYNILWKFEATELPNKPPNVYINKWFAQSDILAQPNVKLFISHAGLLSTTEAIHHAKPLIGMPVFFDQFLNMERIKRAGIGVFVDYKYFTYDELRSAIVEVMENPKYTQTIQHMSRRYHDQPMKPLDKAIFWTEYVLRHGGAPHMRVAAQELNFIQYHSLDTLLVLVGGAMLVLLIPSWFVYRNVGRLLLGDRGKIKLKHN

SEQ ID NO: 6751 - protein, 526 aa, Apis florea
MIPNFVRLSFLLYVLIYANESECYKILAIIPTSSYSHQIPYRQIWLELQAQGHEIVLITTNPIPNINLPNFTQIDISHSYSCLKEIDFVKNRFEHIGWLKIIEKHVIPLYTCFLTEVFNSTEVKKLYSPDNPVKFDVFLAEFFYGPAMCAFAHRFNVPLIGLSSLGLISLNEFILGGLVLPSHEFTWEMEANTGTNLPFFKRLSNFVTMWSFLYRTSFDVFSFQQKLAEKYLGPLPPLMDIMKNASLIFINQIDVLSSARPKLPNMLSFNSFHISKNPPPLSKDLEEFLDDAKEGFIYFSLGTNARSSCLPKELVSMFCNIFAKLPYKIVWKYEQDLPEKPGNIYIKDWLPQQSILAHPKIKLFIYQGGQQSSEEAINFGVPVIAFPILGDQDYLVRRIEALGMGKYFDIRTIVSDQFENAIKEVITNKEYKKRVLDVRTQIRETSPDVKNIIWWIEYVIRTKGALHLRSTLAWQPWYQRYDTDIIIFLTIVIFVIFLIIISIVVKILTYFYRSKNIFTHQKHKIY

SEQ ID NO: 6752 - protein, 520 aa, Amyelois transitella
MIRYQILVLCVIINLFANNVNSARILGVFPVPSISHQVVFQAYAKELAKNGHELVIITPNPLKEKNANITEIDVSASYQEVKKIMNNDPHKMFRRGVVQDPSPEILTELYSFVTHMFIDQFNQPAVKNLINNKEHFDLVVIEAFLEYPLIFSHLFKAPTILLCSFYGFSKVYDTVGAATRHPIFYPHIQRTKYRDYTFWDRVRETVTEFRLMYSESLVEQYQNKALKDNYGPDAPTVHDLQNNIDLLFLNSHPIITNNRPVPSNVVHLGGLHLQPVKELPQDLKQYLDRCHLGVVYVSFGSNVRPANMDEDLLNTFLTAFNKLPYNILWKFDGDNLKNVPKNVKIQKWFPQRDLLGHPNIKAFVTQGGLQSFDEAVDVAVPLIGIPMMNDQWHNVNKFVELGIGLELDALTMNADDIVIAVETVIKNDSFKKNMERVRTIWYDQPQKPIERALWWTEYVLRHGGGRHLRAATANVTWREYWMIDVLAFLLVIFILAVFILVITVRKVLKLFVGKSKVKVN

SEQ ID NO: 6753 - protein, 530 aa, Oryctolagus cuniculus
MRCEKWVSTVLLLQLCCAGCGLCGNILVWPCDMSHWLNLKTILEKLTERGHYVTVLISSHTFLVDYSESSALNFEVVSVPNNQDSALNELYDFLELAANVLPTLPLWQSAIKLQEFLANMTENMKLFCENVVYNQTLMKKLQETKYDVMVIDPVIPCGELVAELLAIPFVNTLRFSMGDIVEKYCGQLPVPLSYVPVSMGALTDRMTFMERLKNVILSIFFNFWLHQYDFQVWDQLYSKVLGRPTTLCETMGKAEIWLIRTYWDFEFPRPYLPNFEFVGGLHCKPAKPLPEEMEAFVQSSGEDGVVVFSLGSMVKNLSEAKANLIASALAQIPQKVLWRYKGKTPATLGSNTRLYDWIPQNDLLGHPKTKAFITHGGTNGIYEAIYHGVPMVGVPMFADQPDNIAHMKAKGAAVEVNMNMMTSEDWLSALRTVINDPSYKENAMRLSRIHHDQPMKPLDRAVFWIEFVMRHKGAKHLRVAAHDLTWYQYHSLDVIGFLLACIAAAIILVTQCCLCVYHKFGKTGKKKKRE

SEQ ID NO: 6754 - protein, 531 aa, Symbiodinium microadriaticum
MASRGVIVTYYVHEQFRKVVEATGANWRQMQRPHDLTEEQATKYLPGLDKTACLFPASAVPVAAAILPFLLSDMENLHPRPSLILYDPFLPQGLVVARHLHIPSASLLTYTGPGVVSCQASVSLQWETNPAVQRAAQEIEQMYGVDIFEHGLVGEFYSMERNTVATFERLFAPPSSSLQKDRLSNVPFRCVGPMIASEEARISHAWASAEQLDKKLPWNTIDEARRQSKHVVYLSMGSVATSSFWGRKFGPTAESNGLQAFSGKEFVQFVLNSAFEAFRHEEDILVVAAIGPQIDALDGLPPAPDNFILQEVVPQLQLLQTCDVFITHGGANSLHEALGFALPLVVVPMFGDQPFNADALADTGAAISFKFPSETLSAPALRLAIRQMLDPGNSFRLAARDLNHEMARSGGVARAVDFILFGDDAADAHAKFEMLFFASKSPSSVSTQIRALCGLESVSQVSKVEKSADPAGPSLVRTLSSDTPTLILLDIPDSGGFYVGKMAKELDGSGVQAMIDGWKGKSLERKQLSKS

SEQ ID NO: 6755 - protein, 531 aa, Athalia rosae
MRANKVFPAIALCVVLNYFMDCGSAARILAIFPTPSISHQVVFRGLTLALNKRGHELVVITTDPVKDPTLKNYREIDLNYLYDSFGEIDFVGMRRSMNWPDMLAQLEAILHHQTRQALENPEVKKLHAPENDEKFDVVLMELLFWQALTPLVTRFNAPLIGMVSMAPSTQVHYRIGNPILSNHPSVWELDKDIHESPTLWRRLKNFVNLWKYLYYFETDFLTKQQKMAEEFFGEDIPDVRDIERNVSLILVDQQTTISPVRANLPKIIQFGGFHVSKKVQTLPKDLKKILDEATSGFVYMSLGTNVKSNLLSNETRGEFMKAFSKVPYKVLWKFEDDELPGKPDNVVIMKWTPQQAVLAHPNLKVFVYQGGLQSTEEAIHHGVPLIGLPTIGDQDMNVNKMVSLGVAKKIEITTLRSEELVEAITTIAPDESYKKRMSNLRSLLGDKPNDAMETAIWWTEHVIRHRGAPQLHSTMADEPWYRRYDMDLIAIVSAGSVIVLLAFLFISYKFLVYGIRLLTKVFVANEKKKRN

SEQ ID NO: 6756 - protein, 516 aa, Papilio xuthus
MKFFVVLLLVIIGDFVKSANILAVYPCPSISHQVVFRPITLELLKRGHKVTVVTSDPMYPKGGHENLTEIDVHDRSYAALKKYFVSHVTGSNWDLLNQVKGILDLLSVSFEELMKTKEVQDLINSKEKFDLILLESIYPQGLAISHTFKAPTILISSFGPYVDSYNIMGIPTNPILYNHMFRQRLYNLTLLDKLTEFYNQLVIHYELKKREEIENDLLKKYFGPDIPSLGVLKNYADMLFINIHPVWEGNTPVPPNVIHMGGLHMKKPKKLTQDLQQYLDASDNGVIYFSFGTNVQLSLLPQNKIEIFENVLSQLPYNVIWKRDTESVFIKSKNVKIYKWLPQADLLRHPNIKLFITQGGLQSTDEAITAGVPLLGIPMLGDQWYNVEKYVYHGIGQRLYFEELTEEKLKNAILDVAEDNRYKDNIISLRSLMLDQPQAPLNRAMWWIDYVLRHGGAKHLRAPAANITWTEYLELDLMLFIACSFLILFGFTFSLLRILVSIVSSKIKLDNKLKNE

SEQ ID NO: 6757 - protein, 514 aa, Hyposidra talaca
MYYIIVVLLWLAEQCHGANILAVMPTPSYSHQSVFKVYLESLAERGHTITVIRPTTRVFYDNKFNGNLTEIDATMSELYFSELIEDSSVFRKRGVIADSKTVTAANYIGLVHMIRDQFKLPAVKKLIEQRHRLQFDVLITEAFLDYPLVFSYLFGNLPVIQISSGHGVAENFETMGAVSRHPLYYPNMWRDRFINLNVWETINEIYMEMRLQNEFSLLAEEQTKLMAQQFGDGVPSVQNLRDRVQLLLINTHPVFDNNRPVPPSVQYMGSLHLHKKTVSPLNNYVQNFLDNSTRGVVYVSFGSSISSKDMTPEFLDMLIDTFRLLPYDVAWKMDVVPDVNNLPENVLIQHWFDQFSVLQHPNVKVFVTQGGVQSTDEAVDALVPLVGVPMMGDQFFHTNKYAELGIGRAVNTLTVNSLQLMRAIVDVATSAVYRNGLRHLRHIIHHQPITPLHKEIWYTEHVIRYGKTNNTWLKTKAANVSYSDYFMAYIIFPLITVVAMNQLQQLMRMTFFSI

SEQ ID NO: 6758 - protein, 522 aa, Bactrocera dorsalis
MGRIIYIILALAVLAFVPRLTESAKILAIFPFTGPSQYICVQLYLKSLAARGHEITSISAFPQKTPLKNFRDITLKDEYKDHDEFIITAIEEMSATKLTQLRTLFDYSIMGSLPVLKNEEFQQLLRSDEHFDLIIIEVFSQDSLYALGEHFKAPMIGVSTFGADVIVDQLVDNVSPLAYVPAPSGTNLDVMNFWQRLDNLYTNTMELLYTHLVIIPEQQRQYEKYFPNATLRLTDVRRDFSLLLLNQHYSFSWARPLVPNAIEVAGMHVENKPKKLPMDMEAFINASARGAIYFSLGSNVKSASLPKQKLQEIMTAFASLPVNVLWKFEKTDLAGKPKNVFINKWFPQMDVLAHPKVKLFITHGGMHSQIEAVHHGKPVVGMPIFYDQYLNVEKAVYKGFGVGINFRNFTSTEMRDAILEVLNNPKYTERAREISASFHDRPMNPLDTAIYWTEYVLRHKGAPQLRVAARHLNFLQRHSVDTMAVLFGIPLLLAIFITRRIYSLLLIVFLSKDRSNNKKKSE

SEQ ID NO: 6759 - protein, 552 aa, Cyprinodon variegatus
MRQSVVLVLFLLSMALEDRAAAEKVKDSAETPKLVKPDKVKDTNTTVKSSSSPKFLGNLLVIPMDGSHWVGIKALAQELGRRGHRVTVVIPEHNLRMGPGKYYDTIFYPVPYDKEHVINLLSSHKDVLEKSVQPFMEKIKARFTQIGKTSNFLHTTAESLLFNTSLIHHLAEQKFDAVLTDPMVPTGSFIARKLGVPVINLLRGIPCFMDLKAAGCPAPPSYVPRFFTGLTDKMNFKERTINTLVALLEPLLCRILYWHFDQTAYKFLGEKVGVAEILSDSDIWLHRIDFTLDSPRPLMPNTILVGGINCKLRNPLPEDLVTWISGEHGFVVFTLGSMLSELPEYITSTFLEAFRQIPQKVIWRYTGKVPGKIPENVKMMKWVPQNDLLAHPGVRAFITHAGSHGAFEGLCHAVPMLMVPVNAEQPDNAQRIASRGAGVVLDITSITTESLLQGLNEVINNPRYKENIRQLSALHNDRPMDPLDLSVYWTEYVMQHKGAKHLKAAVHDLNWFQYYCLDIVALLATVLLVTVTLIFKCLKLCFRKLGRKKKQE

SEQ ID NO: 6760 - protein, 498 aa, Danaus plexippus
MDKLLLLSCCVVASHCSNILVVFPVPERSHRVLGESIVKILLEAGHEVTWVTPFPRDIKWSKLDYIDISSALIHETETGNNDDHGPSISELRLNIQQLGSRYAGLALRHPALQELMVNTTVRFEAVVAEWYHSGLLAPLASVFDCPLVWYTPEDISWQTYGLVHGDSSLDFMASTLQSPSYSLPERLRYLWSKLCFGVRNYFHISATELPEYEACYLRAFQSRRRVLPNYEELVYQGSALLINSHPPLGHKIPLPLNAKFNIAKLLDGSKAGVIYVNLESHVTSGEVSHHVIQELIEIFGVVQQTVIWKSEEIQWSLPQNVFMMKNPPQNIILNHTNTIAYINHGQMLSIVDAINFGVPVIGIPLLEDHIVNMDSVVKRGCGIKVDYTNEFAWKVKDAVNRILKMSSYREQSNKDKLIFRNRVATPQSEVLHLMQLVLDSDGAGHLQSSTLFLSVMERHNLDIIILVLMFFWFLNRAWSLFGAYFVWGEDDSDDKKYQ

SEQ ID NO: 6761 - protein, 554 aa, Daphnia pulex
MAGITYATTTLLTASICYCLVTAATAYNILVLSPITTPSHTNVLKPLVMALADQRNHSVTYWNGLKPPSAFNSTSGNLRVLHSSPGDLVDINSDHGIRFRHRNSPFRLFFDIPQRMATYCTAVFNDPIFHRLMMLNGTADGQQQEERYDLLVIEGVFNDCALLLAKALDLPFVYFNCMSPTPWLLDAVGSPLALDHFPHPGFSYTDQMSLWQRAVNALSGVMIVYFHRWVVMPTVDRVAANILGPGRNLTPVWDIEDRYLSLLMTNSHFSINYQFPMLPAVVQIGGLYCAPPKPLPQELESFVEASGDDGFILVSFGSIVKGSQVPDGIRFLFLSTFARLSQRVIFKWEDQPGENVSIPSNVKLLPWMPQQDLLGHPKIRLFINHGGLNSKQEAVYHGVPFIALPLFADQPINAQKAQDDGYAIRLDWDTLTEEILYDAIQRILTDPRYALRMKEVSALSRDEMTSALDRAVYWIEYVIRHGGAPHLRSASRQLSLHQRGFIDVMLVVVSIAFLVAYVAICMCRRAFLLLALAARKQQHDTPTRRMMGSAKKVD

SEQ ID NO: 6762 - protein, 530 aa, Loxodonta africana
MSTKWISALLLIQLSCYVSSGTCGKVLVWPTEYSHWINIKTILDELIQRGHEVTVLTSSASILIDPNTPSAIKFEVYPTSLTKDDFEFLFMKWIRTWTYDLPKDTFWTFFSQIQEIEWEFSDFIEKLCKDIVFNKKLMMKLQESRFDVVLADVIGPCGELVAELLKIPFVYSVRFTYGYTFEKYSGGLLTPPSYVPTALSGLNDQMTFLERVKNMVYGLYFDFWFQSFKEKKWDQFYSEVLGRPTTLYETMGKAEIWLIRTYWDFEFPRPLLPHFDFVGGLHCKPADPLPKEIEEFVQSSGKHGVVVFTLGSMVSNTTEERAHMIASALAQIPQKVLWRFDGKKPDTLGPNTRLYKWIPQNDLLGHPKTKAFITHGGTNGIYEAIYHGVPMVGIPLFADQPDNIARVKAKGAAVSLDMNTMTSADLLNALKTVINDPSYKENAVRLSAIHHDQPVKPLDRAIFWVEFVMRHKGAKHLRPASLSLTWYQYHSLDVIGFLLACVAIATFLVIRCCLFGYQMFYKAGKKKKRE

SEQ ID NO: 6763 - protein, 405 aa, Branchiostoma floridae
CALLLSDSNLVDQLRTSQYSVVISDPFFPCGAILSAHLDSRVPHIAVLRLDPFFLDVKATGVPLPLSYIPFIFSDYTDGMTFLQRLQNVVLSTVAPVIARRNVNMNYNELVRRYIGEEETIQSVTSRTDLWLYRTDNVLDFPRPSMPNMVQVGGLNVRAAVPLTEDIEAFVQSSGDDGVIVVSFGSMVKTMSTERQEVFAAAFARLRQKVVWRYVGEKPAGLGNNTKLLAWLPQNDLLAHPKTRAFITHAGSNGLYEALHHGVPMVCLPLFGDQPANAARVVARGLGVKLDFSTVTSDQLYEAILLVVTNNSYRETAARLSRLHRDQPQSPMERAVWWIEHVIKHGGLPHLRARAVELPWYQYYLLDVAAFLLAGCVAVLGTVWYSCTFFCRKCCTKGGGKLKSQ

SEQ ID NO: 6764 - protein, 518 aa, Trichoplusia ni
MENLKWMLFSVLLCLYGTEAYKILAVFPLPSRSHGILGDNMIKHLLDAGHEVTYVTPYLKEKPHPNLHQVDVTDNRKIMNENTLDIKMLMNGTLSFEDPDVLFGMMFGMTEATMTNPNILELMRKGKFDVVIAEYMFIDLYSAFGPVFQCPLIWFSTIEPHWMILNLVDGPLNPAHSADYTRHRVAPFSFYERVTELWDLVVALYKTSHSYNDKVKGVYEKSVVPILKEKGIPVPDYDEVRYNGSLVLGNSNPAIGDQVPLPQNYKHIGGYHIDKNVKPLPENLQKIMDSAKNGVIYFSLGSNIKSKDLPAETKEGILEIFRGLKQTVLWKFEEVLPNTPKNVHIVQWAPQPSILAHPNLVLFITHGGLLSLTETVHFGVPVIAIPVFADQFQNAKRVESKGYGKEITLTENLHKDLKPAIDEVLGNPRYAAAAKDLSKAFHHRQTKPKDDINFWVDHVVKTRGAPHLRSIALPIPLYQRYFLDLLALVFLSLVTLILIVRRILCSLTKKTNTKVKKN

SEQ ID NO: 6765 - protein, 520 aa, Zeugodacus cucurbitae
MHLPSLILMATALLCAANVQAYRFLAVLHTGARSHHIVGSALMKELARRGHQVTVISPFPLKKPMENYVDIETPRIKAAMDSTASNLLLTVERSVIENMRNFHEMGLNMSRTFLEEANVKALLASNQTFDAVINEIFLSEALFGLSEHYNIPLIGLGTFGAHPWNTDMVGSPSPPSYVASAMLPFSDRMTLWQRVANFAYNIFERLLLDVYYLPKQAAIYKKYFPNNKRDMYEVRRNAALVLLNQHVSLSFARPYVHNQIEVGGMHINRKRSPLPVDLERFINESKHGIIYFSMGSNLRSKFLPLEKRQAILETFRGLKQRVLWKFEDPQLEGKPDNVYISEWFPQDDILAHPNVKLFITHGGLLSTTESIYHGKPFIGIPIFGDQFLNMNRAEAGGYGIRVDYTSFTKDKFKAAIERMVSDESYAKRAAAVSATYRDQPMNPLDLAVYWVEYVVRHKGAKHLHCSGQDLNFIQYHSIDTMLILFGGISLVLLLFMLLIRAVWGWLQFALARKDIKEKVH

SEQ ID NO: 6766 - protein, 541 aa, Coturnix japonica
MLSRSVSAHRKMTLRLCSPLAAWIFIILIPGLSEGGKLLVVPMVGSHWLSMKEVVQKLAERGHEVVVLKPEVSWHMGEKHKHAYTVKTYPGSTKLEELDDAFKVYLATHLKSKPFPLNILALYNISVDVFSTFFLQCKELFDSTETLQYLNQSGFDAILTDPVLICGATVANYLSLPSVFFMRGFPCNLHYEATECPSPLSYVPRLFSFNSDHMTFFQRVENTLIALLEQFYCNGYYRAAIQLSSEVLQRDVSLIDLLNSASIWLLRYDFVFEYPRPVMPNMVFIGGINCEQKKPLPKEFEAIVNASGEHGIVVFSLGSMVSEIPMKKAMEIADALGTVPQTVLWRYTGEVPPNLPKNVKLVKWLPQNDLLAHPKTRAFITHGGSHGVYEGICNAVPMVLMPLFGDQMDNAKRVESRGAGLTLNILEMTSKDISDALKAVINDKKYKENIQRLSDLHLDRPIHPLDLAVHWVEFVMRHKGAPHLRPAAHDLNWIQYHSLDVFAFLLAVVLLSLFISVKCCMFCCRRCCFKKGRKSKKSKTH

SEQ ID NO: 6767 - protein, 502 aa, Drosophila yakuba
MKRSPVSLSLLWMGYTGIFLLADSPAPVEAHHILGVFVNVHRSQLMVHLAVCRALLQKGHHLTLVTTWPLEEQEIRGNVSHIFIPWKQPAEEGSTSDLIGRLERMFKRLEHSGDLLDLPEWKTFLSNPPQTPYDLLLLGYHFNDHLLGLAAHFNCPVAIVSTQQPTGFVNSLMGNPEERWYVPQPYDGHQRSGMSACVFGIWEKFIEMMARRVLARIYSLHFPEPRYPSFETMRRSVVLALSNHHMISEGPIAPLIPSMVDIGGIVLEQQLSKTPLELPAGNRSLIIFSLGTRFTWRKSTEELVQTFTKAFSQFPDYDIYWTYDGPNGSAISLDYPHLKVAKWWPQSQLLQSGRARLFITHGGKGSLSEALFHGVPMLGLPLIGDQRANLRRMQSRNWGLTLSTHNLTHLELAKGISRMLTNSSYSETILKASQVYRDRPMNSSDLATYWIEYIVRHKGAKNLYNPARQLNMIEYHSIDMYFMVYGFLMLTIAMLRKVNRLL

SEQ ID NO: 6768 - protein, 525 aa, Danio rerio
MRTLPVPAQGLLALLCLFSFESVQAGKVLVLPVDGSHWLSMKILVEELSNRGHEMVVLVPETSILIKKSGKYSTKTYPVSFTHDDLAENLKEIQNSALEKAPKLTDIVVNFRNLLQFLTMQSKTCEGLLYNEPLMKSLREMGFDAMLTDPFLPCGTIIADSFSIPAVYFLRLIPCRLDEAAAQCPSPPSFMPRYSSGFTDKMTFPQRLVNTLLTVVEGFLCRSMYESADELASKYLQKETTYAELLGHGAVWLLRYDFAFEFPRPQMPNMVQIGGINCVKRAPLTKELEEFVNGSGEHGFVVFTLGSMVSQLPEAKAREFFEAFRQIPQRVLWRYTGPVPENAPKNVKLMKWLPQNDLLGHPKVRAFVTHGGSHGIYEGICNGVPMVMLPLFGDQGDNAQRLVSRGVAESLTIYDVTSEKLLVALKKVINDKSYKEKMMKLSAIHRDRPIEPLDLAVFWTEFVMRHKGAEHLRPAAHDLNWIQYHSLDVIGFLLLILLTVIFVTVKSCMFCFRKCFKKSQKKKKA

SEQ ID NO: 6769 - protein, 532 aa, Xenopus tropicalis
MRLLCTLEYSVYRVFALLFLGRVQLIEAEKLLAIPLDGSHWLSMRILVESLGQRGNQVVVLAPHSNIHIHPSENYILRTYPVPYSKELLKEQMVKSANDVFTKRPLLDKITNMYQRITNVTGIVFSACQHLLHSKEIMQELQESAFDAALIDPFFPCGMIVAEYLHLPSVYLLYGLPCGIDRLATQCPSPLSYVPRHFTGNTDHMSFPQRLKNALLWPVDTFLCNLLYSPYAQLASEFLHREMTILQLYSQTSVWLMKTDFVFDYPRPLMPNMVFVGGINCVGEQHLNQEFEKLVNSSGEHGFVVFSLGSMVSEIPMNKAMDIAEALKSIPQKVFWRYTGKAPPNLGENTHLVKWLPQNDLLAHPKARAFITHAGSHGIYEGICNAVPMVMMPLFGDQMDNAKRIESRGAGLTLNVLHMTPEDLSNAVRAVINNPVYKENIQRMSSLHLDRPIHPLDLAVHWVEFVMRHKGAPHLRPAAHDLNWFQYYSLDVIGFLLAVLLTALFISLKCCTFVFRRCFKRNSKKQRKSKSQ

SEQ ID NO: 6770 - protein, 713 aa, Symbiodinium microadriaticum
MVTPARKFGFIFPMASGHINPSLPVARTLVEEGQEVHYLCREQMKDAIEDTGATFHSEIEALPEMYEGRNVDIFGCLSDLQKEYGLEEDPLFVAMFKIREIMQEMMLPGILRWLEKVGVDVVVICPLMNKEACWAAQILGIPCVGIMTTAGPGSLRSATLEWMEKMGYTTERCLKERRAYQPLLEAVDRLRAKYGLEIELDEEMAPVGMSVVAKQSALTLVTTVDFLADPLSPELEKIYEEAQTEFVFVGPLLDKAGAKRAAGHKFQKEASSTQGLEPPAETAPIDPVALIRKAREAGRKVIFASMGTVITGDSPEVGWANHMSVDGVFQGLTGKELCQAAWGGLFDAFGTDSADAGPLLLVSLGPQPDALENLVAPANAACLPVMPQVDILKEGVDLFLTHGGQNSFMESLSTGSPVVVCPGFADQPVNAQKAVQLGVGLQIERPMCDLSEASQVAAKYRCDVAAALQQVHGNPEFKTKANECSSKMQSAGGVRRATDLILQDVARAFVEDWGAYGRRLPNRRTGFVSMPLLIIIDIQRPGVPIVLTRFFMNLHIGHALSGNPHLALGCTGDSNQGVQVSCGESTRRPPKKSLEAALTPFIFWISEGSCVFGLPWEMTEQGQEEIAGRQRLWSALRFQPLAGEFKTVLAGFPSSLCASFVQFYGSKATGTADMKASPNVIKIGQRVILGLQALQAFIEDHGARHTRKAQDDL

SEQ ID NO: 6771 - protein, 531 aa, Melanaphis sacchari
MLPSVFFCSVLCITTTITRASNILVFMPLPIKSHFRGFQPLFETLSNRGHNVTVVSSYPLDHSVANYTDIGPFIDKTRAKNVMDLVRMNFITSVQLKWRIGIQLSEMVMSHRNMKQFVQSNSNSYDLVMVETFGQEYAVAMGHKFNAPVINLAPAMIWTSISKWLHVPSTFSYIPDACTQPTTNMGFVERLKNTITGLMQLYVENYLYLPKTKEVMNTYLKYRNWESRPPLENMLNNVSLTLVNSHNAIGISRPYLPGIIEVGGMHIKDPKSLPKNLQTFLDAANQGVIFFSFGTLVNLNDLPKEKLKIFINVLGRLKQKVIIKWTPEDSNVKLPQNIMTGSWFPQRDILAHPNVILFITHGGLHSLEETVCNAKPVVGVPFFAEQNFNMKIVEEIGYGKLVNFFEITEESFENTIKEVLSNEMFKEKAIIQSHVYKDQPMKPLDHAVYWVEYVIRYGGAGHLKSDSIGLNDLQYFLFDVLLILLLSIGLIAWLCNFIFAKCIYLVKLSLDSCTTPSTPDTTTSQIKTLMD

SEQ ID NO: 6772 - protein, 410 aa, Epinephelus coioides
LIARGHEAVVLVPESSLLIHGSESYKTEIYQVSYTKAELDGKFAELQTGVSLKPPAITDLFIDVQRLTNFTSIQVKGCESLLINQPLMSRLKEGGFDVVLTDPFLPCGSVLGHMFSIPVVYFLRGLPCELDIKANQCPSPPSYVPVFFSGNTDIMTFPQRVKNMLMSFFELYLCKVMYASFDDLVSRYLGDNMTYKDVLSHGAIWLLRYDFVFERPKPVMPNMVFIGGINCAKKAPLPADLAEFVDGSGDDGFIIFTLGSMISNMPTEKAKQFFDAFRQIPQRVLWRYTGVVPEDIPKNVKLMKWLPQNDLLAHPKARVFTTHGGTHGIYEGICNAVPMLMFPLFGDQGDNVERMVSRGVAEQLRIYDMTTETLLAALNNIIHDKSYKEKMVTLSQIHLDRPVPPLDLAV

SEQ ID NO: 6773 - protein, 525 aa, Ceratitis capitata
MARVSLVILALVCFAFVPSRVQAAKILVVFPFTGPSQYLLVQPYLKTLAARGHEITSVSVFPQKTPIKNFRDITLKIEEADHDEIVIAAIEEMSRGKMQQLNLVKEYVLPATLSVLTNEEFQQLLRGNEHFDLIIVEVFCQEALYALGSHFKAPMIGISTFGADVVNDQLVDNVSPVSYVSAPSGQYLDCVDFWQRLDNLYINTVEWLYDLFVILPAQQRLYETYFPNVTLDLSEVRRDFSLLLLNQHYSYSWPRPLVPNAIEIAGMHVEHIPKKLPADMEAFINASPKGAIYFSLGSNVKSAYLPKEKIKAIMDAFASLPVNVLWKFEKTDLPGKPKNVFINKWFPQQDILAHPKVKLFITHGGMHSTIEVVHHGKPIVGMPVFYDQHLNIQHILKKGFGVAVNFKNFTSGELRDAILEVLNNPKYAESAREISARFHDRPMKPLDAAIYWTEYVLRHKGAPQLRVAARHLNFLQRNSVDTMAVLFGIPILLVILIGCILYKLFKAIYRNANNTKTNLKKRKNE

SEQ ID NO: 6774 - protein, 537 aa, Perigonia lusca
MTHLSLVVLLVAATFVGGTNGGNIVAFLPTPSYSHQSVFKVYLEEMARRQHVVYIIKPNISTVKFEQPTAGKGKIIEIDSTLKESSFVKLLKESRVYRKRGLVADVSTVTADNYINLVQMVANQLQLPHVRSFIEKNIVDETGRSLRFDVLITEAYIDYPLILSHLLHNLPVIQISSGHGVAENFETMGAISRHPLYFPNMWRTKFVNVKSSASSSSWNFITQLYAELKLKYEFTNLADRQSVMFRDTYGDDTPDVYTLRNNVQLLLINVHPWLDNNRPVPPSVQYLGGLHLVNVDEYSAQIINSAVKKFLDSSDKPVVYISFGSGIEVANNMDMEFFNMLVSTFDSLKTQYNFLWKYESDQHLDKIPTNVLVQKWFEQQAVLKHKNITAFVTQSGIQSIDEAIDSLVPMIGLPLMGDQAFNANKIRELKLGCVVDTVSVDTAGLVRAIKDVAENPVYRHNLRRLRHSIRNPMISPLQKATWFTEHVITRKFNSNLKPQSANTSYSQYYMCHMITSILFVVILNQLRYIIQLYEAFN

SEQ ID NO: 6775 - protein, 523 aa, Spodoptera exigua
MNGCAVLILFFALTTGSAVSAARILAVFPTPAYSHHSVYKVYVRALVERGHEVVVIKSTDKINYRDLDYRNAGYNMRYNVTEIDASLSQDYFKKLMKQAQVFRKRGLVADSSTVTADNYMGMVRMISDQFNLPAVKRLIDEQSKFDLIIAEAFIDYSLVFSHLFDDAPIVQISSGYAVAENFETMGAVSRHPVYYPNMWRDKFRDLNVWDLINELYIELKLYNEFNKLVDEQNRLLKQQFGANTPTIQELRNRVQLLFVNTHPVFDNNRPVPPSVQYLGSLHLTDKHPKSLFGTVREVLDNATNGVVYVSFGSGISTDEMESEFIEMLLRTFETLPYTVLWKYDGYLSRIPDNVFVQSWFEQYDLLHHPNVRAFVTQGGVQSTDEAIDALVPMVGMPMMGDQAFNTNKYAELGIGRVVDTATVNAFQMINAITDVAENPSYRKKLAELRHLIRHQAVSPIHKAVWYTEHVINSSKKRDGGDTLLKTKASNVNYSDYIMSYIFVPLASFTVMNHLRQLLRINLV

SEQ ID NO: 6776 - protein, 220 aa, Ooceraea biroi
MVLIETFPRTILDVFYVSLGKIAPVRVLIKVPNPEKLPAGLPENIRTFRWMPQVKVLKHPNIRAFVTHGGLMSTMEAIFCGVPMIGMPLYADQFKNVEACVTRNVSVKLDVHKMTEKDMDAALNAILHDPRYMENIRNLSQRVHDQPLRPADIANYWIEYVIKYGDDVLRSPAMDLAWWQICLIDVAACFLFCVTAIITVAMFIICFVMKMINGNHHMFL

SEQ ID NO: 6777 - protein, 399 aa, Unknown
  Description of Unknown: Actinobacteria bacterium OK074 sequence
MSGFLFVVPPLVGHINPAVGVAAELTARGHRVAWACSDPALVRRLAGEQAAVFTCAGPALGPGGAERPPDLRGPQALKFLWEYYLVPLADAMAPGVAAAIEEFRPDTVVADQQAFAGALVAERLGLPWATSATTSAEFVDPLAGLPKVTEHLDGLLAALRGRIGDPAGSADPRFSPHLVLAFSVPELVGPDAVHGEQFRYVGPSVAARPSTTGFPWEWLDEGRATVLVSLGTANTDVGARFLGECLTALRERADRVQGVIVDPGGTLAPDTGHDKDVLIVPSVPQLPLLERVDAVVCHAGDNTVCEALWHGVPLVVAPIRDDQPVIAGQVTDAGAGVRVRFGRVTAPKLGAALDAVLHEPEARAAAERIGTAFRAAGGAPAAATHLEHLATGAPKEADQ

SEQ ID NO: 6778 - protein, 551 aa, Frankliniella occidentalis
MQHASPARAAAQQSVAVLVMALFTQCVSLAAPEVKTTAVGTARQPLRILSIMTFDTMSHHIWMSALTVELAKRGHLVTSIDIHRHGENPPTLNTTIIETAFKVFDDPKDRERWFAASVVKKIGMMQSLLEEDCKRDLGSPTMQRLLDPAFTGAFDLIIFDYMSDCTLGFAHRFNYPGMLAVSPFPISPWIDDLMYNPQVPSILAHTMQPFPHPMNLWQRTWTLFLHAHYKLTVWWRRPVQDSLIKRFFGDKAPRVEQLRQHVHVALVNENPVLEAARPLPQSLIPAGGMHVKPADLGRIPSDLRKWMDEAEDGFLFVSFGSIIKGKDIDLVKKRALVHSFAALAPVRVLWKIEPDAVGEEPVAANVRVEAWAPQNDLLAHPKLRLFVSHCGGLSVQEASYHGVPMLGTPFAVDQFVNLEKVVGIGMGRGMPYKEITKERFVNEIKEMLTNPRYLKAARHTRTLIHDQKETPLERAVWWAEYVGRHRGAPHLRSPSRDLYWHQVMMLDIAALLALAVLAVLLVAFLVVNCAVYFFRSSGQRGKEPLKRTKKD

SEQ ID NO: 6779 - protein, 463 aa, Bactrocera oleae
MFALKPIVVALWMLACATNYVESAKILAVFPFSGPSQYICVQSYLQTLAVRGHEITSVSAFPQKTLLKNFRDITIHIEQSHHDEAVISAIEEMSGGKLDLLQSVRDYTTMTSLLVWETEEFQQLLRSDEQFDLIIIEVFYQEALYALGQHFKAPMIGVSTFGADIIIDQLVDNVSPVAYVPTPTGINLDRMNFWERLDNLYSNTMELLYTHLVLIPEQQRYYEKYFPNATLRLTDVRRDFSLLLLNQHYSFSWPRPLVPNAIEVAGMHIDHKPKKIPTDMEDFINASSRGAIYFSLGSNVKSAFLPKHKLQELMNAFASLPVNVLWKFEKTDLAGKPKNVFINKWFPQSDILAHPKVKLFVTHGGMHSLIEAVHHAKPVVGTPVFYDQHLNVEKAVSKGFGVAINFRNFTSTELRNAILEVLNNPTYTEKAREISASFHDRPMKPLDAAIYWTEYVLRHKGAP

SEQ ID NO: 6780 - protein, 665 aa, Anas platyrhynchos
LLLSVLGLAAGGKVLVVPVDGSHWLSMREVLEGLKAKGHEVVVVAPEVSLYIKPSKSFVMKMYPVPFTQEEMDTTFQRTGQQVFEEGTFLERIVKTYEGVKNTSAIFLSTCEHLLYNKELIRYLEESKFDAVFTDPILPCGQILAEHLSVPSVFYLQQIPCGLEFEATQCPNPPSYVPRVFTDNTDRMNFLQRVKNVIFDIPNFFLCDVVFQPYSKLASEFLQRGKLLVVPIDGSHWLSMRPIVERLRQRGHEIVIVAPEINLRIDSSVHYTMKTYSVPYTREYVEAEFKKLGYRSFTPQPFLEKFSKVANITKMFFDSCKMLLSDKELIKYLEESTFDAVLMDPFFPCGQILAEHLSIPSVYLVRGLPCSLDFHATLCPNPPSYIPRFFTRYTDRMGFLQRVVNVIVSLSNSLTCSLFYSPYDILIKEFLQKEATLLEILSHASIWLMKYDFVFEYPRPVMPNMVLIGGISCTQEKPLSKVLWRYTGKVPSNLPQNVKLVKWLPQNDLLAHPKTRAFITHGGSHGVYEGICNAVPMVLMPLFGDQMDNAKRVESRGAGLTLNILEMTSEDMSNALKTVINDKKYKENIKRLSELHLDRPIHPLDLAVHWVEFVMRHKGAPHLRPAAHDLNWIQYHSLDVIAFLLAVVLLSLFISFKCCMFCCRR

SEQ ID NO: 6781 - protein, 521 aa, Vanessa tameamea
MSKWALVLVSFLSSLYLSNAYKVLFISPLPSKSHSILGEGVLNHLSRAGHEVTYIASIIPEKPIKGVSVIDVSDTLVTFLAGMMNLKSIMDKTQSNDLFNMMPALMNMSRNTINNDGVKTLLSDKTKQFDVIIAEWMFNEVYAGFSGIFNCPLIWLSTIEPHWMVLQLVDEIPNPSYNVDSLSSNVPPLTFSQRLLELGLQIFGKLIQIFYTSGVEQEIYENHFVPHIRNRGYPVQPIEELKYNVSLVLSNSHVSMGVATRLPPNFIPIGGYHIDPVVKPLPKDLQNIMDNAKHGIIYFSMGSNLRSQHFPTEVKQELLNMFAELKQTVLWKFEEDLPNLPNNVHILKWAPQQSILAHKKCLLFITHGGLLSTTESIHFGVPIIGIPVFADQFVNVARGVKKGFAKKVDLSYTMAKDLRVAIQEMIHESRYMTKIKELSFIYHHRTVSPGQELVHWVEHVIKTGGARHLRTPALMTPWYQKVYLDLAIILLIIIIAIKYIFRYICCSSGNKVSASYKKKQN

SEQ ID NO: 6782 - protein, 528 aa, Neodiprion lecontei
MSRYFLSATLILVVGFWHYGCASRILGIFPTPSISHQVVYRGLTLALRERGHELVIVTTDPVNDPNLTNYKEIDVHSLYDIFIQDVDWIATREKDTWSNMFDGFMSKLELECEEILEHPELRKLYAPNSGEKFDLMLIEMLFFPSLMPLATRFDVPVIGMASLGLSLNMQYAVGNPIMPSHPSNWDADEKIFGELTLWQRMKNFVRTWKYLYKYWTRYMPAQQALARKYFGNDIPDISDIEKNVSLVFANQQAPITYLRPNVPKIIDIGGFHVTKKIKPLSKDLQKILDDSTQGFIYMSLGSNVKSVMLANETREEFIAAFSKLPYTVVWKFEDEFLPNKPPNVLIMKWAPQQSILAHPNLKVFIYQGGLQSTEEAISHGVPVIGFPVLADQDIHVSKMASLGVGKKLEILTVKRDELIEAIQSVVYDTSYKKRMLDLRNLLRDKPYDSMENAIWWTEHVIRHKGAPHLQSTLVDEPWYQRQDMDIVFIISAGSLVALCFTLVVFHKLLICSIRAFNKLPSSKKDKLH

SEQ ID NO: 6783 - protein, 519 aa, Daphnia pulex
MKHRSIVLPLLVIAFAVGSCFGERIVVLYPLGSKSHFYAVMPIIEKLVERGHNVTVFTPFKGITKNVKNVREVILESLAKKIDEVDIDWFAMQKQGATQFFKMMFSSIELAALACEELITNPVFRQIVETREVDLFIVDGIGNEFTYPVIDKLGVPFVLHGASSAFPATLGALGAPIDYASVPIVFMDFDDKMTFFQRLINFSTGELIKLVRDHFVFKKLDAILQREFPGVKPIVQLEGEASLLITNTHPITNWPRSLPPTIIPIAALHTRPAKQLPSVLKTFADEAKDGFVVFTLGSFVSVSSMPKETVDTFFRVFAKLPQRVIWKWEADIPENIPPNIMMVDWLPQQDLLGHPNAKLFITHGGLLGIQESIYHGVPLLGLPFGNDQRANVARAARDGWGLKLDWDKINDQDLIDAVTHLINNPSAREKVKRLSLLMRDEILPGGEMAVYWIEYVIRHGGTIHLQLAAKDMPFYQRYLVDVTLFLVLIAAVFLIIAYKLIRSLSRNCRKEISRKIKTN

SEQ ID NO: 6784 - protein, 528 aa, Peromyscus maniculatus
MIKKFSQLLVFHLALTEIVLSGNVLIWPTDGSHWLNIKILLEELIQRNHSVTVLASSETLFINSSPDAFVHFEEISVSYTKSKIDEIIEHMIALWLDHRPTPLTMWTFYKELGKLFETFYQINIEICDGVLNNPTLMAKLQDQDFNVLIADPVTICGDLVALKLGIPFVYTLRFSPAFTVERHCGKIPAPTSYVPAALSELTDQMSFGERVKNTISYSLQDYIFQSYWRRWNSYYSRVLGRPTTLCETMGKAEIWLMRTYWDFEFPRPYLPNFEFVGGLHCKPAKPLPKEMEEFVQSSGEHGVVVFSLGSMVKNLTEEKANLIALALAQIPQKVLWRYKGKIPATLGSNTRLFDWIPQNDLLGHPKTRAFITHGGTNGIYEAIYHGIPMVGVPMFADQPDNIAHMKAKGAAVEVNMNTMTSEDLLSAVRTVINDPSYKENAMRLSRIHHDQPVKPLDRAVFWIEFVMRHKGAKHLRVAAHDLSWFQYHSLDVIGFLLACVASALFLLAKSCLFVFQKFAMTGKKKKRD

SEQ ID NO: 6785 - protein, 229 aa, Anopheles sinensis
MIPVGGLQILSPKPLAEDLQKIVDGARNGFILFSLGSNARSDLLGPERIRNILTAMERLPQYQFFWKFESDQSKLPMAVPKNVFIRAWMPQNDLLAHPNIKLFITHSGLLSTQEAIWHGVPVIGFPVFADQFRNINYCVNVGIAKRLSIHNFQANELVDAVKEILEEPKYTKKMKQVSRLFRDQPETPLERAVWWCEWVLRNPEADLLQSRAVHLNKKIKEGVIVKENT

SEQ ID NO: 6786 - protein, 527 aa, Cephus cinctus
MNLRIFIIPLLTSVVATSCNGFRILAIFPFTAKSHFVMFEELSKSLARAGHRVDVVSLFPLKENFPNYTDIVKLKWDFPTLVNNISIDFVEKEFRGNIISFIATVTGNQICKNLDHPDILKIVQNPPNDPPYDAFITEIFGAHCYMIIGHQLKIPIIGVSSSELYPWGHEMIANPRNLAFVPFELLPMTPPLSYWERMKNFLLYWWSYHEFNYYTRVQDDMIRKNFGEDAPGVRELERSVSMILANSHSSVNGAKPVTAGLIEVGGLHVRDDGPELPENLQKWLDESAHGFIYFTFGSMVRIETLPKETLAILYRSFGKIAPVRVLMKIAKPQELPDGLPGNVITQAWIQQLKVLKHKNIRAFITHGGLMGTQEAIHCGVPMIGVPLFADQFVNIHNYVEKKIALFLDYKAITEEKLDAAIDAILNDPVYLKSVRAISEKFRDRPLTPAETAVYWVEYIIKHGSQALRSPALDLTWWQEALLDVYVALVLALLVTVYAIIMIVGALVRLIFGKKRGSKRASRSKKNK

SEQ ID NO: 6787 - protein, 498 aa, Strigamia maritima
MFLQAIVLLFFSHEASCSKILCLLPVGGKSHEHILIPVVEELVKANHHVTCVWPHKFPKNIDNPNFRIIAMDQIEMRETTSMQNIFNLPSASPLLFFASFTDFTIVPCETFFKSKEVQLLIKRGVQFDLVLVAGFMNECAMTISHLIANYSVILSPNIIMPWTPVTCPRPSSFVPNMMLRYTDEMTLFQRFYNSFYFIAIRAINDFHLMPVFEDIAYKYVSKSSSVDTAIDKISLILTNTDPVIITPRPTMPNVVSVGCIHCETALPVPEEFEDFINGSGDEGFILFSLGSNVQSKYLPEEIKQRFIHVFSNLKQRVIWKYEGEIDHLSTNIKATKWMPQQDILGHSKIRLFITHGGLLSLQQAVYHAVPVIGIPLFSDQKVNMARVQQLQIGRTLDFANITVENLNYSINIILQDERYPVNMKKHSRILKDEMDEPAKRAVYWLEYVIRHSGGKHLKSYAERLNWFQYFLIDLLLFLVIGCFLIVTVIRICYKTCCF

SEQ ID NO: 6788 - protein, 525 aa, Drosophila willistoni
MRLAIFASIFSLIGCVGLCSAYNFLMVLNSAGRSHFNVGHALAKGLVAKGHEITVVSVFPLKKPIPGYHDVDVPNVIKVMQGDIAALWQSIQKPLTEKLMDHYQMGFRITRGLFEDPNFQKLLVSNSTFDGVICESFYNDAHYGLAEHFKAPLIALSTGGALTFISDMVGSPAPPSFVPHIMLSFGDHMTFYERLVNVLFLAYERFLLDYYYLPKQAEIYREFFPHNKHNFYEMRRNASLVLINQHFSLGFPRPYAPNMIEVAGLHVDDNQKPLPPAIEKFINESNHGAIYFSMGSNLKSKDLPAEKIAEILQAFRGLKQRVLWKFELDDLPNKPDNVYISNWFPQTDILAHPNILAFITHGGMLSTTESIYLGKPVIGYPIFSDQFSNMAHAEQIGYGIKLDFQKLNSKDLRAAIERITSVRSYSERVQAISQRYRDQQQKPLDNAVFWVEHVVRHKGADYLKSAGQRLNWWQYHIVDVLAVISISVILTLTVLFWALWKLLSKLLNEQWPSGPPFAILGYNKK

SEQ ID NO: 6789 - protein, 522 aa, Tribolium castaneum
MVSFSLMTFMAVINACTCANILMITMGGTKSHKIPFWELARGLIPRGHNITFISAFPSDFLLPGLEEITPTSFVFYVKNFTNWDLVGAKIRGEEPVHPFDMVRYAYEACDVLLSDPETKDLLYSQQSFDLLVLDGAYPECALGFVNHYNAPFIYINTVGFYTGSLSLAGNPAPYSVTPFLARPFTDAMSLLQRTVNTVWHLLANSLHSFMVRNMIQPIVRKHFGPDVPLVYDISRNVSFILQNAHATVTYPRPYLPNVAEIACIHCKRAKALPDDLEEFIQGSGSAGFIYFSMGSSVKAANMPEYLRRMLMRVFRQLPQRVLWKYEADEEMPDLPANVKLGRWLPQQDILGHPKIRAFVTHGGLLSMFETVYHGVPVVSLPVFCDHDSNAAKAETDGYALKLDLSKITAESLVWAIRKVIHDPKYREEVKKRQFLLRDQKETPLERAVYWTEYVLRHKGATHLQSPAKNMGVVEYYLIDVALLASCCTFIVWYLMKLTLKIIVMVLSGNLSFNLFRKKIKIE

SEQ ID NO: 6790 - protein, 526 aa, Drosophila mojavensis
MSPSDRRTSLTGLALMCLLSSATAYNYLLVLPTIARSHYNVGSALAKGLAAAGHQVTLVSPFPLKTPIQNINDLPVPNILKAMSGDLDSLLKKSEKPIIQQIIGFYAMGLRITEALLKEPKIQQLRKSNQTFDAVISEVFLNEAHFGFAEHFKAPLIGLGTFGAISWNTDLVGSPSPPSYVPHALLKFSDHMSLVERVINFAFINYEYLFMTLYYLPQQEALYAKYFPDNKQNFYEMRKNTALVLLNQHVSLSFPRPYSPNMIEVGGMHINRKRQPLPQDIEDFIKGAKHGVIYFSMGSNLRSKDLPMAKREALIETFGKLNQRVLWKFEEPNLVGKPANVFISDWFPQDDILAHENVILFITHGGLLSTTESIYHGKPFVGIPIFGDQFLNMARAEQNGYGRTVHYEELTAERLLAAIQQLLQDPHAKQLVNEMSARYKDQPQLPLERAVFWVEHVSRHKGARYLRSASQDLDFVQYHNLDAMFILYGGILFVLYCLMLFIRLVWRALQQFFMGRQAAQPKQKRH

SEQ ID NO: 6791 - protein, 813 aa, Symbiodinium microadriaticum
MANESPIRFAFAFGMASGHINPSLPIARALVKLGHEVHYLSREQMRAPIEDTGAHFTNELEECPELYEGRKEDLFGATEALKLEHGLEEDPMMLSWVKLAPISLELGLPGVLRWMQRLQPQVLVFCPMLNRDAFFAAKILGIPRVPLLTTAGPGSMVSVINQFLSWSGLSMPEIIERARKFPASAEAIRRLADMGVNYEAELELSAKSPGAIGCMVHSPITVVTTCEDMQDPVPPELEAAYSSQGAKFVYVGPLLDQQGARRAAGHKFAQFAHSDTEKAGDSPKDVLEELRDARDAGRLIVLASMGTVITGDSPDFGWAVKPVESQRQGLTGKQLCQAAWSGVFDAFGAKEGDLLEKTPLILVSVGPQKDALDSVKVPPNAICKPVLPQVDLLRAGVDIFLTHGGQNSFMESLAAGVPVVVCPGFADQPANAQKAAELQVGLQVTRPVPAEGEEDAATASYTTSVAEALRRVQQEPVFRTAAAECGRKITEAGGVQRTVDILLQTGRERWKPNDRGGVDYNVDSAVTGPGSVNFATVTEKFTLNSNTFALYNCMNVMRYTIEETIVKVAHMAPAAQSTASDHDLGETAPAVFYQYLIKHANGSLMAQTSQYRLPETDINFTSFIPGSLQTDVFAMAKRQGRWEGTGWRDCRTPQKGWNISFPEKKGDNLVAIATVQDLQVAALAVLTLLAWREETVGSDGFEHAGQFSMYWSLPLGMSAGYGKHGQMTCSCDTAPSRAPWLAASAPCNPCLERILRRRRRSRRALLCSPGTSCWPATGPRHLFRPESACLQRHLSKRKVPILPRCLEMKRELS

SEQ ID NO: 6792 - protein, 693 aa, Ochotona princeps
MLGNILLWSLQLSLLGTTLGGNVLIWPMEGSHWLNVKIIIDELIRKEHNVTVLMASGALFITPTINPSLTFEIYKVPFDKERIEGVIRDFVLTWLEHRPSPSTIWRFYHEMAKVMKDFHMVSREICDGVLKNQKLMEKMKKSKFEVLLSDPVFPCGDIVALKLGIPFIYSLRFSPASTVEKHCGKVPFPPSYVPAVLSELTDQMSFTDRVRNFISYRLQDYMFEALWKSWDSYYSQALDGSHWLNIRNIVEELIQRNHSVTVLASSTTLFINSNPDSSVTFEVIPVSYNLSKLDSLIEHMIMLWLEHRPTPFTMWTFYKELGKLLHTFFQINIQICEGVLNNPQLLAKLQKNAFDVLIADPVTICGDLVALQLGIPFIYTLRFSPAATVERHCGKIPAPVSYVPAALSELTDQMTFGERVKNTISYSLQDYIFQSYWGEWNSYYSKVLGRPTTLCETMGKAEIWLMRTYWDFEFPRPYLPNFEFVGGLHCKPAKPLPEVLWRYKGKTPDTLGPNTRLYDWIPQNDLLGHPKTKAFITHGGTNGIYEAIYHGVPMVGVPMFADQPDNIAHMRAKGAAVEVNMNTMTSEDWLNALRTVINDPSYKENAMRLSRIHHDQPVKPLDRAVFWIEFVMRHKGAKHLRPAAHDLTWFQYHSLDVIGFLLACLATSIILITKCCLCVYHVFGKTGKKKKRE

SEQ ID NO: 6793 - protein, 412 aa, Blattella germanica
MLWCTQGARILGLFPFPARSHKAIFSPLLRELATRGHDVVIYSPYPEIPPVANITDVVMAELDYRDHKRKESLYTLKDQGMMGKLVVLWKMGLHTCEKVLQDKEVQGILQSTEIHFDLILIEAFFNECLLGFAHKFRAPTVHICSHGGMFWMGDYVGNPNPHAYVPDVFFDFSDKMTFQQRVWNTLAALFARAGRELWYLPQQNTIMKNYFKYEDLPSVWELQTNTSAVMLNTHVAVNYPRPLMPNLLLVGGMHIKKPGKLPQDLQRYLDDAPGGVIYFSMGTNLQSSLMPESKVKAFLGAFSRLTEQKVLWKWESDSLPGQPNNVKLAKWLPQSDILAHPNIRLFVSHGGMMSTQEAVYRGVPLVGIPIFSDQLLNIRQASAAGYALHLDYENITEESVYWAIQQVLYVPK

SEQ ID NO: 6794 - protein, 525 aa, Drosophila persimilis
MEMQTKVIVLSLICLCSGQAAKILVLFPHASESHFAVMRTLVTELASREHNVTVYTGHGLGERLENVSETIIPEYPFWSNLQKHAAPKGNLADLGRLSIPTLRKSLAVVGANALDHFLSQEPLQKLLQQPPLDFDFDVIILDYFYTEALLALGQFHQKPIVGIVSTDFGNYMEAVQESMVPAACSPIDFEHYVPSLGFSARLGNIRECISRRKQFAKDHFGAQEQLIAKHFKVKSSVPELQANQLSLLLVNSHVPLMTPRPSLQHIVPAGGLHIRGPRELPWNIKRFLEEARAGAIYLQLGNEQPCGELPKLKLEALLGFFDSRKERFIWSCHDVKTLDGLPKNVMIQHAVPQIDILAHPRVNAFIMNGDLLSLQEAIVRNVPTLGLPIFQNERQNMELAVRLGVGLKLEQENVTIASLSWAVDRLLLEPQYQITIRDVSLEFRDRPLGALASAMFWVNYVARHKGGAAIRTRGVGISSNQLHLFDLFLFYFGVALFFVGLLVGLCLVAIFFWQKKISTKNTKLN

SEQ ID NO: 6795 - protein, 517 aa, Bombyx mandarina
MMIRRLTIAIAVCFCLGVDAYKILTVFPVPGRSHGILGDAVVRHLLEAGHEVTHITPFPKKDPPPNLVQIDVAANKAAFNEDYIDIKALMTKEFNLKDKNVLFSLMNNISSSTILNENVQRLLRDQSREQFDVIIAEWMFSDLYASFHAVLDCPLIWFSTIEPHWMVLRLIDEYPNPAYTSHFQDSFEVPFTFVERMSVLSSQLTWSLSLNTWVYDLEKYIYDNNIAPIIKKNGKPVPNYDEVRYNGSLLLGNSHVSLGDAIKVPINYKAIGGYHIGGNVKELPLDLQKIMNESKHGVIYFSMGSNLKSKDLPKEIKEGLLKMFSQLKQTVLWKFEENLSPLPENVHLLKWAPQQSILAHPNCILFITHGGLLSTTEAVHFGKPIIGIPVFADQFGNVNRAVQKGIARRVDLSFTMVRDLEEAVAEMINNSRYKEKIKELSLIYHDRPVTPGAELVHWVEHVVKTRGALHLRSPALHVPFYQKLYLDLLAIVLVTSIVLRFILKNIHCNVHFKDKIQ

SEQ ID NO: 6796 - protein, 484 aa, Pteropus alecto
MLINNILLLALQISILGNTLGGNVLIWPVEGSHWLNVKIIIDELIEKEHNVTVLVASGALFITPTYNSSLTYEVYKVAFGKEKIEDVIKGFVLTWMEYRPSPSTIWKFYQEIAKVIEDFHMVSREICDGVLKNQKLMENLKKSKFEVLLSDPVFPCGDIVALKLGIPFIYSLRFSPASTVEKHCGKIPYPPSYVPAILSELTDQMSFTDRIRNFISYHLQDYIFDTLWKSWDSYYSKALGRPTTLCETMGKAEIWLMRTYWDFEFPRPYLPNFEFVGGLHCKPAQPLPKILWRYKGKKPATLGANTRLYDWIPQNDLLGHPKAKAFITHGGTNGIYEAIYHGIPMVGIPMFADQPDNIAHMKAKGAAVEVNINTMTSADLLNALRTVIDEPSYKENAMRLSRIHHDQPVKPLDRAVFWIEFVMRHKGAKHLRPAAHNLTWFQYHSLDVIGFLLACVATAIFLVTKCCLFSCRKFGKTGKKKKRE

SEQ ID NO: 6797 - protein, 553 aa, Poecilia reticulata
  MOD_RES (315)..(315): Any amino acid
  MOD_RES (521)..(521): Any amino acid
MRKAYFLVLFLLSMAVEGRGAAGKVKDSAETPKLVKASKVKETDTIPEKSGSSSGFLGNLLVVPMDGSHWVGIKAIAQEMGRRGHRVTVVIPEINIRMGPGKYYDTITYPVPYDRDYMNFVMNSHKDILEKSAQPFIEKMKKLFSQIQKITNALHTTAESLLFNASLISHLAQQNFDAVLTDPMVPTGLIVAHKLGIPTINLLRGVPCSLDMKATGCPSPPSFVPRFFTGYTDRMNFKQRVINTLVALLEPLFCRLMFWHFDQIAYDFLEEKVSVAELFAESAIWLLRIDFTLEFPRPLMPNVVLVGGINCKVRXPLPEDLASWLSGEHGFVVFTLGTMVSELPDYITSTFLDAFSQIPQKVIWRYTGKFTSRIPDNVKIMKWVPQNDLLAHPGVRAFITHAGSHGTFEGLCHGVPMVLVPLAAEQPDNAQKIASRGAGIVLDITSVTTETLLKGLNEVINDPRYKENIQKLSALHTDRPIDPLDLSVFWTEFVMQHKGAKHLRPAFHDLYWFQYHSLDVXAVLATVLLVFVALTFKCLKLCLRKLSRKKKQE

SEQ ID NO: 6798 - protein, 520 aa, Spodoptera litura
MEKIKMFWLAVCLMLACAEASKILVVFPLPSRSHGNLGDGLVKHLLNAGHEVTYITPFPYKNAPPTLRTIDVSKNFDIMPMDIMSIKSIMDSPMFLHSIGFMLYMMIDLNRHTIQLEEVNKVLTDPKEEFDLVIAEWMFTDIPAGFASVFDCPLIWLSSVEVHWMILQLVDQPTNPAYTVDIMSTYTPPLNFWQSANELWTQVKINFLQYVWLDGVQERAFNELIHPLVLKRGRKPPTFDESRYNASLLLSNAYISTAASVALPQNHKFIGGYHIDDEVKPMSAELKKIMDNAKHGVVYFSMGSNFKSKDMPEELKKSLLQMFGTLKQTVLWKFEEKMDNLPSNVHILDWAPQQAILSHPNLAVFITHGGLLSTTESVHFGVPIIGIPVFADQFLNVVKAVNKGFAQRVDLSYTMADKLREAIIEVTSNKRYAEKAKELSFIHHDRPVKPGVELVHWVNHVINTRGAPHLRSPALHVPFYQKMYLDLAVFLVILLLVGRLLVKKAYRAVLSKSKAKKKTH

SEQ ID NO: 6799 - protein, 509 aa, Spodoptera exigua
MYGRVLILVSFFIAPVFTARILAVFPTPSYSHHSVFKTYIRALAERGHDVTVIKSTNKINYNELDDCYNITEIDASLSQNYFKKLMTQASVFRKRGLVADSTTVTAHNYVGMVRMISDQFNLPNVKHFLHKKQKFNIIITEAFMDYPLVFSHLFDNAPIIQISSGYAVAENFETMGAVSRHPLYYPNLWRNKFNKLNVLETINEIYEEIRLQNEFEKLAEEQNKMLKLQFGANTPTVQQLRNRVQMLFVNTHAIFDNNRPVPPSVQYLGALHLTNKKPRPIFGIVNEILSSASNGAIYVSFGSGISTEELEPEFIEMMLSTFEALPYTVLWKYDGHLSRMPENVFVQSWFDQYNLLHHANLKAFVTQGGVQSTDEAIDAIVPLLGMPMMGDQAFNTNKYTELGIGRFVDTVSVTKQELVEAIIDVVENPTYRQQLKKLRHLIRNQIISPLHKAVWYTEHVINSTSTDSMLKTRAANVNYSDYFMSYIFVPLALFTIMNHMRQILRTNLM

SEQ ID NO: 6800 - protein, 410 aa, Branchiostoma floridae
MEGFKEYCAHLLGDSSLMDRLRASQYSVVISETFFPCGAILSAQLDIPNIAFMRLDLHFLDEKATGVPLPLSYVPSILTDFTDDMTFVQRLQNVVLSTLVPVLARLGVSSYYDELVRKYIGEKETIQSVTSRAVLWLCRTDNVLDFPRPSMPNMVQVGGLNVGANNPLAEDVEAFVKSSGDDGVIVVSFGSFVETMSAERREVFAAAFARLRQKVVWRYVGEKPIGLGNNTKLMGWLPQNDLLGHPKTRAFITHAGSHGMYEALHHGVPMVCLPLFGDQPANAARVVARGLGVTLDFSTVTADQLYQAVLHVVTNTSYRETAARLSRLHRDQPQSPMERAVWWIEHVIKHGGLPHLRARAVELPWYQYYLLDVAVFLFAVCLAVLGTVWCSCLFICRKICRKSGGKLKSQ

SEQ ID NO: 6801 - protein, 506 aa, Apis cerana
MFNRKIILREEQKGQNECYKILAIISTPSYSHQIPYQPLWLELHARGHEIVLVTTNPIENINSPNFTQIDISVNYNSLRAIDFVKLRFEKVDWIETLEKYLLSLCSSFEVQVFNSTEIQKLYAPDSNIKFDVFLTEFLYMPAMYAFAYRFNASLIGLSSLGLLSINDFVLGGAVLPSHEYLWENEGNTGINLPFYKRLHNFVKTWRLLLHLNFNIFPKEQKLAEQYFGPLPPLIDIMKNVSMIFINEADVLTPGRPILPNIVRFSSFHVSENPDPLPKNLQKFLDDAKEGFIYFSLGSNARSSTIPKEIKRIFCNVFAKLPYKVIWKYEEDLPEKPKNVYIGKWLPQQSILAHPKIKLFIYQGGVQSSEETIRFAVPVLGFPILADQDYQVRRMEALGIGKYLEITTFTEDQLKNSIYEIINNKKYKERILIIRDQIKDTPYDTVKHLAWWTEYVVRTKGAPHLRSTLALEPWYQRFDMDIVVFLAIVTYILKKTVILSSTSARVS

SEQ ID NO: 6802 - protein, 505 aa, Trichoplax adhaerens
MVFHYFTSILVLMLISCYSGSLKASEIVAVSHHTYSHAIQLVQIGQELVERGHQFTLVVGSNVDFRHDHASTIRIRRYRTILNDSFVTDCIQQFVKGKQNLSSFCITMLNDDCECLLKDRQLLKEISNGTDILITDVTFRCSVIIEDMLKNIPYHVGFSASGFQDPIVSSLYRIPTPPSYIPMMILDFSTEMTFIQRLQNFFTYISADLLFDQIMDEGNQDLWMKYTKIPSLDRNYHIPLANILIMTTSFAIEYARPITPSVKVVGPIIPRQTSNNLTVDLYNFIYSTSSPEFIVISFGSHVPNFQLDIDYELLVLKLSKLPYRIIWKYSGQPLKNQPENVKIMSWIPQNDLLSNPNCKLFVTNAGMSSILEASYYGVPMLAIPLFGDQAGNAQRVQVAGIGKVLSLSEGTVNELLPSITNVIHDPIIKENSKRIASLMQYKTEKTISGIKEAANWIEYAQLHDNAKHLRVQAFDMPWYQRDSIDIWFSLVAIIIIFYIYFFYFE

SEQ ID NO: 6803 - protein, 404 aa, Panthera tigris
  MOD_RES (235)..(241): Any amino acid
MGVVNWHGNLKQVLVGAQHKLVIYGDDFKEKEISYQVIPWLPPEDYNKGLKNNFDFFIEEALGGRYTFGKFLKFMEQVGLQCSHFLRRSDIMDSLKNENFDLVIVENFDYCPFLVAEKLGKPFVSILSSSFGAIDFGLPNPLSYVPVLDSLLTDHMDFWGRVKNFLMFFDFTMKQRQIQSAYDNTIKEHFPEGSRPVLSHLLKKAELWFVNSDFALEFARPLLPNTVYVGGLMAXXXXXXXQEFENFIAKFGDSGFVLVALGSMVSTFQSQELLREMNSAFAHLSQGVIWKYKPSHWPKDVKLAANVKIVDWLPQNDLLAHPRIRLFVTHGGMNSIMEAIQHGVPMVGIPLFGDQTENLVRVEAKKFGVSIPLKQIKEETLAVKMKQVIEDKRYGTLWACGHLG

SEQ ID NO: 6804 - protein, 430 aa, Aethina tumida
MDYQSMLDPKLNSVCQNIGGSPNPILQSPNSVPANMAGTIIKRSSGYNNPPLVYSWRFNCPSVGVASMDAYFPYHYYMGNPTHPLVTPEWSTEIEDTDNMRLTDRINSAVTNVMIIILSHLLFNPLMEDLYHKHFGPNVPSLIDMTYNVDMLLIATNPIFHDVRPLNPHTVTIGSGIHITPPKPLPEDVKTFLDNAEQGVVYFSLGSNVKGNLMLEDTKKAIYKAFSELPYKFLIKVDWVNLTVPENVKVGRWLPQQDILRHPNIKLFITQGGLQSLQEAVTNAVPLVSIPFFGDQQMNTQKIVKRGFAVKLERTNITTESMKWAIQEVITNPKYKLKAIEMQDLMYDEPMTSLERAVWWIEYVIRHKGAPHFKSNATKLPLYQYFLLDVIGVVLVSLIVVNYILYKIIKLTLRVAFRLVKGKQLKKKKE

SEQ ID NO: 6805 - protein, 527 aa, Papilio polytes
MIRIFWIILLKVFLNKMVFPIKNVLFVVLCLIICADASKILVVFPFPAGSHCNLGDGYVRHLLNAGHEVTYITPFPKTNPNPNLRQISVADNVHAVNAQALNVQALMKHEVEMDQDLLFHMTVNVTKKTFENAAVQALLNDASERFDVVIAEWMFNEIYSGIAAVFNCPLIWSFPYEPNFVGLSLIDEASNPAYSANIQFSDIPPFTFGQRVFALWFQIMHRVKYFLFYQKIETDAYESIFKSIVEKRGRQLQPYNEFKYSAAMILGNSHVSLGQAVRLPQNYVPIAGYHIDDVKPLPEDLQQIMDNAKYGVIYFSLGSNLKSKDLPEHYKKNLLKMFGELKQTVIWKFEEALPKLPKNVHILQWAPQTSILAHPNCVLFITHGGLLSTTEAVHFSVPSIGIPVFFDQNFNVDQAVRRGISLKVMLSENCHIDLKNAIQEMLGNPKYREKIKELSFVYHHRPVPPGKLLVHWVEHVVRTNGAPHYRSTALLLSWYQKMYLDLLVLVLSVLFGTIYVIKMYTGRKMQK

SEQ ID NO: 6806 - protein, 527 aa, Habropoda laboriosa
MRSNISGLLFVACVLCAARYSESARILAVVPTASYSHQIPYRPLWISLSKRGHEVVLVTPNPIENYKAPNFTQINISQTYSILKAIDFVDLRFKGQTWFDFFDERLLDISNDFAESVLNNTDLRKLYAPDSNVTFDVVLAEFLFMPATYALAHRFNAPLIGLSSLGLVAANEHALGGLVLSSHEYRWEMEANTGSNLPFFKRVWNYVTLWRSVYIIYRDLFPKQQQIAEKYFGPLPSVLDMTKNISMIFVNEPNVLTPASPKLTNMLTFSSFHIDENPKPLPKDLQKFLDSAKDGAIYFSLGSNARSADLPKELQRMFCDVFAKLPYKVVWKYEEELVGKPDNVYAGKWLPQQTILTHPNVKLFIYQGGLQSTEETVHAGVPIIGFPVLADQDYQIGRMDALGLGKRLELLTVTKDEFESAIREIITDKKYKERVLYVQRVIKDTPYDLVDNLVWWTEYVIRTNGAPHLRTNLAWQPWYQRYDMDVVVFLTIIAFLIVSNMFNLIAKLIVYVYRRYQVSTGEKQKIS

SEQ ID NO: 6807 - protein, 510 aa, Capitella teleta
MSSNMSPLIFLFLLASSADAGKILLMPVNHGSHVNFFSLVGDVLQNDGHDVKILASAAQAKHATKHGISVISAGNVPKLLESQEATNMVFENTSFPIMQLVRIARLGREICEDVLSNEQLMKDLMDEDFDLILIDGLDPLRCMYVVPYRLGVKYITLTARHDPWSAKIPALPSLEGSQGGVVLGRGSSFVQRLKNTFMVLMTSIILPPSPVTDPDLITKYAPERPQTTFSQLFHDSEMWIINMETVCLDYPRLHAFHYQFISCLNCEPAKPLERKFADFADRATQGLIVVSFGSGIDRLPRLVIDKMLEAFSSLPQKVIMRYNGDITAPSNVMLSSWLPQNDLLGHKNTRLFITHAGNNGQQEALYHAVPMLSMTVFGDQQYNAERASDHGYGLTLNAKDFSEEELLWAIQEIISNPKYTNQIKQCSRIFHSMPKSQGTLLFWVNHILEFGGSHLKPTYMDMPLWRVLMLDIIAVLLLVAFVLSMCVCLSCKRLRMWCSPSPKKGKQKKH

SEQ ID NO: 6808 - protein, 446 aa, Loxodonta africana
MSTKWISALLLIQLSCYVSSGTCGKVLVWPTEYSHWINIKTILDELIQRGHEVTVLTSSASILIDPNTPSAIKFEVYPTSLTKDDFEFLFMKWIRTWTYDLPKDTFWTFFSQIQEIEWEFSDFIEKLCKDIVFNKKLMMKLQESRFDVVLADVIGPCGRPTTLYETMGKAEIWLIRTYWDFEFPRPLLPHFDFVGGLHCKPADPLPKEIEEFVQSSGKHGVVVFTLGSMVSNTTEERAHMIASALAQIPQKVLWRFDGKKPDTLGPNTRLYKWIPQNDLLGHPKTKAFITHGGTNGIYEAIYHGVPMVGIPLFADQPDNIARVKAKGAAVSLDMNTMTSADLLNALKTVINDPSYKENAVRLSAIHHDQPVKPLDRAIFWVEFVMRHKGAKHLRPASLSLTWYQYHSLDVIGFLLACVAIATFLVIRCCLFGYQMFYKAGKKKKRE

SEQ ID NO: 6809 - protein, 530 aa, Anopheles gambiae
MGETRSPLVPFWTVLLLAIGAGVHYAHGANILALMGVPSPSHHIWNRALVNALAARGHNLIVVSPDVERKPPPNVTYIHLEKTYDTIHEGATAIDFYEMGQSSILESMRIFYDYAISMCIGILGSEGYQTIMNYPRDTKFDLVLYDFTCGPCLLAVYDRFGQPPMVGVTGFNTPPYTTDLIGGHKYYAYVPYYTLDYDSSMNFYQRFYNAALHWIDYFYRNYIFLPETDRLVREHEKANDLPYLGTMDQKMMLMLVNSHHSVDFPEPIPQNMIQVGGLQIIPSKPLPADIDRFIRAGKKGSVLFSLGTNVLSKDLGPERIKAFLQAFQQMPAYNFLWKFETDLPYDLPPNVMMKKFLPQNDILAHPHVKGFMTHGGLLSTHEATWHGVPMIGIPVIADQYRNLAKSIRAGVAEKISLWDLTTEKIRNTVLKVLESPRYRDAMKVRSELFRDQSEHPLERGVWWVEWALRHPNAKTIQSPTLELGPWRSELYDVKACLVLAVLLVVYLLHKTGKALFAKASQPGKAKKKVH

SEQ ID NO: 6810 - protein, 523 aa, Zeugodacus cucurbitae
MKCLLPLKAVLLLCLITCRFEGLFGANILAIFPFSGRSQYICVENYLKALAARRHQVTSISAFPQQKPVQNFHDVPIIYEGTYFDDFLVDGNTPKVSKWEELNWGIEFLIEPTRKVLEHPEVQKWLANGVTFDLVIVEALQQDALYALAHHFNASLIGVSSFGTDIRIDELVGNSSPLSYVPSILSTFSDHMTFDERLESLYTHIVEWVHNHYVMIPLHQKLYTKYVNKPADDFETVRKNFSLLLLNQHFSLSIPRPYVTNAIEVGGWHIDRKPKALPAEMEAFINAGTNGTIYFSLGSNLHSKNLSKEKLAIILQVLGSLPYNILWKFEAPELHGKPKNVYINKWFPQADILAHPNVKLFITHGGLLSTIEAIHYAKPIVGMSIFYDQHINVARAQVKGFGLGVDFMNLNATQLRNTILTVLTNPKYAQRAQELSRRYHDQPLKPLDMAIYWTEYVLRHNGALYMRVAAHDLNVIKYHNLDVIAVLFGLPLLTFVFLVWVGCLLFKRLAEKLCDRVVKQKQY

SEQ ID NO: 6811 - protein, 628 aa, Symbiodinium microadriaticum
MSLLIKFQHRGVAALGRSTQFAHPKPGRGGARHGCRQHRARALHMDMPYLQEAQELYQRFSDAFQVESVEGPRSTVQQAEEVQTRKVYYRIPRVSLRVQGSEASPEPQRRWPKPQLTKLSPQTFALGLRIMAPMIQPMEQQITVEGPTIAIFNVAMIGHVNPTFALVQELRRRGCKVHYFLPPVAPIRAAAIESGAVVEGYLPEDPSDFVMEKCGIDEPLIHIVPEILEDDRAEFERSVWPLAQALLCGEHVIERCRQLGVSVVLYDPFLPLGLLAATKLGIQCASLVTYPGMGSLSGLMSSLEAEGRLERAAFIRRPYGKAIQEKFGVDLSCHLLTRRQFYTKTNFVTTCEDLIAELPALGEQNWADELRREFSFSAVGCLVSSSAPHVITARSDSFIPRVKSFGHSLPLAELSDQVAKGRRIIYAALGTMALSDRWSIDLGRISAANLPYGTTGKAFCQHVWKALLAAMEELGDDFFCVLSVGKQPDALDFLGSSEAEIFELVPSNVLIRGFVPQVEMLNNYASAFISHVGFNSLQESLMAGVPLVAIPQAVDQPANAFKVEQRGWGQAFFKPMETVTSTALAEALRRVCDESGGYRQAVQCARLELAGGAPRLAESVVSMALGGC

SEQ ID NO: 6812 - protein, 537 aa, Autographa nigrisigna
MFYFNMKITLKDIVLIISAIFLFILKTESAKILAVFPTPAYSHQSVFRVYIRALAERGHEIYVIKPSTRVSYTDPLADFELRGNITEIDATLSEDYFKRLVKESSVFRKRGLISDSNTVTAHNYLGLVRMISDQFDLPKVKQFIGRRDEYQFDLLVTEAYMDYPLVFSHLFNNLPVIQISSGYAVAENFETMGAVSRHPVYYPNMWRDKFRDLNVWETINEIYMEIRLQNEFSKLADEQDKMLKDQFGRNTPSVHQLRNRVEMLFVNTHAVFDNNRPVPPSVQYLGGLHLVEQKEPSYQFQNSHRFHLGGMVKEFLDNSTRGAIYVSFGSGIVTSDMDMEFLDMFLEVFAKLPYDVLWKYDGIVPISKLPLNVLTQAWFDQYQVLKHPNVKAFVTQGGVQSTDEAIEALVPMIGLPMMGDQAFNTNKYVELGIGRALNTNTVNTEQLIDAITDVAEDPHYRKHLLQLRNMIRHQMISPLQKAIWYTEHVINNKGRTWLKTKAANVSYSDYVMVYIFVPFVTISVMNHLRQLLRINLF

SEQ ID NO: 6813 - protein, 258 aa, Haemonchus contortus
MIRYVGGFAINDPQPLSKELDDLLNKRPATILFCMGSLAQSSEMPDQLKKVFIETFTSLPNITFIWKYEESDHSLFKNTPNIYTMKWVPQTDLLADQRLSLFITHGGVNSMLESMNYGKPMIVMPLFADQLMNAKSIQRRGLGIIVEKHLLTKEILTAAIQQVLNDKSIARQCSLVKSLLKDRPRQYREDILKYTRAIIEYGRLEHLQMISRNMNVFQYLCLDVVLFELCIVLIVLFSSVWLLRRLLSRMRAPKTKNE

SEQ ID NO: 6814 - protein, 525 aa, Neodiprion lecontei
MGRELVHLLIACLHFVYSSPQPAESYNVLLATMGGTKSHTVPFVALGTILKERGHNVTLFSAFTGPAANNALREFVPPVLEAYVGNYTAEWDLVGSRFRNELPLSPWDAMRYGWEACEALLQDETSLNSLRKPEGDPRARWHVAVLDGTYPECLLAILHKENVPTIMLNTVALYTGSITRQGSPSPWSITPYFGKAFTQDMNFIRRIVNVACLMTLEVMHWVMITGYLQPILRKQLGDDVPDVRDLIADVPLTFQNSHYTVADSLPHLQNVVNVACLHCRPATELSTELELFLRRGFIFVSMGSSVHAAGMPDALREIFIAAFSTLPYNVVWKWEGGKIENLPPNVRIAAWWPQQELLGHPNLKAFVSHGGLLSLHEAAFHGAPTLVLPVFCDHDGNAAQAEKQGYALLMDLASISATALREGILKVASPKSNPYRNAAIQKSILLKDLPIKPQDLATWWVEHVAKYRGAEHVKSTSRHMTTIRYYSIDVAAFYVSLVTILVYTLKKFTLRLVVAKGNIAKMKID

SEQ ID NO: 6815 - protein, 328 aa, Ancylostoma ceylanicum
MSFLERLYNVFINGSGFILANIYEYFEQSLFESKFPGFKNLHDLIKDKTDYMLMNTNEFTESTRPTLRSIQYVGGSATPDPQPLDEEFEWIVSRGAKGAILFSLGSLVKSSDMPVAVRKAFLDAFATFTDYVILWKDDTHVNSSYPNIYFRDWVPQVDLLADGRVKLFITHGGMNSMQESLLFGIPMITVPLFADQDSNAAVAAERGFSVNLSKFSVTKEKVIDAINKVLGKDGEESTYTQKVRQAARLLKGSPEEMRRAIKRLARISGTEPPLKHLKLDLDHLNNFQYYNIDIYLLLLSIVLVHLWICARVSMRIADFFTALKKKTD

SEQ ID NO: 6816 - protein, 274 aa, Bactrocera latifrons
MDRVLEQMVPAACSPISYETYKPEVGYWNRLGVIRNCMSRRKQFIKDNWGAQESVMRKHFSQFKGVNELNIGTLQAELTILLLNSHVPLLRPRPLLLNTVAAGGMHIRPPRELPWPLRRFLDESRAGVIYMNLGNEQLCTDVPKHIMQILLNTLGKRKERVVWTCHDHTALKNLHTNIMVQHAVPQADILAHPHVHIFLMNGDLLSTQEGIMRHVPMISVPIFRNEVRNAELTVQLGVGIHLNHNNLTETALNWALQTIKEDSTYQLTIRQVAA

SEQ ID NO: 6817 - protein, 521 aa, Aedes aegypti
MFRRLDFAVLINCLLLSLCPCNGARILGVLPSAGWSHYAIGEGIMKALSRAGHEVTVIGSNSWKQAPNNYRSIELKELMFDKQGSEPDLFQYRNDPYLKVLYLLYTMIGPSLSEVILTHPKVKTLMNSGEQFDVVIVECFVSDVLYGFAQHFNAPLVVFSPFGASLWANELIGTPYPFSQIPHTFLSYTDRMSFGERFINTLLWNVDSFYYRNIFLPRQEEMYKTYFPNAMQSLPQVMKNVSLALLNQHFSLSFPHPYAPNMIEIGGIQIDEPKPLPEDLQHILDNSKHGVIYFSMGSMLKGCRFPEEKRNAFISAFSKLNETVLWKYENTSLPNKPKNVFIRKWMPQSDVLAHPNVKLFITHGGLLGSTESLYHGKPMVGVPIYGDQRLNMARAEKAGYGTHIEYENLSEETISNAIRSVLDDPSFSSNAQLISERYRDKPMTPAQLAVYWIEYVVRHRGAPQLRSAILELSFIERNLIDVYSVMMLLVGTILASLCVALRKIMRFIGLLPKRIDKIKQQ

SEQ ID NO: 6818 - protein, 534 aa, Mesocricetus auratus
MASEKWVMTVFVVQLSCAAYGFCGKVLVWPSDMSHWLNQKAILDELVDRGHEVTVLKYSTLMMDQNRQSALHFENIPQSNGEKMAENQLNEIVNLAVNVIPKLPLWQGAAKLREFFLQLTSVFEDVCRSALYNQTFMNKLRDRKYDVLITDPVIPCGELMAEVLQVPFVNTLRFSMGYIMEKHCGQLPVPLSHVPVIMAELTDNMTFTERVKNMMLSLFFEFVLQQYDFAFWDKFYSETLGRPTTFCEIIGKAEIWLIRTYWDFEFPRPYLPNFEFVGGLHCKPAKPLPKEMEEFVQSSGEHGVVVFSLGSMIKNLTEDKANLIASALAQIPQKVLWRYSGKKPATLGSNTRLFNWIPQNDLLGHPKTKAFITHGGMNGIYEAIYHGIPMVGIPLFADQPDNIAHMKAKGAALNVNLNTMTSEDLLNALRAVINEPYYKENAMRLSRIHHEQPVKPLDKAVFWIEFVMRNKGAKHLRVAAHDLTWFQYHSLDVIGFLLLCVVTLAFIIIKCCLFTCRKFCMSEKKTRVNRKKKN

SEQ ID NO: 6819 - protein, 536 aa, Monodelphis domestica
MKARISMMSEKWVPALLLLQLCCFSCGSCGKILVWPMEYSHWLNLKAMLDGLIARGHEVTVLTPSATVLVDPNNSSALHFEVFPVQTNPEDLAFFFENWITIWSYEWSKLSLLEYGANMQEKFLHYSGIIKEHCESAVLNKELMKTLKKARYEVVLSDAMCPCAELIAEILQIPFVYSLRFTMGNTYEKYCGGLPSPPSYVPVPMTALTDRMTFMDRVKNMLFTLYFDFWFQNFDEKDWNQFYSDVLGRPTTLCETMGKAEMWLIRTYWDFEFPRPYLPNFEFVGGLHCKPAKPLPEEMEKFVQSSGDHGIVVFSLGSMVKNLTDEKSNVIAAALAQIPQKVLWRYKGKKPATLGPNTKTYDWIPQNDLLGHPKTKAFITHGGTNGIYEAIYHGIPMVGVPMFADQPDNIAHMKAKGAAVEVNFNKMTTADLLNALKTVINDPSYKENAMRLSRIHHDQPVKPLDRAVFWIEFVMRHKGAKHLRPAAHDLTWYQYHSLDVIGFLLACVATVVFIVAKSCLFCCRKFGKTGKKQKRA

SEQ ID NO: 6820 - protein, 484 aa, Echinops telfairi
MLNKIFLLLFLQLSILGTTHGGKILIWPVEGSHWLNIQIIIDELIKKEHNVTVLVASGALFITPTSKSSLTFEIYKVPFGKDRIEEVIKNFVLTWLTHRPSPATIWRFYQEMAVVIQDFHTVCREICDSVLQNPKLMERLKKGNFEVLISDPVFPCGDIIALKLGIPFMYSLRFSPASTVEKHCGKVPYPPSYVPAVLSELTDQMSFADRIRNFISYHLQDYMFDTLWSSWDSYYSKALGKPTTLCETMGKAEIWLIRTYWDFEFPRPYLPNFEFVGGLHCKPAKPLPKVLWRYKGQKPATLGANTRLYDWIPQNDLLGHPKTKAFITHGGTNGLYEAIYHGIPMVGVPMFADQPDNIAHMKAKGAAVDVNMNTMTSADLLNALKAVINDPSYKENAMRLSAIHHDQPVKPLDRAVFWIEFVMRHKGAKHLRPAAHDLTWLQYHSLDVIGFLLVCVATALFLVTKCCLFSCKKLGKRGKKKKRE

SEQ ID NO: 6821 - protein, 518 aa, Drosophila simulans
MSGWKAFCLLALLSLVDSSDSLRILGLFPHPAISHFKFFHPIMRGLAEAGHSVDVISPFEDKDPPQGYKDHLLPPSNLTDTISLEDFERPFNFLFHYIEFFILHNMGKEDCNTTLHSRALTKILKNPPGYYDVILLEQFNIDCAISVAHVLQAPVIGMSSCALMPWHYERFGAPLIPSYISALFQGQSQEMSFAGRLGNWITVHSLNLLYKMFTVPAGNALIRQRFGPGLPSTEDLVRNTSLMLVNQHFSLSGPKPLPPNVIEVGGVHISPPKPLPSDLQKILDNAPKGVILISWGSQLKASSLSAARRDGIVRAIGRLEQEVIWKYENDTLPNKPPNLHIRKWLPQRDILAHPNLKVFMSHGGLMGTTEAVSSAVPIVGVPIYGDQSLNIAALVQRGMALQLELKKLDENTVYEALTKALDPSFKARAKEVASAYNNRIQGPLETAIWWVEHVAETKGAPLIQPSAVHLPRFVYYSLDVYLVVALTLLLPVITFLGLIRMCKIREPKGDRKLKLKRK

SEQ ID NO: 6822 - protein, 534 aa, Caenorhabditis brenneri
MKFSIFILLILAELCSTYKVLVFNPAFGASHSNFLGKISDILIDAGHEVTMFIPVFVDGKKHLVGSKKVEKIVRLDQDPRVYQMHKEGATEELMRKKIWTMSSDISSMLGFVGNFSKSAAYLTEHMFQQTELLEQLRQEKFDLGITESLLLGAFALFDEIGIKSVINADSTLYMSGIKNALGEPAAIAYYPGLFSPVNDKMDFLGRIKNLFGYQFGMWFSTLKYDAEVAAFPKSYKGPREWKKQLDRVAFNFVNSNQYIDYASPTLPKTVFVGGMQVNTKKSGKATLSKEWDDVLGKQKTNVLVSFGSNAFSSDMPDKFKSSFLEVFASMPDTTFIWKYEEENATLADHLPNVKLTTWMPQNDILADDRLTLFITHGGLGSSVELAYQGKPAVVIPLMADQPRNAHMLTRHGGALQLDKELLEKPEEIRKAIQTVLTNPDYKKNAERLAKILEDQPQKPKDVVLKHCDFAVQFGALETLNSEGRHLNTFQYYSLDIALAFIAVLLIVLFVLHLIIKFVFRQLKRIFLSPKKKLD

SEQ ID NO: 6823 - protein, 531 aa, Athalia rosae
MLRHSLVLIVICLIGGIIRVGDGYRILGIFPAPSISHQVVFRALMIGLKEAGHEVVVITSNPMNDPTLKNYTEIDVSFTYKDFKVNHFENRANGIHWIDWFGTGHDVFVHMTDGIFSCPQVKKLYAPNSNEKFDLVIVEMHYWPGLFTLAHRFDAPLIGISSLDIPLNAHYAIGNPILSADIMNWELDFMVSGELSFWRRLQAFFTTWRHLYWYRNEYLTIQQGIAEKHLGNGIPHIAEVENNVSLVLINCQFPITFARPYVPNVIMMGGLHLAKQDQELPKDLKKFMDDATDGFVYMSLGTNAKSALMPNQTLDAIKSAFSRLPYKVLWKYEDDFLPGKPENVFTMKWLPQQAVLAHPNLKVFVYQGGLQSTEEAITNAVPVIGLPVLADQDSNVDKMVQLGTGKKLEITKLDADEMLQAITDVASDKSYKQKMIDTRTLMNDKSHNALENAIWWVEYVIRYKGAPHLHSTAADLPWYKRQDMDMIAFVTAAFVLILNLALFISYQLWKGTMFRNVKPAEEKIRKRKKIN

SEQ ID NO: 6824 - protein, 528 aa, Apteryx mantelli
MWRYQINAGLVLLLSFWSLAEAGKLLVVPQDGSHWLSMRVVVEKLWERGHDIVAIIPEASLLMKSSENFTIKTYSVPYTQESLDRYYHSIGKNCFLNPPLLEKITILLKNLSEMTTMFSSTCRHLLYDEELMKYLQDSNFDAIMMDPVLPCGPIIAEFLSLPSVYFMRGLPCGLDYKAAQCPNPPSYVPRLFTSSSDHMTFTERVKNLLIGFSEHLLCYLLYSKYENLASEFLHRDVTVLELFSTASVWLMRYDFVFEYPRPIMPNMVYVGGINCKQKKPLPKEFEAIVNASGEHGIVVFSLGSMVSEIPMKKAIEITEALGSVPQTVLWRYTGEVPPNLPKNIKLVKWLPQNDLLAHPKTRAFITHGGSHGVYEAICNAVPMVLMPLFGDQMDNAKRIETRGAGLTLNILEMTSKDISDALHAVINDKKYKENIKRLSDLHLDRPIHPLDLAVHWVEFVMRHKGAPHLRPAAHELNWIQYHSLDVIAFLLAVVLLSMFISLKCCLFCCRRCFRKKGRASKPTKSKSH

SEQ ID NO: 6825 - protein, 554 aa, Branchiostoma floridae
MFATVVPVLRYMIILTQKTSLLLLLVLSTSMSTGFHLFLAVVAILSQHVQAADILVATSTYNSPWMDVAKIAEALASRGHVVTVLAHASQKNDLMRKWPTLQYETFGDPEKPPSVKEFSKTVPQKLAFSSSGMLGLLTFGSTLSSALLDLGEEMLSDNQLLTKLKNSHYDVVLTYAGPSCGPLVAQYLDLPLVSTMRSFPTGQDIRATGVPNPLAYVPTVTSELSDRMTFLQRLKNVLVYFAATTMGQLVVDKSYDDLAKRTIGDSFTMSAALARTDVWLYQSDLMFDFPKPMMPNMVSIAGHMAEDVKPLSEELEKFVQSSGDDGVVLVTFGSLVAAMPADIADMLAAAFARLPQKVVWRYAGTPPPSLGPNTKTMEWVPQIDLLAHPKTKAFVSHCGYNGVAEAMYHGVPLVGMPLFAEQFDNIARMVARGMAVSLDIHTVTSEEVYRAITTVISDPSFKEKANQISTHLRDQPQSPMERAVWWIEHVIKHGGLPHLRSRAPELPFYQYYLLDVIALIVAVISAVLLSCWKCCSFACNMCKKGTTITKKKVN

SEQ ID NO: 6826 - protein, 534 aa, Callorhinchus milii
MQPGGTFKIMELTSLLAVFLFLPKASGDNVLIWPVEGSHWINLRPIIDRLIERGHNVTVPVPMGTLFINYTKPSPIKFIVFEASFTSHDIESIIQNFVDFWMYKYSHSSHWEIYQHIAAMKTNVTNWNRHVCDGILKNSKLMHNLEQSNFKVLLSDPVSYCGDLVALKLGIPFIYTLRFSLASAMERLCGQLPAPPSYVPAVMSELSEKMNFTERTKNVLYLLMYDLMSIWFWNAWDLYYSEVLGEPTTFCETMGKADIWLIRTYWDFDYPRPFLPNFVFVGGIHCRPAKSLPQEMEEFVQSSGEHGIVVFTLGSMIKNLTAERADVIAAALGQIPQKVLWRYAGEKPKTLAPNTKLYDWLPQNDLLGHPKTRAFITHGGTNGIYEAIYHAVPLIGIPIFADQPDNMSHMKEKGMAVVLNFNTMTTLDLVDALNTVINDPRYKENAIRLSSIQHDQPMTPLDTAVFWIEFVMRHKGAKHLRPASHSLTWYQYHSLDVIAFLCFCLAVALYIPIKCCMYCFRRCRSKLKRKGKKD

SEQ ID NO: 6827 - protein, 526 aa, Drosophila virilis
MSHLSNKTSFIGLALLCLLSSVAAYNYLLVLPTSARSHYNVGSALAKGLAAAGHQVTLVSPFALKKPIKNINDMPLPNVLKAMGGDIDSLLKKSEQPIIQQIIGFYDMGLRITEALLKEPLVVQLRQSNQTFDAVISEVFLNEAQFGLAEHFKAPLIGLGTFGAISWNTDLVGSPSPPSYVPHALLKFSDHMTLTERVINLAFLSYEHLFMKLYYLPKQEHIYTKYFPQNKQDFYDMRKNTALVLLNQHVSLSFPRPYSPNMIEVGGMHINRKRQPLPQDIEEFIKGATHGVIYFSMGSNLKSKDLPQEKRLALIETFSKLKQRVLWKFEEPNLPGKPENVFISDWFPQDDILAHENVILFITHGGLLSTTESIYHGKPFVGIPIFGDQFLNMARAEQNGYGRTVVYEELTAERLTKAIQQLVQDPHAKQLVEGMSARYKDQPQLPLERAVYWVEHVTRHKGATYLRSASQDLNFVQYHNLDAILILYGGILFVFYCLLLLIRRVWRALQNIFMGRQQKEPKLKRN

SEQ ID NO: 6828 - protein, 421 aa, Daphnia pulex
MLNGTADGQQQEERYDLLVIEGVFNDCALLLAKALDLPFVYFNCMSPTPWLLDAVGSPLALDHFPHPGFSYTDQMSLWQRAVNALSGVMIVYFHRWVVMPTVDRVAANILGPGRNLTPVWDIEDRYLSLLMTNSHFSINYQFPMLPAVVQIGGLYCAPPKPLPQELESFVEASGDDGFILVSFGSIVKGSQVPDGIRFLFLSTFARLSQRVIFKWEDQPGENVSIPSNVKLLPWMPQQDLLGHPKIRLFINHGGLNSKQEAVYHGVPFIALPLFADQPINAQKAQDDGYAIRLDWDTLTEEILYDAIQRILTDPRYALRMKEVSALSRDEMTSALDRAVYWIEYVIRHGGAPHLRSASRQLSLHQRGFIDVMLVVVSIAFLVAYVAICMCRRAFLLLALAARKQQHDTPTRRMMGSAKKVD

SEQ ID NO: 6829 - protein, 522 aa, Ceratitis capitata
MLLRSIPGLLLLALISFSAHQRTDCAKILAIFPFPGPSQYICVQAYLKALAGRGHEVTVVSAYPQKKPLPNFRDISLEEVLNGYEETIVDVITQERNKWQELNLYYDFFTGGTLSVLKSANVQKLLQSDEHFDLVIVEALQMDAVYAFAHHYKAPIIGISTYGTDPTIDELVGNTSPISYIPLPLSELSDRMSFWQRLENLWHHLLHQLHMHFIYLPNQVAIYKEYFPNGTADILALRKSFSLVLLNQHFSISFPRPYVPNAIEVAGMHISQKPNQLPAVMEGFINASKAGAIFFSLGSNVKSKNLSKEKIDIILRVFASLPYNVLWKFEATDLPNKPQNVYIDKWFPQSDVLAHPNVKLFISHAGLLSTTEAIHHAKPLVGMPVFFDQFLNMKRIKHAGIGVSVNYKSFTYDELRGAILEVLDQPKYTQNIQQMSQLYHDRPMKPLDKAIFWTEYVLRHEGAAHMRVAAQGLNFIQYHSLDTIAVFIVGVVLAVILPVWAIYGIVSGMVMRDSGGAKLKHS

SEQ ID NO: 6830 - protein, 495 aa, Danaus plexippus
MVFPVPGKSHSILGEGYVRHLLAAGHEVTYLTPIPIKNPPDRLRQIDVSENIKYMSEELFDVKKYMYKEVNLVHLELTELFDNLCYNTFKIDSVQRFMRDKDVDFDVVIVEWLYSELGVGFSSVFNCPLVWSSSLDVHTEVLGLIDGYTNPAYTKHFFSTDYSFTFWDRVNELWRVSRLLLYKWWHIDENDKMFREIFGPAAEERGIKLPHFNDVRYNASLMLGNSHIVIGDAIALPQNYLHIGGYHIKNVLEPLPKDLQQIMDKAKNGVIYFSLGSTLQGSKIPSNVKRKFLDMFGELSQNVIWKLDGKITDLPKNVHIVDWAPQQSILAHPNCVLFITHGGLLSTLETIKYGVPIIGIPFFADQFLNVNKVVAKGFGRRVDISENTPEELRFAIREVLGNTSYRTRVKELSSLFIADSDPGQRLVQGVELVVRTNGAPHLRSVALRVPFYQKLYLDVLLLVIAIVFGLPLVIYYTCKHLLLDGTKSNLNKKRN

SEQ ID NO: 6831 - protein, 717 aa, Trichuris suis
MHTSFHMPVHFLLLLLRLCSSQSKTIGLFMNTGPYSHDAMMQHIADDLYDKRYKVFLLQIRVFNFNMTLPKSKYVHPTLRYDYSGPETLAVMQEAQAQIWHGPVPLGGGTVNLKGVYAFQKLYEVQSAACQAALKSESYLSKIKAAHLDFIVIDYVLNECALGISAILKIPRVYLSNYPLIEVYSNTFGVPSNPSYVPAVLSPTSSRMTFVQRLQNVLIHTATIFIRASLIWRSQKLLHSVGHDAELRGEERKAIFYGTPLEFLLDGPRPLSNSVKYLGCLRCSRGDEIRTSQSQSWLPDKNMIIASFGTCASATRLPKQVLNSFITAFSQLKQYKVLLQMPGIEIHNSTWPSNVVAVQWIPLLDLLRSPSVKLLISHGGMSTTVEAVNNAVPMLGIPLQGDQMYNVGRLVEKGVADVLPISGLTAELLSKKLRRMLPITANDQTLNLKQKRAIKNYRGVVNYEEDLECESLEVFLRFKNEPFQKQDNRHPDLVLLPEYRQALSTFIAKIPKILVQQMTPGLIKCPAGLPQNSRVKRTLNGLNLWACLALLWMCVRLDIFFQNKAVSSQLKRCSGRDPFSSVTFLNCSGNVDRANTSTIAASPVLFKFFLLEYVLGQHVTQAVDKRFNSRVNMERRKIVLLKKMLSTYQTFERQKMKKNMTTAPAFWIDWAARHFSNQEKREAFLVLKYTDQFFSYFSFDVLFVSQLIFIIMFLLAV

SEQ ID NO: 6832 - protein, 534 aa, Drosophila grimshawi
MKAFAALLVLLICNNWQQLHGARILCLIATPEHNNPSWTQPFFEALAERGHLLTVVSTLADPSIPGITHIPVSNDYDVIKKHYVNEMGYYNNYWDIKQVLIWYEALLGTCQSAAEIDLVKMLEKVKHKYDLIIYDATYSMECLLSKFPKFRKVPVLALSGGKLTTDLMHLVQAENTINPATIPHFISHLPREMSHWQRIQNHVLYLTESFIRWAVVKPVLNGIHKHEYASPEVQLVLLNTHPVLDHVQNIPPNVIEVGGLHIRAESEPLSFSTQEFLERSSEGIIYINLPHIDLMYGVGLRAIENMVREYRQFGFLWNVNNVKDPTLSKNFHNLRTINVRDNMQQNILAQSNIKAFLTHGDNFGLQEAIYNAVPVIVLPLLMDQFNNAQRVKERDLGIQISVGDFSVDSLSEALKQIVRDKVYSKALHQAQFNFRTRQVKPVDQAVWYAEQLIGQPKLFEHLSVPKSLEYGYFITQSLEVLVYPLLFIIIFIINFILLIWNCKSGKKKTKQHQIAKKLKRKMRSDGTENELKKD

SEQ ID NO: 6833 - protein, 566 aa, Euproctis pseudoconspersa
MLIIFVLPHIKRDAVPLTSFDFSRATRCNLWNKQFNMDLKILTLVVWAWSLAMRRNVSAARILAVFPTPSYSHQSVFKVYVEALAERGHSIVVIKPKLSQLDRDKHAHDNITVVDATLSERYLEQLFGESPIYRKRGIIADSSTVTARNYMNLAQMISRQLELPNVKKFIAANSVITGGSTISHSTFDVLITEAFMDYSLVLSHLFGNLPVIQISSGHGLAENFETMGAVSRHPIYYPNMWRFKFGDLHLYELINEIYTELRLRSEFDLLAQKQSVLMKTQFGADTPDVNQLRNNVQLLFVNVHPVVDNNRPVPPSVQYLGGLHMHGARIRKLNDYVNEVLDNSTMGLVYVSFGTSVQANNIDNEFMDVLLDCFQRLPYNVVWKFDATTTRRLMPSNVYTQTWFDQYSLLNHKNVKAFVTQGGIQSIDEAIEALVPMVGLPVMGDQAFNVNRYAELGIMRALDTATVNANQLSRTIIDVVTDIKYRNNLRNLRHNIREQIVNPVHKAVWYTEHVIESKKYNSYLLKTKAANVNYSDYLMSQLYVPLITITIMNYLQQAVRTTFFSY

SEQ ID NO: 6834 - protein, 530 aa, Mustela putorius
MVSKKWISAIVLLQLCCASCGFCGKVLVWPCDMSHWLNMRIILEKLTERGHEVTVLVSPESFIIDYSKSSTLKFEVISMPYNKEEAEENLNAFLDMAANVMPTLSQWQSAIKLQEFFVQITGKLKLICESVVYNNSFMKKLQETNYDVMVIDPELPCGELIAELLKVPFVYTLKFSIGDTVQQYCGKLPTPLSYVPVSMAGLTDRMTFLQRVKNIMFSIFINFWIHPLDTQVWDQFYSEALGRPTTLCEIMGKAEIWLIRTYWDFEFPRPYLPNFEFVGGLHCKPAKPLPKEMEEFVQSSGEDGIVVFSLGSMVKNLTDEKANLIASALAQIPQKVLWRYKGKKPATLGDNTRLYDWIPQNDLLGHPKTKAFITHGGTNGIYEAIYHGIPMVGVPMFADQPDNIAHMKAKGAAVEVDISTMTSEDLLNALRTVINEPSYKENATRLSRIHHDQPVKPLDRAVFWIEFVMRHKGAKHLRPAAHNLTWFQYHSLDVIGFLLACVAAAIFLVTKCCLFSYQKFGKTGKKKKRE

SEQ ID NO: 6835 - protein, 464 aa, Branchiostoma floridae
MPFLYSHWMVEASIGQKLVDKGHTVTVVVEEDIVEKRRKQRPDFTFETFQDDGFGSRLRQFQDDSFGMSESISAYDELRLYMKAIEGANKHCEHLLEKGGQDSDLLRKLKTAHYSVVISDPVLRCGTIVAANLGIPHVANCPDDGTFIDKMAAGVPLPLAYVPPVKLELTDRMTFLQRVENTCFFGFSTITDTVLGFPRPFMPNMVQVGGLTVRAGVPLSEDLEDFMQSSGNDGVIVVSFGSIVKTMSKEKREMFAAVFARLRQKVVWRYPESMGEKPPGLGNNTKLISWLPQNDLLAHSKTRAFVNHAGLNGVYESLYHGVPMVCFPLFGDHPGNAARVVARGLGISLDFSTVTSDQLYKAVLHVLTNSSYRETAARLSRLHRDQPQSPMELAVWWIEHVIKHGGLPHLRARAMELPWYQYYLLDVAAFLFGICSAVLGTLWYSCSFVCRKVCCKRGGKIKSQ

SEQ ID NO: 6836 - protein, 540 aa, Bactrocera oleae
  MOD_RES (137)..(137): Any amino acid
  MOD_RES (333)..(333): Any amino acid
MKYWSDDRSLIAIVIAAILVISTGMQPVSGANILGVLLSPSPSHLIVHMSIMKTLAERGHNITVVSSLKPKVNHPKIHNIIIEPTEARQKEVNDELYDLGMKKQNPIVMMMKLLRADSIMVTLQLDVVKNKKFQSIXKNKYDLVIMGYFMNNFQFIVPAKLNCPMILSWTGQPMEMVNDLVGVPHEVSYVPSVFTPHKNGEIMSFGLRLLNFVSSGLLRFATNIMDISFEAYYKELAADDTTLRTYSQMKKNVSIIFCNSHFSGGPIRPMVPGMVEIGGIQIKEKPAPLPKIIDDFLNASKKNGAVLFSLGSNMKSSSIQPETVNIIYKVLQXEHNVIWKWENLENTPGNASNILYQKWLPQDDILAHPNLKLFITHAGKGGMVEAIYHSVPMVAIPIFAEQPTNAAKIVSSGYGVLVDILNLEENKFRDAILEVLHNPIYRSNVRRFSELYRNRPLTAGETVNFWVKYVIRHHGAVHMQSPLIHLNFVQSNSLDVILAILITLYLLWKLLKFICKLLYKLVRLAIGKQNAALSNKSKKE

SEQ ID NO: 6837 - protein, 512 aa, Strigamia maritima
MKVPYLFLTIFLCSEYIEGYKVLYLFPFASKSHKNIFDALITELARRDHEVTVISELSFSQPVKNVKEIIIKKSIDFQSADIQREVFGTIGYHPIFMTFAFPMFTLPICKSFFQNSDVKKLLKKGKQFDMVIVSGFLNECALATAPLLGKYIISQSPGFLIPWNGAFVPQPPSYVPHLSLSYTSEMSFFQRLNNLFTSVSLNLVHDYYIIPTFQSEIAKHIPENPSILEARNLISLHIDSADPVLTSPRPSMPNIVSVGGIHCKKAKPLPQELEDFVQSSGDNGFIYFSLGSNAQSRFLPEKVKTSLLAAFSKLKQKVIWKYEEELKNAPSNVKVIKWAPQQDLLGHPKIKGFITHGGLLSLQETVYNAVPVVAVPILGDQHSNIARVEELKIGYKVDFNNISEVSIFEAVNEILKESYKENMMKYSAIFHDRYQQPLEQAVFWVEYVIKNDCADCLKSVGEELNFLQYFLIDVIAFISIILLFVVFGLIFLVKLVMKIANKSKLVVEKKQQ

SEQ ID NO: 6838 - protein, 277 aa, Oesophagostomum dentatum
MLMNSNEFTESTRPTLRSIQYVGGATIPEPEPLDEDFDWILSRGSKGAILFSLGSLVKPSDMPLAFREAFVDAFRAFPDYSVLWKDDIEMNFTYPNIHFREWVPQVDLLADGRVKLFITHCGMNSMQESLLFGVPMVTIPLFADQDSNAAVAAERGYSVNLNKLSITREKIIDAINAVLGKPGEESTYTQKARQAARLLKGSPKEMRRTIKKLARISGTEPPLKHLKLDLDHLNNLQYYNIDVYLVPFCILFVYLWFCINIVMRVSDYFRASKKKTD

SEQ ID NO: 6839 - protein, 741 aa, Chinchilla lanigera
MRLIMVSNILLWSLQISLLGTTLAGNILIWPMEGSHWLNVKIIIDELIKREHNVTVLVASGALFITPTSHSSLTFEIYKVSFGKERIQGVIKDFVLTWLENRPSPSTIWRFYQEMAKVIKDFHMVSREMCDGVLKNEKLMEKLKKGKFEVLLSDPVFPCGDIVALKLGIPFIYSLRFSPASNVEKHCGKVPYPPSYVPAILSELTDQMTFADRVRNFISYHLQDYMFETLWKPWDSYYSKELDGSHWLNIKVILEELTQRNHSVTVLTSSTTLFISSSPDLLVDFEEIPVSVNKSYLESLIEHMIIMWMDHKPTPLTLWAFYKELGKLLEAFFLINVQLCDRVINNLTLMARLQRGGFDVLVADPVTLCSELLALKLGIPFVYTLRFSPASTVERHCGKIPAPVSYVPAALSELTDRMTFGERVKNIFSYFLQDYIFHSHWREWDSYYSKTLGRPTTLCETMSKAEIWLIRTYWDFEFPRPYLPNFEFVGGLHCKPAKPLPPEMEEFVQSSGEDGIVVFSLGSMVKNLTEEKANLIASALAQIPQKVLWRYKGKEPATLGPNTRLLDWIPQNDLLGHPKTKAFITHGGTNGIYEAIYHGVPMVGVPMFADQPDNIAHMKAKGAAVEVNMNTMTSADLLGALRAVINDPSYKENAMRLSRIHHDQPVKPLDRAVFWIEFVMRHKGAKHLRVAAHDLSWFQYHSLDVIGFLLACLATAMLLVTKCCLFSYHTFMKAGRKMKRE

SEQ ID NO: 6840 - protein, 522 aa, Drosophila grimshawi
MYRICSLLFVLFTGQALGADILMATMGGTKSHKIPFWELAKGLINRGHNITFLSGFPADFHIDGLHEVSPASLVEYISNYTNWDLLGARMNGEMPIKPWDGLRFAFESCEAMLSDPDTMDLANRTFELAILDGAFPECLLGLIYQHRTPFMYVNTVGFYMASLSRAGNPASYAVTPNFYSRLTDTMSLYERALNTGMQIGQNILHNYVMRRTHRILRDHLGSHIPHPYDMSRNVSFILQNGHAVVSYPRPFLPNVAEVACIHCKPARPLPKDLDDFISASGASGFIYVSMGSSVKAANMPESLRRMLVKTFARLPYNVLWKYEGNEADMQDLTPNVKLSRWLPQQDILGHSQLRAFVTHGGLLSMFETVYHGVPVVTMPVFCDHDVNSAKAEVDGYAIKLDLETLSTNQLYKAIMKVIHDPRYRSAARYRQNLLLDQRSTALETSIYWTEYVLRHNGAYHLQSPARDLSWWQYYLLDVVALYLVALCALVLILKRLDIRSDKTRSQHFPNILPATKKKSKKL

SEQ ID NO: 6841 - protein, 433 aa, Tribolium castaneum
MNRERKKQLLSLNDHSVFHTVHFLTNMGYAVTEEFYRNENVQKLLKSQEHFDLIILAQFVNEGLVGLAHHFNAPFVLMSSMPLFAWSKFFLTHPAPSSYVPNLLTPYSGHMNFWQRLCNSIYDVYSILYHQWVILPKHNQLIKKHIRGEPDVHNLLNNASLLLVNSHVSANEPTVQIPNVVEMGGMHLEEPKKLPEDLQKFLDGSKDGVIVFSMGSNLKSSDLPRDKRDAILRAFSKLKQNVLWKWEEEELPGQPKNVKLMKWMPQTDILAHPNVKAFVTHGGLLSTMESIYRGVPTIGIPIFSDQKTNMEIAVSYGYALLLPLQELTEEKLSSALDEILSNPKYRENVLKRSKIMKDRPIKPLDNAIYWIEYVIRHQGAPHLRYPGMDLNWFQRNLLDVGAFATIALLLILALIRLIVKLIFNKKVTKEKIN

SEQ ID NO: 6842 - protein, 250 aa, Papilio polytes
MILIILGENLIQEYFDLKNIMDNAKHGVIYFSLGSNLKSKDFPERMLKDLLKLFGNLQQTVVWKFEESLPNKPANVHILKWAPQQSILGFSAHPNCILFITHGGMLSVTEAVHFSVPFVGLPVFYDQNFNVAKSVQRGIAKKVALSMNLAEDLRDAIQEMLNNNTYNEAMKETSFVYHDRVPPGKELVHWIEHVVRTNGASHYRSTALLLSWYQKMYLDFIIMIFGFVCLFVYLIKYLCNKSKVQKIKSS

SEQ ID NO: 6843 - protein, 431 aa, Camponotus floridanus
MGSTAKIIFCMMCSSCIITSLLEAARILAIISIPSYSHQIGYQPLWTALSRRGHKVVVLTTNPVNEPNITNLTEVDFHYNYRLLKDLNHVKMMEHDTWINVERNLLFNVGNELTEDIYKHPEVRKMYAPDSDQKFDAVIIEVIKTPGLYALAHRFNAPLIGISSVGLYSHIYYLLGAPVLPSHPSNWEMKEVTGFNLSLWQRLKNVIEQWYHIYCVLNHFFPQQQAIAEKYLGKNIPNIVDMERNISIIFHHQQEALSFIRPKTPNVIVFGNSHVSKNTSALPKNLNKFLVDAPNGFIYMSLGTNAHMSHFSKHVLKAFCDIFASLSTKVVWKLDEELTNKSDNIYTAKWLPQQSLLAHPKIRLFIYQGGLQSTEEAVYNAVPLIGLPILADQYTNVNKMVSLGVAKYLNYRNISTEIVNSSITDLLNDKR

SEQ ID NO: 6844 - protein, 522 aa, Anopheles gambiae
MLKWTAVAVALLAALYAAKTPVEGAKILAVFPTSSRSHYIVGSALMKELARRGHEVSVINPFPQKKPLKNYRDIDVSGSEELVKDLVPNMFEMADQSVWESITMTYKFGQMLANYTLMHPNVAKLIKSNEKFDLIIMESFLNDAHLGFAHHFKAPCVALSTFGASRWTNDMVGTPSPLSYVPHPFLSFTDRMSFVQRIGNTLMTLMDTVLGQVLDLPVQSAMYEAAFPDPKPPLEELRRHAVSLVLLNNHFSLSYPRPYVPNMVEVGGMHVNRKPNPLPEDIQRVLDGAEHGVIYFSMGSNIQSSQLPVAKREAILRVFSRLKQTVLWKWEDETLPNRPANVIVKAWWPQDDVLAHPNVRLFITHGGLLSTTESLYHGVPVIGIPVFGDQYLNMAKAERTGYGLLLPYQDISEERLAHAIDRILREPSFKTVAQSISARYRDQPQEPLELAAFWVEYVIRHGGAEHLKSAGQELGFLQYHGVDVLVTIVGGPILFVYLLSKLLCGGRSKKNASTVNAKKKRN

SEQ ID NO: 6845 - protein, 1002 aa, Caenorhabditis briggsae
MRVLLYCFAVILLECFIVGSAKILVYCPSISKSHVILCAKYADVLHNAAHDTVLFIPSYSSALNNFDGAKHANVWRLHNVTHAYDAKLDSLANVMEDSHIGFLDRLTYDVDFWMEMCEDLARQHHRMQHLIDYGFDLALFNDIDPCNSAIIRSLNISKTVLLSSEAIMDKIAWDLGLPMLPSYVPSIEENPNHDRMNFLERMSNAYKYFQSLVVHYLQERRVLHIFRKYIADDFPPIMEMLKNVSLVFVNTDETFDIARSYSQKFVYVGMLGAENSANETLPKKLDEYFSKGKAGSIFVSFGTVTPFRALTQQVQQSVYNAVQKLPHYHFVIKTALDDISTAELFADVPNVDLVDWVPQSAILNHPNLKVFVSHGGMNSVLETMYHGIPMVIMPVFTDQFRNGKNVERRGAGKMVLRHLVVNETFFDVINEVLTDESYTTCAKRVSKLMKSRPFTSEERVTKWVDYVLDHETSEHFNLEINNLTLIQQYYIDILFVYTILPLFSLAKILTYCPSISKSHVLVCAKYADALHNAGHDSVLFIPTYAEALNTFDGAKHAKVWRMLNVTAAYDTKFDSYASIMEDTHIGFLDRMLNDVYFWMDMCEDILKQFHRLQYLADYKFDIGIFNDVDPCNPAIVKALNISKTILLSTEPLMDKIAWDLGLPILPSYVPSMEENPNHDRMGFFERMSNAYKYFQSIVIHYLQDWKMANLFRNYISPDFPSIMEIIRNVSVVFVNTDEMFDITRSYSQKFVFVGMLEAEKSKNETLPEKLNEYFSKGKLGSVFVSFGTVTPFRVLPERIQLSVFNAIQKLPDYHFVVKTVIDDTTTAELFAGVPNVDLVNWVPQTAILNHPNLKMFVSHGGMNSVLETMHHGIPMVIMPVFTDQFRNGKNVERRGAGKMVLRQTVANETFYETMNEVLTDERYTKGAKRTSQLMKNRPFTPEERVSKWVDFIMTHDTSEQFHLESNSFTFIEHNQLDIFFVFILLPLITFFVYRRFLKRKVN

SEQ ID NO: 6846 - protein, 524 aa, Spodoptera litura
MALAIFLLLGLLLSSSCEAYKALVVFGMPSTSHFHLGNGVVRNLLKDGHEVTYITPIEYKNAQPNLRQIDVSSNFDVLPTYQINLKHLMEAPTPSGHRKFVKLMLINLVVKTLEHENVQRLLNDTNEHFDVVIVEHMMADLSASYATIFDCPLIWVSPVEVNALSIGLIDVLPNPAYTTDAMALYTAPFTFLERLEELWMRISDSYNDYMVYEPTEEAEYQRLIVPQLQKRGRQAPPYSEVRYNATLVLGNSHVSTGIALGLPQNYKSIGGYHIEEEVKPLPEDLEKIMMNSKNGVIYFSMGSNLKSKDWPEEIKRDLLKLFGELKQTVIWKFEEELPNVPKNVHILKWAPQPSILAHPKCVLFITHGGLLSTTETIHYGVPTIAIPVFGDQFINVKKAVARGYALEVKLSHSIAAELKVAIQEMLNNPKYRQRVKELSYIYHDRPVKPGAELRHWVQHVVNTRGAPHLRSPALQVPLYQRLYLDLAALLLVVILVLKVLLRNLYHRIRPKKTNVNIKKKDKKN

SEQ ID NO: 6847 - protein, 538 aa, Ooceraea biroi
MRLITGISPIIAALWVLVTVNAAHSKRLLIITPAPSYSHQIVFRALCLALNKRGHEIVVLTPNILNDSSLINYTEIDFGFEYEKIDDTDLSQTRWNLTQLGGLKTRLLRLGHDIAEDVLSHPDLVKYYANNTNEHFDAVIAEMIMTPAIYMLAHRFNAPLIGIMSMDLQNCHRFNLGSPVLPSHPSNWELENFTGLNLPFWKRLVNYVNTWWSIHSWFNNFANKQQQIAEKYFGKDIPHIIDIAKNMSLVLINQEPVLAYARPEIPNIVHFSGLHIAKTPPPLPKNLKSFLDGATNGFVYMSLGTNVKSKFLPKGMLETFTNAFADLPYRVLWKFENDSFHVPANVFISKWIPQQGVLAHPNIRLFIYQGGLQSTEEAVHYAVPLIGIPFVFDQMYQVMKMVSLRVAKHLDIVQLTTPELRDAVLEVAGDRRYKDRMAALRVLTKDKPYDSLENVIWWIEYVMRHNGASHLRFDGVDSAWYQQCDLDLIVFLTTTVFVTLCAFLSLAGWGLMQLYKRCDKNNACEQLQTFTNGKVKAA

SEQ ID NO: 6848 - protein, 420 aa, Tribolium castaneum
MKTAASLLVLFLISTYGANSAKILGVFPVPGRSHYILGSSLMKALAEKGHDVTVISCFEEQNPPKNGTYRDIVITGAVDEMTKQMAKMNMFDRESTNPFAGAVFMSFRLPAMTETTLKHENVQKLINSNEKFDAVIVEFASEALYALSTHFGAPLVTFSATRASHWINPLVGNPSPPSYIPDIMLDFSVLMTLYERLVNSLVYVFNELLLNFVVYPKHNELMKKYIPNAPSHISEVLYNHSIVLVNSHPSVNRPVPYVPSMVDIGGFHIKPPKKLPQDLQEFLDSAKHGVIYFSLGSNLKSAQLPLEKRNALLQTFAKLKQKILWKWEDEDLPGKPPNVKVAKWLPQQDILAHPNVKLFITHGGQSSTTETIYHGVPILGIPIFGDQKINAKSVARDGCGLYVAYSEITEEKLTESILDF

SEQ ID NO: 6849 - protein, 322 aa, Blattella germanica
MKVLTILLLLVAYGEGAKILALLGVVSRSHHIFNKALTHALAERGHQITVLSPDKDEDVPNVTYLQIEGLYKTKDGFNYEQFVKQSTLALAFSTFDWVGGVCEKELESIAVQNLMKSTENYDLIITEATFSECLFGFIPKFGSPPVVAISGFGIPSWLSETVGTPNTPSYIPNSFLPYTEHMSFFERMYNTIVTTIMSFLYTKIHLPKMEALASKITSTNSMKFESDKLQVLPSNVKIGKWLPQSDILGHQKIRAFISHCGKMSTTESLYRGVPVIGVPFLADQWLNLQQMMAKGVAVKLDFMTLTKESVLSSVLEILNNKR

SEQ ID NO: 6850 - protein, 523 aa, Agrotis segetum
MNGRFVSLSAIFFFALLIEGGAPARILAVFPTPAYSHHSVFKVYIRALVERGHEVVVIKSTDRISYIDDNANDYDDNDNIRRNITEIDASLSQEYFKRLMKQAGVFRKRGLVADSSTVTAHNYLGMVRMISDQFSLPVVKRFIEQRHKFDVLVTEAFIDYPLVFSHLLGDLPVIQISSGYAVAENFETMGAVSRHPVYYPNLWRDKFAELNVWDMINEIYVELRLHNEFSKLADEQNRLLKQQFGADTPTVQELRNRVQLLFVNTHPVFDNNRPVPPSVQYLGGLHLVDKHPKPLFGMVGEILDNATAGAIYVSFGSGISTDEMETEFIEMLLKTFEALPYMVLWKYDGLLTRTPSNVFIQSWFDQYDLLHHTNLRAFVTQGGVQSTDEAIDAIVPMVGMPMMGDQAFNTNKYVELGIGRVVDTVNVNAFQLTEAIRDTAENPKYRTRLNELRHFIRHQAVSPMHKAVWYTEHVINHTGRGTMLKTKAANVNYSDYVMSYIFVPLATFTVMNHLRQLLRINIL

SEQ ID NO: 6851 - protein, 522 aa, Nilaparvata lugens
MQNPLLFVLLYIGSIECANILALVPVNSRSHFIVMEPLFKALASRGHQITVVSPFPQKKPLPNYTDIDISKWFPSKGKSFSIDFIKSNAGLQGLLCFKAIAGIGDVTCDVTYSDQRVSKLYNSTGKFDLVITEIFSSDCFVLFAEKFDVPLISFVTSVSLPWSNDRIGNPDNPSYIVNYINDFAHQMSFYERAINTATLIYIKLINYYHADLAHRKTVNKFFGDEAPEFHEVYNRRTALIFVNSHYTVNQPRPMVPNFVEVGGIHLQQSEPLPKDLQDMLDKAKDGFILFSMGTLVNCTTFSDHVLSSFMNTFITFGNLLVLWKYDGKLPNQPKNVITRKWMPQKDILVHKNVKMFITHGGLSSTLEAVNAGVPVLGIPMFGDQPANIMNLVRRGAGISIDYDDITTEKLTSSIREIIEDKSYKENAVKLSTLFKDRPQSAIDSAIFWTEHVLRHKGALHMRSAATDMPLYKLLLLDVTLIFLAIIIVICAGFYKITNYFLGLATSTKLREKSTTKIRAKRD

SEQ ID NO: 6852 - protein, 532 aa, Caenorhabditis brenneri
MISTRTVSFLSVSTVLCCLSSVSSLNILVHSPAYAASHTNFMARLADTLSEAGHDVTFLVPIAIDERRDKLGVKTTKDVIIVEQDEEMKSKLKPSNGSIEFLWIIDMDSSSIDTMLSWYNEIMILTCENFMRNKKVIADLKTRHFDVAIAEPFTICGLGLFEELNIKKTILVSSCAHYDFMLPHIGEPEDFSSVPTLSSKVGEEMSMTEKWENYRLVAETKASLAKLFDAETRIYREEFGKEVPDWKELMASASLYFTNSNPFIDYPRASIQKTVPVGGITVDLEKIKSEKLDEEWEEVLNRREKTLLISFGSNVPSAKMPAAWKAGIFNTVKSMPNVTFIWKYESDDVSFASEVNNIHFSKWVPQTALLGDRRLSGFLTHGGLGSTNELAHCGKPAVMVPIYGDQTRNANMLARHGSVIVLHKKELANEKLVKEAVHAILYDKKFMENAERIAEMLANQPTTPKQTVVKYTEFVAKYGPFPQMDPYARKLNYFQKTFLDIYITVFVGFLAFLISFIVLIRFVLSFTKLKKE

SEQ ID NO: 6853 - protein, 518 aa, Galleria mellonella
MKVLSFLFFAIVASSLCDAYRILVLFMVPGKSHGILGDGVVRHLLEAGHEVTYITPFPQKNPHPNLQQVDISKNAELMDEKMFDFKTILNNEAIFRNPIKMIQVMSGLFEATIQNPNVVKILNDTNQRFDAVISEWMFNDAYSGLATIFDCPFIWFSSIEPHGIILSLIDESTNPAYVPDSMSSTIPPFNFKERVSGLFAQLFGAALRFFYTDGIDGKQFYKIIGPYLTLRGKTIPSYYDVQYNTSLILGNSHVSLGQATRLPQNYKPIAGYHIKSDVEPLPEDLKKLLDNANNGLIYFSMGSNLKSKYLPDELKRGFLKIFRELKQTVLWKFEEPLPNLPKNVHIVQWAPQPSILAHPNCVLFITHGGLLSTTEAVHFGKPIIGIPVFGDQFTNIERAVNRGFAVKVTLSYEMVDELKSAIDEVLSNPKYKNRVRELSAIYHDRPVSPGKELVHWVEHVVRTRGAPHLRSPALHVPFYQKFYLDLLGLIVVAIIVIVTVIKLVIRSKKKEDLTKKNK

SEQ ID NO: 6854 - protein, 529 aa, Symbiodinium microadriaticum
MAKAHTFAFVFPMASGHINPSLGVARCLVERGHSVHYMCRPQMQAAIDDTGAKFHSEIDVQPELYVGREPDMIGAIASLQNEYGLTSQGYVRGRMLLKEIMSEMMLPGTLRWLQEIGADVVVCDPLINLEASLAAQLAGLPCASILTIAGPGAGQPAWQNILDAAGLTVEQMLEQRRQFQPLRECLQRLNARGLPLGLGDTLKPLGLLPAISLSQLTIVTTCEFLADPYPADMREAYDGAGANFAFVGPLLDKPGAKRAAGLRFDASLHKDNEHTASSEQDPVELVRDARKAGRKVVLASLGTMVTGDNNELGWRARPVVDGEPRGLTGKELCQAAWAGVFDAFGSDSSAAPLILVALGPQPDALDEMTVPPNAFCAPALPQVDVLRAGVDVFLQHGGQNSFMEALSTSVPMVVCPGFGDQIENAAKAESLGVGLKVDRPMGPVDKAASQAAAYREAAASSLRKVLSEPSYKDRALECARKLEAAGGVPRATELLLKLTEDKAPKAEEGKGQFPEAVANHAASVAAAGA

SEQ ID NO: 6855 - protein, 229 aa, Dendroctonus ponderosae
MGSSVKASNLPDYFRALLMIVFRNLPQRVLWKYEGDDLTDLPSNVLLGKWLPQQDVLGHPKLKAFVTHGGLLSVFETVYHGVPVVSLPVFCDHDANAAKAEADGYAIKLDLFTITPEGLLRAIKTVIRDPRYKTQVKHRQKLLLDQSEIPLEKAVYWTEYVLRHKGAVHLQSPSRHMGVIDYYSLDVVVFLALVLIGIYYTTKKLLRLMRILPKDEVSIDLPRKNIKVE

SEQ ID NO: 6856 - protein, 513 aa, Branchiostoma floridae
MGFLTPRSSAEKVLLVPPPVGDSHWMAMAKIGRALVDKGHTVAVVIPQDLMVKRRAEWPDFQFEAFQDQGTHVRLKEIQEKGLSTAGKLSIFEFANLFYAMSGDLMKHCSLLLGDSKLEHQLRASQYSVVISDPIFPCGAILSAHLDIRVPHIAVLRGDIYFLDEKATGVPIPLSYVPSIVTDLTDDMTFGQRVQNVIVSTLLPSVAQSIVSSAFDGLVRTFVGEEETIQSVTSRTDLWLYQTDDVLDFPRPSMPNMVQVGGLNVGEAAPLTKDMEAFVQSSGDDGVIVVSFGSMVKTMSTERLEVFASSFARLRQKVVWRYVGEKPTGLGNNTRLLALLPQNDLLAHPKTRAFITHAGSNGMYEALHHGVPMVCLPLFSDQPANAARVVARGLGVKLDFSTVTSDQLYQAILHVVTNTSYQETAARLSRLDHDQPQSPMERAVWWIEHVIKHGRLPHLRARAVELPWYQYYLLDVAAFLLTVCAAVLGTVWYSCSFICGKICCKSGAKLKSQ

SEQ ID NO: 6857 - protein, 406 aa, Ancylostoma duodenale
MGQSHINFIGNVADTLREDGHNVTLLIVEFDPDFKTSTGTRLVENIIRYSSPYHNSADWRTLTFKQGVVFNSIFGLNFIDLTKMQIYAYRVCKGFILANIYEYFEQSLFESKFPGFKNLHGLIKEKTDYMLMNTNEFTESTRPTLRSIQYVGGSATRDPQPLNEEFEWIVSRGSKGAILFSLGSLVKPSDMPVAVRKAFMDAFRTFTDYVILWKDDTQLNSSYPNIYFRDWVPQVDLLADGRVKLFITHGGMNSMQESLLFGVPMITVPLFADQDSNAAVAAERGFSVNLSKFAVTKEKVVDAINEVLGKDGEESAYTQKVRQAARLLKGSPQEMRRTIKRLARISGTEPPLKHLKLDIDHLNNFQYYNIDIYLLLLSIVLVHLWICASLSMQMAEFFTALKKKTD

SEQ ID NO: 6858 - protein, 818 aa, Branchiostoma floridae
MGIGPKLRCATLLLVFLGFLIRHRSSAEKVLLVHPTFYNSHWMNMAKIGRALVDKGHTVTVVVSEDIVEKRRAEWPDFQFEVFQDQGTQTRLREDHAHTTARTMSHLELIEEFVPGEGDLIKHCDLLLGDSKLEHRLRTSQYSVVISDHVFPCGAILSAHLDVRVPHIAVMRGDPLFLDETSTGVPVPPSYVPSLVTDFTDDMTFGQRVQNAIVSTLLPVLARRAAGSRYDGLVRSYVSEEETIQSVTSRTDLWLYRTDNVLDFPRPSMPNMVQVGGLNVRVVAPLTEIKRSNMGIGPKLRSSTILLVFLGFLIRSSAEKVLMVPPPCYHSHWMTLAKLGRALVDKGHTVTVVASEDIVEKRRAEWPDFQFEAFQDQGTQARIMELQDKAYSLVEILSVFEMREEIVAEFGELIKHCDLLLGDGKLQNRLRTSQYSVVITDPIFDCGAILSAHLDAPHVAVLRGDPFLDETSTGVPIPPSYVPSLGTDFTDDMTFGQRVQNVALSTFLSVVTRQDLSRAFDGLVRTYVGENETIQSVTSRTDLWLYRTDNVLDFPRPRMPNMVQVGGLNVLEAAPLAEDMEAFVQSSGDDGMIVVSFGSMFKTMSTEKQEVFAAAFARLRQKVVWRYVGEKPTGLGNNTKLLAWLPQNDLLAHPKTRAFITHAGSNGLYEALHHGVPMVCLPLFSDQPANAARVVARGLGVKLDFSTVTSDQLYQAVLHVVTNTSYRETAARLSRLHRDQPQSPMERAVWWIEHVIKHGRLPHLRARAVELPWYQYYLLDVSAFLLAVCAAVLGTVWYSCSFFCRKICCKSVGKLKSQ

SEQ ID NO: 6859 - protein, 703 aa, Operophtera brumata
MRLVAPHIEKRSRTPPSFEELKYNSSLVFGNSHVSMGQATRLPQIYKPVGGYHIEDTLKPLPEDLKKLMDEAKHGVIYFSMGSNLKSKDLPEQLKKDLLKVFGTLKQTVLWKFEEVLPDLPKNVHILKWAPQQSILCLLSTTESIHTATPIIGIPVFADQFINVRRAVSKGFAKQVSLSYTMAGELKEAIEDILTDPKYSQKVKELSYIYHDRPVKPGVELVHWVEHVIKTGGAPHLRSPALMVPWYQKIYLDLAALLLIALYILIKVLKLVKPLIFRKNVMLKLLVTTVLLSLCACDAFKILVIFPIPGKSHGILEDTMNIKAIMDKELNMKDYNFVQQLMVNISTSTIQDANVQRLLQDPKQNFDLVLGEWLFSEVYSTLAALYDCPFIWFSTLEPHWQITRLIDEHLNPAYNADILSDASLPYSFAERVNQLWVQIQGVLRYNVVPILRARGKVVPAYEDLVANSSLVLGNSHVSLGLAPRLPQSYKPIGGYHIDSKPSPLPENLQKLMDNSKHGVIYFSMGSNLKSKDIPLNLKQGFLRIFRGLKQTILWKFEEVLPDLPKNVHILTWAPQQSILAHPNCVLFITHGGLLSTTEAVHYGKPIIGIPVFADQFTNVQRAAEKGFGKRVELSYTMDAELKVQIDEILGACALDGTRDQDSRRAASTLPGTATALVPEDVSRSSGFSDTSYCDSDFTAGQNI

SEQ ID NO: 6860 - protein, 518 aa, Nestor notabilis
LVLFLSFWSLAEGGKLLVMPQDGSHWLSMRLVLEKLWERGHEVVAVIPDAALLLKSSQSFTIKTYSVPYTQEFVDNAYNSIGESSFKNPSLLDRIALFSNLSELTNMYSTSCRHLLYDEELMKYLQDSKFDAIMMDPVLPCGPIIAEHLSLPSVYFMRGLPCTLDYKATQCPSPSSYVPKTFAYTSDHMTFAERVNNFLLGISEHVLCDLFYLNYKNLASEFLRREVTMLQLFSQASVYLMRYDFVFEYPRPIMPNMVYVGGINCKQKQPLSKEFEAIVNASGEHGIVVFSLGSMVSEIPIKRAKEIADALGTVPQTVLWRYTGEVPPNLPKNVKLVKWLPQNDLLAHPKTRAFITHGGSHGIYEGICNAVPMVLMPLFGDQMDNAKRIESRGAGLTLNILEMTTKDISTALQAVINDKKYKENIQHLSDLHLDRPIHPMDLAVHWVEFVMRHKGAPHLRPAAHDLNWIQYHSLDVIAFLLVVVLLSLFISLKCCQFCCRRCCCKKGRTRKPTKSKSH

SEQ ID NO: 6861 - protein, 524 aa, Lissorhoptrus oryzophilus
MWVWTLFFVLPFFVTSHGAKILAVFMTPSYSHQIVYQPIWRELSLRGHQVTVYTPNPLNDKSLTNLTEYDLGFSYEVLKDHHFEDTKSPSENLKKVLECYKKVFENQMSHKYLQDLIKNVNNETYDLFLVEYIWQSYYAIKEIYNVPMIGLTSLPLTLLASDSLGMDKHPVLDPDIFVQFSFAETLKQRVFSWAYNWIYRIIVKPRWLGQFNAEIKKYFGERIKDVRQLAQEVSLVIGNYNFALQNIKPITPKYVPVSSLHVRPRKALPTDLAQFMDNLKNDVIYFSLGTNVKSSQVSKEKIQQILNVLGRLPYTILWKYETKNLPPNLPKNIIVRKWFPQQDLLGHPKVKLFITQAGIQSLDESILREVPMLIIPFLFDQKINADKCVKLGIAESINFADFTEDELETKINKLLNDQLYRKNIKEQARIITDQPMSSVDTAVYWIEYVIRHKGASHLRYKSVDIPFYQYYMLDVYLFVALISSLLFYILKRIAVIVALSYTAFKKLIVAKIFNWRYTEEKKIK

SEQ ID NO: 6862 - protein, 539 aa, Anopheles gambiae
MEHTRLLSAVVLLGLLLLGSAPPSQGARILGILPSVGRSHYIIGAGLMKALLDAGHEVTIVSPYPMKDAPAGLHRDILLPDLATSHGVSGPDLFQYKSAPNLMVLYLVYSEIGPQASEALLQHPKMVELMQSGERFDAVIVESFASEVLYGLAEHFGGQLFVFSPFGASMWTNELVGTPYPYSYIPHTFLSYTNEMSFWQRFTNALVGHADKLYYRCVFLPQQEAMYRRFFPNAKLTFQQTLESVRLAFVNQHFTLSYPHPYAPNMVEIGGIQIQPAKKLPADIQKYIDEAPHGVIYFSMGSMLKGRNFPEDKRAAFVNVFRGLKENVIWKYENDSLPDKPPNVLIKAWMPQSDILAHPKVKLFITHGGLLGTTEGLYHGKPMVGIPIYGDQELNLARAEQAGYGVKLDYDTLSEETIAAAIRTVLDGPAYGERARLISDRYRDQPLGPAKAAVYWVEYVLRHKGAPQLQSPSVRLSFVQYNLLDVYAVMGAIALSVLIGAGLMLRALLTSRANLRKKKAKPNSPIRQCAKDVGEEVGW

SEQ ID NO: 6863 - protein, 489 aa, Pediculus humanus
MNNFFYTFIIFLLCTFTLHVNYANGKNILVAFGNSGKSHFFMYEQYVEKLAERGHKITLLTGFNTTNIKMNENVKVIKFEDEIFNFVVDLTKYESTPKILMKYNEISYINEAGQRTCRNGLSNSNVKKFIESKKHFDVVVVEYFNTDCFSVLSHIFKAPLVGIFSSAPLPWHNDRMGNPDNPSYVAHTLSEFSSEMNFYARLKNSLSLFFSKTYYNMYSNGPTDKIIKRNLGKGIPKVKDIVSNTSLFLVNSHFSLFQSRPLVPSMVEVGGIHLRPPKNLPPDLQSYFDKSKDATNISTLSTKRKNAILKGFNNVTENVLMKWDADDMPEKPENVLLKKWVPQNDVLAHPKVKVFVTHGGLMGILEAVSNGVPMIVIPLFGDQFYNAAAVAEKGCGIVLDYFSLSGDRFLRALKTVLEDKKYSDNTKILAAKFKERPLSPMNTAIYWTEYVLKFKGAPHLRPSSKKLYWFSESLLDVHIFITVVLTYFN

SEQ ID NO: 6864 - protein, 376 aa, Rousettus aegyptiacus
MPCGELVAELLKVPFVLTLRTSLGGIKEKHCGKIPSPPSYVPVPMIGLTDRMTFLERVKNTMISVFFDFWIQDYDTRFWDQFYSEALGRPTTLCETLGKAEIWLIRTYWDFEFPRPYLPNFEYVGGLHCKPAKPLPKKIEEFVQSSGEDGVVVFSLGTIVQNLTEDKANLIASALAQIPQKVLWRYKGKKPATLGANTRLYDWIPQNDLLGHPKTKAFLTHGGINGIYEAIYHGVPMVGVSIVGDQHDNIAHMKTKGAAMEVNMNTMTSADLLRALKTVINDPSYKENMMKLSRIHHDQPIKPLDRAVFWIEFVMHHKGAKHLRPAIHDLTWIQYHSLDVIGFLIACVASAIFLATKCCLFSYQKFGKRGKKEKRK

SEQ ID NO: 6865 - protein, 650 aa, Peridroma alphabaculovirus
MHKHLLVLQLEFLAQKIVGMAKVLHDVGLLVVVDEYVLVIGRRHAQAVNGEHAVVPDAENSVYPLLAQEPLERRQIINYSAQVQPVGDTRHVDALTVGQPHKVLGMHRTSYSSARPTIYKRYCGSPKYCSLTLCTMSIRLAFGLFVCALAVVGGGSAARILAVFPTPAYSHHSVFRVYVRALAERGHDVVVIKPTERISYTDDNDDTVGNITEIDATLSQEYFQQLFKHASVFRKRGLVADSSTVTAHNYMGLVRMMSDQFELPAVKQFIAQKQRFDLLVTEAFMDYPLIFSHLFGHLPVIQISSGYAIAENFETMGAVSRHPVYYPNLWRDKFSDLNVWQMINEIYVEMRLQNEFSQLADEQTRLMKQQFGMSAPSVHELRDRVELLFVNTHPVFDNNRPVPPSVQYLGGLHLVHKTHKPLFGTIRQFLDNCTQGAVYVSFGSGISSDDMEAEFVEMLLRAFEQLPYGVLWKHEGFVPRLPPNVFMQSWFDQFDLLHHPHLRAFVTQGGVQSTDEAIDALVPLVGMPMMGDQAFNANKYTELGIGLVVDTISVTSNQLVDAITEAVENSKYRKRLTALRHLINHQPITPLHKAVWYTEHVIANRNTTTMLRTKAANVNYSDYVMSYIFVPFVTFSVMNHLRQLLRINVL

SEQ ID NO: 6866 - protein, 520 aa, Ostrinia furnacalis
MNLLGKFLLSAALCLSISEAYKILVVFPLPGPSHGILGDGVVRHLLNAGHEVTYVTPFPKDSKNPKLKQIDVSVDDAAMPKMNLKDILNKEQSAFDPNKFFDFTIGTHQRAIQNENMQKILNDPQQTFDVVVAEWMVCELYTGLAAFYGCPFIWVSTVEPHSTILSLIDDSLNPAYNPGLFSTTIPPYNFVERAKELLLSVANVVLKDVVLVRYYEQAAYDELYVPLLKKKGRPVLTYEEVRYNVSLVLGNSHVSLGQATRLPQNYKPIGGYHIDTNFKPLPEDLKNLLDNAKNGVIYFSMGSNIKSKDMPEELKRSLLKMFSGLKQTVLWKFEEVLTDLPKNVHIVKWAPQPAILSHPNCILFITHGGLLSYTEAVHFGKPTVGIPVFADQFLNVERIGKKGLGKRVDLSYTMADDLKIAINDVLSNPSYMTKAKELSLIYHDRPTPPGGELVHWVEHVIKTGGAPHLRSPALNVPFYQKMYLDLAALVVVVIIALRLIVKRLCNSCRKKKVSSEKKNK

SEQ ID NO: 6867 - protein, 519 aa, Drosophila busckii
KMFALKLCVLLSLISLLQGARILAIFPYPGPSQYINVVSYLKALAARGHQVTSVNAFPQKQPVANFSDIPVLEVFNSYEEIIQDLETPRSSWQENNFINDFFMNITKLVLQNANVQRELLPVGKAQFDLIIVEALRIDALYGFAAHFNAPIIGLSTFGTDWNIDELVGNTSPLSYTPLVTAGLSDRMTFSERVHNFVETTIAWLNWQLLYVPQQQQLYAQYFPHVAQQAPLQQLCKNFSLVLLNQHFSLSFARPYVPNMIEVGGLHIAHTPTALPQHMEQFIAGAGEAGVIYFSLGSNIKSKDLPPARRELILNTFASLPQRVLWKFEDDQLPNKPANVLISKWFPQPDILAHANVKLFITHGGLLSTIESIHHGKPLLGLPFFYDQFLNVERAKRAGFGLGLEHATMTAEQFKSSIVRLLSEPQFADTAAAMSARYRDQPMSPQQTAIWWTEYVLRHKGAAHMRVAAQDLSFIAYHSLDVLSYLLAICLLIVLVVALVLRKLFLLVTHSAANNKLKQH

SEQ ID NO: 6868 - protein, 530 aa, Frankliniella occidentalis
MEPARLLLPLALLALVAVPGPAAALRVLALFPLPAHSHFLMFKGVLEGLVDRGHEVVLFSHFPNKRPRANWTDVDTSRGRPSMVSTYSFDMVTAPKWGLPGYNERNSMAILSTIAGEGLCRDVFTLPDFDHLMKGGFGRFDLVLTEVFGSDCFAAVPYKLGLPVVSLSSAPDVSWLHERIGSVDNPSYIANVFGDYRGRMTLWERMHNAFSGLYLNHLFKYYMQDGCDPLVREFFGPGVPPLRELVRNTSLVLLNRHVSIHAARPVVPNLVLVGGLHVREPPGALDADTRAWMDGAQHGVVFFSLGSLIRAATMPARIRDALLGAFAELPQRVLWKYEDDGLVLPPNVRVAKWLPQLDILTHPKTVLFMTHGGLMGTLEALHSSVPMLGLPLFADQMSNMHLYKSLGIADQLDPHDHAAMTKAVVLAKLRNMTGDAGYRERAREIASLFRDRPRRALDEAVWWIEYVVRHRGAPHLRPLGADLPLYQYLLLDVAAVVLAAAVLVGSLIALAVRRALQGATWSSPTKMKLK

SEQ ID NO: 6869 - protein, 537 aa, Linepithema humile
MKLITSTLPIIVILWILATSNLASSKRLLIITPAPSYSHQIVFRALCLALNKRGHEIVVLTPNTLNDPSLTNYTEIDFGFEYEKIDDTDLSQTRWNLTQLGGLKTRLLKLGHGIAEDVLSHPDLMKYYENRTNQQFDAVIAEMIMTPAIYLLAHKFNAPLIGIMSMDLQNCHRFNFGSPVLPSHASNWELESKTGLNVSFWRRLVNFFNTWWHIYSWFNNFANRQQKIAEKYFGKDIPHVVDVAKNMSLILINQEPLLAYARPEIPNIVHFSGLHILKTPPSLSKDLKSFLDNATNGFIYMSLGTNVKSKLLPKKALEIFINAFADLPYKVLWKFEDNNLRVSPNIFISKWIPQQGVLAHPNIKLFIYQGGLQSTEEAVHYAVPLIGIPFVFDQVYQVMKMVSLGVAKHLDIVRLTTPELRDTILEVAGDKGYKDRMLKLRALTKDKPYDSLENVIWWIEFVMRHNGAPHLRFNGVDAAWYQQFDLDVIVFLTIVTFSVLCILLVITKRVLISLYTRYEMGTRCAFRKFVTKKLKSK

SEQ ID NO: 6870 - protein, 428 aa, Caenorhabditis brenneri
PDIFQQTTILDELKDEKFDLGITESLFICGFRKLYPTNIMNKTYISIPALFDHIGVKTVINADSVLYLDVVKYALGEPASTSFYPGLFSKFIDKMNFFERTRNLLGYAFSWYFSWTRFQGELEAIKPYYNKSLSWEDHINGAAFYLINSNQYLDFASPTLPKTVFIGGMQVNTKKHGKVELEKEWDDLLSIRKQNVLVSFGSNAFSSDMPAEYKKAFLEVFESMPDTTFIWKYEEENATLADHLPNVKLTTWMPQNDLLADDRLTLFITHGGLGSSVELAYQGKPAVVIPLMADQPRNALMLTRHGGALELDKFHLDKPSQIRHAIKTVLNDPNYKKNAEKLASILSSQPHQPKDVVLKHCDFAVKFGDLKTLNSEGRNLNLFQFYSIDIALAALAVTILLLLLLSLIISCVFRKMYTLFSNVKSKID

SEQ ID NO: 6871 - protein, 519 aa, Plutella xylostella
MTPIAKLIFLCVFTCIASVSSGARILCVYPVPFHSHQAVFNALSEALARAGHQVVALTPLPHPAPPPGLTQIDVHQLSYRLWEEGYKKFQHDNGGFGVDFITTWTQLSPVLHKIVESQIETPEMQAIIKDPKQHFDVILVEAVIPLSIMVAARFKAPVIQVSSFFGGNDNFMAMGVPVHPIIFPEFGARKTWKFSFWDKISSVYDFIRMRRFESSIRATENAIIRKHFGENAPTVEELQKNIHMLFLNVHQIWDNNRPVPPSVLYMGALHVKKPKLIPENFKKYLDASKNGVIYVSLGSKFLFSDLPDEDVRVFMKVFADIPYDVLLKWNGGDLPNKPPNVRLEKWIPQNDILHHPKIKAFVTQGGLQSTDEAIAANVPLIGFPVIGDQWYNAQKYEQFGIGIELDIKNVQEEKLRNAILSVASEKSYRENITRLSEVMREQRQGGLEKAVYWTEYVATRGALHLRSPLADAPLVDYFMLDVIAAAFASVLIAITVILVLIGGIFKSFRRETHVKVKRN

SEQ ID NO: 6872 - protein, 529 aa, Drosophila busckii
MARLLFVLFAALLISGSQSANILGVFTSLSPSHLILQMSMAKVLAEGGHNVTVVTAMKPPIMHKDIHLVQVPTSEQTMQELNSIIGSMAGRDNSNMLVSLFKSLGQMTFMFDLMRDTMAHRLVRNLYEQQSTKFDLVIIGSFMNNYQIGLAHKLKAPVVLISPMPANPMFDLMIGNPTSLSYVPITPTNLEPGQGLSLMQRIKNFVGNYAFKIFIYIIENNNKRYYSELYGDDPSMPDYAELTKNVSMIFCNSHGLSEGPIRAAVPALVEVSGLQIKDTPDALPQEMAEFISKAKHGAILLSLGSNVKGEHIKPDTVTKMFNVLSKLKQRVIWKWEDLSNVPGKSPNILYSKWLPQDDILAQPNLKLFITHAGKGGITEATYHGKPMLALPVFGDQPNNAEKMVKSGFGLSLSLLTLEEQPFQQSLDEVLNNPMYADKVKAFSALYRDRPLTARQSVLYWTEYVLRHHGAQHMQSPLVHMGIIAANNLDVYALLLALLIALLFLAKCFIKFVYKKCTGKAKQVKKAKKH

SEQ ID NO: 6873 - protein, 515 aa, Vanessa tameamea
MILKYLISTILLVNICYGYKVLVVFTLPGKSHGILGEGYVRHLLKAGHEVTYVTPFPEKNPPKNLRYIDVSENTKCLNMGIFDIKVIMDKEINLQDQNVIIPIMDNFWECTLKKEALQRFLYDQNEKFDAVVVEWLYSELGSGFATVFNCPLIWSSSMDPSTFVLSLIDEHLNPAYTVHHMSKDYSFSFLDRVYQLWSVARVRYYKWANSNNENELFKQLYGPIVAKKSRELPEFDEVKYNASLMLGNSNIVAGDGIALPQNYKHIGGYHFKEEIEPLPKDMKEIVENAPHGVIYFSMGSNLKSSNIPDKLKRELLDMFSEFKETVIWKLEKTIPDLPKNVHISPWVPQQSLLAHPKCVLFITHGGYLSLLETLRAGKPIIGIPFFADQYLNVNRAVAKGFAKRVDFDENVIPLKEAIKEILENPSYQQRAKELSVQFNDRIVPPGKELVYWIEHVIKTNGAPHLRSAALHVSWYKKMYLDLLSVTVIALMMIFVIIKYLFTFMQVDTHQKKKVH

SEQ ID NO: 6874 - protein, 1065 aa, Drosophila serrata
MRCFLNFLPFLLTMALVGQACGYSYLMVMHTASKSHHVVGEALAKGLIAAGHEVTIISPFAQKKPIKNLIDIDTPNTIKIMEAYKSRILQNMKKSLVLRYPLMHGMGLDLTEVLLVAPEVQELLGRNRTFDAVICESFMNDAHYGFAEHFGAPLITLSPLGATGWTSDLVGTPSPPSYVPHFLLPFDDHMDFWQRAQNLGFQAYEYIYHNWVYLPKQEAMYKKYFTNNKQDFYKMRRDTSLVLLNNHVSLSNPRPYSPNMIEVGGMHVSRKDPKPLPKDIREFIEGAEHGVIYFSLGSNLKSKDLPEEKRKAFVETLKGLKFRVLWKYEDDNFADKPANVFISKWFPQDDILAHEKVIAFITHGGLLSTMETIYHGKPVVGIPFFGDQFMNMARAEQLGYGITVKYGQLTASRFRSAIDRITSDPSYMQRAKAMSSQFRDQKETPLERAVYWVEHVTRQRGAKYLRSASQDLSFVEYHNLDVLAAFFAIFSLVLVSLVLLIRFIAIKVKGSKAKTLKQKTQISPINCLEFVSRRTVRMKPTGGQTSFLGLLLLCLLSCVSAYNYLVVLHTAARSHYHVGSALAKGLASAGHQVTLVSPFELKKPIKNIKDVTAKGIIASMEGRMTNLLESSKQPIIKQIVEFHKMGIEITDTLLSDPGVIELMKTNQTFDAVICEVFLNEAHFGLAEHFKAPLIGVGTFGAISWNTDLVGTPSPPSYVPHAMLKFSDRMSFVERVANLAFATYEYLFLNFIYLPRQEVLYRKYFPNNKQDFYDMRRNTALVLLNQHVSLSFPRPYSPNMIEVGGMHINRKRNPLPKDIEAFIEGAEHGVIYFSMGSNLKSKTLPLDKRQALIDTFAQLKQRVLWKFEDTNLPGKPDNVFISDWFPQDDILAHDNVIAFITHGGLLSTTESIYHRKPFVGIPIFGDQFLNMARAEQNGYGVTVNYEELTAPRLLAAIQRLIQDPEATQKVRDMSDRYRDQPQKPLERAVFWVEHVSRHKGAKYLRSASQDLNFIQYHSLDTMLVLYGGIAFVIFCIMLLIRRIFRFLQELFIKNDTPKQKPKVKRN

SEQ ID NO: 6875 - protein, 516 aa, Diuraphis noxia
MFAAVPPRLLSLLLLPMVLSPPPAALAANILAFMPIPLKSHFGGFQPLFEELASRGHNVTVVSSFPLVNRSVPNYTDVDVTPEKGLHEVNITELIDLNFLTSVTNRWFLAHILSAQMEHANLIDFLKSEDNSFDLVMVESFLQEYTVAIGHKYNAPVINLSPAMVWVSISKWLHIPSTFSYVPDCCIGVTDDMSFTERLKNTIVGLVEMFVEDYLYIPMIKAKMSKHFAYVGWESRPTLEQMLNNVSLTLMNAHHAVGVCRPYLQGVIEVGGMHIREPKSLPKDLQDYIDSATNGVIYFSFGSIINLSNLPKEKLSIFLNVISRLKEKVIIKWVPDKSIKLPQNIKVGSWLPQNDILAHPNVKLFITHGGLHSIEEAVYNAKPVIGIPVFADQHSNLRRVEKIGYGKFITFDQLTEESFGNAIEEVISNPTFKDKAMIQSRVYKDQPMNPLDRAIYWIEYVIRNDGAQYLKAGSLELNTAQYFLFDVTLFLLLLTVIFTWLGYRGIVKVSSKRKAN

SEQ ID NO: 6876 - protein, 530 aa, Nilaparvata lugens
MGFKNKFITILLSMVMVTSSYAGNILCIIVFPAYSHQQPLLALSEKLARRGHNLTVLTTDPPKKPIPNYTYIDMSSAYKNLKEMDEKFGFNLQREMSAAEIFKKLPQVFSELCDYELGLPQVQAFIGKAASMKFDAVLIENQYYSSFHGLTHKLGSPPVIGVHTFVPWSALDEFMGVKVNPSYMPHIFSHHSDSMTFLERCFNTFLYWYNWYLVEYELFPYQEAILKKYFGTNTPSAREMEFNKSLLLVPADLSVAYPMSIPPNYVRTGTFHIQPSPEPLPKDLKQWIDGAEQGIVYFSLGSNMQGTSVPQEKREIFFKTIRRFPKIRFFWKYEAESPLSNVPSNLLIRKWFPQQSILVHPKCRIFISQGGLQSTEEAIYYAVPLLVIPLFADQPHQAAKIEKEGAGLSLLLSRLTEDNFYDAISSMLTDPKFKSNMNRLSSLSKDQMVPALDEAAWWVEYVIRHKGASHLRPQNLNMNWIQVQLVDVYGAIVAAALFVLYIIYKLIKSIVALIPSGKSKKGKKAKSKRS

SEQ ID NO: 6877 - protein, 528 aa, Mamestra brassicae
MGHLHIVHWRLTMNGAIAALFLCLVMVHQQHAVRILAVFPTPAYSHHSVFKVYIEALAERGHDVVVIKSTDRINYANRNGLRGNVSEIDASLSQEYYGRLMRHAGVFRKRGIVADSSTVTAHNYMGLVRMMSDQFDLPIVKSFIEEAHKHKFDLLITEAYIDYPLVFSHLFGDLPVVQISSGYAVAENFETMGAVSRHPVYYPNLWRDKFSGLNVWETINEMYVELALQNEFSKLADEQNALLKRQFGESTPTIQELRNRVELLFVNTHAVFDNNRPVPPSVQYLGALHLHDKRPDSMYGMVREFLDNATTGAIYVSFGSAISSEDMEPEFIEMLLRVFEKLPYSILWKYDGYMNRMPANVFVQSWFEQYNLLHHKNVRAFVTQGGVQSTDEAVEAIVPMVGMPMMGDQAYNMNKIVELGLGKVVDTVRVNAEQLIEAIVDAAESPKYRKRLRELRHMIHHQPMTPLQKAVWYTEHVIESRRRVVPTMLKTRAANVNYSDYIMSYVFVPFIMFTVMNHLRQLLKMNMV

SEQ ID NO: 6878 - protein, 530 aa, Drosophila melanogaster
MVLRVEKFLLLAIAIGAVMGSSQGANILGLFPSLSPSHLIIQMSAAKVLAENGHNVTVVTVLKPVVNHKNITVIQVPLSKEEAQQMSDTIGAMSKNDNSNMALSLLRMSDQMDFMIRKNAETLMNDRVRDLYLNRGNKFDLVISGYFMNDFQLGFARKVNAPVIVLATMPPNHLLNPLIGNPLEVSYAGISNPAEGSKAVTFQRRLSSYMQSLGFGVFSHLSERRNRNWYKEVYGNDPKMPEYSEMLKNTSLVFFSSHAASEGPIRPNVPSAIEIGGIQIKDKPDPLPQNIAEFLGNATDGAILLSLGSNVQGKHLNPDTVAKMFNVLSKLKERVIWKWEDQENTPGKSANILYSKWLPQDDILAHPNIKLFINHAGKGGITESQYHGKPMLSLPVFADQPRNANAMVKSGFGLTLSLLTLEEKPFQEAILEILSNPQYAERVKSFSTLYRDRPMTARESFLYWTEYVIRHHGAAHLQSPLVHMSFIAANNIDICFLIFVILVSVLVLIKFLVQFIYRRFISKPKKEKTH

SEQ ID NO: 6879 - protein, 536 aa, Danio rerio
MPLCSTSFGGMKRTLFVPALGLFAFLCLFSSESVQAGKVLVMPVDGSHWLSMKILVEEMSSRGHEMVVLVPETSILIGKSGNFTTKSFRVPYSFDELNAHVDHIRKTAIEKAPRFIDIVGALGNLIQFTNMQVKACEGLLYDEPLMKSLRDMKFDALLTDPFLPCGSVIADYFSIPAVYFLRGIPCRLDEAAAQCPSPPSFIPRFFTGYTDKMTFPQRMINTFMTVFEKYLCHQLFASFDELATRYLKKDTSYAELLGHGAVWLLRYDFSFEYPKPQMPNMVQIGGINCAKRAPLTKELEEFVNGSGEHGFVVFTLGSMVSQLPEAKAREFFEAFRQIPQRVLWRYTGPVPENAPKNVKLMKWLPQNDLLGHPKVRAFVTHGGSHGIYEGICNGVPMVMLPLFGDQGDNAQRLVSRGVAESLTIYDVTSEKLLVALKKVINDKSYKEKMMKLSAIHRDRPIEPLDLAVFWTEFVMRHKGAEHLRPAAHDLNWIQYHSLDVIGFLLLILLTVIFVTVKSCMFCFRKCFKKSQKKKKA

SEQ ID NO: 6880 - protein, 1087 aa, Neodiprion lecontei
MSWRVIFIVFTLLASDWHFGDAARILAVLPTASVSHQVVFQKLMLELNKRGHELVVVTPNPVNDPTLKNYTEIDISFQYSDKDTLPNIINLRGNVDWFGLLKVFEPMLSKHAVQIFEHPELKKLYDPNSGEEFDLILMQMFITPAFMSFAARFKAPMIGIVSASLQTSVQYAIGNPILHSDPSNWQLDMKSPGSSWIPWRRLDNFIQSWRFIHYHRTVILPKYQKIAEKYLGIDIPDLHDLEKNVSLIFVNQQGPISFAKPNVPKVIEIGGFHVADKIKPLPKDLKKVLDEATQGFVYMSLGSNIQSNMLPEKARKDIVTAFSKLPYTVIWKFEDDTLKNLPENVIILKWTPQQAVLAHPNIKVFIYQGGLQSTEEAVSNGVPLIGLPVMSDQDMNVRKMVSVGVAKMLEITNINEKDFFEAVRTVAGDDGYKQRMLNLRSLLKDKPYDMLENAVWWTEHVIRHRGAPHLHSTTADEPWYQRQDMDIIAFLSAMFVILSILSVFIFYKCVILSIRLASHPTVEKSKKLQLSKQMYLRMIVGSRNQHRQLGMEVCKISSNMPRWTFFTALMLLGCGLDCGDGARILSIFPAPSISHQSVFRKLTLELNKRGHELVVVTTDPIKDSTLKNYKEIDISFLYKEKNYIGSVVDFRGKIDWYSRLSMLETIMSSQVTQIFSFPEFKKLYEPGSGEKFDLVLMEIFFSPAFMALAERFKAPLIGIASANLQLGVQYGIGDPILPSHPSILEMNVKGGDSWIPWQRLQNFIYSWRIIHYYRTVTLPKHKELAEKYLGIEIKDLHEMEKNISLIFVNQQKPISFVRPNVPKVIEIGGFHVSDKSKPLPKDLQKTLDEATQGFIYMSLGSNIKSNTLSKKTRDAFITAFSELSYKVIWKFENDELEGKPDNVIILKWAPQQAILAHPNIKLFVYQGGLQSTEEAVSHGVPLVGLPVMGDQDVNVNKMVSLGVAKKLEITDITKDDLLDAINTVARNASYKQKMMNLRSLLKDKPQDSLKSAVWWTEHVIRHGGAPHLHSTTAEEPWYQRQDMDIIAFLSAAFVITLILTNLILYKCVIYSIRAFAVHSVDKKKKRS

SEQ ID NO: 6881 - protein, 521 aa, Spodoptera exigua
MKRMQTYWLALILLLVYAEASKILVVFPLPSRSHANLGDGIVRHLLNAGHEVTYITPFAYKNAPPNLRTIDVSSNFEAWPVHLITIKTFIEKADSFANVNMMILMVNTIMEHTYQNKDVATLLNDPKENFDAVIVEWILNEAIGGIATIFDCPLIWMSSVEVHWKLLSLIDQPLNPAYSVDMMSTSQPPLSFTERVSELWTQIQVTIMDYFIFDKMQDEVYQKYVVPAVKQRGRVAPSFYDMKYNASMILANAYVSTAIPHTMPQNHKYIGGYHVDEVVKPMPQDLKKIIENSKHGFIYFSMGSNLKSKDWPEEVRVSLLKMFGSLKQTVLWKFEANMTDLPPNVHILEWAPQQAILSHPNLAVFITHGGLLSTIESVHFGVPIIGIPVLGDQHLNIRKAVKNGFALKVDLSYTMADELKKAIVEVTTNKKYAEKAKELSYIHHDWPVKPGVELVHWVNHVIKTRGAPHLRSPALHVPFYQKMYLDLAAVLIILFLAGRVFLKRAYAAVFSKTKANKKKTH

SEQ ID NO: 6882 - protein, 486 aa, Papilio xuthus
MAVFINIYKFFIIVIICHECVCYNILVVTPMPVISHAILGNSFVKLLLNAGHKITHVTGIPYNISHPNLRRFEVDYYLESIPNMDSSRAFGRIIRELFISSLREKDVNMLLRDTKERFDLVVAEWMFNDLYAGLSALYDCPLLWFSATESHWMMLRLLEDTINSQDKTSKYIPPFITSYIIQDMYLYNLEKEAYENIFTPLMDLRGKSLIKFEESKYFGAQILVYLNVLPHEAKNWPRKFKPIAGYHIDRQVEPLPKDLQSIMDNAKYGVIYFSMGSNLNSQDILDGYNEILMEVFSNLRQVVLWKHDLKFSHLPSNVHVLKWAPQQSILSHPNCILFMTQGGALSSIEALHFGVAILGIPIIADQFTNIERAVDQGYAKQVDFPYSTGEDIRDTIEEMIRNPRFRNKVKELSRKYHNQSSPGTDLVRYVRKVIRAGITKYSAPYETLYLKKIFINLGLWGIILLTSLRFIFKNFIRLRRSKKLNA

SEQ ID NO: 6883 - protein, 530 aa, Octodon degus
MSRMMRALFFLFLLLCCYTSTGSCGKVLVWQMEFSHWMNTKVILVELVQRGHEVTVLRPLSSVFIDHNNPSGIKFETFPSSVTPEENKKFFRQWIDNWIYNVPKDTYWKYFPLLQDIYRDFSNLCERNCKDAVLNKKLLTKLQESKFDVILADAHFPCSELLAELLKIPFVYSLRFNPGYTYEKYSGGLLFPPSYVPIVMSGLSGQMTFMERVQNMICTLYFDFWFQTFNEKKWDQFYSEVLGRPTTLYKEISKAEMWLIRSYWDLEFPRPTLPNTDFVGGLHCKPAKPLPEEMEDFVQSSGEHGIVVFSLGSMVYNMTEERTNVIASALAQFPQKVIWRFNSKKPDNLSPNIRLYEWIPQNDLLGHPKTKAFVTHGGANGIYDAINHAVPMVGIPLFAEQHDNIAHMKAKGAAVVLDFTTMSTTDLVNALSTIINNPSYKENVMRLSTIHHDQPMKPLDRAVFWIEYVMRHKGAKHLRPLAQNLTWYQYHSLDVIGFLLACVLTIVILVVKCFLLCYQKFSEIGKKKKD

SEQ ID NO: 6884 - protein, 548 aa, Neodiprion lecontei
MSRYLISVTLILAIGDLHQVYAARILGIFPMPSLSHQVVFRGLTLALRERGHELVVVTPNPINDPTLKNYTEVDVSFLYDIFNKETDWIAGRNEDTWLGVLRRITPIFMMMTEGALGHSEVQKLHAPNSRENFDLMLIEMLYWPAYLPLAKRFDVPVVGMASLSLSVYMQYGIGNPIMASHPSNWDCGAAVLGDLTFWQRLKNFVRTWRFLYWYRTDYMQKQQEIARKYFGNDIPDIGDVEKNISLVFVNQQTPITFVRPNIPNIVGIGGFHVSNQSEPLSKDLQRTLDEATQGFIYMSLGSNVKSATLSKETRGEFIAAFSKLPYIVIWKFENDFLPDKPDNVFTVKWAPQQSILAHPNIKAFIYQGGLQSTEEAVSYAVPVIGLPVFADQDTQVDKMVSLGVGKQLEILTVNRVNLVETIESVVTDSSYKERMLKLRDLMEDKPYDSLENAVWWTEHVIRHKGAPHLHSTTADDPWYQQQDMDLIFIISSVISIALITALVVLYKVLVHSVRLLNRNHLPFDQKDKVVRMFLSLQKVEMSDKLLRT

SEQ ID NO: 6885 - protein, 518 aa, Amyelois transitella
MMKKTAYILLVLTTLSHICDGYKILTVFPMAMPSHQILAKGVVKALLEAGHEVTQLTPFPDKNLPPNLSQVDLSAVDMSFATQRLNVTTVLDGQDAANLFEFKPFIEMTNRNVFQDPNLQKLMGDTSQTFDVVIAEWMFSDTYTALGYLFSCPFIWFSTVEPHSVIVSMIDENTNPAYVPSLMSSNVPPYDFINRVKELFMQIMTWGFQTIYFSRHYNEVYAELLVPHIIKRGKPVIPLDDIKYNASLVLGNSHVSLGLPTRLPQAYMPIGGYHIDPEVPPLPKDLQNLLDNAKNGLIYFSMGSILKSKDLPDVLKKDLLETLGSLKHTVLWKFEEVLPNLPPNVHIVHWAPQQSILAHPNCILFITHGGLLSTTEAVHFGKPIIGIPVFGDQFNNVDRAVKKGFAMRVDLAYNMKDKLKAAINEFLRDKRYTEKAKELSFIYHDRPVHPSKELVHWVEHVVKTRGAPHLRSPALDVPVYQKLYLDLLALVLVVLYVLKKIMVKIFSSKKVAKKQKKN

SEQ ID NO: 6886 - protein, 507 aa, Aethina tumida
MIFKSVFCVVTVLQLCEGAKILGIIPTPSYSHQLAFQPIWRELSLRGHNVTVITANPLNDPKLINLTEINISTVYDCIKRNNVWDLAANKNILFLINSFIELMRDWSEVILSHPQVQQLIKDPNFNFDLVFYEALSPVSLAFAYKYKCPAIGMASMDVPFMYHQAMGNPTHPLVSPDYNLKIEDTENMSFFDRFTAVFSDFVGNVLVRVLFTPVLNDVHKKHFGEDFPDVYDLFNLTDIIFTTTNPIFNNIRPVNPNTFTIGGGLHIQKPKPLPNDLKQYLDGANDGVIYFSLGSNVKGSLLTEQSKTAIMNVFSQLPQKVLMKCDWENITIPQNVKVEKWLPQQDLLRHPNIKLFVTQGGLQSLQEAITNGVPIVGIPFFGDQYSNVFRSVKKGFAVRLNKDDITEESFKGAVLEVLNNPKYKETAIKMGQIMYDEPMTSLEKVIWWTEYVIRHKGAQHLKSNAPRLPFYQYYLLDVIGIVLLSFLVLIYVLYKLFCVLSFCGAVY

SEQ ID NO: 6887 - protein, 529 aa, Fundulus heteroclitus
MELRLSVCVLLLLCAPRSSDGGKILVWYTEASHWINMKPVLETLVDRGHQVTVLVPSASMFMNSSEPSRFQYEPFDVSVSVKDVEQMFEQMIHLFINEMDHLSTLEIYFRFVDLISNNFKVSLKFLDGVMKSERIMKKLKEGNYDLLFADPIYPGSDLTADLLGLPLVFSLRFSIAHNVERLCGQLPAPPSFVPGAMSKLTDKMDFSERLWNVLFYALQDVGMERFMWKELDKYYSDITGTPTSACKMMGNADIWLLRTYWDFDFPRPLLPNFKFVGGIHCRPAKPLPKEMETFVQSSGDAGIVVFSLGSMVKNLTIEKANTIASALAQIPQKVVWRYSGQKPQTLGSNTRIYDWIPQNDLLGHPKTKAFITHGGTNGIYEAIYHAVPMVGIPIFGDQPDNMVHMEAKGVALTVNLNSMTAESLRDAVNTVINNKSYKENMMRLSRIHHDRPMSPQDEAVFWIEFTMRNKGAKHLRVQAHELTWYQYHSLDVLTFLLTLNLLLIFVLFKTCSFCFRRCCGRKTTKRKAE

SEQ ID NO: 6888 - protein, 554 aa, Leucania separata
MSLMNKFSYDPHIKLSARRELGHRSVRFLHAPHPLEQFVMFRFVVFVAAIASVRSARILCMFPTPAYSHQMVFRSYTQALIERGHTLTVITPTPLNAKNSANLTEIDISNSHTHYKQLVDQSKLYKKRGIIADVESVNHRNYLGLVRMVSEQFRNERVGELLRADRDTNRFDLIVTEAFIDFPLILSHFYDAPVIQMSSGHGLAENFETMGAVSRHPIYYPNVWRDTFPSSSNVWQMANELYRELVLYREFALLADEEDKMLKRQFGRHVPGVRALRNNVQMLLLNTHAMFDNNRPVSPSVQYLGGIHLKKQSNIMNSHLSQFLDDSTMGVVYVSFGSGVHALDMDDEFLHVFLSTFRSLPYNILWKADSVNDTLLPGNVLVQKWFPQQDVLNHRNVRVFVTHGGIQSTDEAIDAQVPLVGLPLMGDQFFNVAKFQELGIGRALNAHTVDAAELIEAILDANENPAYKRNLARVKRIILDQPMKPLEKAVWYTEHVIRHGGAAHLKTRASNVAWYEYLMVNALVPVVVSAFIGCFGTYSKYTLGLSHIYYYAIF

SEQ ID NO: 6889 - protein, 437 aa, Eufriesea mexicana
MRFDGITWFNSLEIRFFDMCADFARNVFEDPQMKKLYAPDSNAKFDVFLTEFLYMPSLYAFAHRYNIPMIALSSLGTAAINEHVFRGVVFPSHESTWEMEASTGPNLPFTKRLSNFLIMWRMMYIFHRDVFPTHQRIAESYLGPLPSMLDIMKNVSAFFIDQSDILTPARPKLANVVTFTSFHISENPDPLPKDLQEFIDDADAGFIYFSLGSNVKSADLPTELRRMFCDVFSKLPYRVVWKFETDLEEKPANVYSSKWFSQQTILAHPKIKLFITQGGLQSTEETIHFGVPVIVFPVIGDQDYQASRVDALGFGKRLEITTVTRDEFESAIQEVITNKEYKERIIRIRSLIRDTPYDLVENLIWWTEYIVRSDGAPHLRSSLATQPWYRYCDMDIVVFLTTVTSFVILTAISLIVRIIASLRKSWPPTVHQKQKIS

SEQ ID NO: 6890 - protein, 574 aa, Eumeta japonica
MKLLLLLSLVYASDAYRILVVFPMPGKSHSILGQGFVDTLSQAGHEITYITPFPIDKPATNVRQINISSVVGNMPADALKITKLVKSPFRAHMTALVGPMLATGTLENENLQEFLADTTQEFDVVIVEWFLTNVLSGFATLYKAPLIWFSPMDPQWQVLQLVDEPSNPAYTPSMIIKAVPPFDFFERANELFMQLYVQLWKTIAYFLMERPTFNKHFLPAFEKRGMTPPSYNEIVYNGSFMFFNTQPVLGIGYRLTQNTRYIGGYHIDPDTKPLPENLKKIFANARNGVIYFSMGFNLKSKDMSEYTKRGLLEMFGTLKQTVLWKFEDELRDLPPNVHILKWAPQPSILNSEEADGPAARNIPRPVSSLDIISNPKTVLFITHGGKLSTIETIHYGVPVIGIPIFGDQFANMDQAVHKGYGIKVDYEEDLAKPLKATLDEMLSKPSYSETAKLMSALYHDVIASPRQELVHWVEHVVRTQGAPHLRSIALHVPWYQKIYLDLIAVIGVLLYIVKIILCWACQLYSSKKQISTRKAGNVLVAPLRLGVFLGGSDYLLSGGSHVRVPLESAIKNQL

SEQ ID NO: 6891 - protein, 535 aa, Danio rerio
MTINMHLGVIFCLVVGVVCSAAVDQKLSRKSSWTGKLLVVPMDGSHWTGVKAVAEEMGRRGHTVIVVIPEISMRLGPGKHYITKKFPVKYDQKLFNEVLTEHVHEVTNPGHSRLKTVTSTMANLLKMFNMMASTSESLFQDKELIKFLRDENFDAILTDPALPMGAVLAYNFSVPAVYMLRGMPCALDATATACPNTPSYIPRFHTGNTDRMSFGERVMNVLMSILEQVACKVMYWSFEEVTPNFLQRDVSLTEILSTGAVWLMRYDFTLEFPKPLMPNMQFIGGINCGVKNPLMKEVEEFVNGSGEHGIVVFSLGSLVSSMPKEKADIFFKAFSMIPQRVLWRYTGEIPNNVPENVKLMKWLPQNDLLGPPKARAFITHGGTHGIYEGICHGVPMVMLPLFGDQADNVHRVATRGVGVILSIHDITVETLLDALNSVINNSSYKQKMQKLSAIHNDRPIQPLDLAVFWTEFVMRHKGADHLRPAAHELNWLQYHSLDVIGFMLLIVLIVTLAMLKCCSLCWRCCCRKTQKRKED

SEQ ID NO: 6892 - protein, 416 aa, Penaeus vannamei
MRPRPLQRPSSGGRWKLRAVIAVSAAPGASLLFLPPAKLPQRGHQVTIASLHARRPANGSRLRDLGTLDAGRRAQGDRGFDVFRMREASGGKDVNSQVMKKVVRHLPEYCDAFLRDPALQAAWAERPDLVLLPAFMNECGLAFVQVQAPFIYVTTSGLTPWTADLLGNPENPAYVPNQYLPYDTHMTLWQRTLNTLVRFISPHLRSQLVLSRLDGVVQRFLGDPTVSLSEVEKNVSLVLVNSHYSLGHPRPLLPNVVEVGAMHCRPARALHDAQLRRFLDASDAPAVFFSLGSAIRSEQLPASVRDTLVRAFARLPYRVLWKWEGAAVPGLPPNVLTRPWFPQQDVLGHERVRAFLTHGGLSSMQEAVYHGVPVVGLPLMSDQHLNVRQAVTLGLGRELTLETMTEDDLVEAITAV

SEQ ID NO: 6893 - protein, 518 aa, Culex quinquefasciatus
MDRSRVLVLFLVAVLCVPSSDGANILAIMTVPSPSHHIWNRVWMEALVDRGHNLTVVTQDKDNSRANLTYVLLENVYPTLFKDGATNYVEMAKESAFRTVFSFLDYYDSVCEGALASKGLDVIRAYPKEFKFDLVIYDYGCGPCLLPLLHKFNYPPLVSLTPFNNPPYSVDVVGGHKQFAYTPYFALNYDSKMNFQQRAYNTLLCLLSSAYRNWYIMPQLDRKVRSFFQYPDMPHLADLEQRTQLMLVNTNPALDALEPLPPNVIAIGGAHIKDPEPLPADLEKFIASSRDGAVLFSLGSNVRSDQIGEERQRMFIEAFRQIPQYHFLWKFESKLNLDLPPNVIIRKWMPQNSILAHSRTKAFITHSGGLSTQEASWFGVPLIGMPFFMDQIKNCQRAVSAGVAERLNFNDLSVERIRTTVLKVLQTPSYKENMMRRSQIFRDQETKPLDRALWWIEYALRHPNVATMKSPTLELGAIRANLWDVYALYVAIVFAAYKLVTGVLGSMGRKRVKQMKRD

SEQ ID NO: 6894 - protein, 346 aa, Diabrotica virgifera
MGNPTHPIVSPDVMLNFSGKLSFLEKVQSFLYNIWYRMFYYWYALPKADKIARKHFGEEMPYLGDLERNISLLLINVNPIIHNVRPNVPNIIEINQMHIKERKPLPKDIQEYLDSALQGVVYFSLGSNVKSANLTEKIRKEIVAGLGELPYKVLWKWETDYLPDKPNNVMTKKWCPQQDILAHPNIKVFVMQGGLQSIEEAITLEVPLVGMPLITDQHANVKRIVELGLGVKVDYKTLTKAIFKDAVMEVAQNPTYKEEVKKAKSILLDQPVKGVEKAVWWIEYVIRHKGAKHLRSPAADMSFFEYFMVDVILFLLICITLVLYSVYKLMTVLRSIFRSLKRIKQQ

SEQ ID NO: 6895 - protein, 287 aa, Drosophila sechellia
MITSSNQLEGQYEFMMHPNFKEIYENPKTKFDLADPLPKELAKFLDNADEGAIFFSLGTNVNTNTFRPDTVDILYKVLSQLPQRVIWKWEDLKNKPGNASNIFFGNWLPQDDILAHPNTKLFITHAGKGGVAEAQYHGVPMVALPIFGDQQGNAEIMTKSGFGRWLDILTMTENELKETIYEVLENPAYRETIGKFSTLYRDRPLTARQSVIYWTEYVLRHQGALHLQSPLINTGFVARNNLDVYGVVLLVSILLIVTSKFLLRKILNVASGYSNRRESLARKLKSN

SEQ ID NO: 6896 - protein, 395 aa, Musca domestica
  MOD_RES (372)..(372): Any amino acid
MAENIIKYYKTGLNLTEIILTEPSVRKLMASNHTFDAVICEVFLSEALYGFSEHFNAPLIGMGAFGAATWNTDMVGSPSPPSYVPGTGMKYTNHMSLKERIGNLAFVTYDRLIMDLYYLPRQAALYKKYFPHAKRDMYEVRRNAALVLLNTHVSLAFARPYVPNQIEVGGMHINRKPKPLPEDIAKFINESEHGVIYFSMGSNLKSKNMPQAKRDEILKAFRNLKQRVLWKFEDPILEGKPDNVLIRDWFHQDDILAHEKVKVFITHGGLLSTTESIYFRTPVIGTPIFGDQFLNMANAEKEGYGLVLDYQTWTADKLRQALNRILSDSSFQQRINEISDRYRDQEMLPMEKAIYWVEHVVRQNGARYMHCXRNYGLRIISMSRNKSMTSLVSTF

SEQ ID NO: 6897 - protein, 488 aa, Bos taurus
MSKMSMKRLSLLLLLQLTCYFSGGSCGKVLVWPVEFSHWLNIKTILEELVTRGHEVTVLISSASTIPNSSKPSTMKFETFPVSLTKTDYENFIERLLEEWTYVSKDSFWSYLSTVRTLFWEFFDTTLSICKDAVSNKKLMTKLQESRFDILIADAVGPCGELLAELLKIPFVYSHYTSPGHIIEKNSGRLPLPPSYVPVMLSELSDRMTFMERIKNMFYTLYFELFFPTYKEKKWNQFYSEVLGRPTTLSETMGKADVWLIRSYWDFSFPRPQLPNVEFVGGLHCKPAKPLPKVLWRYDGKKPDTLGPNTRLYKWLPQNDLLGHPKTKAFITHGGSNGVYEAIYHGIPMVGTPLFADQADNIARMKSKGTAVRLDLETMSTRDLLNALKEVINNPSYKENVMRLSAIQHDQPMKPLDRAVFWIEFVMRHKGAKHLRPAIHDLTWFQYHSLDVIGFLLACVATAIFVITKCCLFCCLKFAKLGKKEKRD

SEQ ID NO: 6898 - protein, 522 aa, Zeugodacus cucurbitae
MCRIKSIVISLWILACATNSLESAKILAVFPFTGPSQYICVQSYLRTLASRGHEITSVSAFPQKNPLKNFRDITLQIEQSHHDESVINAIGEMSESKLDQMKMVKDYILLTSLVILKNEEFQKLLHSDEQFDLIVIEVFCQDSLYALGHHFKAPMIGVSTFGTDVVIDQLVDNISPVAYVPAPSGKNLDRMNFWQRLDNLVAYTIELMYNHLVIIPEQQRYYEKYFPNATVRLADVRRNFSLLLLNQHYSFSWPRPLVPSAIEVAGMHIDHKPSKIPDDMEAFISASTRGAIYFSMGSNVKSAFLPKHTLQEIMNAFASLPVNVLWKFEKPDLAGKPKNVYINKWFPQPDILAHPKVKLFITHGGMHSLIEAVHHGKPIVGMPVFYDQDLNVQKAVSKGFGIALNFRNFTSTELRDAILEVLENPTYTERAREISAIFHDRPMKPLEAAIYWTEYVLRHKGAPQMRVAARHLNFLQRHSVDTIAVLFGIPLLLIIFITRGAYKLIVKFFTCKEPANKKRKHD

SEQ ID NO: 6899 - protein, 506 aa, Dendroctonus ponderosae
MRQLVWCVVIFQIFVSVSLGANILAIIPTASFAHQMPFRPLWRELAKRGHNITLVTTDPMDDLSLKGVKEIDIGYGYQIMEKHQVFDTISNDSKSFIEMGRAFVRAFNETNNKFFQSPEGQNLIHNKDNHYDLLMVEAQLPAMMVFSWWYQIPFIGLSSMDCALQYHDTAGNLVHHLVTPDPNMQVQDTFWDRLKSFLYIWIYRALLNFTTFPKEQRILQQYFGANVPTIPEIQNNMSMLFVATNPIFQPIRALMPNTITVGNGMHIGESKPLAPEIQRFLDEAEEGAIYFSLGTNVKSRYLNASAKSELLKAFTGLPYRVLWKTDEQFDDLPANIKAQKWFSSQPDILLHPNIKLFITQGGLQSMQESLNANKPMIGISFFGDQHSNVDRMVQLGFGLKVHKHNITEETVREAIGEVISNFKYSDKAKEFGDIFRDAIAPNVETAAWWTEYVLRHKGAKHFRNPLLDMPLWKAYMLDVFGLICLFIFVFIRLLSLILHSISRNIC

SEQ ID NO: 6900 - protein, 518 aa, Bombyx mandarina
MSKSLFLFLCIASLLCFCDAYKVLVVFSLSGKSHSILGYGIVKHLLKTGHEVTYITAFPEESSDPNLTQIDVSSNMVALPKSYKESLNLKTVLEGKAVPLDFDIIHNLMNAVEMNTYQIENVSKLLNDPEQKFDVVIAEWMFTEICVGYAAIFNAPLIWFSSVQTHWIITKLIDESLHPAYNAEAIAHSIPPFNFFQRAHNLWTQLQVFYHLTKGRQETLYANEIVPIIKKRGLVPPSFNDLLYNSSLVLSNTHVSYAAATRLPQNYKPIGGFHIDEEVKPLPEDLKKVMDGASNGVIYFSMGSNLKSKEMPDMLKKELIKMFSDLKYTVLWKFEEEFFDLPENVHMVKWAPQHSILAHPNCVLFITHGGLLSTIESIHFVVPIIAIPVFGDQFINVEWSVRKGFGKRVDLSYTLAEDLKAAIEEVFANPRYKEIAKETSLIYHDRPVSPGAELVHWVEHVVKTKGALHLRSPALFVPLYQKLYLDVLVVILVFLIVLYKTARCLFFKEKITNKKKNN

SEQ ID NO: 6901 - protein, 484 aa, Mustela putorius
MLNKNILLFSLKISLLGITLCGNVLIWPMEGSHWLNIKIIIDELIKKEHNVTVLVASGALFISPASKPSLMFEIYKVPFGKERIEGIIKDFVLTWMENRPSPSTIWRFYQEIARVLKDFHILSREICDGVLKNQNLMDKLKKSKFEVLISDPVFPCGDIVALKLGIPFMFSLRFSPASTVEKHCGKVPFPPSYVPAILSELSDQMSFTDRVRNFISYHLQDYMFDSLWKSWDSYYSEALGRPTTLCEIMGKAEIWLIRTYWDFEFPRPYLPNFEFVGGLHCKPAKPLPKVLWRYKGKKPATLGDNTRLYDWIPQNDLLGHPKTKAFITHGGTNGIYEAIYHGIPMVGVPMFADQPDNIAHMKAKGAAVEVDISTMTSEDLLNALRTVINEPSYKENATRLSRIHHDQPVKPLDRAVFWIEFVMRHKGAKHLRPAAHNLTWFQYHSLDVIGFLLACVAAAIFLVTKCCLFSYQKFGKTGKKKKRE

SEQ ID NO: 6902 - protein, 528 aa, Ooceraea biroi
MRAVVYVLYVILFLLSLSANAGRILSLSVVPFLSHQLIHRTLNLALHKRGHELVIVTTAPLKDPTLKNYTEIDVSYGFSIITEYNDAKWKISQMESCRQVFTITTEFMGTIWDNPEFKKIYRRDSGEKFDAIMIEPISDLSLYSMAHRFNAPLIGLTPMGFHNFQRYIFASPMLPSHPSNWEVNTLVEGYPSFWQRLQNFIDVWGYLYAWSHHVVMARKRVEKYFGSDTPDPMDIAKNMSIVLVNENPLFAYARPEQPNVIYFSGSQIQKTPPTLPKDLRRFLDDATKGFIYVSLGTTVSCHNLPTEIMGNFIEVFSKLPFKIVWKYECDEFPGKLDNIFISKWFPQQGILAHPNIRLFIYQGGLHSTEEAVHYAVPLLGLPIMFEQASRIQRLASLGAAIFLKLNELSKERLNTAIHQILNDKSYKERMAYLSKLSKDQPYDSFENAIWWIEYVMRHKGISHLRFSESDKPWYQRYDMDIIGFLAVIAFIMSLIFLYTLFRILRFCYGYYHLLYKNVQYLNTKLKMQ

SEQ ID NO: 6903 - protein, 2722 aa, Tribolium castaneum
MKPVLFVFGTNLLFSIAQCARILGVFPAPGYSQFILAEVLMKEIANRGHEVTVISPYKPHNAPPNYKTIETSDVIENSDGLDLYELDNESLFKNILTTYEFGNIITEFTLKNKEVQKLLHSDVSFDLVIVEQFFNDAMKGFARHFNAPLVLFSSMGLTEWNKEYMGIPALPSINAISYTSYTNRMNFFERIRNLIGTIFDYCYRKWVFYPIQREYLSRYFPNSIDFDEIINNASLMLLNSHFTTSENVLLPFNMIEIGGFHVSQNPLSKDIQKILDEATDGAILFSLGSNLQSSDLTPKILNTILSVFGKLKQKVLWKFEKDLSEKPSNVFISKWLKQADILAHPNIQLFITHGGMLSTTEAIFNGVPILGIPVFADQKMNTARAKRAGFANVMSLKDLTEGKFLSLINETINEPKYSENARKMSNLMRDRVVRPLDLAMYWVEYAIRNEGVRFETPVLKMYWFQVYMLDILCFVIFNLLVIYLSVKYLCSFMLPKKCKTNSKVNDRKKLLFILQTTVLFSATTCARILGVFPASGYSQFILAEALMKEIASRGHEVTIISPYRPKTAFFNYTTIQTSDVLHSDDGFDLFELDNKSLFKNILTTYEYGNLLTEFTLKDKGVQKLLHSNESFDLVIVEQFFTDALKGFATHFNALLVLFSSVGLTEWNKHYMGNPVLPSTNTIVYTGYTNQMNFFQRIRNLAGTIFDYCYRTWVFYPIQRKYAEKYFPKPVNFDGIINNASLMLLNSHFTTSENVLLPYNMIEIGGFLVTQNRLNNDTQKLLDEATDGAILFSLGTNLKSCDLAPNTLRTILKVFGRLKQKVLWKFEKDLPGKPKNVVISKWLEQADILAHPNVRLFITHGGILSVTEAIFNGVPMVGIPVFVDQKMNMARAKHARIANVISLKELTEERFFSMINETINNPTYSENVKKMSKLMKDRVVRPLDLAMYWIEYAIRHKGVRFETPVSKMYWFQVYMLDIFCFVIFNLLITYLLITGYSQFILGEKLMVELSQNGHNVTVISPYEPKTPIENYTTISTSGILQQYESVNWFQFESFTFVTSIMGSHKSGLKITEYTLANPKVQELLQSGVNFDLVIVEQFFCEALFGFAKHFNAPLVVFSSIGPSEWNNNQMGNPHLPSYMPMTKLTYNSQMNFYQRIKNTAAFLFDATYKRYVTYPIHDKLLKKYFPKSMDLEDVLYNASLMLLNSHYSITEPFPLVPGMVEIGGFHVSNSEALPKKLETFLDGAKDGAIYFSMGTNIKSSNLNPNLIQDIVDMFSQLKLKVLWKFDKTIPKLPPNVLVEKWFPQNAILGHVNTKLFISHCGLLSTTESVYFGVPMIAIPVFGDQKMNAAKAEHFGFALTIPYPLLSGETLRQGISEVLSDSKYVENVKLRSRLYHDRPVKPLDLAMFWIDFTIRNKNGTTLRFAGIELKWYQLYLLDITAFCVLIIIAMAIVGKYVIRKFNWKRLQTRMKLFLAIFQVIFVCNAKGAKILGVFPTPVRSHHILGHSLLSALAEKGHEVTLISPYEEKNGPGNKNYKHISLTGFDRKPIYINLKDSAFDIFLKLPLIKMIKFELAEDTLNHTNVQLLMDSDETFDVVIVEEFTEEALKALAVHFKAHLVVLSTVCSNPSVETSVGNPQPFSYVPYHLSSYSKSMTFHERVVNTLLHIYDQLLNHFYIYPKHEQVIKKYLPNAPPLKSIIYNSSIVLVNSHLSLNQPLPRVPNMIDIGGFHIKAPQKLPQDLEEFLDSAKDGAIYFSLGTFLQSSKLPAEKRNIFLKVFSKLKEKVLWKWEDDTLPGRPPNVKVAKWLPQQDILAHPNVKLFITHAGILSTTEAIYSGKPLLAIPVFGDQKTNAQNIHSNGFGLFLPYNNISEDDLTVKLNELLKNPKYARSARKRSEIFHDRLVKPMDTAIYWVEYVVRHGGAPHLRVAAVEFPCGSKILGIFPTFVRSHYYLANTLMNHLAEKGHRVTVISPFLDENPAKNNSYQNVVLTGLDDLKDTVNMFDYVNTNELLFIVLSIKKSLEMTELVLNNTNVQYLLQSNEKFDLVIMERFVNEAYVGFAEHFNCPYIVLSTFGTNPWINVLTGNPAPPSYIPNPSMPLSSKMNFWERQLNTLMYIYVHFLHNFYAFPGQKLLYEKYFNASTNFYDVLYRPSLVLLNSHPVTNQPVPYVPNMIDIGGFHIKPRGKISKDLQIFLDEAKEGCYMMKLSTSLLFLFLGLICGTKSARILGIYPLPGRSHYRLGSALFRELAERGHDVTVISPFGEKDPPKNGTYRDIVLDGIFEGDEKHKGKQWNMFKREGLNPFVGAYVVATMASKFMGVILNHTKVQELLHSDEKFDVVITDNFLSDAFKAFAMHFDAPLIVINPVGPNFWINPLVGNPSPPSYIPDILLNYYHPMTFCERMVNTLIYGFNFLLYNWMVFPRHNEYVKQFIPRGGDLNDILYNTSLVLLNSHPSLNQPVPLVPNMIEIGGFHMKPAKKLPDDLQDFLDKSEEGVVYFSMGSNLQSVLWPIEKREVFLKTFSKLKMKVLWKWEDDELPGKPPNVKISKWVPQMDVLAHPNLKLFITHGGFVSSVETAYHGKPMLAIPIYGDQRNNANFAYKNGFGRYITYGNLTEENLLATINEMLDNPKYSENAKIRSQIFHDRQVHPMDTAVYWVEYVIRHRGAPHLQVAALDLPWYKYLLVDVIFVVVMALSSLIFVTWFVLKKVCKKICAKKNTQKVKTN

SEQ ID NO: 6904 - protein, 313 aa, Daphnia pulex
MMGNWPSPWQLDAIGSTLGFDHYPNLILNFGDEMNLWQRTINTLSGLVALYYWRWNVMTVVDRIASETLSIDNLTTIEEIEQRYLSLFIFNTHFSLNYQLPPTSSVIQAAGLNCAPPQPLTQDLESFIDGSGDDGCIILSFGSILKGVDLPDDVRRLFLSTFSRLKQRVIWKWEDESKLGKDDFIPPNVKFMSWLPQQDLLGHPKVRLFITHGGLNSIQEAVYHKVPLIILPVFVDQPINARIAQNVFYDAIQQILSDPSYKERIDKLSAVMQDQMESPMDRVIYWIEYVIRHEGGSHLRTSSQRHLEKYANY

SEQ ID NO: 6905 - protein, 502 aa, Drosophila melanogaster
MKRSPISWSLLWMGYTCIFLLADSPAPVESHHILGLFVNVHRSQLMVHLAVCRALLQRGHHLTLVTTLPLEEQEIQGNVSHIYIPWQQPKEEVSSSDLILRLERMFRRLEHSGDLLDLPEWKMFLRNQPNTPYDLLLLGYHFNDHLLGVAAHFNCPVAIVSTQQPTGFVNSLMGNPEERWYVPQPYDGQQRSGISAWVFGMWEKFMEILARRVLARIYRLHFPEPQYPSFETMRRSVVLALSNHHMISEGPIAPLIPSMVDIGGIVLEQQLDKTPLEISAGNRSLIIFSLGTRFTWRKSTKELVRTFTKAFAQFPDYDIYWTYDGPNGSAISLDYPHLKVAKWWPQTQMWQSGKVRLFITHGGKGSVSEALFYGVPMLGLPLIGDQRDNLQRMQSKNWGLTLSTNNLTHWKLAKAITRMLSDSSYGETILKASQLYRDRPVSPSDLVTYWIEYIVRHKGAKNLHNPARQLNIIEYHSIDVYFIVYGLLILTIAILRKVNSLL

SEQ ID NO: 6906 - protein, 526 aa, Ceratitis capitata
MVRILFVILALACFAFMPSRVESAKILAVFPFRGPSQYILVQPYLKALAARGHELTVISAFPQKTPIKNFREITLKFEQVANHEELVSAAIEEMAGTKVQQLNLLKQYSLSSTEVALTNEEFQQLLRGNEHFDLIIIEALYLDALYALGSHFKAPMVGICASAADLAVDQLVDNISPVSYVPAPSGQQMDRLDIWQRLDNLYVYTLEWLYNRYVLIPAQQRLYERYFPNATLDLSEVRRDFSLLLLNQHYSYDLPRPLVPNAIEIAGMHVEHIPKKLPADMEAFINASPKGAIYFSLGSNVRSALLPKEKIKAIMDAFASLPVNVLWKFEKTDLPGKPNNVFINEWFPQQDILAHPKVKLFVTHGGMHSTVELLHHGKPIVGMAVFYDQHLNVQRAVSNGFGVAVNFQNFTSGELRDAILEVLNNPKYAERAKELSARFHDRPMKPLDAAVYWTEYVLRHKGAPQMRVAARHLNFLQRHSLDTMAILFGIPILLATLLTYILYKLLFALYSNVNNTNINLKKSKNE

SEQ ID NO: 6907 - protein, 446 aa, Ceratotherium simum
MSMKWISVLLLLQLGCYFSPGSGGKVLVWPTEYSHWINMKIILEELVQRGHEVIVLTSSASILVDPNKLSAIKFEIFPTSITKHDILGFALKLTNKWTYDMPKDTFWTYFSLMQEIFWEYSDIMEKFCTDMVLNKKLITNLQESRFDLILADPIGPCAEPTTLSELMKKAEMWLIRTYWDFEFPRPFLPHFEYIGGFHCKPAKPLPKEMEEFVQSSGENGIVVFSLGSIVSNMTEERANVIASALAQIPQKVIWRFDGKKPDTLGPNTRLYKWIPQNDLLGHLKTKAFITHGGANGVYEAIYHGIPMVGVPLFADQPDNIERMKTKGAAVRLDFNTMSRTDLLNALKTVINDPSYKENAMKLSRIQHDQPMKPLDRAVFWIEFVMLHKGAKHLRPASHDLNWFQYHSWDVLGFLLACVATAIFVITKCCLFCCQKFSKRGRKEKRE

SEQ ID NO: 6908 - protein, 524 aa, Capitella teleta
MKMLAAAALLIGSVFCVCRGANIIVIPTNIHSHHLYMSQLAADLTTYAHRVSILLPSNAKPPEMLRGTKVNVMTFQSPGKTSAMNSEEFSRHLIALAFSKSFVGTISTMREMATMGDKQMETDCEGRFQLIPQIKAQAFDFAIVDGQDLFCTPLLPYALEIPFALVSISIAPLQFRVPALPSFTPAFMSSLSDRMHFWQRTINTVQSLLMMAAYNLQLNGVHFAEKFAPERPPISPSGLARKASLLFLMNDLAIGYPFPLMPNVVPMADIMARPAKALPEDIQLFLDGASDGAILMSLGSVVNHVPDDVIDVFCRAFGQIEQKVLWKLPGNKDCRGMSPPNIMTSSWLPQNDILAHQNLKLFITHGGLNSVIESIYHAVPMVAIPVALDQPGNAARLSDKHLGVRMSIAEDFTTEKLVSNIREVMSNGSYKHAMHHACRVLRDRQESPGKRVSYWVDHVMQLGDAHLRTGAFDLNICQFLMFDVLAFLAVAVLVCAGCLVKVGCCVGKRCCCPPARQRKKSKVE

SEQ ID NO: 6909 - protein, 781 aa, Cyprinus carpio
MTGLWLLLSLFFLGSAQAGKLLLIPSDGSHWLGMKHVVEELGRRGNQVVVVIPEASLKTVRAGKVLVVPVDGSHWLSMKILVEELSRRGHEMVVLVPETSVLIGKSGNYTTKYFCVPYTLAELNANLDHIKNNAFEKPPQLTDIFVNLGNLMRFTDMQVKACEGLLYNESLMKSLRETGFDVVLTDPFLPCGTIISDSFSLPAIYFLHAIPCRLDEAAAQCPSPPSFVPRFFTGFSDKMTFPQRVRNTLMTVFQKYQCHQLFASFGELASRYLQKDTTYKELLGNGAVWLLRYDFTFEFPKPQMPNMVQIGGINCAKKGPLTKNVRRMVRALTVPALGLLALLCLFSSEPVRAGKVLVAPVDGSHWLSMKILVEELSRRGHEMVVLVPETSVLIGKSDNYTTKSFRVPYTLADLKANLDNIEKNAFEKPPNLSDIVENVGNLIQFLNMQVKACEWLLYDETLMKSLRETGFDVVLTDPFLPCGTIIADSFLIPAVYFLRLIPCLLDEGATQCPSPPSFVPRFFTGFSDKMTFPQRVRNMLMTIFEAFLCRKLFAGTDELASRYLQKDTTYKELLSHGAVWLFRYDFTFEFPKPQMPNMVQIGGINCAKKGPLTKELEEFVNGSGEHGFVVFTLGSMVSQLPEAKARVFFEAFRQIPQRVLWRYTGPIPENAPKNVKLMKWLPQNDLLGHPKVKAFITHGGSHGIYEGIFNGVPMVMLPLFGDQGDNVQRLVSRGVAETLSIYDLTSEKLLVALRKVINDKSYKEKDDRAFSIHRRDRPLSL

SEQ ID NO: 6910 - protein, 478 aa, Anopheles sinensis
MGQRVRITTIAAVILGVTYGVNFACCANILCLMGVPSPSHHIWNRALVNALAANGHNLTVVSPDIELKPTANVTYIHLEETYNAIHEGSTAIDFYEMAQAGVVESLKIFYNYALSMCVGILGSKGYRTIMDYPSDYKFDLVLYDFTCGPCLLAVYDKFGQPPMVGVTGFNNPPYTTDLVGGHKYYAYVPYYTLDYDTNMNFFQRFYNAAIHWIDYFYRNYVFLPETDRIVREHHKAMDLPYLATLDQKMMLMLVNSHHSVDFPEPIPQNVIQVGGLQILPPKPLPADIDRFIRAGKKGSVLFSLGTNNDILAHPHIKGFITHGGLLSTHEATWHGVPMIGIPLIADQYRNLAKSIRAGVAEKVDLWEVSTEKIRNTVLKVLEQPKYRKAMEARSNLFRDQPDTPLERAVWWVEWALRHPNAKSIQSPTLELGPWRSELYDVKLCLVLAVLFIACTVKKILCALFTKTSKTKQPKKKVQ

SEQ ID NO: 6911 - protein, 528 aa, Chrysochloris asiatica
MVSEKWVSLLLLLQLCWAGCGNCGKVLVWPCDMSHWLNMKIILEELTRKGHEVTVLVSPNNFIIDYNKPSTLNFEIVNTTSKEDAKKRLNDFLELAVNVMPTLSHWQSTIKLQEFFIQMVPYMKLLCENVIYNQTLMKKLKEDNYNVMFIDPVLPCGELIAELLAVPFVYTVRLSLGASMEKCAKLPSPLSYVPVPMLGLSERMTFLERVKNVMLSLILDICLQRYDAQYWDKFYSEALGKPTTLCETMGKAEIWLIRTYWDFEFPRPYLPNFEFVGGLHCKPAKPLPKEMEEFVQSSGEHGVVVFSLGSMVKNLTEEKANLIASALAQVPQKVLWRYKGVTPATLGANTRLYDWIPQNDLLGHPKTKAFITHGGTNGIYEAIYHGIPMVGVPMFADQPDNIAHMKAKGAAVDVNMNTMTSADLFNALNTVINDPSYKENAMRLSAIHHDQPVKPLDRAVFWIEFVMRHKGAKHLRPAAHDLTWFQYHSLDVIGFLLLCVATALLLVIKCCLFSYQKFGKTGKKKKRE

SEQ ID NO: 6912 - protein, 542 aa, Stomoxys calcitrans
MNLIWMILISLQLSSAEHILMVTMGGTKSHKIPFWELAKGLIKKGHHVTFLNGFKADFHMEGLKEITPMHLVEFIQNYTDWDLVGARYAQKAPLSIWKALRYPAESCNSLLEADAQSGVTVTDDLLTQRFHLAIVDGAFPECALGIVHRLGLPFMFINTVGFYTGSLAMAGNPITYAVTPHVFTAFTETMNLLQRVENSLIHRLADILHMYYTNQVHDVLMKHFGASIPHPYALMQNVSIILQNGHASITNARPFYPNVIEIACIHCRPAGSLPLDLEEFMESAPAGVIFFSMGSSVRAANVPEEFRRLLVEVFSRLPQYHVLWKWDAGGSVNTAEHMAPRLTKTTHQNMSAVTKNVRLSGWLPQQDILGHRKVKAFVTHGGLLSMFEAIYHAVPMVMLPVFCDHDVNAAKAESDGYAIRLPLETITADKLYQAIIAILNNGQYKRKVQEKSQLLLDQITTPLDTAIFWSEFLMRHNDVSHLQSPVRHMSCFIYYSLDLIGISMLVIGGILIILSKILMYVWQHGNRRHLRHRRQNKYLKQY

SEQ ID NO: 6913 - protein, 518 aa, Drosophila mojavensis
MRLLRLLLLLLASLSQAWAYSYLVIANTAAKSHFYVGQALAKGLVGAGHEVTMVSPFPQKKPLKNFVDVATPNVITAMEVHKARIFDVVKIPIVFRVPLMHAMGLKLTRTLLAEPAVQTLLAENRTFDAVLCEIFMNDAHYGFAEHFQAPLIAFSSFGASSWSNPLVGTPSPPSYVPHFLLQFSDHMSFFERAQNLIFTAFEYIYHTFFYLPQQEQIYKEYFPRNKQSFDEMRRNTALVLLNNHISLGFPRPYAPNMIEVGGMHINRKRQPLPQDIEDFIKGAKHGVIYFSMGSNLKSKDLPQEKRQAIIETFGKLKQRVLWKFEEPNLVGKPANVFISDWFPQDDILAHENVILFITHGGLLSTTESIYHGKPIVGIPIFGDQFVNMARAEQLGYGVTVAFDKLTAETFHNAINQILSDPRYAQQMREMSARFKDQHETPLERAVYWVEHVTRQKGAKYLRSASQDLNFIQYHNLDVFAMIVGGLISITFAVIYILAIVVRFIRRILQGKAGKVKKN

SEQ ID NO: 6914 - protein, 511 aa, Cimex lectularius
MRAFMRLGFVFIFVFGWSTGAEILAILPFRGKSHFLVFEPLLDQLSRRGHHVTVASYFPKAEPFPNYTDVSFVDEKDHRPVKGFYDFKSFESLKPSVMNNMRLIYGLEAEYDRLFTLPEFMDLQRRKFDLVITEYFSSDVHFGLVYKIGAPYILLSTCQHFPWQSYAAGDSIDPSYISHPFSAHPVKKNFLERLQNTVEVFGTVAVYDQLFRRNEQILAEKYLGPLPKLRDIANNASVYMIHSHFSIHGLKPTMPNSVQIGGITVKPPKPLPQKLQKVLDESKGVIYFSMGSVLKGDSMSMNKQKAFIKVFSELKQTVLWKRETPLEEKVNNIVTNGWFPQRDILAHPKVQLFISHGGLLSTNEAVTSGVPMVVVPMFGDQHHNAKALESIGFAVSVDFNSLTEDDLRQAVNKVLNDPSYKENARKTKEAFLDRPMSPLDTAVYWVEYVIRHKGAPHLRSAARDMTWYQYHNLDVYASLALMAYFAYLIVKNILKFLLGLCCGRVNKHKTE

SEQ ID NO: 6915 - protein, 518 aa, Amyelois transitella
MAGVSFLVLVTLILGHVSAYKILVVFPVPATSHNILARGVVRSLLHAGHEVTHVTPFPDTNVHPNLHQVDISASAENSHIKDQMNVTRILNGEVKTDFNMLKKFVDLMNKKILSDANLVELLNDTRQTFDVVIAEWMLTDTNAGLGYVFNCPFIWFSTIEPHSVILSLIDEHTNSAYIPDYRSSNIPPYDFVNRVKELISQAMMIAFRYFYLDSYQNERYKELLSPYSIKRGRPEISFSEIKYNASLILGNSHVSLGLAIRLPQAYKTIGGYHIETEVKPLPDELKNILDNAKNGLIYFSMGSNLKSKDFPELLKKGLLEIFGGLKQTVLWKFEEVLPNLPPNVHIVNWAPQQSILAHPNCILFITHGGLLSTTEAVHFGKPIIGIPVFADQFNNIDKAVKKGFAIRVDLAYDMKDKLKVAIDEFLREERYTEKAKELSLIYHDRPVHPSKELVHWVEHVVRTRGAPHLRSPALDVPVYQKLYLDLFVVILVVLYSLKTIVVKIFCSKKIVSKKLKRN

SEQ ID NO: 6916 - protein, 535 aa, Caenorhabditis brenneri
MLKLLPIFSLIGWVFAGDVLFIPSTLYPVHGQTMAVLAKELVDRGHQVTWLEIGPKQSDLVLPVEVTREFWPAQFGDKTLQDIYQFRNHSSHSELWSPAYYNENEQTTGWLASIRLCDSLLSRSKSKFDKLAEKKFSTVIVDDLYNPCGTLMAALKRSVYIYWSMTGLRTESAWANQSPSPPSYLPVAGTGLTDDLTFTDRMYNVASYFKQLYIHQHIVQPRIDAVYQKYYPGVATHFEIERNASINFVNTPPIFDFSRPYMPRVNFIGAIQCRKAKELSKEFTSRISEYPEGFVVLSTGFTAQWSKSPESIRHAYLQTFKAFPKILFIWQFDSTFDKSTVLPANLHIKPWLPLQDLLGHPKCLCHVSHGGLNSVIESVYHGVPVVGVPLTARGLDNLLRITARDSGVMIEKEEFGAKKLIEAIKEVIGNEKYKKEMLIFQDMVTDVPYTELYHAAFWVEFIERHQEVPHARSGADHLNFLQYFLVDVIAFFFFVIFCTISLIYYIIRTVIRTIRSVVNGIRGVPRIVTKGKKNN

SEQ ID NO: 6917 - protein, 535 aa, Solenopsis invicta
MRQITVISPIITILWILITSKLACSKRLLIITPTPSYSHQLVFRTICLALNKRGHEIVTLTPNIINDTSITNYTEIDFGFEYEKIDDTDTSQIHWNLTQLAGLKTRLLTLGHNIAEDVLSHPDLVKYYANGTDVQFDAVIAEMIMTPAIYMLAHRFNAPLIGIMSMDFQNCHRFTLGSPVMPSHLSNWELESFTGLNLSFWRRLVNFVNTWWSIYSWFNNFANKQQQIAEKYFGTDIPHIIDVAKNMSLALINQEPLLAYARPEVPNVVHFSGLHIAKTPPSLPKNLKDFLDSATNGFVYMSLGSNTKSKLLPKEILEIFVNTFANLPYKVLWKFENDSFHVPPNVFISKWTPQQSVLAHPNIKLFIYQGGLQSTEEAVHYAVPLVGVPFVFDQVYQVMKMVSLGVARYLNIVRLTTTELHDAILEVADDKGYKDRILALRALTKDKPYDSLQNVIWWIEFVMRHNGAPHLRFNGVDTTWYQQFDLDVIVFLTIILFLASCAILGAIGWISKKLYTYYDQENRCIIRKWNKMKSA

SEQ ID NO: 6918 - protein, 528 aa, Drosophila ananassae
MQLTSGRTGFLALLVLGLLSCVSAYNYLVVLHTAARSHYHVGSALAKGLAGAGHQVTLVSPFELKKPIKNIKDVTVKAILKAMQGSMSNLLESSKEPIIKQILGFHNMGLNITEVLLSDPAVVELMKSNQTYDAVISEVFLNEAHFGLAEHFNAPLIGLGTFGAISWNTDLVGTPSPPSYIPHALLKFSDHMSLAERVGNLAFVTYEYLFLNYFYLPHQEALYLKFFPNNKQNFYEMRKNTALVLLNQHVSLSFPRPYSPNMIEVGGMHINRKRQPLPEDIEKFIEEAEHGVIYFSMGSNLKSKTLPLEKRQALIDTFAQLKQRVLWKFEDPNLPGKPDNVFISDWFPQDDILAHDKVLAFITHGGLLSTTESIYHRKPFVGIPIFGDQFLNMARAEQNGYGVTVNYEDLTSSNLLSAIKRLLSDPEATKKVRDMSDRYRDQLQTPLERAVFWVEHVSRHKGAKYLRSASQDLNFIQYHNLDAILILYGGILFVLYCLFKLIGFMFRLLQELFIKKETPKSKKKAKQN

SEQ ID NO: 6919 - protein, 520 aa, Danio rerio
MACSWLLVGLFLFGSAEAGKLLVIPSDGSHWLGMKPVVEELGRRGNQVVVVIPEASLSMGPSEKTTTLTYPVNYTKAELHMVLEGNLTEILSTDFSTELSKFFVFFLQLKVLQNFIVRNAEGLLFNEDLMKKLQDCKFDAILTDPFEPVGVIASEYLSIPAIYMQVNLPCGVDSLASQCPSPPSYVPQRNTHFTDQMNIWQRCTNLVRTLLQHMACRYMYTEADEIASRFLQRRASIVEIMNRATLWLMRFDFAFEFPRPLMPNMVMIGGMATKMPKPLSKELEEFVNGSGEHGFVVFTLGSMVSQLPEAKAREFFEAFRQIPQRVLWRYTGPVPENAPKNVKLMKWLPQNDLLGHPKVRAFVTHGGSHGIYEGICNGVPMVMLPLFGDQGDNAQRLVSRGVAESLTIYDVTSEKLLVALKKVINDKSYKEKMMKLSAIHRDRPIEPLDLAVFWTEFVMRHKGAEHLRPAAHDLNWIQYHSLDVIGFLLLILLTVIFVTVKSCMFCFRKCFKKSHKKKKA

SEQ ID NO: 6920 - protein, 462 aa, Agrotis segetum
MSLVVLSLLVSGGSCANILGVFPTPSYSHQSVFAAYVDKLAAAGHNVTVITPMKRATGHVREIDCSLSVERFQELVSRSKHIKKRGAVADEFTVTKENYMGLINVVATQLETNAVTALIKNPFNKFDLVVCEAYLAYTLIFGHIYDAPVIQLSSGHGIPENFEIQGAIARDYVNHPNIWRSTFTGSPLEQMFMENYLKNEWGLIEIEQEKMLRKRFGYHIKMENLKKSVLMLFINVPAVYDNFRPVTPTVQYLGGLHLRKEQPIRDLVLNRFLESHSTIVYASFGSGIDVLDMDRSLLKELIRVFSKLPYGILWKVDDSVHSIYNVSANVYTKSWFPQRDLLKHENVKAFITQAGVQSADEAIDGGVPMITLPMMGDQFYNAHRFEQLGIGIHLDVLKLEKERLDKKIVQVVENRNYKKNIERLRHFINDVPLKSLRKSLWYTNYVIRKQKTLNVIKNVKCN

SEQ ID NO: 6921 - protein, 508 aa, Mus musculus
MLWKWISALLLLQISCCFRSAKCGKVLVWPVDYSHWMNIKIILDELIQKGHEVTVLRPSTSIFLDPKKSPGLKFETFPTSFSNDVMEIIFAKAVERWTYEVPRDTCLSYSPLLQNIFDEYSDYCLTLCKDTVSNKQLMAKLQESKFDVVLSDAIGPCGELIAELLQIPFLYSLRFSPGYYLEKYSGGLPLPPSYVPVILSGLSGQMTFKERVKNMICMLYFDFWFQTFREKKWDQFYSETLGRPTTLIETMGKAEMWLIRSYWDLEFPHPTLPNVYYVGGVHCKPAKPLPKEMEDFVQSSGEHGVVVFSLGSMVLWRFDGKTPATLGPNTRIYKWLPQNDLLGHPKTKAFITHGGANGLYEAIHHGIPMIGIPLFGEQHDNIAHMVAKGAAVTLNIRTMSRSDLLNALEEVIDNPFYKENAMWLSTIHHDQPMKPLDRAVFWIEFVMRHKGAKHLRPLAYNLTWYQYHSLDVIGFLLAFVTFIVALIVKCFLFVYRFFVKKEKKMKNE

SEQ ID NO: 6922 - protein, 563 aa, Anoplophora glabripennis
MSLIYNYLTLEKRDNLLIMKYSVFELIFQEVTMNLRDISSMTNMLSCVVFAVILVSAKSAKILGIFMTPSHSHQQVFQPIWRELSLRGHEVTVFTPNPLKDPSLTNLTEIDLSFSYDVFLNHSHKNFKWESKSEEIKALFEGFSAVFHDQISSPEMQKLLANKNKVKYDLFLVENLYPCMYAFKDVFDCPMIGITSLPLTISAVQMLGLVKHPVLDPDLFLPFSVDLSFKERVTSTIFYSIFKLNGYFNLAPKLNAETRKYFGPKTRDVYTIASEMSLILGNFNYVTQNIRPHVPAFVEISGIHLQPEKPLPKDLKQILDESKEGVVYFNLGSNVKSSLLPRDKLDAILSAFSELEYKVLFKFETDDLTNVSSVPSNVEIRKWFPQQDVLRHPNVKLFVTQGGLQSIDEALNAKVPLLIIAVFGDQLFNAHKMVSSGAGLSIDFDNLSKGELVEKINKVIQNPEYKKTVSKLGAIAFDHQVPPLEKAVWWIEYVLRHNGAHHLRYKGAGMPFYQYYLLDVFCFLGLVCALTTYSVFKIAKMLILGIRFISRNRKPNESLKKSQ

SEQ ID NO: 6923 - protein, 543 aa, Helicoverpa armigera
MNLSRWPLLCLPLLVASACCSDILMVTMGGTKSHKMPFWELARGLIRRDHNITFISAFPADFHITGLEEIAPEGLVTYVRNYMSFDLVGARMRGEDQMPVKDILRYGYEACDAFLSDPETRSFLRSGRTFDLVILDGTYPECALGIVYKLKVPFMYINTVGFYTMPLSNSGSPVPYSVTPFFGKGFTDNMGILDRALNTAFHLAILPFHAFSMQILQGVLRRNFGQHMPHVYDMAKNVSFILQNGHYSVSYPRPYLPNVAEVACIHCKEAKILDPEIEEWISGAGETGFVYVSMGSSVRTTKMPLTAHRLLVEALGRLPQRVLWKQDAEQNMTDMPSNIRLFKWLPQQDLLGHPKIKAFVTHGGLLSMFETVYHGVPIVTIPIFCDHDSNAAKAEIDGYAKKLDLQHLTPEKLYKAILEVITEPRYKIEVKKRQVLLRDQKETPLERAIYWTEYVIRHKGAYHLQSPAKDMSFFTYYSLDVFLLLISVLITVYALVSYALRLGFNRLVNYVQNRQMHKLLGKSNNLLSSSKLLTQSAMAKKKL

SEQ ID NO: 6924 - protein, 530 aa, Branchiostoma floridae
MAIGPVRKLRCSFLLVLLGLLIRHRSSAERVLLVHPNFNSHWMALAKIGRALVNKGHTVAVAVPQDTVEKHRAEWPDFQFEVFQDQGTQARMRAIQDQAWSTAGELSIFDFKNVFDASSGESKKHCALLLGDSKLQHRLKTSQYSVVISDPIFPCGAILSALLDTRVPHIAVMRADVHFLDEKATGVPIPLSYVPSLTTDFTDDMTFGQRLQNVIVSTLLPLLLRPIVSSTYDGLVRTFVGEDETMQSVTSRTDLWLYRTDNVLDFPRPSMPNMVQVGGLNVRVAAPLTEDMEAFFQSSGDDGVIVVSFGSMVKTMSTERQEVFAAAFARLRQKVVWRYVGEKPAGLGNNTRLLAWLPQNDLLAHTKTRAFITHAGSNGLYEALHHGVPMVCLPLFAEQPANAARVVARGLGVKLDFSKVTSDQLYQAILHVVTNTSYRETAARLSRLHRDQPQSPMERAVWWIEHVIKHGGLPHLRARAVELPWYQYYLLDVAGFLLVVCAAVLGTVWYSCSFVCRKICGKSGAKLKSQ

SEQ ID NO: 6925 - protein, 516 aa, Athalia rosae
MKSLFKVNTVIALLCIFSDVAKAARILAVFPTPSISHQVVYRELTVELSKRGHEFVIFTTDPINDPSLKNYKEIDMHHTYSLMPDFVKTSETTFITDWWGTAESILEQFFSHPEMQRIIAPNNTEHFDLIMLEYMSWEATCALHDRLKAPIIGIISLQLFQWGHYGIGNPTALAYSPTVLDSFDYDVTSFWHRLRLLYEHSVQAFGHRFDNMPRQERLVKKYFGENVRDLQELNAELSLVISNTNPILGYPRPNLPIIIEVGGIHLKIKMKGFEKNVKKFLDSAVEGFVYFSLGSNVKSKHLPEDKLKTLMSVFASLPYKVLWKFELDTLPGKPDNVFISKWLPQHDVLAHPNIKVFVYQGGLQSTEEAITLGVPLVGVPVFGDQIFNVVKLVSVRIAKMVHFNSLPGEELRKAIVEVASDPSWKERVIKFRELLTDQPDTPLDRAVWWTEYVIRHKGAYHLRPKARFLSWYQREFLDVIAFVIAIVLLVVYLTVKIVKRLLAYICRKVCAKVKTN

SEQ ID NO: 6926 - protein, 976 aa, Papilio machaon
MEPRLTVLYYLLCLTLSFVDSARILGVFPTPSISHQVVFRTLTHELARRGHELIVITPDPVHPKGPRNLTEIDVHDLSYTIWNKGISEMEDGSRDVTKQVEAMMYLNYEIFEEQVKSKSVQKLLSYEHDHFDLIFVEAFLGYTLGFSHVFKAPVILVSSFAGVWDNYDAIGAPTHPFLYPNSVRDRLNNITMWEKFIQLRKEYKMRNMNSNYETVNKLLKKLFGADTPPVQKLFDNVAMLFLNVHPIWDNNRPVPPGVVYMGGLHQNLIKELPKDLKFYLDSSKNGVIYFSLGTNVKPSYVPPEKLQAIINVFSRLPYDVLWKWDNDELPIRSNNIKISKWLPQSDLLRHPKVKLFITQGGLQSTDEAITAGVPLIGIPLLGDQWYRHPKVKLFITQGGLQSTDEAITSAVPLIGIPLLADQWYNVEKYVQHKIGVRIDIDSLTEEMFENSIHTVINDTSYRDNIVRLRSIMQDQPQSPLERAVWWTEHVLRHGGAHGYETSLVAYDGTKINILYYLICLTLSFVDSARILGVFPTPSISHQVVFRTLTHELARRGHELIVITTDPVHPKDQVPENLTEIDVHDISYSRWNKAILEIEDGSRDVSKQVEAMSDINMEIFEEQVKSKSVQKLLSYKDDYFDLILVESLLAFSLGFSHVFKAPVILVSSFGGVWDNYDAMGAPTHPLLYPSMKLFDNVAMLFLNQHPIWDSNRPVPPGVIYMGGLHQNPLKELPKDIKLHLDSSTNGVIYFSLGTNVKPSYVPPEKLQAIINVFSRLPYDVLLKWDNNELPIRSNNIKIFKWLPQSDLLRHPKVKLFITQGGLQSTDEAITAGVPLIGIPLLADQWYNVEKYVQHKIGVRIDIDSLTEEMFENSIHTVINDTSYRENIVRLRSIMQDQPQSPLERAVWWTEHVLRHGGARHLRSPAANISWTQYLELELLFTLAIILILALFVLVLVTRSIWNVINSNVTTKIKIKKP

SEQ ID NO: 6927 - protein, 522 aa, Caenorhabditis briggsae
MKIALFSILLILVGSASSFNFLVFCPLYAHSHHKFLAKIADTISDAGHNVTFLAPIILRKYENVKYLESTRDIVYIQPSKKLESLGVTSDYSKFWSKDATAIQFVPAIKAFTRMFQQLYEDLKNDLSVLDELKNRKFDAMVFEFLCATSYPIAEYLEIKALFPSLSMTHHPFMSRLIGEPSSPTVMPSMISSFGDDMTFSERLQNTIGDVFFNLFVHPPPMASFKNPERLIDIADMTARSPFLFMNGNPYLDYPRALLTKTVMIGGISVNATQMKQEKISEEYNQILDKNKKNVLISFGSMIFSKDMPTIYKQTIVRVIASLPDVTFIWKYEEDDVSFSKNLPNLHFSKWVPQTALLADPRLSAFITHAGLGSVTEFSYMGKPAVLIPVFADQLRNSKTLERHNGSITLSKYDLSNFDKLRSAIKTILTEERYKINAERLAQQLQDQPVSPHDLLVKHAEFGAKYGELPNLDPISRKMSYISFYMIDIIVFVGSIVFLVLALFFVIARWVLRQCLRPKLKVE

SEQ ID NO: 6928 - protein, 535 aa, Bactrocera dorsalis
MQWPIAYVGVFVFVAIAYLIPTQDAARILGFFPSPGDSHLIIHCAVADTLAQAGHNVTVIATKPNVNPKAKYNYIYIDTPLLPPSFLKNFVNQPMPFYKRYPMLLKEVSKMHNRTLWHPEIQQFLHDHGAGSFDLLLVGYFANDFHVGLGAHFKCPVILTFMVQPIFYLNELIGNPSEHAYVPTVFSGLKQPMNFWARLENYVIYLFEYYYMGPLMKSTAQKYYSYNFPASSGYPSFEEARRNVALIFANHWFAQGPVRPHVPSLIEVGGIQVKEKPDPLPTDIAELLDGSPEGVIYFSFGSLIRGNTLKPDTVHIIFNVLSKLPYKVLWKWGADYPGNSSNILFKSWLPQTDVLAHPNIKLFITHGGKGSVVEAEYNGVPMVGIPLFSDQPANMEEVRQAGFGTYVPYADLTEESLREAIEEVINNPKYRKAVREFSEVYRDRPMTPRQSVVWWVDYVLRHKGAKHMQSPAVYLTHWQLMSLDVLGVLLAIAAAVVGLLIILWRFCITKLVARLIKTNGVNGTKRNAKKSAKVE

SEQ ID NO: 6929 - protein, 526 aa, Asbolus verrucosus
MFPLSVIVVALLPLVQTSNILFVAVSPSVSHQIVFQAVWKELSLKGHNVHVITPNPLRDPTLHNLVEIDISSLYDKMREVPRDVAKYLLKKPDFFNVFLKDRVLTEYFSKFMEYAFQHEHVQKFLSEQHEFDVVIVEWLYPTMAAFGAKYNCPIIGITSLGAPIPALDTVGNPSHPVYVPDHNLPVKRDLNFKERLMSTLYSIFVRVYYHFVVLPREDALAKKYLGEGLPYMGDIEKNVSLLLLNRNLVFHRIGPSVPAIIDLGGIQLNKTKKDLEPELKKFLDNSVNGAIYFSLGSNMKSIYLPEATRNIFRDTFAQLPYNVVWKWEGGDLPGAPNNVFTQSWIPQVELLGHPNLKLFITQGGLQSTEDAIKNHVPIIGIPFHSDQTTNVDTSVKYGIGIGIDLDEINIENLNASVHQIINDARYKENVVRLDKIMHDQPKDGLERAVWWTEYVIRHKGAKHLRSHSMDVPWIQYLMIDIAAFLAGTLFFIIFIVYQSLKLISFIIFWILRKLLRCKTDRDKKNK

SEQ ID NO: 6930 - protein, 483 aa, Cavia porcellus
MLRNILLLSLQISLLGTTLAGNILIWPMEGSHWLNVKIIIDELIKREHNVTVLVASGALFITPSSQSSLTFEIYKVSFGKERMEGLIKDFVLTWLENRPSPSTIWRFYQEMAKVIKDFHTVSREICDGVLRNEKLMDKLKKSKFEVLVSDPVFPCGDIVALKLGIPFIYSLRFSPASNVEKHCGKVPYPPSYVPAILSELTDQMTFADRVRNFISYHLQDYMFETLWKPWDAYYTKELGRPTTLCEIMGKAEIWLIRTYWDFEFPRPYLPNFEFVGGLHCKPAKPLPKVLWRYKGKEPATLGPNTRLFDWIPQNDLLGHPKTKAFITHGGTNGIYEAIYHGVPMVGVPMFADQPDNIAHMKAKGAAVEVNMNTMTSADLLGALRTVINDPSYKENAMRLSRIHHDQPVKPLDRAVFWIEFVMRHKGAKHLRVAAHDLSWFQYHSLDVIGFLLVCVASAILLVTKGCLFFYQKFINTGKKIKRE

SEQ ID NO: 6931 - protein, 693 aa, Bos mutus
MLNKIILLLSLQISLLGTTFGGNVLIWPMEGSHWLNIKIIIDELIKKGHNVTVLVASGALYITPTTNPSLIFEIYEVPFGKERIEGVIKDFILTWMEHRPSPLTIWRFYQEMAKVIKDFHMVSREICDSVLQNEKLMEKLKKSKFEVLVSDPVFPCGDIIALKLGIPFIYSLRFSPASTVEKHCGKVPYPPSYVPAILSELTDQMSFTDRIRNFISYHLQDYMFNTLWKSWDSYYSKALGIHWLNIKIILEELNQRNHNVTVLASSATLFINSNSDSPVNFEVIPVSYKKSNIDSLIEHMIMLWIDHRPTPLTLWTFYKELGKLLDTFFRINIQICDGVLNNPKLMARLWKSRFDVLLADPVTICGDLVALKLGIPFMYTLRFSPASTVERHCGKIPAPASYVPAALSELTDQMSFGERLKNTISYPLQDYIFQSYWGEWNSYYSKVLGRPTTLCETMGKAEIWLIRTYWDFEFPRPYLPNFEFVGGLHCKPAKPLPKVLWRYKGKKPATLGANTRLYDWIPQNDLLGHPKAKAFITHGGTNGIYEAIYHGVPMVGVPMFADQPDNIAHMKAKGAAVEVNINTMTSADLLNALRTVINEPSYKENAMRLKRIHHDQPVKPLDRAVFWIEFVMRHKGAKHLRPAAHNLTWYQYHSLDVIGFLLACVATAVFLVIRCCLFSCRKFGKTGKKKKRE

SEQ ID NO: 6932 - protein, 362 aa, Hyalangium minutum
MGAPRFLFYAVNGLGLGHVTRLLSIARALKRLSPEAEVLFLTSSEADHVIYREGFAAVKLPSKTIRERCGLRKGSYLKLVQTVTWNTLAAFDPDVLVVDTYPTGSFEELIPALRWRQKNVFVFREQREESAGSELLQASLRLYDRILIPHEDISVVGPLPELAKARAVGPILIRERSELPSRAQARQALGLPQDATLLYASFGGGGDPEGARALTLTAQVARELPGVRLVVGAGPLWREQPPALEGAVVLQGRYPAIDFLPAFDAAVTAAGYNAVHELLYAGVPSVFVPFERMVDDQEKRAREVAAADAGLVCAPLTREGLTRAVRELMNPATRERLSAAARKRVECNGAEPAARALLELLA

SEQ ID NO: 6933 - protein, 518 aa, Drosophila grimshawi
MNLLHLCLILMACLCHVWGYSYLMISHTAANSHFYVGQALAKGLVAAGHEVTVISPFPQKNPLKNYVDVPTPSSISVMAVHKNKILDIVKIPILFRLPAMHGVGISMTQSLLEEHSVQSLLSQNRTFDAVICEVFMNEAHFGFAEHFNAPLITFSTMGASSWTTDLVGTPSPPSYVPHFLLQFGDHMNFFERAHNLLFILYQGAYEQCVYFPKQEQLYKKYFPNNKQNFYDMRKNTALVLLNNHVSLGFPRPYAPNMIEVGGMHINRKRQQLPQNIEDFINGAQHGVIYFSLGSNLKSSALPLEMREALVETLRNLKQRVLWKFEEPNLPGKPDNVFISDWFPQDDILAHEKVILFITHGGLLSTTESIYHGKPVLGIPFFGDQFMNMARAQQSGYGLTLRFTELTAETFKNSINKLLSDPSYTQKVHDMSVRFRDQHETPLERAVYWVEHVTRQKGARYLRSASQDLNFIQYYNLDVLIMIIGGLGFVIFTFIYLLMALIKVIAKKIGGKRKKAKRN

SEQ ID NO: 6934 - protein, 529 aa, Oreochromis niloticus
MELRLSACILLVLCATWSANGGNILVWYTEGSHWINMKPVLETLVDRGHQVTVLVPSSSLYMNANEPSRFRYEPFNVSFSKDAMQDFLEEFLRFSMYEIDYMSYWEIYIRFSEIIKTQMQFSIQYLDGVVKSEVVMKKLKEGNYDLLLADPIYRGSDLVADILGIPLVFSLRFSVAYNWERHCGQMPAPPSFVPGAMSKLTDKMDFSERVWNFLYYALQDIAMSHIFGKVDRYYSDVKGTPTSACELMSKADIWLIRTYWDFEFPRPFLPNFKYVGGIHCRPAKLLPEDLEEFVQSSGDDGIVIFTLGSMIKNVTKEKANMIASGLAQIPQKVLWRYRGEKPATLGANTRIYDWIPQNDLLGHPKTRAFITHGGTNGIYEAIYHGVPMVGIPMFGDQPDNMVHMKAKGAAVILNLNFITTEDLRDAINTVINDKSYKENAMRLSSIHHDRPMSALEEAVFWIEFTLRNKGAKHLRVQAHELTWYQYHSLDVLGFFLTIVLLLIFIFIKTCSFCLHRCCVRKGKTKRKAE

SEQ ID NO: 6935 - protein, 754 aa, Ooceraea biroi
MATEIKVQVDKLESEAEWARWKWQMSMLFEQYDLVSIVDGTRPCPPQPPTIATADVVKEFKAWKSNNGRAANYIMSALNKQNAELVLSCTTAHECWQKLCSRFERSSTQRRDMLFQQFFKAEHNKIEDVASYIARIQKIFIDLNSELQKQHRNTLDESVLIGRITSSLGTEYNEFQNVWEVIPEEHQTINLLTEKLCAIELRNRSTIVSQSEAVAFEAKSTAGKKNNDLQVRNKRIQALKQKTKCAICHVKGHWAKECQQNKTSQHTSDGTLHKRGHELVIVTTAPLKDPTLKNYTEIDVSYGFSIITEYNDAKWKISQMESCRQVFTITTEFMGTIWDNPEFKKIYRRDSGEKFDAIMIEPISDLSLYSMAHRFNAPLIGLTPMGFHNFQRYIFASPMLPSHPSNWEVNTLVEGYPSFWQRLQNFIDVWGYLYAWSHHVVMARKRVEKYFGSDTPDPMDIAKNMSIVLVNENPLFAYARPEQPNVIYFSGSQIQKTPPTLPKDLRRFLDDATKGFIYVSLGTTVSCHNLPTEIMGNFIEVFSKLPFKIVWKYECDEFPGKLDNIFISKWFPQQGILAHPNIRLFIYQGGLHSTEEAVHYAVPLLGLPIMFEQASRIQRLASLGAAIFLKLNELSKERLNTAIHQILNDKSYKERMAYLSKLSKDQPYDSFENAIWWIEYVMRHKGISHLRFSESDKPWYQRYDMDIIGFLAVIAFIMSLIFLYTLFRILRFCYGYYHLLYKNVQYPNTKLKMQ

SEQ ID NO: 6936 - protein, 995 aa, Ctenocephalides felis
MKIILLLGCLLLAMLQVNGAKILMVFNSVSKSHYILGQALGIGLADKGHQVTMISPFEMKSKHPNYYEIVLHEVMATSKQTIFGNMYQNRNISFIQLIKQIQIDGLFAANLTLHDPQVQKLVHSGEKFDAVITEIFLNECLYGLANHFEAIPIHLCTVGSSIWTDFLMGNPNNPAYNMNQLLPFTLPMKFHERLINTVFSMAFMPSLWLRLSDQHAAYESYFKPLYKGPKDEFPHLQDLLFNFSLLLVNDHHVISEPKAMMPNIVNVGGLHIKESPLPNHLQEVLDAAVDGAIYFSLGSNVKSSELSQTTKNAILKTFSKLKLKILWKFEDSNLQNKPDNVVIEKWMPQQAILAHPNIKAFITHGGLLSTLESIYFGVPVLGIPVIGDQMMNVARTENLGFGIGLKLDDITENTLTEALNKILYEPRYQLRAKALSRIFRDDPQSSLEKAVSSVEYVIRHKGARFLRSPALELPWYKVLLIDVMIALLLIVTIALYVAYFITKKALCVFRKYCVGSHSVYFKVTMISPFKLNKPHENYSEIFLDDASESLLAKILNTNILTASKQPIWERLPKMTQIGVDGANRTFYHPKVQQLLKSGKKFDIFIMEAFLNECLLGIAHHVEAIPIATSPAGSSTLTNKMVGNPFNPAYDLNFILPFTNPLSYKERFLNTAFKILDELYYRIHIHEHDKLYEKIYHELLGKRPENRPHISSLVTNVSLVLINSNVVVHNSRASVPNMINVGGLHIKTDAKLPEDLQAILDNTKEGVVYFSMGSNLKSSKVFLDKQDAILKTFAKLNQTVLWKWESKDLSNKPDNVIIQSWMPQQSILAHPNVKLFITHGGLLSSIEALYFGVPLVGIPVFGDQHMNMARAVESGYGIKLDLNNISEDTLTETLQEALNNPRYLQRARYLSNIFRNDTQTPIEKAVSSIEYVLRHKGAPFLRSPAVDMPVYQQALLDVVAGLLAITILFFIIIGWFLKKIVGLFTRPKININKKHN
